United States Patent Application Publication US 2024/0066114 A1 - sequence listing, part 5

SEQ ID NO: 6710 - protein, 1365 aa, Artificial Sequence
  SARS-CoV-2/Shenzhen/SZTH-001/2020__EPI_ISL_406592 spike protein (1-1211)(K986P_V987P) WhcAg construct
MFVFLVLLPLVSSQCVNLTTRTQLPPAYTNSFTRGVYYPDKVFRSSVLHSTQDLFLPFFSNVTWFHAIHVSGTNGTKRFDNPVLPFNDGVYFASTEKSNIIRGWIFGTTLDSKTQSLLIVNNATNVVIKVCEFQFCNDPFLGVYYHKNNKSWMESEFRVYSSANNCTFEYVSQPFLMDLEGKQGNFKNLREFVFKNIDGYFKIYSKHTPINLVRDLPQGFSALEPLVDLPIGINITRFQTLLALHRSYLTPGDSSSGWTAGAAAYYVGYLQPRTFLLKYNENGTITDAVDCALDPLSETKCTLKSFTVEKGIYQTSNFRVQPTESIVRFPNITNLCPFGEVFNATRFASVYAWNRKRISNCVADYSVLYNSASFSTFKCYGVSPTKLNDLCFTNVYADSFVIRGDEVRQIAPGQTGKIADYNYKLPDDFTGCVIAWNSNNLDSKVGGNYNYLYRLFRKSNLKPFERDISTEIYQAGSTPCNGVEGFNCYFPLQSYGFQPTNGVGYQPYRVVVLSFELLHAPATVCGPKKSTNLVKNKCVNFNFNGLTGTGVLTESNKKFLPFQQFGRDIADTTDAVRDPQTLEILDITPCSFGGVSVITPGTNTSNQVAVLYQDVNCTEVPVAIHADQLTPTWRVYSTGSNVFQTRAGCLIGAEHVNNSYECDIPIGAGICASYQTQTNSPRRARSVASQSIIAYTMSLGAENSVAYSNNSIAIPTNFTISVTTEILPVSMTKTSVDCTMYICGDSTECSNLLLQYGSFCTQLNRALTGIAVEQDKNTQEVFAQVKQIYKTPPIKDFGGFNFSQILPDPSKPSKRSFIEDLLFNKVTLADAGFIKQYGDCLGDIAARDLICAQKFNGLTVLPPLLTDEMIAQYTSALLAGTITSGWTFGAGAALQIPFAMQMAYRFNGIGVTQNVLYENQKLIANQFNSAIGKIQDSLSSTASALGKLQDVVNQNAQALNTLVKQLSSNFGAISSVLNDILSRLDPPEAEVQIDRLITGRLQSLQTYVTQQLIRAAEIRASANLAATKMSECVLGQSKRVDFCGKGYHLMSFPQSAPHGVVFLHVTYVPAQEKNFTTAPAICHDGKAHFPREGVFVSNGTHWFVTQRNFYEPQIITTDNTFVSGNCDVLIGIVNNTVYDPLQPELDSFKEELDKYFKNHTSPDVDLGDISGINASVVNIQKEIDRLNEVAKNLNESLIDLQELGKYEQYIKGGGGSDIDPYKEFGSSYQLLNFLPLDFFPDLNALVDTATALYEEELTGREHCSPHHTAIRQALVCWDELTKLIAWMSSNITSEQVRTIIVNHVNDTWGLKVRQSLWFHLSCLTFGQHTVQEFLVSFGVWIRTPAPYRPPNAPILSTLPEHTVIC

SEQ ID NO: 6711 - protein, 1365 aa, Artificial Sequence
  SARS-CoV-2/Shenzhen/SZTH-004/2020__EPI_ISL_406595 spike protein (1-1211)(K986P_V987P) WhcAg construct
MFVFLVLLPLVSSQCVNLTTRTQLPPAYTNSFTRGVYYPDKVFRSSVLHSTQDLFLPFFSNVTWFHAIHVSGTNGTKRFDNPVLPFNDGVYFASTEKSNIIRGWIFGTTLDSKTQSLLIVNNATNVVIKVCEFQFCNDPFLGVYYHKNNKSWMESEFRVYSSANNCTFEYVSQPFLMDLEGKQGNFKNLREFVFKNIDGYFKIYSKHTPINLVRDLPQGFSALEPLVDLPIGINITRFQTLLALHRSYLTPGDSSSGWTAGAAAYYVGYLQPRTFLLKYNENGTITDAVDCALDPLSETKCTLKSFTVEKGIYQTSNFRVQPTESIVRFPNITNLCPFGEVFNATRFASVYAWDRKRISNCVAYYSVLYNSASFSTFKCYGVSPTKLNDLCFTNVYADSFVIRGDEVRQIAPGQTGKIADYNYKLPDDFTGCVIAWNSNNLDSKVGGNYNYLYRLFRKSNLKPFERDISTEIYQAGSTPCNGVEGFNCYFPLQSYGFQPTNGVGYQPYRVVVLSFELLHAPATVCGPKKSTNLVKNKCVNFNFNGLTGTGVLTESNKKFLPFQQFGRDIADTTDAVRDPQTLEILDITPCSFGGVSVITPGTNTSNQVAVLYQDVNCTEVPVAIHADQLTPTWRVYSTGSNVFQTRAGCLIGAEHVNNSYECDIPIGAGICASYQTQTNSPRRARSVASQSIIAYTMSLGAENSVAYSNNSIAIPTNFTISVTTEILPVSMTKTSVDCTMYICGDSTECSNLLLQYGSFCTQLNRALTGIAVEQDKNTQEVFAQVKQIYKTPPIKDFGGFNFSQILPDPSKPSKRSFIEDLLFNKVTLADAGFIKQYGDCLGDIAARDLICAQKFNGLTVLPPLLTDEMIAQYTSALLAGTITSGWTFGAGAALQIPFAMQMAYRFNGIGVTQNVLYENQKLIANQFNSAIGKIQDSLSSTASALGKLQDVVNQNAQALNTLVKQLSSNFGAISSVLNDILSRLDPPEAEVQIDRLITGRLQSLQTYVTQQLIRAAEIRASANLAATKMSECVLGQSKRVDFCGKGYHLMSFPQSAPHGVVFLHVTYVPAQEKNFTTAPAICHDGKAHFPREGVFVSNGTHWFVTQRNFYEPQIITTDNTFVSGNCDVVIGIVNNTVYDPLQPELDSFKEELDKYFKNHTSPDVDLGDISGINASVVNIQKEIDRLNEVAKNLNESLIDLQELGKYEQYIKGGGGSDIDPYKEFGSSYQLLNFLPLDFFPDLNALVDTATALYEEELTGREHCSPHHTAIRQALVCWDELTKLIAWMSSNITSEQVRTIIVNHVNDTWGLKVRQSLWFHLSCLTFGQHTVQEFLVSFGVWIRTPAPYRPPNAPILSTLPEHTVIC

SEQ ID NO: 6712 - protein, 1365 aa, Artificial Sequence
  SARS-CoV-2/France/IDF0372/2020__EPI_ISL_406596 spike protein (1-1211)(K986P_V987P) WhcAg construct
MFVFLVLLPLVSSQCVNLTTRTQLPPAYTNSFTRGVYYPDKVFRSSVLHSTQDLFLPFFSNVTWFHAIHVSGTNGTKRFDNPVLPFNDGVYFASTEKSNIIRGWIFGTTLDSKTQSLLIVNNATNVVIKVCEFQFCNDPFLGVYYHKNNKSWMESEFRVYSSANNCTFEYVSQPFLMDLEGKQGNFKNLREFVFKNIDGYFKIYSKHTPINLVRDLPQGFSALEPLVDLPIGINITRFQTLLALHRSYLTPGDSSSGWTAGAAAYYVGYLQPRTFLLKYNENGTITDAVDCALDPLSETKCTLKSFTVEKGIYQTSNFRVQPTESIVRFPNITNLCPFGEVFNATRFASVYAWNRKRISNCVADYSFLYNSASFSTFKCYGVSPTKLNDLCFTNVYADSFVIRGDEVRQIAPGQTGKIADYNYKLPDDFTGCVIAWNSNNLDSKVGGNYNYLYRLFRKSNLKPFERDISTEIYQAGSTPCNGVEGFNCYFPLQSYGFQPTNGVGYQPYRVVVLSFELLHAPATVCGPKKSTNLVKNKCVNFNFNGLTGTGVLTESNKKFLPFQQFGRDIADTTDAVRDPQTLEILDITPCSFGGVSVITPGTNTSNQVAVLYQDVNCTEVPVAIHADQLTPTWRVYSTGSNVFQTRAGCLIGAEHVNNSYECDIPIGAGICASYQTQTNSPRRARSVASQSIIAYTMSLGAENSVAYSNNSIAIPTNFTISVTTEILPVSMTKTSVDCTMYICGDSTECSNLLLQYGSFCTQLNRALTGIAVEQDKNTQEVFAQVKQIYKTPPIKDFGGFNFSQILPDPSKPSKRSFIEDLLFNKVTLADAGFIKQYGDCLGDIAARDLICAQKFNGLTVLPPLLTDEMIAQYTSALLAGTITSGWTFGAGAALQIPFAMQMAYRFNGIGVTQNVLYENQKLIANQFNSAIGKIQDSLSSTASALGKLQDVVNQNAQALNTLVKQLSSNFGAISSVLNDILSRLDPPEAEVQIDRLITGRLQSLQTYVTQQLIRAAEIRASANLAATKMSECVLGQSKRVDFCGKGYHLMSFPQSAPHGVVFLHVTYVPAQEKNFTTAPAICHDGKAHFPREGVFVSNGTHWFVTQRNFYEPQIITTDNTFVSGNCDVVIGIVNNTVYDPLQPELDSFKEELDKYFKNHTSPDVDLGDISGINASVVNIQKEIDRLNEVAKNLNESLIDLQELGKYEQYIKGGGGSDIDPYKEFGSSYQLLNFLPLDFFPDLNALVDTATALYEEELTGREHCSPHHTAIRQALVCWDELTKLIAWMSSNITSEQVRTIIVNHVNDTWGLKVRQSLWFHLSCLTFGQHTVQEFLVSFGVWIRTPAPYRPPNAPILSTLPEHTVIC

SEQ ID NO: 6713 - protein, 1365 aa, Artificial Sequence
  SARS-CoV-2/Australia/VIC01/2020__EPI_ISL_406844 spike protein (1-1211)(K986P_V987P) WhcAg construct
MFVFLVLLPLVSSQCVNLTTRTQLPPAYTNSFTRGVYYPDKVFRSSVLHSTQDLFLPFFSNVTWFHAIHVSGTNGTKRFDNPVLPFNDGVYFASTEKSNIIRGWIFGTTLDSKTQSLLIVNNATNVVIKVCEFQFCNDPFLGVYYHKNNKSWMESEFRVYSSANNCTFEYVSQPFLMDLEGKQGNFKNLREFVFKNIDGYFKIYSKHTPINLVRDLPQGFSALEPLVDLPIGINITRFQTLLALHRRYLTPGDSSSGWTAGAAAYYVGYLQPRTFLLKYNENGTITDAVDCALDPLSETKCTLKSFTVEKGIYQTSNFRVQPTESIVRFPNITNLCPFGEVFNATRFASVYAWNRKRISNCVADYSVLYNSASFSTFKCYGVSPTKLNDLCFTNVYADSFVIRGDEVRQIAPGQTGKIADYNYKLPDDFTGCVIAWNSNNLDSKVGGNYNYLYRLFRKSNLKPFERDISTEIYQAGSTPCNGVEGFNCYFPLQSYGFQPTNGVGYQPYRVVVLSFELLHAPATVCGPKKSTNLVKNKCVNFNFNGLTGTGVLTESNKKFLPFQQFGRDIADTTDAVRDPQTLEILDITPCSFGGVSVITPGTNTSNQVAVLYQDVNCTEVPVAIHADQLTPTWRVYSTGSNVFQTRAGCLIGAEHVNNSYECDIPIGAGICASYQTQTNSPRRARSVASQSIIAYTMSLGAENSVAYSNNSIAIPTNFTISVTTEILPVSMTKTSVDCTMYICGDSTECSNLLLQYGSFCTQLNRALTGIAVEQDKNTQEVFAQVKQIYKTPPIKDFGGFNFSQILPDPSKPSKRSFIEDLLFNKVTLADAGFIKQYGDCLGDIAARDLICAQKFNGLTVLPPLLTDEMIAQYTSALLAGTITSGWTFGAGAALQIPFAMQMAYRFNGIGVTQNVLYENQKLIANQFNSAIGKIQDSLSSTASALGKLQDVVNQNAQALNTLVKQLSSNFGAISSVLNDILSRLDPPEAEVQIDRLITGRLQSLQTYVTQQLIRAAEIRASANLAATKMSECVLGQSKRVDFCGKGYHLMSFPQSAPHGVVFLHVTYVPAQEKNFTTAPAICHDGKAHFPREGVFVSNGTHWFVTQRNFYEPQIITTDNTFVSGNCDVVIGIVNNTVYDPLQPELDSFKEELDKYFKNHTSPDVDLGDISGINASVVNIQKEIDRLNEVAKNLNESLIDLQELGKYEQYIKGGGGSDIDPYKEFGSSYQLLNFLPLDFFPDLNALVDTATALYEEELTGREHCSPHHTAIRQALVCWDELTKLIAWMSSNITSEQVRTIIVNHVNDTWGLKVRQSLWFHLSCLTFGQHTVQEFLVSFGVWIRTPAPYRPPNAPILSTLPEHTVIC

SEQ ID NO: 6714 - protein, 1365 aa, Artificial Sequence
  SARS-CoV-2/Germany/BavPat1/2020__EPI_ISL_406862 spike protein (1-1211)(K986P_V987P) WhcAg construct
MFVFLVLLPLVSSQCVNLTTRTQLPPAYTNSFTRGVYYPDKVFRSSVLHSTQDLFLPFFSNVTWFHAIHVSGTNGTKRFDNPVLPFNDGVYFASTEKSNIIRGWIFGTTLDSKTQSLLIVNNATNVVIKVCEFQFCNDPFLGVYYHKNNKSWMESEFRVYSSANNCTFEYVSQPFLMDLEGKQGNFKNLREFVFKNIDGYFKIYSKHTPINLVRDLPQGFSALEPLVDLPIGINITRFQTLLALHRSYLTPGDSSSGWTAGAAAYYVGYLQPRTFLLKYNENGTITDAVDCALDPLSETKCTLKSFTVEKGIYQTSNFRVQPTESIVRFPNITNLCPFGEVFNATRFASVYAWNRKRISNCVADYSVLYNSASFSTFKCYGVSPTKLNDLCFTNVYADSFVIRGDEVRQIAPGQTGKIADYNYKLPDDFTGCVIAWNSNNLDSKVGGNYNYLYRLFRKSNLKPFERDISTEIYQAGSTPCNGVEGFNCYFPLQSYGFQPTNGVGYQPYRVVVLSFELLHAPATVCGPKKSTNLVKNKCVNFNFNGLTGTGVLTESNKKFLPFQQFGRDIADTTDAVRDPQTLEILDITPCSFGGVSVITPGTNTSNQVAVLYQGVNCTEVPVAIHADQLTPTWRVYSTGSNVFQTRAGCLIGAEHVNNSYECDIPIGAGICASYQTQTNSPRRARSVASQSIIAYTMSLGAENSVAYSNNSIAIPTNFTISVTTEILPVSMTKTSVDCTMYICGDSTECSNLLLQYGSFCTQLNRALTGIAVEQDKNTQEVFAQVKQIYKTPPIKDFGGFNFSQILPDPSKPSKRSFIEDLLFNKVTLADAGFIKQYGDCLGDIAARDLICAQKFNGLTVLPPLLTDEMIAQYTSALLAGTITSGWTFGAGAALQIPFAMQMAYRFNGIGVTQNVLYENQKLIANQFNSAIGKIQDSLSSTASALGKLQDVVNQNAQALNTLVKQLSSNFGAISSVLNDILSRLDPPEAEVQIDRLITGRLQSLQTYVTQQLIRAAEIRASANLAATKMSECVLGQSKRVDFCGKGYHLMSFPQSAPHGVVFLHVTYVPAQEKNFTTAPAICHDGKAHFPREGVFVSNGTHWFVTQRNFYEPQIITTDNTFVSGNCDVVIGIVNNTVYDPLQPELDSFKEELDKYFKNHTSPDVDLGDISGINASVVNIQKEIDRLNEVAKNLNESLIDLQELGKYEQYIKGGGGSDIDPYKEFGSSYQLLNFLPLDFFPDLNALVDTATALYEEELTGREHCSPHHTAIRQALVCWDELTKLIAWMSSNITSEQVRTIIVNHVNDTWGLKVRQSLWFHLSCLTFGQHTVQEFLVSFGVWIRTPAPYRPPNAPILSTLPEHTVIC

SEQ ID NO: 6715 - protein, 1365 aa, Artificial Sequence
  SARS-CoV-2/Wuhan/HBCDC-HB-02/2020__EPI_ISL_412978 spike protein (1-1211)(K986P_V987P) WhcAg construct
MFVFLVLLPLVSSQCVNLTTRTQLPPAYTNSFTRGVYYPDKVFRSSVLHSTQDLFLPFFSNVTWFHAIHVSGTNGTKRFDNPVLPFNDGVYFASTEKSNIIRGWIFGTTLDSKTQSLLIVNNATNVVIKVCEFQFCNDPFLGVYYHKNNKSWMESEFRVYSSANNCTFEYVSQPFLMDLEGKQGNFKNLREFVFKNIDGYFKIYSKHTPINLVRDLPQGFSALEPLVDLPIGINITRFQTLLALHRSYLTPGDSSSGWTAGAAAYYVGYLQPRTFLLKYNENGTITDAVDCALDPLSETKCTLKSFTVEKGIYQTSNFRVQPTESIVRFPNITNLCPFGEVFNATRFASVYAWNRKRISNCVADYSVLYNSASFSTFKCYGVSPTKLNDLCFTNVYADSFVIRGDEVRQIAPGQTGKIADYNYKLPDDFTGCVIAWNSNNLDSKVGGNYNYLYRLFRKSNLKPFERDISTEIYQAGSTPCNGVEGFNCYFPLQSYGFQPTNGVGYQPYRVVVLSFELLHAPATVCGPKKSTNLVKNKCVNFNFNGLTGTGVLTESNKKFLPFQQFGRDIADTTDAVRDPQTLEILDITPCSFGGVSVITPGTNTSNQVAVLYQDVNCTEVPVAIHADQLTPTWRVYSTGSNVFQTRAGCLIGAEHVNNSYECDIPIGAGICASYQTQTNSPRRARSVASQSIIAYTMSLGAENSVAYSNNSIAIPTNFTISVTTEILPVSMTKTSVDCTMYICGDSTECSNFLLQYGSFCTQLNRALTGIAVEQDKNTQEVFAQVKQIYKTPPIKDFGGFNFSQILPDPSKPSKRSFIEDLLFNKVTLADAGFIKQYGDCLGDIAARDLICAQKFNGLTVLPPLLTDEMIAQYTSALLAGTITSGWTFGAGAALQIPFAMQMAYRFNGIGVTQNVLYENQKLIANQFNSAIGKIQDSLSSTASALGKLQDVVNQNAQALNTLVKQLSSNFGAISSVLNDILSRLDPPEAEVQIDRLITGRLQSLQTYVTQQLIRAAEIRASANLAATKMSECVLGQSKRVDFCGKGYHLMSFPQSAPHGVVFLHVTYVPAQEKNFTTAPAICHDGKAHFPREGVFVSNGTHWFVTQRNFYEPQIITTDNTFVSGNCDVVIGIVNNTVYDPLQPELDSFKEELDKYFKNHTSPDVDLGDISGINASVVNIQKEIDRLNEVAKNLNESLIDLQELGKYEQYIKGGGGSDIDPYKEFGSSYQLLNFLPLDFFPDLNALVDTATALYEEELTGREHCSPHHTAIRQALVCWDELTKLIAWMSSNITSEQVRTIIVNHVNDTWGLKVRQSLWFHLSCLTFGQHTVQEFLVSFGVWIRTPAPYRPPNAPILSTLPEHTVIC

SEQ ID NO: 6716 - protein, 1365 aa, Artificial Sequence
  SARS-CoV-2/Australia/QLD02/2020__EPI_ISL_407896 spike protein (1-1211)(K986P_V987P) WhcAg construct
MFVFLVLLPLVSSQCVNLTTRTQLPPAYTNSFTRGVYYPDKVFRSSVLHSTQDLFLPFFSNVTWFHAIHVSGTNGTKRFDNPVLPFNDGVYFASTEKSNIIRGWIFGTTLDSKTQSLLIVNNATNVVIKVCEFQFCNDPFLGVYYHKNNKSWMESEFRVYSSANNCTFEYVSQPFLMDLEGKQGNFKNLREFVFKNIDGYFKIYSKHTPINLVRDLPQGFSALEPLVDLPIGINITRFQTLLALHRSYLTPGDSSSGWTAGAAAYYVGYLQPRTFLLKYNENGTITDAVDCALDPLSETKCTLKSFTVEKGIYQTSNFRVQPTESIVRFPNITNLCPFGEVFNATRFASVYAWNRKRISNCVADYSVLYNSASFSTFKCYGVSPTKLNDLCFTNVYADSFVIRGDEVRQIAPGQTGKIADYNYKLPDDFTGCVIAWNSNNLDSKVGGNYNYLYRLFRKSNLKPFERDISTEIYQAGSTPCNGVEGFNCYFPLQSYGFQPTNGVGYQPYRVVVLSFELLHAPATVCGPKKSTNLVKNKCVNFNFNGLTGTGVLTESNKKFLPFQQFGRDIADTTDAVRDPQTLEILDITPCSFGGVSVITPGTNTSNQVAVLYQDVNCTEVPVAIHADQLTPTWRVYSTGSNVFQTRAGCLIGAEHVNNSYECDIPIGAGICASYQTQTNSPRRARSVASQSIIAYTMSLGAENSVAYSNNSIAIPTNFTISVTTEILPVSMTKTSVDCTMYICGDSTECSNLLLQYGSFCTQLNRALTGIAVEQDKNTQEVFAQVKQIYKTPPIKDFGGFNFSQILPDPSKPSKRSFIEDLLFNKVTLADAGFIKQYGDCLGDIAARDLICAQKFNGLTVLPPLLTDEMIAQYTSALLAGTITSGWTFGAGAALQIPFAMQMAYRFNGIGVTQNVLYENQKLIANQFNSAIGKIQDSLSSTASALGKLQDVVNQNAQALNTLVKQLSSNFGAISSVLNDILSRLDPPEAEVQIDRLITGRLQSLQTYVTQQLIRAAEIRASANLAATKMSECVLGQSKRVDFCGKGYHLMSFPQSAPHGVVFLHVTYVPAQEKNFTTAPAICHDGKAHFPREGVFVSNGTHWFVTQRNFYEPQIITTDNTFVSGNCDVVIGIVNNTVYDPLQLELDSFKEELDKYFKNHTSPDVDLGDISGINASVVNIQKEIDRLNEVAKNLNESLIDLQELGKYEQYIKGGGGSDIDPYKEFGSSYQLLNFLPLDFFPDLNALVDTATALYEEELTGREHCSPHHTAIRQALVCWDELTKLIAWMSSNITSEQVRTIIVNHVNDTWGLKVRQSLWFHLSCLTFGQHTVQEFLVSFGVWIRTPAPYRPPNAPILSTLPEHTVIC

SEQ ID NO: 6717 - protein, 1365 aa, Artificial Sequence
  SARS-CoV-2/India/1-31/2020__EPI_ISL_413523 spike protein (1-1211)(K986P_V987P) WhcAg construct
MFVFLVLLPLVSSQCVNLTTRTQLPPAYTNSFTRGVYYPDKVFRSSVLHSTQDLFLPFFSNVTWFHAIHVSGTNGTKRFDNPVLPFNDGVYFASTEKSNIIRGWIFGTTLDSKTQSLLIVNNATNVVIKVCEFQFCNDPFLGVYYHKNNKSWMESEFRVYSSANNCTFEYVSQPFLMDLEGKQGNFKNLREFVFKNIDGYFKIYSKHTPINLVRDLPQGFSALEPLVDLPIGINITRFQTLLALHRSYLTPGDSSSGWTAGAAAYYVGYLQPRTFLLKYNENGTITDAVDCALDPLSETKCTLKSFTVEKGIYQTSNFRVQPTESIVRFPNITNLCPFGEVFNATRFASVYAWNRKRISNCVADYSVLYNSASFSTFKCYGVSPTKLNDLCFTNVYADSFVIRGDEVRQIAPGQTGKIADYNYKLPDDFTGCVIAWNSNNLDSKVGGNYNYLYRLFRKSNLKPFERDISTEIYQAGSTPCNGVEGFNCYFPLQSYGFQPTNGVGYQPYRVVVLSFELLHAPATVCGPKKSTNLVKNKCVNFNFNGLTGTGVLTESNKKFLPFQQFGRDIADTTDAVRDPQTLEILDITPCSFGGVSVITPGTNTSNQVAVLYQDVNCTEVPVAIHADQLTPTWRVYSTGSNVFQTRAGCLIGAEHVNNSYECDIPIGAGICASYQTQTNSPRRARSVASQSIIAYTMSLGAENSVAYSNNSIAIPTNFTISVTTEILPVSMTKTSVDCTMYICGDSTECSNLLLQYGSFCTQLNRALTGIAVEQDKNTQEVFAQVKQIYKTPPIKDFGGFNFSQILPDPSKPSKRSFIEDLLFNKVTLADAGFIKQYGDCLGDIAARDLICAQKFNGLTVLPPLLTDEMIAQYTSALLAGTITSGWTFGAGAALQIPFAMQMAYRFNGIGVTQNVLYENQKLIANQFNSVIGKIQDSLSSTASALGKLQDVVNQNAQALNTLVKQLSSNFGAISSVLNDILSRLDPPEAEVQIDRLITGRLQSLQTYVTQQLIRAAEIRASANLAATKMSECVLGQSKRVDFCGKGYHLMSFPQSAPHGVVFLHVTYVPAQEKNFTTAPAICHDGKAHFPREGVFVSNGTHWFVTQRNFYEPQIITTDNTFVSGNCDVVIGIVNNTVYDPLQPELDSFKEELDKYFKNHTSPDVDLGDISGINASVVNIQKEIDRLNEVAKNLNESLIDLQELGKYEQYIKGGGGSDIDPYKEFGSSYQLLNFLPLDFFPDLNALVDTATALYEEELTGREHCSPHHTAIRQALVCWDELTKLIAWMSSNITSEQVRTIIVNHVNDTWGLKVRQSLWFHLSCLTFGQHTVQEFLVSFGVWIRTPAPYRPPNAPILSTLPEHTVIC

SEQ ID NO: 6718 - protein, 1365 aa, Artificial Sequence
  SARS-CoV-2/Guangdong/GD2020087-P0008/2020__EPI_ISL_413863 spike protein (1-1211)(K986P_V987P) WhcAg construct
MFVFLVLLPLVSSQCVNLTTRTQLPPAYTNSFTRGVYYPDKVFRSSVLHSTQDLFLPFFSNVTWFHAIHVSGTNGTKRFDNPVLPFNDGVYFASTEKSNIIRGWIFGTTLDSKTQSLLIVNNATNVVIKVCEFQFCNDPFLGVYYHKNNKSWMESEFRVYSSANNCTFEYVSQPFLMDLEGKQGNFKNLREFVFKNIDGYFKIYSKHTPINLVRDLPQGFSALEPLVDLPIGINITRFQTLLALHRSYLTPGDSSSGWTAGAAAYYVGYLQPRTFLLKYNENGTITDAVDCALDPLSETKCTLKSFTVEKGIYQTSNFRVQPTESIVRFPNITNLCPFGEVFNATRFASVYAWNRKRISNCVADYSVLYNSASFSTFKCYGVSPTKLNDLCFTNVYADSFVIRGDEVREIAPGQTGKIADYNYKLPDDFTGCVIAWNSNNLDSKVGGNYNYLYRLFRKSNLKPFERDISTEIYQAGSTPCNGVEGFNCYFPLQSYGFQPTNGVGYQPYRVVVLSFELLHAPATVCGPKKSTNLVKNKCVNFNFNGLTGTGVLTESNKKFLPFQQFGRDIADTTDAVRDPQTLEILDITPCSFGGVSVITPGTNTSNQVAVLYQDVNCTEVPVAIHADQLTPTWRVYSTGSNVFQTRAGCLIGAEHVNNSYECDIPIGAGICASYQTQTNSPRRARSVASQSIIAYTMSLGAENSVAYSNNSIAIPTNFTISVTTEILPVSMTKTSVDCTMYICGDSTECSNLLLQYGSFCTQLNRALTGIAVEQDKNTQEVFAQVKQIYKTPPIKDFGGFNFSQILPDPSKPSKRSFIEDLLFNKVTLADAGFIKQYGDCLGDIAARDLICAQKFNGLTVLPPLLTDEMIAQYTSALLAGTITSGWTFGAGAALQIPFAMQMAYRFNGIGVTQNVLYENQKLIANQFNSAIGKIQDSLSSTASALGKLQDVVNQNAQALNTLVKQLSSNFGAISSVLNDILSRLDPPEAEVQIDRLITGRLQSLQTYVTQQLIRAAEIRASANLAATKMSECVLGQSKRVDFCGKGYHLMSFPQSAPHGVVFLHVTYVPAQEKNFTTAPAICHDGKAHFPREGVFVSNGTHWFVTQRNFYEPQIITTDNTFVSGNCDVVIGIVNNTVYDPLQPELDSFKEELDKYFKNHTSPDVDLGDISGINASVVNIQKEIDRLNEVAKNLNESLIDLQELGKYEQYIKGGGGSDIDPYKEFGSSYQLLNFLPLDFFPDLNALVDTATALYEEELTGREHCSPHHTAIRQALVCWDELTKLIAWMSSNITSEQVRTIIVNHVNDTWGLKVRQSLWFHLSCLTFGQHTVQEFLVSFGVWIRTPAPYRPPNAPILSTLPEHTVIC

SEQ ID NO: 6719 - protein, 1365 aa, Artificial Sequence
  SARS-CoV-2/Sweden/01/2020__EPI_ISL_411951 spike protein (1-1211)(K986P_V987P) WhcAg construct
MFVFLVLLPLVSSQCVNLTTRTQLPPAYTNSFTRGVYYPDKVFRSSVLHSTQDLFLPFFSNVTWFHAIHVSGTNGTKRFDNPVLPFNDGVYFASTEKSNIIRGWIFGTTLDSKTQSLLIVNNATNVVIKVCEFQFCNDPFLGVYYHKNNKSWMESEFRVYSSANNCTFEYVSQPFLMDLEGKQGNFKNLREFVFKNIDGYFKIYSKHTPINLVRDLPQGFSALEPLVDLPIGINITRFQTLLALHRSYLTPGDSSSGWTAGAAAYYVGYLQPRTFLLKYNENGTITDAVDCALDPLSETKCTLKSFTVEKGIYQTSNFRVQPTESIVRFPNITNLCPFGEVFNATRFASVYAWNRKRISNCVADYSVLYNSASFSTFKCYGVSPTKLNDLCFTNVYADSFVIRGDEVRQIAPGQTGKIADYNYKLPDDFTGCVIAWNSNNLDSKVGGNYNYLYRLFRKSNLKPFERDISTEIYQAGSTPCNGVEGFNCYFPLQSYGFQPTNGVGYQPYRVVVLSFELLHAPATVCGPKKSTNLVKNKCVNFNFNGLTGTGVLTESNKKFLPFQQFGRDIADTTDAVRDPQTLEILDITPCSFGGVSVITPGTNTSNQVAVLYQDVNCTEVPVAIHADQLTPTWRVYSTGSNVFQTRAGCLIGAEHVNNSYECDIPIGAGICASYQTQTNSPRRARSVASQSIIAYTMSLGAENSVAYSNNSIAIPTNFTISVTTEILPVSMTKTSVDCTMYICGDSTECSNLLLQYGSFCTQLNRALTGIAVEQDKNTQEVFAQVKQIYKTPPIKDCGGFNFSQILPDPSKPSKRSFIEDLLFNKVTLADAGFIKQYGDCLGDIAARDLICAQKFNGLTVLPPLLTDEMIAQYTSALLAGTITSGWTFGAGAALQIPFAMQMAYRFNGIGVTQNVLYENQKLIANQFNSAIGKIQDSLSSTASALGKLQDVVNQNAQALNTLVKQLSSNFGAISSVLNDILSRLDPPEAEVQIDRLITGRLQSLQTYVTQQLIRAAEIRASANLAATKMSECVLGQSKRVDFCGKGYHLMSFPQSAPHGVVFLHVTYVPAQEKNFTTAPAICHDGKAHFPREGVFVSNGTHWFVTQRNFYEPQIITTDNTFVSGNCDVVIGIVNNTVYDPLQPELDSFKEELDKYFKNHTSPDVDLGDISGINASVVNIQKEIDRLNEVAKNLNESLIDLQELGKYEQYIKGGGGSDIDPYKEFGSSYQLLNFLPLDFFPDLNALVDTATALYEEELTGREHCSPHHTAIRQALVCWDELTKLIAWMSSNITSEQVRTIIVNHVNDTWGLKVRQSLWFHLSCLTFGQHTVQEFLVSFGVWIRTPAPYRPPNAPILSTLPEHTVIC

SEQ ID NO: 6720 - protein, 1365 aa, Artificial Sequence
  SARS-CoV-2/Tianmen/HBCDC-HB-07/2020__EPI_ISL_412983 spike protein (1-1211)(K986P_V987P) WhcAg construct
MFVFLVLLPLVSSQCVNLTTRTQLPPAYTNSFTRGVYYPDKVFRSSVLHSTQDLFLPFFSNVTWFHAIHVSGTNGTKRFDNPVLPFNDGVYFASTEKSNIIRGWIFGTTLDSKTQSLLIVNNATNVVIKVCEFQFCNDPFLGVYYHKNNKSWMESEFRVYSSANNCTFEYVSQPFLMDLEGKQGNFKNLREFVFKNIDGYFKIYSKHTPINLVRDLPQGFSALEPLVDLPIGINITRFQTLLALHRSYLTPGDSSSGWTAGAAAYYVGYLQPRTFLLKYNENGTITDAVDCALDPLSETKCTLKSFTVEKGIYQTSNFRVQPTESIVRFPNITNLCPFGEVFNATRFASVYAWNRKRISNCVADYSVLYNSASFSTFKCYGVSPTKLNDLCFTNVYADSFVIRGDEVRQIAPGQTGKIADYNYKLPDDFTGCVIAWNSNNLDSKVGGNYNYLYRLFRKSNLKPFERDISTEIYQAGSTPCNGVEGFNCYFPLQSYGFQPTNGVGYQPYRVVVLSFELLHAPATVCGPKKSTNLVKNKCVNFNFNGLTGTGVLTESNKKFLPFQQFGRDIADTTDAVRDPQTLEILDITPCSFGGVSVITPGTNTSNQVAVLYQDLNCTEVPVAIHADQLTPTWRVYSTGSNVFQTRAGCLIGAEHVNNSYECDIPIGAGICASYQTQTNSPRRARSVASQSIIAYTMSLGAENSVAYSNNSIAIPTNFTISVTTEILPVSMTKTSVDCTMYICGDSTECSNLLLQYGSFCTQLNRALTGIAVEQDKNTQEVFAQVKQIYKTPPIKDFGGFNFSQILPDPSKPSKRSFIEDLLFNKVTLADAGFIKQYGDCLGDIAARDLICAQKFNGLTVLPPLLTDEMIAQYTSALLAGTITSGWTFGAGAALQIPFAMQMAYRFNGIGVTQNVLYENQKLIANQFNSAIGKIQDSLSSTASALGKLQDVVNQNAQALNTLVKQLSSNFGAISSVLNDILSRLDPPEAEVQIDRLITGRLQSLQTYVTQQLIRAAEIRASANLAATKMSECVLGQSKRVDFCGKGYHLMSFPQSAPHGVVFLHVTYVPAQEKNFTTAPAICHDGKAHFPREGVFVSNGTHWFVTQRNFYEPQIITTDNTFVSGNCDVVIGIVNNTVYDPLQPELDSFKEELDKYFKNHTSPDVDLGDISGINASVVNIQKEIDRLNEVAKNLNESLIDLQELGKYEQYIKGGGGSDIDPYKEFGSSYQLLNFLPLDFFPDLNALVDTATALYEEELTGREHCSPHHTAIRQALVCWDELTKLIAWMSSNITSEQVRTIIVNHVNDTWGLKVRQSLWFHLSCLTFGQHTVQEFLVSFGVWIRTPAPYRPPNAPILSTLPEHTVIC

SEQ ID NO: 6721 - protein, 1365 aa, Artificial Sequence
  SARS-CoV-2/Hong Kong/case42_VM20002493/2020__EPI_ISL_414527 spike protein (1-1211)(K986P_V987P) WhcAg construct
MFVFLVLLPLVSSQCVNLTTRTQLPPAYTNSFTRGVYYPDKVFRSSVLHSTQDLFLPFFSNVTWFHAIHVSGTNGTKRFDNPVLPFNDGVYFASTEKSNIIRGWIFGTTLDSKTQSLLIVNNATNVVIKVCEFQFCNDPFLGVYYHKNNKSWMESEFRVYSSANNCTFEYVSQPFLMDLEGKQGNFKNLREFVFKNIDGYFKIYSKHTPINLVRDLPQGFSALEPLVDLPIGINITRFQTLLALHRSYLTPGDSSSGWTAGAAAYYVGYLQPRTFLLKYNENGTITDAVDCALDPLSETKCTLKSFTVEKGIYQTSNFRVQPTESIVRFPNITNLCPFGEVFNATRFASVYAWNRKRISNCVADYSVLYNSASFSTFKCYGVSPTKLNDLCFTNVYADSFVIRGDEVRQIAPGQTGKIADYNYKLPDDFTGCVIAWNSNNLDSKVGGNYNYLYRLFRKSNLKPFERDISTEIYQAGSTPCNGVEGFNCYFPLQSYGFQPTNGVGYQPYRVVVLSFELLHAPATVCGPKKSTNLVKNKCVNFNFNGLTGTGVLTESNKKFLPFQQFGRDIADTTDAVRDPQTLEILDITPCSFGGVSVITPGTNTSNQVAVLYQDVNCTEVPVAIHADQLTPTWRVYSTGSNVFQTRAGCLIGAEHVNNSYECDIPIGAGICASYQTQTNSPRRARSVASQSIIAYTMSLGAENSVAYSNNSIAIPTNFAISVTTEILPVSMTKTSVDCTMYICGDSTECSNLLLQYGSFCTQLNRALTGIAVEQDKNTQEVFAQVKQIYKTPPIKDFGGFNFSQILPDPSKPSKRSFIEDLLFNKVTLADAGFIKQYGDCLGDIAARDLICAQKFNGLTVLPPLLTDEMIAQYTSALLAGTITSGWTFGAGAALQIPFAMQMAYRFNGIGVTQNVLYENQKLIANQFNSAIGKIQDSLSSTASALGKLQDVVNQNAQALNTLVKQLSSNFGAISSVLNDILSRLDPPEAEVQIDRLITGRLQSLQTYVTQQLIRAAEIRASANLAATKMSECVLGQSKRVDFCGKGYHLMSFPQSAPHGVVFLHVTYVPAQEKNFTTAPAICHDGKAHFPREGVFVSNGTHWFVTQRNFYEPQIITTDNTFVSGNCDVVIGIVNNTVYDPLQPELDSFKEELDKYFKNHTSPDVDLGDISGINASVVNIQKEIDRLNEVAKNLNESLIDLQELGKYEQYIKGGGGSDIDPYKEFGSSYQLLNFLPLDFFPDLNALVDTATALYEEELTGREHCSPHHTAIRQALVCWDELTKLIAWMSSNITSEQVRTIIVNHVNDTWGLKVRQSLWFHLSCLTFGQHTVQEFLVSFGVWIRTPAPYRPPNAPILSTLPEHTVIC

SEQ ID NO: 6722 - protein, 1365 aa, Artificial Sequence
  SARS-CoV-2/USA/CruiseA-23/2020__EPI_ISL_414482 spike protein (1-1211)(K986P_V987P) WhcAg construct
MFVFLVLLPLVSSQCVNLTTRTQLPPAYTNSFTRGVYYPDKVFRSSVLHSTQDLFLPFFSNVTWFHAIHVSGTNGTKRFDNPVLPFNDGVYFASTEKSNIIRGWIFGTTLDSKTQSLLIVNNATNVVIKVCEFQFCNDPFLGVYYHKNNKSWMESEFRVYSSANNCTFEYVSQPFLMDLEVKQGNFKNLREFVFKNIDGYFKIYSKHTPINLVRDLPQGFSALEPLVDLPIGINITRFQTLLALHRSYLTPGDSSSGWTAGAAAYYVGYLQPRTFLLKYNENGTITDAVDCALDPLSETKCTLKSFTVEKGIYQTSNFRVQPTESIVRFPNITNLCPFGEVFNATRFASVYAWNRKRISNCVADYSVLYNSASFSTFKCYGVSPTKLNDLCFTNVYADSFVIRGDEVRQIAPGQTGKIADYNYKLPDDFTGCVIAWNSNNLDSKVGGNYNYLYRLFRKSNLKPFERDISTEIYQAGSTPCNGVEGFNCYFPLQSYGFQPTNGVGYQPYRVVVLSFELLHAPATVCGPKKSTNLVKNKCVNFNFNGLTGTGVLTESNKKFLPFQQFGRDIADTTDAVRDPQTLEILDITPCSFGGVSVITPGTNTSNQVAVLYQDVNCTEVPVAIHADQLTPTWRVYSTGSNVFQTRAGCLIGAEHVNNSYECDIPIGAGICASYQTQTNSPRRARSVASQSIIAYTMSLGAENSVAYSNNSIAIPTNFTISVTTEILPVSMTKTSVDCTMYICGDSTECSNLLLQYGSFCTQLNRALTGIAVEQDKNTQEVFAQVKQIYKTPPIKDFGGFNFSQILPDPSKPSKRSFIEDLLFNKVTLADAGFIKQYGDCLGDIAARDLICAQKFNGLTVLPPLLTDEMIAQYTSALLAGTITSGWTFGAGAALQIPFAMQMAYRFNGIGVTQNVLYENQKLIANQFNSAIGKIQDSLSSTASALGKLQDVVNQNAQALNTLVKQLSSNFGAISSVLNDILSRLDPPEAEVQIDRLITGRLQSLQTYVTQQLIRAAEIRASANLAATKMSECVLGQSKRVDFCGKGYHLMSFPQSAPHGVVFLHVTYVPAQEKNFTTAPAICHDGKAHFPREGVFVSNGTHWFVTQRNFYEPQIITTDNTFVSGNCDVVIGIVNNTVYDPLQPELDSFKEELDKYFKNHTSPDVDLGDISGINASVVNIQKEIDRLNEVAKNLNESLIDLQELGKYEQYIKGGGGSDIDPYKEFGSSYQLLNFLPLDFFPDLNALVDTATALYEEELTGREHCSPHHTAIRQALVCWDELTKLIAWMSSNITSEQVRTIIVNHVNDTWGLKVRQSLWFHLSCLTFGQHTVQEFLVSFGVWIRTPAPYRPPNAPILSTLPEHTVIC

SEQ ID NO: 6723 - protein, 1365 aa, Artificial Sequence
  SARS-CoV-2/Hong Kong/case85_VM20002868/2020__EPI_ISL_414519 spike protein (1-1211)(K986P_V987P) WhcAg construct
MFVFLVLVPLVSSQCVNLTTRTQLPPAYTNSFTRGVYYPDKVFRSSVLHSTQDLFLPFFSNVTWFHAIHVSGTNGTKRFDNPVLPFNDGVYFASTEKSNIIRGWIFGTTLDSKTQSLLIVNNATNVVIKVCEFQFCNDPFLGVYYHKNNKSWMESEFRVYSSANNCTFEYVSQPFLMDLEGKQGNFKNLREFVFKNIDGYFKIYSKHTPINLVRDLPQGFSALEPLVDLPIGINITRFQTLLALHRSYLTPGDSSSGWTAGAAAYYVGYLQPRTFLLKYNENGTITDAVDCALDPLSETKCTLKSFTVEKGIYQTSNFRVQPTESIVRFPNITNLCPFGEVFNATRFASVYAWNRKRISNCVADYSVLYNSASFSTFKCYGVSPTKLNDLCFTNVYADSFVIRGDEVRQIAPGQTGKIADYNYKLPDDFTGCVIAWNSNNLDSKVGGNYNYLYRLFRKSNLKPFERDISTEIYQAGSTPCNGVEGFNCYFPLQSYGFQPTNGVGYQPYRVVVLSFELLHAPATVCGPKKSTNLVKNKCVNFNFNGLTGTGVLTESNKKFLPFQQFGRDIADTTDAVRDPQTLEILDITPCSFGGVSVITPGTNTSNQVAVLYQDVNCTEVPVAIHADQLTPTWRVYSTGSNVFQTRAGCLIGAEHVNNSYECDIPIGAGICASYQTQTNSPRRARSVASQSIIAYTMSLGAENSVAYSNNSIAIPTNFTISVTTEILPVSMTKTSVDCTMYICGDSTECSNLLLQYGSFCTQLNRALTGIAVEQDKNTQEVFAQVKQIYKTPPIKDFGGFNFSQILPDPSKPSKRSFIEDLLFNKVTLADAGFIKQYGDCLGDIAARDLICAQKFNGLTVLPPLLTDEMIAQYTSALLAGTITSGWTFGAGAALQIPFAMQMAYRFNGIGVTQNVLYENQKLIANQFNSAIGKIQDSLSSTASALGKLQDVVNQNAQALNTLVKQLSSNFGAISSVLNDILSRLDPPEAEVQIDRLITGRLQSLQTYVTQQLIRAAEIRASANLAATKMSECVLGQSKRVDFCGKGYHLMSFPQSAPHGVVFLHVTYVPAQEKNFTTAPAICHDGKAHFPREGVFVSNGTHWFVTQRNFYEPQIITTDNTFVSGNCDVVIGIVNNTVYDPLQPELDSFKEELDKYFKNHTSPDVDLGDISGINASVVNIQKEIDRLNEVAKNLNESLIDLQELGKYEQYIKGGGGSDIDPYKEFGSSYQLLNFLPLDFFPDLNALVDTATALYEEELTGREHCSPHHTAIRQALVCWDELTKLIAWMSSNITSEQVRTIIVNHVNDTWGLKVRQSLWFHLSCLTFGQHTVQEFLVSFGVWIRTPAPYRPPNAPILSTLPEHTVIC

SEQ ID NO: 6724 - protein, 1365 aa, Artificial Sequence; identical to SEQ ID NO: 6714
  SARS-CoV-2/England/200990660/2020__EPI_ISL_414523 spike protein (1-1211)(K986P_V987P) WhcAg construct

SEQ ID NO: 6725 - protein, 1365 aa, Artificial Sequence
  SARS-CoV-2/Australia/NSW09/2020__EPI_ISL_413595 spike protein (1-1211)(K986P_V987P) WhcAg construct
MFVFLVLLPLVSSQCVNLTTRTQLPPAYTNSFTRGVYYPDKVFRSSVLHSTQDLFLPFFSNVTWFHAIHVSGTNGTKRFDNPVLPFNDGVYFASTEKSNIIRGWIFGTTLDSKTQSLLIVNNATNVVIKVCEFQFCNDPFLGVYYHKNNKSWMESEFRVYSSANNCTFEYVSQPFLMDLEGKQGNFKNLREFVFKNIDGYFKIYSKHTPINLVRDLPQGFSALEPLVDLPIGINITRFQTLLALHRSYLTPGDSSSGWTAGAAAYYVGYLQPRTFLLKYNENGTITDAVDCALDPLSETKCTLKSFTVEKGIYQTSNFRVQPTESIVRFPNITNLCPFGEVFNATRFASVYAWNRKRISNCVADYSVLYNSASFSTFKCYGVSPTKLNDLCFTNVYADSFVIRGDEVRQIAPGQTGKIADYNYKLPDDFTGCVIAWNSNNLDSKVGGNYNYLYRLFRKSNLKPFERDISTEIYQAGSTPCNGVEGFNCYFPLQSYGFQPTNGVGYQPYRVVVLSFELLHAPATVCGPKKSTNLVKNKCVNFNFNGLTGTGVLTESNKKFLPFQQFGRDIADTTDAVRDPQTLEILDITPCSFGGVSVITPGTNTSNQVAVLYQDVNCTEVPVAIHADQLTPTWRVYSTGSNVFQTRAGCLIGAEHVNNSYECDIPIGAGICASYQTQTNSPRRARSVASQSIIAYTMSLGAENSVAYSNNSIAIPTNFTISVTTEILPVSMTKTSVDCTMYICGDSTECSNLLLQYGSFCTQLNRALTGIAVEQDKNTQEVFAQVKQIYKTPPIKDFGGFNFSQILPDPSKPSKRSFIEDLLFNKVTLADAGFIKQYGDCLGDIAARDLICAQKFNGLTVLPPLLTDEMIAQYTSALLAGTITSGWTFGAGAALQIPFAMQMAYRFNGIGVTQNVLYENQKLIANQFNSAIGKIQDSLSFTASALGKLQDVVNQNAQALNTLVKQLSSNFGAISSVLNDILSRLDPPEAEVQIDRLITGRLQSLQTYVTQQLIRAAEIRASANLAATKMSECVLGQSKRVDFCGKGYHLMSFPQSAPHGVVFLHVTYVPAQEKNFTTAPAICHDGKAHFPREGVFVSNGTHWFVTQRNFYEPQIITTDNTFVSGNCDVVIGIVNNTVYDPLQPELDSFKEELDKYFKNHTSPDVDLGDISGINASVVNIQKEIDRLNEVAKNLNESLIDLQELGKYEQYIKGGGGSDIDPYKEFGSSYQLLNFLPLDFFPDLNALVDTATALYEEELTGREHCSPHHTAIRQALVCWDELTKLIAWMSSNITSEQVRTIIVNHVNDTWGLKVRQSLWFHLSCLTFGQHTVQEFLVSFGVWIRTPAPYRPPNAPILSTLPEHTVIC

SEQ ID NO: 6726 - protein, 1365 aa, Artificial Sequence; identical to SEQ ID NO: 6706
  SARS-CoV-2/Australia/NSW10/2020__EPI_ISL_413596 spike protein (1-1211)(K986P_V987P) WhcAg construct

SEQ ID NO: 6727 - protein, 1365 aa, Artificial Sequence
  SARS-CoV-2/Switzerland/1000477797/2020__EPI_ISL_413023 spike protein (1-1211)(K986P_V987P) WhcAg construct
MFVFLVLLPLVSSQCVNLTTRTQLPPAYTNSFTRGVYYPDKVFRSSVLHSTQDLFLPFFSNVTWFHAIHVSGTNGTKRFDNPVLPFNDGVYFASTEKSNIIRGWIFGTTLDSKTQSLLIVNNATNVVIKVCEFQFCNDPFLGVYYHKNNKSWMESEFRVYSSANNCTFEYVSQPFLMDLEGKQGNFKNLREFVFKNIDGYFNIYSKHTPINLVRDLPQGFSALEPLVDLPIGINITRFQTLLALHRSYLTPGDSSSGWTAGAAAYYVGYLQPRTFLLKYNENGTITDAVDCALDPLSETKCTLKSFTVEKGIYQTSNFRVQPTESIVRFPNITNLCPFGEVFNATRFASVYAWNRKRISNCVADYSVLYNSASFSTFKCYGVSPTKLNDLCFTNVYADSFVIRGDEVRQIAPGQTGKIADYNYKLPDDFTGCVIAWNSNNLDSKVGGNYNYLYRLFRKSNLKPFERDISTEIYQAGSTPCNGVEGFNCYFPLQSYGFQPTNGVGYQPYRVVVLSFELLHAPATVCGPKKSTNLVKNKCVNFNFNGLTGTGVLTESNKKFLPFQQFGRDIADTTDAVRDPQTLEILDITPCSFGGVSVITPGTNTSNQVAVLYQGVNCTEVPVAIHADQLTPTWRVYSTGSNVFQTRAGCLIGAEHVNNSYECDIPIGAGICASYQTQTNSPRRARSVASQSIIAYTMSLGAENSVAYSNNSIAIPTNFTISVTTEILPVSMTKTSVDCTMYICGDSTECSNLLLQYGSFCTQLNRALTGIAVEQDKNTQEVFAQVKQIYKTPPIKDFGGFNFSQILPDPSKPSKRSFIEDLLFNKVTLADAGFIKQYGDCLGDIAARDLICAQKFNGLTVLPPLLTDEMIAQYTSALLAGTITSGWTFGAGAALQIPFAMQMAYRFNGIGVTQNVLYENQKLIANQFNSAIGKIQDSLSSTASALGKLQDVVNQNAQALNTLVKQLSSNFGAISSVLNDILSRLDPPEAEVQIDRLITGRLQSLQTYVTQQLIRAAEIRASANLAATKMSECVLGQSKRVDFCGKGYHLMSFPQSAPHGVVFLHVTYVPAQEKNFTTAPAICHDGKAHFPREGVFVSNGTHWFVTQRNFYEPQIITTDNTFVSGNCDVVIGIVNNTVYDPLQPELDSFKEELDKYFKNHTSPDVDLGDISGINASVVNIQKEIDRLNEVAKNLNESLIDLQELGKYEQYIKGGGGSDIDPYKEFGSSYQLLNFLPLDFFPDLNALVDTATALYEEELTGREHCSPHHTAIRQALVCWDELTKLIAWMSSNITSEQVRTIIVNHVNDTWGLKVRQSLWFHLSCLTFGQHTVQEFLVSFGVWIRTPAPYRPPNAPILSTLPEHTVIC

SEQ ID NO: 6728 - protein, 1365 aa, Artificial Sequence
  SARS-CoV-2/Belgium/BA-02291/2020__EPI_ISL_415159 spike protein (1-1211)(K986P_V987P) WhcAg construct
MFVFLVLLPLVSSQCVNLTTRTQLPPAYTNSFTRGVYYPDKVFRSSVLHSTQDLFLPFFSNVTWFHAIHVSGTNGTKRFDNPVLPFNDGVYFASTEKSNIIRGWIFGTTLDSKTQSLLIVNNATNVVIKVCEFQFCNDPFLGVYYHKNNKSWMESEFRVYSSANNCTFEYVSQPFLMDLEGKQGNFKNLREFVFKNIDGYFKIYSKHTPINLVRDLPQGFSALEPLVDLPIGINITRFQTLLALHRSYLTPGDSSSGWTAGAAAYYVGYLQPRTFLLKYNENGTITDAVDCALDPLSETKCTLKSFTVEKGIYQTSNFRVQPTESIVRFPNITNLCPFGEVFNATRFASVYAWNRKRISNCVADYSVLYNSASFSTFKCYGVSPTKLNDLCFTNVYADSFVIRGDEVRQIAPGQTGKIADYNYKLPDDFTGCVIAWNSNNLDSKVGGNYNYLYRLFRRSNLKPFERDISTEIYQAGSTPCNGVEGFNCYFPLQSYGFQPTNGVGYQPYRVVVLSFELLPAPATVCGPKKSTNLVKNKCVNFNFNGLTGTGVLTESNKKFLPFQQFGRDIADTTDAVRDPQTLEILDITPCSFGGVSVITPGTNTSNQVAVLYQGVNCTEVPVAIHADQLTPTWRVYSTGSNVFQTRAGCLIGAEHVNNSYECDIPIGAGICASYQTQTNSPRRARSVASQSIIAYTMSLGAENSVAYSNNSIAIPTNFTISVTTEILPVSMTKTSVDCTMYICGDSTECSNLLLQYGSFCTQLNRALTGIAVEQDKNTQEVFAQVKQIYKTPPIKDFGGFNFSQILPDPSKPSKRSFIEDLLFNKVTLADAGFIKQYGDCLGDIAARDLICAQKFNGLTVLPPLLTDEMIAQYTSALLAGTITSGWTFGAGAALQIPFAMQMAYRFNGIGVTQNVLYENQKLIANQFNSAIGKIQDSLSSAAPALGKLQDVVNQNAQALNTLVKQLSSNFGAISSVLNDILSRLDPPEAEVQIDRLITGRLQSLQTYVTQQLIRAAEIRASANLAATKMSECVLGQSKRVDFCGKGYHLMSFPQSAPHGVVFLHVTYVPAQEKNFTTAPAICHDGKAHFPREGVFVSNGTHWFVTQRNFYEPQIITTDNTFVSGNCDVVIGIVNNTVYDPLQPELDSFKEELDKYFKNHTSPDVDLGDISGINASVVNIQKEIDRLNEVAKNLNESLIDLQELGKYEQYIKGGGGSDIDPYKEFGSSYQLLNFLPLDFFPDLNALVDTATALYEEELTGREHCSPHHTAIRQALVCWDELTKLIAWMSSNITSEQVRTIIVNHVNDTWGLKVRQSLWFHLSCLTFGQHTVQEFLVSFGVWIRTPAPYRPPNAPILSTLPEHTVIC

SEQ ID NO: 6729 - protein, 1365 aa, Artificial Sequence
  SARS-CoV-2/USA/WA8-UW5/2020__EPI_ISL_413486 spike protein (1-1211)(K986P_V987P) WhcAg construct
MFVFLVLLPLVSSQCVNLTTRTQLPPAYTNSFTRGVYYPDKVFRSSVLHSTQDLFLPFFSNVTWFHAIHVSGTNGTKRFDNPVLPFNDGVYFASTEKSNIIRGWIFGTTLDSKTQSLLIVNNATNVVIKVCEFQFCNDPFLGVYYHKNNKSWMESEFRVYSSANNCTFEYVSQPFLMDLEGKQGNFKNLREFVFKNIDGYFKIYSKHTPINLVRDLPQGFSALEPLVDLPIGINITRFQTLLALHRSYLTPGDSSSGWTAGAAAYYVGYLQPRTFLLKYNENGTITDAVDCALDPLSETKCTLKSFTVEKGIYQTSNFRVQPTESIVRFPNITNLCPFGEVFNATRFASVYAWNRKRISNCVADYSVLYNSASFSTFKCYGVSPTKLNDLCFTNVYADSFVIRGDEVRQIAPGQTGKIADYNYKLPDDFTGCVIAWNSNNLDSKVGGNYNYLYRLFRKSNLKPFERDISTEIYQAGSTPCNGVEGFNCYFPLQSYGFQPTNGVGYQPYRVVVLSFELLHAPATVCGPKKSTNLVKNKCVNFNFNGLTGTGVLTESNKKFLPFQQFGRDIADTTDAVRDPQTLEILDITPCSFGGVSVITPGTNTSNQVAVLYQDVNCTEVPVAIHADQLTPTWRVYSTGSNVFQTRAGCLIGAEYVNNSYECDIPIGAGICASYQTQTNSPRRARSVASQSIIAYTMSLGAENSVAYSNNSIAIPTNFTISVTTEILPVSMTKTSVDCTMYICGDSTECSNLLLQYGSFCTQLNRALTGIAVEQDKNTQEVFAQVKQIYKTPPIKDFGGFNFSQILPDPSKPSKRSFIEDLLFNKVTLADAGFIKQYGDCLGDIAARDLICAQKFNGLTVLPPLLTDEMIAQYTSALLAGTITSGWTFGAGAALQIPFAMQMAYRFNGIGVTQNVLYENQKLIANQFNSAIGKIQDSLSSTASALGKLQDVVNQNAQALNTLVKQLSSNFGAISSVLNDILSRLDPPEAEVQIDRLITGRLQSLQTYVTQQLIRAAEIRASANLAATKMSECVLGQSKRVDFCGKGYHLMSFPQSAPHGVVFLHVTYVPAQEKNFTTAPAICHDGKAHFPREGVFVSNGTHWFVTQRNFYEPQIITTDNTFVSGNCDVVIGIVNNTVYDPLQPELDSFKEELDKYFKNHTSPDVDLGDISGINASVVNIQKEIDRLNEVAKNLNESLIDLQELGKYEQYIKGGGGSDIDPYKEFGSSYQLLNFLPLDFFPDLNALVDTATALYEEELTGREHCSPHHTAIRQALVCWDELTKLIAWMSSNITSEQVRTIIVNHVNDTWGLKVRQSLWFHLSCLTFGQHTVQEFLVSFGVWIRTPAPYRPPNAPILSTLPEHTVIC

SEQ ID NO: 6730 - protein, 1365 aa, Artificial Sequence
  SARS-CoV-2/England/20102000506/2020__EPI_ISL_415147 spike protein (1-1211)(K986P_V987P) WhcAg construct
MFVFLVLLPLVSSQCVNLTTRTQLPPAYTNSFTRGVYYPDKVFRSSVLHSTQDLFLPFFSNVTWFHAIHVSGTNGTKRFDNPVLPFNDGVYFASTEKSNIIRGWIFGTTLDSKTQSLLIVNNATNVVIKVCEFQFCNDPFLGVYYHKNNKSWMESEFRVYSSANNCTFEYVSQPFLMDLEGKQGNFKNLREFVFKNIDGYFKIYSKHTPINLVRDLPQGFSALEPLVDLPIGINITRFQTLLALHRSYLTPGDSSSGWTAGAAAYYVGYLQPRTFLLKYNENGTITDAVDCALDPLSETKCTLKSFTVEKGIYQTSNFRVQPTESIVRFPNITNLCPFGEVFNATRFASVYAWNRKRISNCVADYSVLYNSASFSTFKCYGVSPTKLNDLCFTNVYADSFVIRGDEVRQIAPGQTGKIADYNYKLPDDFTGCVIAWNSNNLDSKVGGNYNYLYRLFRKSNLKPFERDISTEIYQAGSTPCNGVEGFNCYFPLQSYGFQPTNGVGYQPYRVVVLSFELLHAPATVCGPKKSTNLVKNKCVNFNFNGLTGTGVLTESNKKFLPFQQFGRDIADTTDAVRDPQTLEILDITPCSFGGVSVITPGTNTSNQVAVLYQGVNCTEVPVAIHADQLTPTWRVYSTGSNVFQTRAGCLIGAEHVNNSYECDIPIGAGICASYQTQTNSPRRARSVASQSIIAYTMSLGAENSVAYSNNSIAIPTNFTISVTTEILPVSMTKTSVDCTMYICGDSTECSNLLLQYGSFCTQLNRALTGIAVEQDKNTQEVFAQVKQIYKTPPIKDFGGFNFSQILPDPSKPSKRSFIEDLLFNKVTLADAGFIKQYGYCLGDIAARDLICAQKFNGLTVLPPLLTDEMIAQYTSALLAGTITSGWTFGAGAALQIPFAMQMAYRFNGIGVTQNVLYENQKLIANQFNSAIGKIQDSLSSTASALGKLQDVVNQNAQALNTLVKQLSSNFGAISSVLNDILSRLDPPEAEVQIDRLITGRLQSLQTYVTQQLIRAAEIRASANLAATKMSECVLGQSKRVDFCGKGYHLMSFPQSAPHGVVFLHVTYVPAQEKNFTTAPAICHDGKAHFPREGVFVSNGTHWFVTQRNFYEPQIITTDNTFVSGNCDVVIGIVNNTVYDPLQPELDSFKEELDKYFKNHTSPDVDLGDISGINASVVNIQKEIDRLNEVAKNLNESLIDLQELGKYEQYIKGGGGSDIDPYKEFGSSYQLLNFLPLDFFPDLNALVDTATALYEEELTGREHCSPHHTAIRQALVCWDELTKLIAWMSSNITSEQVRTIIVNHVNDTWGLKVRQSLWFHLSCLTFGQHTVQEFLVSFGVWIRTPAPYRPPNAPILSTLPEHTVIC

SEQ ID NO: 6731 - protein, 1365 aa, Artificial Sequence
  SARS-CoV-2/Belgium/VAG-03013/2020__EPI_ISL_415155 spike protein (1-1211)(K986P_V987P) WhcAg construct
MFVFLVLLPLVSSQCVNLTTRTQLPPAYTNSFTRGVYYPDKVFRSSVLHSTQDLFLPFFSNVTWFHAIHVSGTNGTKRFDNPVLPFNDGVYFASTEKSNIIRGWIFGTTLDSKTQSLLIVNNATNVVIKVCEFQFCNDPFLGVYYHKNNKSWMESEFRVYSSANNCTFEYVSQPFLMDLEGKQGNFKNLREFVFKNIDGYFKIYSKHTPINLVRDLPQGFSALEPLVDLPIGINITRFQTLLALHRSYLTPGDSSSGWTAGAAAYYVGYLQPRTFLLKYNENGTITDAVDCALDPLSETKCTLKSFTVEKGIYQTSNFRVQPTESIVRFPNITNLCPFGEVFNATRFASVYAWNRKRISNCVADYSVLYNSASFSTFKCYGVSPTKLNDLCFTNVYADSFVIRGDEVRQIAPGQTGKIADYNYKLPDDFTGCVIAWNSNNLDSKVGGNYNYLYRLFRKSNLKPFERDISTEIYQAGSTPCNGVEGFNCYFPLQSYGFQPTNGVGYQPYRVVVLSFELLHAPATVCGPKKSTNLVKNKCVNFNFNGLTGTGVLTESNKKFLPFQQFGRDIADTTDAVRDPQTLEILDITPCSFGGVSVITPGTNTSNQVAVLYQGVNCTEVPVAIHADQLTPTWRVYSTGSNVFQTRAGCLIGAEHVNNSYECDIPIGAGICASYQTQTNSPRRARSVASQSIIAYTMSLGAENSVAYSNNSIAIPTNFTISVTTEILPVSMTKTSVDCTMYICGDSTECSNLLLQYGSFCTQLNRALTGIAVEQDKNTQEVFAQVKQIYKTPPIKDFGGFNFSQILPDPSKPSKRSFIEDLLFNKVTLADAGFIKQYGDCLGDIAARDLICAQKFNGLTVLPPLLTDEMIAQYTSALLAGTITSGWTFGAGAALQIPFAMQMAYRFNGIGVTQNVLYENQKLIANQFNSAIGKIQDSLSSTATALGKLQDVVNQNAQALNTLVKQLSSNFGAISSVLNDILSRLDPPEAEVQIDRLITGRLQSLQTYVTQQLIRAAEIRASANLAATKMSECVLGQSKRVDFCGKGYHLMSFPQSAPHGVVFLHVTYVPAQEKNFTTAPAICHDGKAHFPREGVFVSNGTHWFVTQRNFYEPQIITTDNTFVSGNCDVVIGIVNNTVYDPLQPELDSFKEELDKYFKNHTSPDVDLGDISGINASVVNIQKEIDRLNEVAKNLNESLIDLQELGKYEQYIKGGGGSDIDPYKEFGSSYQLLNFLPLDFFPDLNALVDTATALYEEELTGREHCSPHHTAIRQALVCWDELTKLIAWMSSNITSEQVRTIIVNHVNDTWGLKVRQSLWFHLSCLTFGQHTVQEFLVSFGVWIRTPAPYRPPNAPILSTLPEHTVIC

SEQ ID NO: 6732 - protein, 1365 aa, Artificial Sequence
  SARS-CoV-2/Belgium/BC-03016/2020__EPI_ISL_415157 spike protein (1-1211)(K986P_V987P) WhcAg construct
MFVFLVLLPLVSSQCVNLTTRTQLPPAYTNSFTRGVYYPDKVFRSSVLHSTQDLFLPFFSNVTWFHAIHVSGTNGTKRFDNPVLPFNDGVYFASTEKSNIIRGWIFGTTLDSKTQSLLIVNNATNVVIKVCEFQFCNDPFLGVYYHKNNKSWMESEFRVYSSANNCTFEYVSQPFLMDLEGKQGNFKNLREFVFKNIDGYFKIYSKHTPINLVRDLPQGFSALEPLVDLPIGINITRFQTLLALHRSYLTPGDSSSGWTAGAAAYYVGYLQPRTFLLKYNENGTITDAVDCALDPLSETKCTLKSFTVEKGIYQTSNFRVQPTESIVRFPNITNLCPFGEVFNATRFASVYAWNRKRISNCVADYSVLYNSASFSTFKCYGVSPTKLNDLCFTNVYADSFVIRGDEVRQIAPGQTGKIADYNYKLPDDFTGCVIAWNSNNLDSKVGGNYNYLYRLFRKSNLKPFERDISTEIYQAGSTPCNGVEGFNCYFPLQSYGFQPTNGVGYQPYRVVVLSFELLHAPATVCGPKKSTNLVKNKCVNFNFNGLTGTGVLTESNKKFLPFQQFGRDIADTTDAVRDPQTLEILDITPCSFGGVSVITPGTNTSNQVAVLYQGVNCTEVPVAIHADQLTPTWRVYSTGSNVFQTRAGCLIGAEHVNNSYECDIPIGAGICASYQTQTNSPRRARSVASQSIIAYTMSLGAENSVAYSNNSIAIPTNFTISVTTEILPVSMTKTSVDCTMYICGDSTECSNLLLQYGSFCTQLNRALTGIAVEQDKNTQEVFAQVKQIYKTPPIKDFGGFNFSQILPDPSKPSKRSFIEDLLFNKVTLADAGFIKQYGDCLGDIAARDLICAQKFNGLTVLPPLLTDEMIAQYTSALLAGTITSGWTFGAGAALQIPFAMQMAYRFNGIGVTQNVLYENQKLIANQFNSAIGKIQDSLSSTAPALGKLQDVVNQNAQALNTLVKQLSSNFGAISSVLNDILSRLDPPEAEVQIDRLITGRLQSLQTYVTQQLIRAAEIRASANLAATKMSECVLGQSKRVDFCGKGYHLMSFPQSAPHGVVFLHVTYVPAQEKNFTTAPAICHDGKAHFPREGVFVSNGTHWFVTQRNFYEPQIITTDNTFVSGNCDVVIGIVNNTVYDPLQPELDSFKEELDKYFKNHTSPDVDLGDISGINASVVNIQKEIDRLNEVAKNLNESLIDLQELGKYEQYIKGGGGSDIDPYKEFGSSYQLLNFLPLDFFPDLNALVDTATALYEEELTGREHCSPHHTAIRQALVCWDELTKLIAWMSSNITSEQVRTIIVNHVNDTWGLKVRQSLWFHLSCLTFGQHTVQEFLVSFGVWIRTPAPYRPPNAPILSTLPEHTVIC

SEQ ID NO: 6733 - protein, 1365 aa, Artificial Sequence
  SARS-CoV-2/Germany/BavPat3/2020__EPI_ISL_414521 spike protein (1-1211)(K986P_V987P) WhcAg construct
MFVFLVLLPLVSSQCVNLTTRTQLPPAYTNSFTRGVYYPDKVFRSSVLHSTQDLFLPFFSNVTWFHAIHVSGTNGTKRFDNPVLPFNDGVYFASTEKSNIIRGWIFGTTLDSKTQSLLIVNNATNVVIKVCEFQFCNDPFLGVYYHKNNKSWMESEFRVYSSANNCTFEYVSQPFLMDLEGKQGNFKNLREFVFKNIDGYFKIYSKHTPINLVRDLPQGFSALEPLVDLPIGINITRFQTLLALHRSYLTPGDSSSGWTAGAAAYYVGYLQPRTFLLKYNENGTITDAVDCALDPLSETKCTLKSFTVEKGIYQTSNFRVQPTESIVRFPNITNLCPFGEVFNATRFASVYAWNRKRISNCVADYSVLYNSASFSTFKCYGVSPTKLNDLCFTNVYADSFVIRGDEVRQIAPGQTGKIADYNYKLPDDFTGCVIAWNSNNLDSKVGGNYNYLYRLFRKSNLKPFERDISTEIYQAGSTPCNGVEGFNCYFPLQSYGFQPTNGVGYQPYRVVVLSFELLHAPATVCGPKKSTNLVKNKCVNFNFNGLTGTGVLTESNKKFLPFQQFGRDIADTTDAVRDPQTLEILDITPCSFGGVSVITPGTNTSNQVAVLYQDVNCTEVPVAIHADQLTPTWRVYSTGSNVFQTRAGCLIGAEHVNNSYECDIPIGAGICASYQTQTNSPRRARSVASQSIIAYTMSLGAENSVAYSNNSIAIPTNFTISVTTEILPVSMTKTSVDCTMYICGDSTECSNLLLQYGSFCTQLNRALTGIAVEQDKNTQQVFAQVKQIYKTPPIKDFGGFNFSQILPDPSKPSKRSFIEDLLFNKVTLADAGFIKQYGDCLGDIAARDLICAQKFNGLTVLPPLLTDEMIAQYTSALLAGTITSGWTFGAGAALQIPFAMQMAYRFNGIGVTQNVLYENQKLIANQFNSAIGKIQDSLSSTASALGKLQDVVNQNAQALNTLVKQLSSNFGAISSVLNDILSRLDPPEAEVQIDRLITGRLQSLQTYVTQQLIRAAEIRASANLAATKMSECVLGQSKRVDFCGKGYHLMSFPQSAPHGVVFLHVTYVPAQEKNFTTAPAICHDGKAHFPREGVFVSNGTHWFVTQRNFYEPQIITTDNTFVSGNCDVVIGIVNNTVYDPLQPELDSFKEELDKYFKNHTSPDVDLGDISGINASVVNIQKEIDRLNEVAKNLNESLIDLQELGKYEQYIKGGGGSDIDPYKEFGSSYQLLNFLPLDFFPDLNALVDTATALYEEELTGREHCSPHHTAIRQALVCWDELTKLIAWMSSNITSEQVRTIIVNHVNDTWGLKVRQSLWFHLSCLTFGQHTVQEFLVSFGVWIRTPAPYRPPNAPILSTLPEHTVIC

SEQ ID NO: 6734 - protein, 1365 aa, Artificial Sequence
  SARS-CoV-2/France/HF1805/2020__EPI_ISL_414628 spike protein (1-1211)(K986P_V987P) WhcAg construct
MFVFLVLLPLVSSQCVNLTTRTQLPPAYTNSFTRGVYYPDKVFRSSVLHSTQDLFLPFFSNVTWFHAIHVSGTNGTKRFDNPVLPFNDGVYFASTEKSNIIRGWIFGTTLDSKTQSLLIVNNATNVVIKVCEFQFCNDPFLGVYYHKNNKSWMESEFRVYSSANNCTFEYVSQPFLMDLEGKQGNFKNLREFVFKNIDGYFKIYSKHTPINLVRDLPQGFSALEPLVDLPIGINITRFQTLLALHRSYLTPGDSSSGWTAGAAAYYVGYLQPRTFLLKYNENGTITDAVDCALDPLSETKCTLKSFTVEKGIYQTSNFRVQPTESIVRFPNITNLCPFGEVFNATRFASVYAWNRKRISNCVADYSVLYNSASFSTFKCYGVSPTKLNDLCFTNVYADSFVIRGDEVRQIAPGQTGKIADYNYKLPDDFTGCVIAWNSNNLDSKVGGNYNYLYRLFRKSNLKPFERDISTEIYQAGSTPCNGVEGFNCYFPLQSYGFQPTNGVGYQPYRVVVLSFELLHAPATVCGPKKSTNLVKNKCVNFNFNGLTGTGVLTESNKKFLPFQQFGRDIADTTDAVRDPQTLEILDITPCSFGGVSVITPGTNTSNQVAVLYQGVNCTEVPVAIHADQLTPTWRVYSTGSNVFQTRAGCLIGAEHVNNSYECDIPIGAGICASYQTQTNSPRRARSVASQSIIAYTMSLGAENSVAYSNNSIAIPTNFTISVTTEILPVSMTKTSVDCTMYICGDSTECSNLLLQYGSFCTQLNRALTGIAVEQDKNTQEVFAQVKQIYKTPPIKDFGGFNFSQILPDPSKPSKRSFIEDLLFNKVTLADAGFIKQYGDCLGDIAARDLICAQKFNGLTVLPPLLTDEMIAQYTSALLAGTITSGWTFGAGAALQIPFAMQMAYRFNGIGVTQNVLYENQKLIANQFNSAIGKIQDSLSSTASALGKLQDVVNQNAQALNTLVKQLSSNFGAISSVLNDILSRLDPPEAEVQIDRLITGRLQSLQTYVTQQLIRAAEIRASANLAATKMSECVLGQSKRVDFCGKGYHLMSFPQSAPHGVVFLHVTYVPAQEKNFTTAPAICHDGKAHFPREGVFVSNGTHWFVTQRNFYEPQIITTDNTFVSGNCDVVIGVVNNTVYDPLQPELDSFKEELDKYFKNHTSPDVDLGDISGINASVVNIQKEIDRLNEVAKNLNESLIDLQELGKYEQYIKGGGGSDIDPYKEFGSSYQLLNFLPLDFFPDLNALVDTATALYEEELTGREHCSPHHTAIRQALVCWDELTKLIAWMSSNITSEQVRTIIVNHVNDTWGLKVRQSLWFHLSCLTFGQHTVQEFLVSFGVWIRTPAPYRPPNAPILSTLPEHTVIC

SEQ ID NO: 6735 - protein, 1365 aa, Artificial Sequence
  SARS-CoV-2/Netherlands/ZuidHolland_9/2020__EPI_ISL_414445 spike protein (1-1211)(K986P_V987P) WhcAg construct
MFVFLVLLPLVSSQCVNLTTRTQLPPAYTNSFTRGVYYPDKVFRSSVLHSTQDLFLPFFSNVTWFHAIHVSGTNGTKRFDNPVLPFNDGVYFASTEKSNIIRGWIFGTTLDSKTQSLLIVNNATNVVIKVCEFQFCNDPFLGVYYHKNNKSWMESEFRVYSSANNCTFEYVSQPFLMDLEGKQGNFKNLREFVFKNIDGYFKIYSKHTPINLVRDLPQGFSALEPLVDLPIGINITRFQTLLALHRSYLTPGDSSSGWTAGAAAYYVGYLQPRTFLLKYNENGTITDAVDCALDPLSETKCTLKSFTVEKGIYQTSNFRVQPTESIVRFPNITNLCPFGEVFNATRFASVYAWNRKRISNCVADYSVLYNSASFSTFKCYGVSPTKLNDLCFTNVYADSFVIRGDEVRQIAPGQTGKIADYNYKLPDDFTGCVIAWNSNNLDSKVGGNYNYLYRLFRKSNLKPFERDISTEIYQAGSTPCNGVEGFNCYFPLQSYGFQPTNGVGYQPYRVVVLSFELLHAPATVCGPKKSTNLVKNKCVNFNFNGLTGTGVLTESNKKFLPFQQFGRDIADTTDAVRDPQTLEILDITPCSFGGVSVITPGTNTSNQVAVLYQGVNCTEVPVAIHADQLTPTWRVYSTGSNVFQTRAGCLIGAEHVNNSYECDIPIGAGICASYQTQTNSPRRARSVASQSIIAYTMSLGAENSVAYSNNSIAIPTNFTISVTTEILPVSMTKTSVDCTMYICGDSTECSNLLLQYGSFCTQLNRALTGIAVEQDKNTQEVFAQVKQIYKTPPIKDFGGFNFSQILPDPSKPSKRSFIEDLLFNKVTLADAGFIKQYGDCLGDIAARDLICVQKFNGLTVLPPLLTDEMIAQYTSALLAGTITSGWTFGAGAALQIPFAMQMAYRFNGIGVTQNVLYENQKLIANQFNSAIGKIQDSLSSTASALGKLQDVVNQNAQALNTLVKQLSSNFGAISSVLNDILSRLDPPEAEVQIDRLITGRLQSLQTYVTQQLIRAAEIRASANLAATKMSECVLGQSKRVDFCGKGYHLMSFPQSAPHGVVFLHVTYVPAQEKNFTTAPAICHDGKAHFPREGVFVSNGTHWFVTQRNFYEPQIITTDNTFVSGNCDVVIGIVNNTVYDPLQPELDSFKEELDKYFKNHTSPDVDLGDISGINASVVNIQKEIDRLNEVAKNLNESLIDLQELGKYEQYIKGGGGSDIDPYKEFGSSYQLLNFLPLDFFPDLNALVDTATALYEEELTGREHCSPHHTAIRQALVCWDELTKLIAWMSSNITSEQVRTIIVNHVNDTWGLKVRQSLWFHLSCLTFGQHTVQEFLVSFGVWIRTPAPYRPPNAPILSTLPEHTVIC

SEQ ID NO: 6736 - protein, 1365 aa, Artificial Sequence
  SARS-CoV-2/Finland/FIN03032020A/2020__EPI_ISL_413602 spike protein (1-1211)(K986P_V987P) WhcAg construct
MFVFLVLLPLVSSQCVNLTTRTQLPPAYTNSFTRGVYYPDKVFRSSVLHSTQDLFLPFFSNVTWFHAIHVSGTNGTKRFDNPVLPFNDGVYFASTEKSNIIRGWIFGTTLDSKTQSLLIVNNATNVVIKVCEFQFCNDPFLGVYYHKNNKSWMESEFRVYSSANNCTFEYVSQPFLMDLEGKQGNFKNLREFVFKNIDGYFKIYSKHTPINLVRDLPQGFSALEPLVDLPIGINITRFQTLLALHRSYLTPGDSSSGWTAGAAAYYVGYLQPRTFLLKYNENGTITDAVDCALDPLSETKCTLKSFTVEKGIYQTSNFRVQPTESIVRFPNITNLCPFGEVFNATRFASVYAWNRKRISNCVADYSVLYNSASFSTFKCYGVSPTKLNDLCFTNVYADSFVIRGDEVRQIAPGQTGKIADYNYKLPDDFTGCVISWNSNNLDSKVGGNYNYLYRLFRKSNLKPFERDISTEIYQAGSTPCNGVEGFNCYFPLQSYGFQPTNGVGYQPYRVVVLSFELLHAPATVCGPKKSTNLVKNKCVNFNFNGLTGTGVLTESNKKFLPFQQFGRDIADTTDAVRDPQTLEILDITPCSFGGVSVITPGTNTSNQVAVLYQGVNCTEVPVAIHADQLTPTWRVYSTGSNVFQTRAGCLIGAEHVNNSYECDIPIGAGICASYQTQTNSPRRARSVASQSIIAYTMSLGAENSVAYSNNSIAIPTNFTISVTTEILPVSMTKTSVDCTMYICGDSTECSNLLLQYGSFCTQLNRALTGIAVEQDKNTQEVFAQVKQIYKTPPIKDFGGFNFSQILPDPSKPSKRSFIEDLLFNKVTLADAGFIKQYGDCLGDIAARDLICAQKFNGLTVLPPLLTDEMIAQYTSALLAGTITSGWTFGAGAALQIPFAMQMAYRFNGIGVTQNVLYENQKLIANQFNSAIGKIQDSLSSTASALGKLQDVVNQNAQALNTLVKQLSSNFGAISSVLNDILSRLDPPEAEVQIDRLITGRLQSLQTYVTQQLIRAAEIRASANLAATKMSECVLGQSKRVDFCGKGYHLMSFPQSAPHGVVFLHVTYVPAQEKNFTTAPAICHDGKAHFPREGVFVSNGTHWFVTQRNFYEPQIITTDNTFVSGNCDVVIGIVNNTVYDPLQPELDSFKEELDKYFKNHTSPDVDLGDISGINASVVNIQKEIDRLNEVAKNLNESLIDLQELGKYEQYIKGGGGSDIDPYKEFGSSYQLLNFLPLDFFPDLNALVDTATALYEEELTGREHCSPHHTAIRQALVCWDELTKLIAWMSSNITSEQVRTIIVNHVNDTWGLKVRQSLWFHLSCLTFGQHTVQEFLVSFGVWIRTPAPYRPPNAPILSTLPEHTVIC

SEQ ID NO: 6737 - protein, 1365 aa, Artificial Sequence
  SARS-CoV-2/France/GE1977/2020__EPI_ISL_414632 spike protein (1-1211)(K986P_V987P) WhcAg construct
MFVFLVLLPLVSSQCVNLTTRTQLPPAYTNSFTRGVYYPDKVFRSSVLHSTQDLFLPFFSNVTWFHAIHVSGTNGTKRFDNPVLPFNDGVYFASTEKSNIIRGWIFGTTLDSKTQSLLIVNNATNVVIKVCEFQFCNDPFLGVYYHKNNKSWMESEFRVYSSANNCTFEYVSQPFLMDLEGKQGNFKNLREFVFKNIDGYFKIYSKHTPINLVRDLPQGFSALEPLVDLPIGINITRFQTLLALHRSYLTPGDSSSGWTAGAAAYYVGYLQPRTFLLKYNENGTITDAVDCALDPLSETKCTLKSFTVEKGIYQTSNFRVQPTESIVRFPNITNLCPFGEVFNATRFASVYAWNRKRISNCVADYSVLYNSASFSTFKCYGVSPTKLNDLCFTNVYADSFVIRGDEVRQIAPGQTGKIADYNYKLPDDFTGCVIAWNSNNLDSKVGGNYNYLYRLFRKSNLKPFERDISTEIYQAGSTPCNGVEGFNCYFPLQSYGFQPTNGVGYQPYRVVVLSFELLHAPATVCGPKKSTNLVKNKCVNFNFNGLTGTGVLTESNKKFLPFQQFGRDIADTTDAVRDPQTLEILDITPCSFGGVSVITPGTNTSNQVAVLYQGVNCTEVPVAIHADQLTPTWRVYSTGSNVFQTRAGCLIGAEHVNNSYECDIPIGAGICASYQTQTNSPRRARSVASQSIIAYTMSLGAENSVAYSNNSIAIPTNFTISVTTEILPVSMTKTSVDCTMYICGDSTECSNLLLQYGSFCTQLNRALTGIAVEQDKNTQEVFAQVKQIYKTPPIKDFGGFNFSQILPDPSKPSKRSFIEDLLFNKVTLADAGFIKQYGDCLGDIAARDLICAQKFNGLTVLPPLLTDEMIAQYTSALLAGTITSGWTFGAGAALQIPFAMQMAYRFNGIGVTQNVLYENQKLIANQFNSAIGKIQDSLFSTASALGKLQDVVNQNAQALNTLVKQLSSNFGAISSVLNDILSRLDPPEAEVQIDRLITGRLQSLQTYVTQQLIRAAEIRASANLAATKMSECVLGQSKRVDFCGKGYHLMSFPQSAPHGVVFLHVTYVPAQEKNFTTAPAICHDGKAHFPREGVFVSNGTHWFVTQRNFYEPQIITTDNTFVSGNCDVVIGIVNNTVYDPLQPELDSFKEELDKYFKNHTSPDVDLGDISGINASVVNIQKEIDRLNEVAKNLNESLIDLQELGKYEQYIKGGGGSDIDPYKEFGSSYQLLNFLPLDFFPDLNALVDTATALYEEELTGREHCSPHHTAIRQALVCWDELTKLIAWMSSNITSEQVRTIIVNHVNDTWGLKVRQSLWFHLSCLTFGQHTVQEFLVSFGVWIRTPAPYRPPNAPILSTLPEHTVIC

SEQ ID NO: 6738 - protein, 1365 aa, Artificial Sequence
  SARS-CoV-2/Finland/FIN-313/2020__EPI_ISL_414641 spike protein (1-1211)(K986P_V987P) WhcAg construct
MFVFLVLLPLVSSQCVNLTTRTQLPPAYTNSFTRGVYYPDKVFRSSVLHSTQDLFLPFFSNVTWFHAIHVSGTNGTKRFDNPVLPFNDGVYFASTEKSNIIRGWIFGTTLDSKTQSLLIVNNATNVVIKVCEFQFCNDPFLGVYYHKNNKSWMESEFRVYSSANNCTFEYVSQPFLMDLEGKQGNFKNLREFVFKNIDGYFKIYSKHTPINLVRDLPQGFSALEPLVDLPIGINITRFKTLLALHRSYLTPGDSSSGWTAGAAAYYVGYLQPRTFLLKYNENGTITDAVDCALDPLSETKCTLKSFTVEKGIYQTSNFRVQPTESIVRFPNITNLCPFGEVFNATRFASVYAWNRKRISNCVADYSVLYNSASFSTFKCYGVSPTKLNDLCFTNVYADSFVIRGDEVRQIAPGQTGKIADYNYKLPDDFTGCVIAWNSNNLDSKVGGNYNYLYRLFRKSNLKPFERDISTEIYQAGSTPCNGVEGFNCYFPLQSYGFQPTNGVGYQPYRVVVLSFELLHAPATVCGPKKSTNLVKNKCVNFNFNGLTGTGVLTESNKKFLPFQQFGRDIADTTDAVRDPQTLEILDITPCSFGGVSVITPGTNTSNQVAVLYQGVNCTEVPVAIHADQLTPTWRVYSTGSNVFQTRAGCLIGAEHVNNSYECDIPIGAGICASYQTQTNSPRRARSVASQSIIAYTMSLGAENSVAYSNNSIAIPTNFTISVTTEILPVSMTKTSVDCTMYICGDSTECSNLLLQYGSFCTQLNRALTGIAVEQDKNTQEVFAQVKQIYKTPPIKDFGGFNFSQILPDPSKPSKRSFIEDLLFNKVTLADAGFIKQYGDCLGDIAARDLICAQKFNGLTVLPPLLTDEMIAQYTSALLAGTITSGWTFGAGAALQIPFAMQMAYRFNGIGVTQNVLYENQKLIANQFNSAIGKIQDSLSSTASALGKLQDVVNQNAQALNTLVKQLSSNFGAISSVLNDILSRLDPPEAEVQIDRLITGRLQSLQTYVTQQLIRAAEIRASANLAATKMSECVLGQSKRVDFCGKGYHLMSFPQSAPHGVVFLHVTYVPAQEKNFTTAPAICHDGKAHFPREGVFVSNGTHWFVTQRNFYEPQIITTDNTFVSGNCDVVIGIVNNTVYDPLQPELDSFKEELDKYFKNHTSPDVDLGDISGINASVVNIQKEIDRLNEVAKNLNESLIDLQELGKYEQYIKGGGGSDIDPYKEFGSSYQLLNFLPLDFFPDLNALVDTATALYEEELTGREHCSPHHTAIRQALVCWDELTKLIAWMSSNITSEQVRTIIVNHVNDTWGLKVRQSLWFHLSCLTFGQHTVQEFLVSFGVWIRTPAPYRPPNAPILSTLPEHTVIC

SEQ ID NO: 6739 - protein, 1365 aa, Artificial Sequence
  SARS-CoV-2/Netherlands/ZuidHolland_2/2020__EPI_ISL_414556 spike protein (1-1211)(K986P_V987P) WhcAg construct
MFVFLVLLPLVSSQCVNLTTRTQLPPAYTNSFTRGVYYPDKVFRSSVLHSTQDLFLPFFSNVTWFHAIHVSGTNGTKRFDNPVLPFNDGVYFASTEKSNIIRGWIFGTTLDSKTQSLLIVNNATNVVIKVCEFQFCNDPFLGVYYHKNNKSWMESEFRVYSSANNCTFEYVSQPFLMDLEGKQGNFKNLREFVFKNIDGYFKIYSKHTPINLVRDLPQGFSALEPLVDLPIGINITRFQTLLALHRSYLTPGDSSSGWTAGAAAYYVGYLQPRTFLLKYNENGTITDAVDCALDPLSETKCTLKSFTVEKGIYQTSNFRVQPTESIVRFPNITNLCPFGEVFNATRFASVYAWNRKRISNCVADYSVLYNSASFSTFKCYGVSPTKLNDLCFTNVYADSFVIRGDEVRQIAPGQTGKIADYNYKLPDDFTGCVIAWNSNNLDSKVGGNYNYLYRLFRKSNLKPFERDISTEIYQAGSTPCNGVEGFNCYFPLQSYGFQPTNGVGYQPYRVVVLSFELLHAPATVCGPKKSTNLVKNKCVNFNFNGLTGTGVLTESNKKFLPFQQFGRDIADTTDAVRDPQTLEILDITPCSFGGVSVITPGTNTSNQVAVLYQGVNCTEVPVAIHADQLTPTWRVYSTGSNVFQTRAGCLIGAEHVNNSYECDIPIGAGICASYQTQTNSPRRARSVASQSIIAYTMSLGAENSVAYSNNSIAIPTNFTISVTTEILPVSMTKTSVDCTMYICGDSTECSNLLLQYGSFCTQLNRALTGIALEQDKNTQEVFAQVKQIYKTPPIKDFGGFNFSQILPDPSKPSKRSFIEDLLFNKVTLADAGFIKQYGDCLGDIAARDLICAQKFNGLTVLPPLLTDEMIAQYTSALLAGTITSGWTFGAGAALQIPFAMQMAYRFNGIGVTQNVLYENQKLIANQFNSAIGKIQDSLSSTASALGKLQDVVNQNAQALNTLVKQLSSNFGAISSVLNDILSRLDPPEAEVQIDRLITGRLQSLQTYVTQQLIRAAEIRASANLAATKMSECVLGQSKRVDFCGKGYHLMSFPQSAPHGVVFLHVTYVPAQEKNFTTAPAICHDGKAHFPREGVFVSNGTHWFVTQRNFYEPQIITTDNTFVSGNCDVVIGIVNNTVYDPLQPELDSFKEELDKYFKNHTSPDVDLGDISGINASVVNIQKEIDRLNEVAKNLNESLIDLQELGKYEQYIKGGGGSDIDPYKEFGSSYQLLNFLPLDFFPDLNALVDTATALYEEELTGREHCSPHHTAIRQALVCWDELTKLIAWMSSNITSEQVRTIIVNHVNDTWGLKVRQSLWFHLSCLTFGQHTVQEFLVSFGVWIRTPAPYRPPNAPILSTLPEHTVIC

SEQ ID NO: 6740 - protein, 1365 aa, Artificial Sequence
  SARS-CoV-2/USA/WA-UW31/2020__EPI_ISL_414618 spike protein (1-1211)(K986P_V987P) WhcAg construct
MFVFLVLLPLVSSQCVNLTTRTQLPPAYTNSFTRGVYYPDKVFRSSVLHSTQDLFLPFFSNVTWFHAIHVSGTNGTKRFDNPVLPFNDGVYFASTEKSNIIRGWIFGTTLDSKTQSLLIVNNATNVVIKVCEFQFCNDPFLGVYYHKNNKSWMESEFRVYSSANNCTFEYVSQPFLMDLEGKQGNFKNLREFVFKNIDGYFKIYSKHTPINLVRDLPQGFSALEPLVDLPIGINITRFQTLLALHRSYLTPGDSSSGWTAGAAAYYVGYLQPRTFLLKYNENGTITDAVDCALDPLSETKCTLKSFTVEKGIYQTSNFRVQPTESIVRFPNITNLCPFGEVFNATRFASVYAWNRKRISNCVADYSVLYNSASFSTFKCYGVSPTKLNDLCFTNVYADSFVIRGDEVRQIAPGQTGKIADYNYKLPDDFTGCVIAWNSNNLDSKVGGNYNYLYRLFRKSNLKPFERDISTEIYQAGSTPCNGAEGFNCYFPLQSYGFQPTNGVGYQPYRVVVLSFELLHAPATVCGPKKSTNLVKNKCVNFNFNGLTGTGVLTESNKKFLPFQQFGRDIADTTDAVRDPQTLEILDITPCSFGGVSVITPGTNTSNQVAVLYQDVNCTEVPVAIHADQLTPTWRVYSTGSNVFQTRAGCLIGAEHVNNSYECDIPIGAGICASYQTQTNSPRRARSVASQSIIAYTMSLGAENSVAYSNNSIAIPTNFTISVTTEILPVSMTKTSVDCTMYICGDSTECSNLLLQYGSFCTQLNRALTGIAVEQDKNTQEVFAQVKQIYKTPPIKDFGGFNFSQILPDPSKPSKRSFIEDLLFNKVTLADAGFIKQYGDCLGDIAARDLICAQKFNGLTVLPPLLTDEMIAQYTSALLAGTITSGWTFGAGAALQIPFAMQMAYRFNGIGVTQNVLYENQKLIANQFNSAIGKIQDSLSSTASALGKLQDVVNQNAQALNTLVKQLSSNFGAISSVLNDILSRLDPPEAEVQIDRLITGRLQSLQTYVTQQLIRAAEIRASANLAATKMSECVLGQSKRVDFCGKGYHLMSFPQSAPHGVVFLHVTYVPAQEKNFTTAPAICHDGKAHFPREGVFVSNGTHWFVTQRNFYEPQIITTDNTFVSGNCDVVIGIVNNTVYDPLQPELDSFKEELDKYFKNHTSPDVDLGDISGINASVVNIQKEIDRLNEVAKNLNESLIDLQELGKYEQYIKGGGGSDIDPYKEFGSSYQLLNFLPLDFFPDLNALVDTATALYEEELTGREHCSPHHTAIRQALVCWDELTKLIAWMSSNITSEQVRTIIVNHVNDTWGLKVRQSLWFHLSCLTFGQHTVQEFLVSFGVWIRTPAPYRPPNAPILSTLPEHTVIC

SEQ ID NO: 6741 - protein, 1365 aa, Artificial Sequence
  SARS-CoV-2/South Korea/SNU01/2020__EPI_ISL_411929 spike protein (1-1211)(K986P_V987P) WhcAg construct
MFVFLVLLPLVSSQCVNLTTRTQLPPAYTNSFTRGVYYPDKVFRSSVLHSTQDLFLPFFSNVTWFHAIHVSGTNGTKRFDNPVLPFNDGVYFASTEKSNIIRGWIFGTTLDSKTQSLLIVNNATNVVIKVCEFQFCNDPFLGVYYHKNNKSWMESEFRVYSSANNCTFEYVSQPFLMDLEGKQGNFKNLREFVFKNIDGYFKIYSKHTPINLVRDLPQGFWALEPLVDLPIGINITRFQTLLALHRSYLTPGDSSSGWTAGAAAYYVGYLQPRTFLLKYNENGTITDAVDCALDPLSETKCTLKSFTVEKGIYQTSNFRVQPTESIVRFPNITNLCPFGEVFNATRFASVYAWNRKRISNCVADYSVLYNSASFSTFKCYGVSPTKLNDLCFTNVYADSFVIRGDEVRQIAPGQTGKIADYNYKLPDDFTGCVIAWNSNNLDSKVGGNYNYLYRLFRKSNLKPFERDISTEIYQAGSTPCNGVEGFNCYFPLQSYGFQPTNGVGYQPYRVVVLSFELLHAPATVCGPKKSTNLVKNKCVNFNFNGLTGTGVLTESNKKFLPFQQFGRDIADTTDAVRDPQTLEILDITPCSFGGVSVITPGTNTSNQVAVLYQDVNCTEVPVAIHADQLTPTWRVYSTGSNVFQTRAGCLIGAEHVNNSYECDIPIGAGICASYQTQTNSPRRARSVASQSIIAYTMSLGAENSVAYSNNSIAIPTNFTISVTTEILPVSMTKTSVDCTMYICGDSTECSNLLLQYGSFCTQLNRALTGIAVEQDKNTQEVFAQVKQIYKTPPIKDFGGFNFSQILPDPSKPSKRSFIEDLLFNKVTLADAGFIKQYGDCLGDIAARDLICAQKFNGLTVLPPLLTDEMIAQYTSALLAGTITSGWTFGAGAALQIPFAMQMAYRFNGIGVTQNVLYENQKLIANQFNSAIGKIQDSLSSTASALGKLQDVVNQNAQALNTLVKQLSSNFGAISSVLNDILSRLDPPEAEVQIDRLITGRLQSLQTYVTQQLIRAAEIRASANLAATKMSECVLGQSKRVDFCGKGYHLMSFPQSAPHGVVFLHVTYVPAQEKNFTTAPAICHDGKAHFPREGVFVSNGTHWFVTQRNFYEPQIITTDNTFVSGNCDVVIGIVNNTVYDPLQPELDSFKEELDKYFKNHTSPDVDLGDISGINASVVNIQKEIDRLNEVAKNLNESLIDLQELGKYEQYIKGGGGSDIDPYKEFGSSYQLLNFLPLDFFPDLNALVDTATALYEEELTGREHCSPHHTAIRQALVCWDELTKLIAWMSSNITSEQVRTIIVNHVNDTWGLKVRQSLWFHLSCLTFGQHTVQEFLVSFGVWIRTPAPYRPPNAPILSTLPEHTVIC

SEQ ID NO: 6742 - protein, 1365 aa, Artificial Sequence
  SARS-CoV-2/China/WF0004/2020__EPI_ISL_413694 spike protein (1-1211)(K986P_V987P) WhcAg construct
MFVFLVLLPLVSSQCVNLTTRTQLPPAYTNSFTRGVYYPDKVFRSSVLHSTQDLFLPFFSNVTWFHAIHVSGTNGTKRFDNPVLPFNDGVYFASTEKSNIIRGWIFGTTLDSKTQSLLIVNNATNVVIKVCEFQFCNDPFLGVYYHKNNKSWTESEFRVYSSANNCTFEYVSQPFLMDLEGKQGNFKNLREFVFKNIDGYFKIYSKHTPINLVRDLPQGFSALEPLVDLPIGINITRFQTLLALHRSYLTPGDSSSGWTAGAAAYYVGYLQPRTFLLKYNENGTITDAVDCALDPLSETKCTLKSFTVEKGIYQTSNFRVQPTESIVRFPNITNLCPFGEVFNATRFASVYAWNRKRISNCVADYSVLYNSASFSTFKCYGVSPTKLNDLCFTNVYADSFVIRGDEVRQIAPGQTGKIADYNYKLPDDFTGCVIAWNSNNLDSKVGGNYNYLYRLFRKSNLKPFERDISTEIYQAGSTPCNGVEGFNCYFPLQSYGFQPTNGVGYQPYRVVVLSFELLHAPATVCGPKKSTNLVKNKCVNFNFNGLTGTGVLTESNKKFLPFQQFGRDIADTTDAVRDPQTLEILDITPCSFGGVSVITPGTNTSNQVAVLYQDVNCTEVPVAIHADQLTPTWRVYSTGSNVFQTRAGCLIGAEHVNNSYECDIPIGAGICASYQTQTNSPRRARSVASQSIIAYTMSLGAENSVAYSNNSIAIPTNFTISVTTEILPVSMTKTSVDCTMYICGDSTECSNLLLQYGSFCTQLNRALTGIAVEQDKNTQEVFAQVKQIYKTPPIKDFGGFNFSQILPDPSKPSKRSFIEDLLFNKVTLADAGFIKQYGDCLGDIAARDLICAQKFNGLTVLPPLLTDEMIAQYTSALLAGTITSGWTFGAGAALQIPFAMQMAYRFNGIGVTQNVLYENQKLIANQFNSAIGKIQDSLSSTASALGKLQDVVNQNAQALNTLVKQLSSNFGAISSVLNDILSRLDPPEAEVQIDRLITGRLQSLQTYVTQQLIRAAEIRASANLAATKMSECVLGQSKRFDFCGKGYHLMSFPQSAPHGVVFLHVTYVPAQEKNFTTAPAICHDGKAHFPREGVFVSNGTHWFVTQRNFYEPQIITTDNTFVSGNCDVVIGIVNNTVYDPLQPELDSFKEELDKYFKNHTSPDVDLGDISGINASVVNIQKEIDRLNEVAKNLNESLIDLQELGKYEQYIKGGGGSDIDPYKEFGSSYQLLNFLPLDFFPDLNALVDTATALYEEELTGREHCSPHHTAIRQALVCWDELTKLIAWMSSNITSEQVRTIIVNHVNDTWGLKVRQSLWFHLSCLTFGQHTVQEFLVSFGVWIRTPAPYRPPNAPILSTLPEHTVIC

SEQ ID NO: 6743 - protein, 1365 aa, Artificial Sequence
  SARS-CoV-2/China/WF0028/2020__EPI_ISL_413791 spike protein (1-1211)(K986P_V987P) WhcAg construct
MFVFLVLLPLVSSQCVNLTTRTQLPPAYTNSFTRGVYYPDKVFRSSVLHSTQDLFLPFFSNVTWFHAIHVSGTNGTKRFDNPVLPFNDGVYFASTEKSNIIRGWIFGTTLDSKTQSLLIVNNATNVVIKVCEFQFCNDPFLGVYYHKNNKSWMESEFRVYSSANNCTFEYVSQPFLMDLEGKQGNFKNLREFVFKNIDGYFKIYSKHTPINLVRDLPQGFSALEPLVDLPIGINITRFQTLLALHRSYLTPGDSSSGWTAGAAAYYVGYLQPRTFLLKYNENGTITDAVDCALDPLSETKCTLKSFTVEKGIYQTSNFRVQPTESIVRFPNITNLCPFGEVFNATRFASVYAWNRKRISNCVADYSVLYNSASFSTFKCYGVSPTKLNDLCFTNVYADSFVIRGDEVRQIAPGQTGKIADYNYKLPDDFTGCVIAWNSNNLDSKVGGNYNYLYRLFRKSNLKPFERDISTEIYQAGSTPCNGVEGFNCYFPLQSYGFQPTNGVGYQPYRVVVLSFELLHAPATVCGPKKSTNLVKNKCVNFNFNGLTGTGVLTESNKKFLPFQQFGRDIADTTDAVRDPQTLEILDITPCSFGGVSVITPGTNTSNQVAVLYQDVNCTEVPVAIHADQLTPTWRVYSTGSNVFQTRAGCLIGAEHVNNSYECDIPIGAGICASYQTQTNSPRRARSVASQSIIAYTMSLGAENSVAYSNNSIAIPTNFTISVTTEILPVSMTKTSVDCTMYICGDSTECSNLLLQYGSFCTQLNRALTGIAVEQDKNTQEVFAQVKQIYKTPPIKDFGGFNFSQILPDPSKPSKRSFIEDLLFNKVTLADAGFIKQYGDCLGDIAARDLICAQKFNGLTVLPPLLTDEMIAQYTSALLAGTITSGWTFGAGAALQIPFAMQMAYRFNGIGVTQNVLYENQKLIANQFNSAIGKIQDSLSSTASALGKLQDVVNQNAQALNTLVKQLSSNFGAISSVLNDILSRLDPPEAEVQIDRLITGRLQSLQTYVTQQLIRAAEIRASANLAATKMSECVLGQSKRVDFCGKGYHLMSFPQSAPHGVVFLHVTYVPAQEKNFTTAPAICHDGKAHFPREGVFVSNGTHWFVTQRNFYEPQIITTDNTFVSGNCDVVIGIVNNTVYDPLQPELESFKEELDKYFKNHTSPDVDLGDISGINASVVNIQKEIDRLNEVAKNLNESLIDLQELGKYEQYIKGGGGSDIDPYKEFGSSYQLLNFLPLDFFPDLNALVDTATALYEEELTGREHCSPHHTAIRQALVCWDELTKLIAWMSSNITSEQVRTIIVNHVNDTWGLKVRQSLWFHLSCLTFGQHTVQEFLVSFGVWIRTPAPYRPPNAPILSTLPEHTVIC

SEQ ID NO: 6744 - protein, 1365 aa, Artificial Sequence
  SARS-CoV-2/2019-nCoV/USA-CruiseA-18/2020__MT159716.1 spike protein (1-1211)(K986P_V987P) WhcAg construct
MFVFLVLLPLVSSQCVNLTTRTQLPPAYTNSFTRGVYYPDKVFRSSVLHSTQDLFLPFFSNVTWFHAIHVSGTNGTKRFDNPVLPFNDGVYFASTEKSNIIRGWIFGTTLDSKTQSLLIVNNATNVVIKVCEFQFCNDPFLGVYYHKNNKSWMESELRVYSSANNCTFEYVSQPFLMDLEGKQGNFKNLREFVFKNIDGYFKIYSKHTPINLVRDLPQGFSALEPLVDLPIGINITRFQTLLALHRSYLTPGDSSSGWTAGAAAYYVGYLQPRTFLLKYNENGTITDAVDCALDPLSETKCTLKSFTVEKGIYQTSNFRVQPTESIVRFPNITNLCPFGEVFNATRFASVYAWNRKRISNCVADYSVLYNSASFSTFKCYGVSPTKLNDLCFTNVYADSFVIRGDEVRQIAPGQTGKIADYNYKLPDDFTGCVIAWNSNNLDSKVGGNYNYLYRLFRKSNLKPFERDISTEIYQAGSTPCNGVEGFNCYFPLQSYGFQPTNGVGYQPYRVVVLSFELLHAPATVCGPKKSTNLVKNKCVNFNFNGLTGTGVLTESNKKFLPFQQFGRDIADTTDAVRDPQTLEILDITPCSFGGVSVITPGTNTSNQVAVLYQDVNCTEVPVAIHADQLTPTWRVYSTGSNVFQTRAGCLIGAEHVNNSYECDIPIGAGICASYQTQTNSPRRARSVASQSIIAYTMSLGAENSVAYSNNSIAIPTNFTISVTTEILPVSMTKTSVDCTMYICGDSTECSNLLLQYGSFCTQLNRALTGIAVEQDKNTQEVFAQVKQIYKTPPIKDFGGFNFSQILPDPSKPSKRSFIEDLLFNKVTLADAGFIKQYGDCLGDIAARDLICAQKFNGLTVLPPLLTDEMIAQYTSALLAGTITSGWTFGAGAALQIPFAMQMAYRFNGIGVTQNVLYENQKLIANQFNSAIGKIQDSLSSTASALGKLQDVVNQNAQALNTLVKQLSSNFGAISSVLNDILSRLDPPEAEVQIDRLITGRLQSLQTYVTQQLIRAAEIRASANLAATKMSECVLGQSKRVDFCGKGYHLMSFPQSAPHGVVFLHVTYVPAQEKNFTTAPAICHDGKAHFPREGVFVSNGTHWFVTQRNFYEPQIITTDNTFVSGNCDVVIGIVNNTVYDPLQPELDSFKEELDKYFKNHTSPDVDLGDISGINASVVNIQKEIDRLNEVAKNLNESLIDLQELGKYEQYIKGGGGSDIDPYKEFGSSYQLLNFLPLDFFPDLNALVDTATALYEEELTGREHCSPHHTAIRQALVCWDELTKLIAWMSSNITSEQVRTIIVNHVNDTWGLKVRQSLWFHLSCLTFGQHTVQEFLVSFGVWIRTPAPYRPPNAPILSTLPEHTVIC

SEQ ID NO: 6745 - protein, 1365 aa, Artificial Sequence
  SARS-CoV-2/SARS-CoV-2/Yunnan-01/human/2020/CHN__MT049951.1 spike protein (1-1211)(K986P_V987P) WhcAg construct
MFVFLVLLPLVSSQCVNLTTRTQLPPANTNSFTRGVYYPDKVFRSSVLHSTQDLFLPFFSNVTWFHAIHVSGTNGTKRFDNPVLPFNDGVYFASTEKSNIIRGWIFGTTLDSKTQSLLIVNNATNVVIKVCEFQFCNDPFLGVYYHKNNKSWMESEFRVYSSANNCTFEYVSQPFLMDLEGKQGNFKNLREFVFKNIDGYFKIYSKHTPINLVRDLPQGFSALEPLVDLPIGINITRFQTLLALHRSYLTPGDSSSGWTAGAAAYYVGYLQPRTFLLKYNENGTITDAVDCALDPLSETKCTLKSFTVEKGIYQTSNFRVQPTESIVRFPNITNLCPFGEVFNATRFASVYAWNRKRISNCVADYSVLYNSASFSTFKCYGVSPTKLNDLCFTNVYADSFVIRGDEVRQIAPGQTGKIADYNYKLPDDFTGCVIAWNSNNLDSKVGGNYNYLYRLFRKSNLKPFERDISTEIYQAGSTPCNGVEGFNCYFPLQSYGFQPTNGVGYQPYRVVVLSFELLHAPATVCGPKKSTNLVKNKCVNFNFNGLTGTGVLTESNKKFLPFQQFGRDIADTTDAVRDPQTLEILDITPCSFGGVSVITPGTNTSNQVAVLYQDVNCTEVPVAIHADQLTPTWRVYSTGSNVFQTRAGCLIGAEHVNNSYECDIPIGAGICASYQTQTNSPRRARSVASQSIIAYTMSLGAENSVAYSNNSIAIPTNFTISVTTEILPVSMTKTSVDCTMYICGDSTECSNLLLQYGSFCTQLNRALTGIAVEQDKNTQEVFAQVKQIYKTPPIKDFGGFNFSQILPDPSKPSKRSFIEDLLFNKVTLADAGFIKQYGDCLGDIAARDLICAQKFNGLTVLPPLLTDEMIAQYTSALLAGTITSGWTFGAGAALQIPFAMQMAYRFNGIGVTQNVLYENQKLIANQFNSAIGKIQDSLSSTASALGKLQDVVNQNAQALNTLVKQLSSNFGAISSVLNDILSRLDPPEAEVQIDRLITGRLQSLQTYVTQQLIRAAEIRASANLAATKMSECVLGQSKRVDFCGKGYHLMSFPQSAPHGVVFLHVTYVPAQEKNFTTAPAICHDGKAHFPREGVFVSNGTHWFVTQRNFYEPQIITTDNTFVSGNCDVVIGIVNNTVYDPLQPELDSFKEELDKYFKNHTSPDVDLGDISGINASVVNIQKEIDRLNEVAKNLNESLIDLQELGKYEQYIKGGGGSDIDPYKEFGSSYQLLNFLPLDFFPDLNALVDTATALYEEELTGREHCSPHHTAIRQALVCWDELTKLIAWMSSNITSEQVRTIIVNHVNDTWGLKVRQSLWFHLSCLTFGQHTVQEFLVSFGVWIRTPAPYRPPNAPILSTLPEHTVIC

SEQ ID NO: 6746 - protein, 1365 aa, Artificial Sequence
  SARS-CoV-2/USA/WA-UW292/2020__EPI_ISL_418077 spike protein (1-1211)(K986P_V987P) WhcAg construct
MFVFLVLLPLVSSQCVNLTTRTQLPPAYTNSFTRGVYYPDKVFRSSVLHSTQDLFLPFFSNVTWFHAIHVSGTNGTKRFDNPVLPFNDGVYFASTEKSNIIRGWIFGTTLDSKTQSLLIVNNATNVVIKVCEFQFCNDPFLGVYYHKNNKSWMESEFRVYSSANNCTFEYVSQPFLMDLEGKQGNFKNLREFVFKNIDGYFKIYSKHTPINLVRDLPQGFSALEPLVDLPIGINITRFQTLLALHRSYLTPGDSSSGWTAGAAAYYVGYLQPRTFLLKYNENGTITDAVDCALDPLSETKCTLKSFTVEKGIYQTSNFRVQPTESIVRFPNITNLCPFGEVFNATRFASVYAWNRKRISNCVADYSVLYNSASFSTFKCYGVSPTKLNDLCFTNVYADSFVIRGDEVRQIAPGQTGKIADYNYKLPDDFTGCVIAWNSNNLDSKVGGNYNYLYRLFRKSNLKPFERDISTEIYQASSTPCNGVEGFNCYFPLQSYGFQPTNGVGYQPYRVVVLSFELLHAPATVCGPKKSTNLVKNKCVNFNFNGLTGTGVLTESNKKFLPFQQFGRDIADTTDAVRDPQTLEILDITPCSFGGVSVITPGTNTSNQVAVLYQDVNCTEVPVAIHADQLTPTWRVYSTGSNVFQTRAGCLIGAEHVNNSYECDIPIGAGICASYQTQTNSPRRARSVASQSIIAYTMSLGAENSVAYSNNSIAIPTNFTISVTTEILPVSMTKTSVDCTMYICGDSTECSNLLLQYGSFCTQLNRALTGIAVEQDKNTQEVFAQVKQIYKTPPIKDFGGFNFSQILPDPSKPSKRSFIEDLLFNKVTLADAGFIKQYGDCLGDIAARDLICAQKFNGLTVLPPLLTDEMIAQYTSALLAGTITSGWTFGAGAALQIPFAMQMAYRFNGIGVTQNVLYENQKLIANQFNSAIGKIQDSLSSTASALGKLQDVVNQNAQALNTLVKQLSSNFGAISSVLNDILSRLDPPEAEVQIDRLITGRLQSLQTYVTQQLIRAAEIRASANLAATKMSECVLGQSKRVDFCGKGYHLMSFPQSAPHGVVFLHVTYVPAQEKNFTTAPAICHDGKAHFPREGVFVSNGTHWFVTQRNFYEPQIITTDNTFVSGNCDVVIGIVNNTVYDPLQPELDSFKEELDKYFKNHTSPDVDLGDISGINASVVNIQKEIDRLNEVAKNLNESLIDLQELGKYEQYIKGGGGSDIDPYKEFGSSYQLLNFLPLDFFPDLNALVDTATALYEEELTGREHCSPHHTAIRQALVCWDELTKLIAWMSSNITSEQVRTIIVNHVNDTWGLKVRQSLWFHLSCLTFGQHTVQEFLVSFGVWIRTPAPYRPPNAPILSTLPEHTVIC

SEQ ID NO: 6747 - protein, 1365 aa, Artificial Sequence
  SARS-CoV-2/Iceland/192/2020__EPI_ISL_417819 spike protein (1-1211)(K986P_V987P) WhcAg construct
MFVFFVLLPLVSSQCVNLTTRTQLPPAYTNSFTRGVYYPDKVFRSSVLHSTQDLFLPFFSNVTWFHAIHVSGTNGTKRFDNPVLPFNDGVYFASTEKSNIIRGWIFGTTLDSKTQSLLIVNNATNVVIKVCEFQFCNDPFLGVYYHKNNKSWMESEFRVYSSANNCTFEYVSQPFLMDLEGKQGNFKNLREFVFKNIDGYFKIYSKHTPINLVRDLPQGFSALEPLVDLPIGINITRFQTLLALHRSYLTPGDSSSGWTAGAAAYYVGYLQPRTFLLKYNENGTITDAVDCALDPLSETKCTLKSFTVEKGIYQTSNFRVQPTESIVRFPNITNLCPFGEVFNATRFASVYAWNRKRISNCVADYSVLYNSASFSTFKCYGVSPTKLNDLCFTNVYADSFVIRGDEVRQIAPGQTGKIADYNYKLPDDFTGCVIAWNSNNLDSKVGGNYNYLYRLFRKSNLKPFERDISTEIYQAGSTPCNGVEGFNCYFPLQSYGFQPTNGVGYQPYRVVVLSFELLHAPATVCGPKKSTNLVKNKCVNFNFNGLTGTGVLTESNKKFLPFQQFGRDIADTTDAVRDPQTLEILDITPCSFGGVSVITPGTNTSNQVAVLYQGVNCTEVPVAIHADQLTPTWRVYSTGSNVFQTRAGCLIGAEHVNNSYECDIPIGAGICASYQTQTNSPRRARSVASQSIIAYTMSLGAENSVAYSNNSIAIPTNFTISVTTEILPVSMTKTSVDCTMYICGDSTECSNLLLQYGSFCTQLNRALTGIAVEQDKNTQEVFAQVKQIYKTPPIKDFGGFNFSQILPDPSKPSKRSFIEDLLFNKVTLADAGFIKQYGDCLGDIAARDLICAQKFNGLTVLPPLLTDEMIAQYTSALLAGTITSGWTFGAGAALQIPFAMQMAYRFNGIGVTQNVLYENQKLIANQFNSAIGKIQDSLSSTASALGKLQDVVNQNAQALNTLVKQLSSNFGAISSVLNDILSRLDPPEAEVQIDRLITGRLQSLQTYVTQQLIRAAEIRASANLAATKMSECVLGQSKRVDFCGKGYHLMSFPQSAPHGVVFLHVTYVPAQEKNFTTAPAICHDGKAHFPREGVFVSNGTHWFVTQRNFYEPQIITTDNTFVSGNCDVVIGIVNNTVYDPLQPELDSFKEELDKYFKNHTSPDVDLGDISGINASVVNIQKEIDRLNEVAKNLNESLIDLQELGKYEQYIKGGGGSDIDPYKEFGSSYQLLNFLPLDFFPDLNALVDTATALYEEELTGREHCSPHHTAIRQALVCWDELTKLIAWMSSNITSEQVRTIIVNHVNDTWGLKVRQSLWFHLSCLTFGQHTVQEFLVSFGVWIRTPAPYRPPNAPILSTLPEHTVIC

SEQ ID NO: 6748 - protein, 1365 aa, Artificial Sequence
  SARS-CoV-2/Belgium/ULG-6939/2020__EPI_ISL_417020 spike protein (1-1211)(K986P_V987P) WhcAg construct
MFVFLVLLPLVSSQCVNLTTRTQLPPAYTNSFTRGVYYPDKVFRSSVLHSTQDLFLPFFSNVTWFHAIHVSGTNGTKRFDNPVLPFNDGVYFASTEKSNIIRGWIFGTTLDSKTQSLLIVNNATNVVIKVCEFQFCNDPFLGVYYHKNNKSWMESEFRVYSSANNCTFEYVSQPFLMDLEGKQGNFKNLREFVFKNIDGYFKIYSKHTPINLVRDLPQGFSALEPLVDLPIGINITRFQTLLALHRSYLTPGDSSSGWTAGAAAYYVGYLQPRTFLLKYNENGTITDAVDCALDPLSETKCTLKSFTVEKGIYQTSNFRVQPTESIVRFPNITNLCPFGEVFNATRFASVYAWNRKRISNCVADYSVLYNSASFSTFKCYGVSPTKLNDLCFTNVYADSFVIRGDEVRQIAPGQTGKIADYNYKLPDDFTGCVIAWNSNNLDSKVGGNYNYLYRLFRKSNLKPFERDISTEIYQAGSTPCNGVEGFNCYFPLQSYGFQPTNGVGYQPYRVVVLSFELLHAPATVCGPKKSTNLVKNKCVNFNFNGLTGTGVLTESNKKFLPFQQFGRDIADTTDAVRDPQTLEILDITPCSFGGVSVITPGTNTSNQVAVLYQGVNCTEVPVAIHADQLTPTWRVYSTGSNVFQTRAGCLIGAEHVNNSYECDIPIGAGICASYQTQTNSPRRARSVASQSIIAYTMSLGAENSVVYSNNSIAIPTNFTISVTTEILPVSMTKTSVDCTMYICGDSTECSNLLLQYGSFCTQLNRALTGIAVEQDKNTQEVFAQVKQIYKTPPIKDFGGFNFSQILPDPSKPSKRSFIEDLLFNKVTLADAGFIKQYGDCLGDIAARDLICAQKFNGLTVLPPLLTDEMIAQYTSALLAGTITSGWTFGAGAALQIPFAMQMAYRFNGIGVTQNVLYENQKLIANQFNSAIGKIQDSLSSTASALGKLQDVVNQNAQALNTLVKQLSSNFGAISSVLNDILSRLDPPEAEVQIDRLITGRLQSLQTYVTQQLIRAAEIRASANLAATKMSECVLGQSKRVDFCGKGYHLMSFPQSAPHGVVFLHVTYVPAQEKNFTTAPAICHDGKAHFPREGVFVSNGTHWFVTQRNFYEPQIITTDNTFVSGNCDVVIGIVNNTVYDPLQPELDSFKEELDKYFKNHTSPDVDLGDISGINASVVNIQKEIDRLNEVAKNLNESLIDLQELGKYEQYIKGGGGSDIDPYKEFGSSYQLLNFLPLDFFPDLNALVDTATALYEEELTGREHCSPHHTAIRQALVCWDELTKLIAWMSSNITSEQVRTIIVNHVNDTWGLKVRQSLWFHLSCLTFGQHTVQEFLVSFGVWIRTPAPYRPPNAPILSTLPEHTVIC

SEQ ID NO: 6749 - protein, 1365 aa, Artificial Sequence
  SARS-CoV-2/France/HF2496/2020__EPI_ISL_418231 spike protein (1-1211)(K986P_V987P) WhcAg construct
MFVFLVLLPLVSSQCVNLTTRTQLPPAYTNSFTRGVYYPDKVFRSSVLHSTQDLFLPFFSNVTWFHAIHVSGTNGTKRFDNPVLPFNDGVYFASTEKSNIIRGWIFGTTLDSKTQSLLIVNNATNVVIKVCEFQFCNDPFLGVYYHKNNKSWMESEFRVYSSANNCTFEYVSQPFLMDLEGKQGNFKNLREFVFKNIDGYFKIYSKHTPINLVRDLPQGFSALEPLVDLPIGINITRFQTLLALHRSYLTPGDSSSGWTAGAAAYYVGYLQPRTFLLKYNENGTITDAVDCALDPLSETKCTLKSFTVEKGIYQTSNFRVQPTESIVRFPNITNLCPFGEVFNATRFASVYAWNRKRISNCVADYSVLYNSASFSTFKCYGVSPTKLNDLCFTNVYADSFVIRGDEVRQIAPGQTGKIADYNYKLPDDFTGCVIAWNSNNLDSKVGGNYNYLYRLFRKSNLKPFERDISTEIYQAGSTPCNGVEGFNCYFPLQSYGFQPTNGVGYQPYRVVVLSFELLHAPATVCGPKKSTNLVKNKCVNFNFNGLTGTGVLTESNKKFLPFQQFGRDIADTTDAVRDPQTLEILDITPCSFGGVSVITPGTNTSNQVAVLYQGVNCTEVPVAIHADQLTPTWRVYSTGSNVFQTRAGCLIGAEHVNNSYECDIPIGAGICASYQTQTNSPRRARSVASQSIIAYTMSLGAENSVAYSNNSIAIPTNFTISVTTEILPVSMTKTSVDCTMYICGDSTECSNLLLQYGSFCTQLNRALTGIAVEQDKNTQEVFAQVKQIYKTPPIKDFGGFNFSQILPDPSKPSKRSFIEDLLFNKVTLADAGFIKQYGDCLGDIVARDLICAQKFNGLTVLPPLLTDEMIAQYTSALLAGTITSGWTFGAGAALQIPFAMQMAYRFNGIGVTQNVLYENQKLIANQFNSAIGKIQDSLSSTASALGKLQDVVNQNAQALNTLVKQLSSNFGAISSVLNDILSRLDPPEAEVQIDRLITGRLQSLQTYVTQQLIRAAEIRASANLAATKMSECVLGQSKRVDFCGKGYHLMSFPQSAPHGVVFLHVTYVPAQEKNFTTAPAICHDGKAHFPREGVFVSNGTHWFVTQRNFYEPQIITTDNTFVSGNCDVVIGIVNNTVYDPLQPELDSFKEELDKYFKNHTSPDVDLGDISGINASVVNIQKEIDRLNEVAKNLNESLIDLQELGKYEQYIKGGGGSDIDPYKEFGSSYQLLNFLPLDFFPDLNALVDTATALYEEELTGREHCSPHHTAIRQALVCWDELTKLIAWMSSNITSEQVRTIIVNHVNDTWGLKVRQSLWFHLSCLTFGQHTVQEFLVSFGVWIRTPAPYRPPNAPILSTLPEHTVIC

SEQ ID NO: 6750 - protein, 1365 aa, Artificial Sequence
  SARS-CoV-2/USA/WA-UW291/2020__EPI_ISL_418076 spike protein (1-1211)(K986P_V987P) WhcAg construct
MFVFLVLLPLVSSQCVNLTTRTQLPPAYTNSFTRGVYYPDKVFRSSVLHSTQDLFLPFFSNVTWFHAIHVSGTNGTKRFDNPVLPFNDGVYFASTEKSNIIRGWIFGTTLDSKTQSLLIVNNATNVVIKVCEFQFCNDPFLGVYYHKNNKSWMESEFRVYSSANNCTFEYVSQPFLMDLEGKQGNFKNLREFVFKNIDGYFKIYSKHTPINLVRDLPQGFSALEPLVDLPIGINITRFQTLLALHRSYLTPGDSSSGWTAGAAAYYVGYLQPRTFLLKYNENGTITDAVDCALDPLSETKCTLKSFTVEKGIYQTSNFRVQPTESIVRFPNITNLCPFGEVFNATRFASVYAWNRKRISNCVADYSVLYNSASFSTFKCYGVSPTKLNDLCFTNVYADSFVIRGDEVRQIAPGQTGKIADYNYKLPDDFTGCVIAWNSNNLDSKVGGNYNYLYRLFRKSNLKPFERDISTEIYQAGSTPCNGVEGFNCYFPLQSYGFQPTNGVGYQPYRVVVLSFELLHAPATVCGPKKSTNLVKNKCVNFNFNGLTGTGVLTESNKKFLPFQQFGRDIADTTDAVRDPQTLEILDITPCSFGGVSVITPGTNTSNQVAVLYQGVNCTEVPVAIHADQLTPTWRVYSTGSNVFQTRAGCLIGAEHVNNSYECDIPIGAGICASYQTQTNSPRRARSVASQSIIAYTMSLGAENSVAYSNNSIAIPTNFTISVTTEILPVSMTKTSVDCTMYICGDSTECSNLLLQYGSFCTQLNRALTGIAVEQDKNTQEVFAQVKQIYKTPPIKDFGGFNFSQILPDPSKPSKRSFIEDLLFNKVTLADAGFIKQYGDCLGDIAARDLICAQKFNGLTVLPPLLTDEMIAQYTSALLAGTITSGWTFGAGAALQIPFAMQMAYRFNGIGVTQNVLYENQKLIANQFNSAIGKIQYSLSSTASALGKLQDVVNQNAQALNTLVKQLSSNFGAISSVLNDILSRLDPPEAEVQIDRLITGRLQSLQTYVTQQLIRAAEIRASANLAATKMSECVLGQSKRVDFCGKGYHLMSFPQSAPHGVVFLHVTYVPAQEKNFTTAPAICHDGKAHFPREGVFVSNGTHWFVTQRNFYEPQIITTDNTFVSGNCDVVIGIVNNTVYDPLQPELDSFKEELDKYFKNHTSPDVDLGDISGINASVVNIQKEIDRLNEVAKNLNESLIDLQELGKYEQYIKGGGGSDIDPYKEFGSSYQLLNFLPLDFFPDLNALVDTATALYEEELTGREHCSPHHTAIRQALVCWDELTKLIAWMSSNITSEQVRTIIVNHVNDTWGLKVRQSLWFHLSCLTFGQHTVQEFLVSFGVWIRTPAPYRPPNAPILSTLPEHTVIC

SEQ ID NO: 6751 - protein, 1365 aa, Artificial Sequence; identical to SEQ ID NO: 6714
  SARS-CoV-2/Portugal/PT0034/2020__EPI_ISL_418019 spike protein (1-1211)(K986P_V987P) WhcAg construct

SEQ ID NO: 6752 - protein, 1365 aa, Artificial Sequence
  SARS-CoV-2/Iceland/202/2020__EPI_ISL_417750 spike protein (1-1211)(K986P_V987P) WhcAg construct
MFVFLVLLPLVSSQCVNLTTRTQLPPAYTNSFTRGVYYPDKVFRSSVLHSTQDLFLPFFSNVTWFHAIHVSGTNGTKRFDNPVLPFNDGVYFASTEKSNIIRGWIFGTTLDSKTQSLLIVNNATNVVIKVCEFQFCNDPFLGVYYHKNNKSWMESEFRVYSSANNCTFEYVSQPFLMDLEGKQGNFKNLREFVFKNIDGYFKIYSKHTPINLVRDLPQGFSALEPLVDLPIGINITRFQTLLALHRSYLTPGDSSSGWTAGAAAYYVGYLQPRTFLLKYNENGTITDAVDCALDPLSETKCTLKSFTVEKGIYQTSNFRVQPTESIVRFPNITNLCPFGEVFNATRFASVYAWNRKRISNCVADYSVLYNSASFSTFKCYGVSPTKLNDLCFTNVYADSFVIRGDEVRQIAPGQTGKIADYNYKLPDDFTGCVIAWNSNNLDSKVGGNYNYLYRLFRKSNLKPFERDISTEIYQAGSTPCNGVEGFNCYFPLQSYGFQPTNGVGYQPYRVVVLSFELLHAPATVCGPKKSTNLVKNKCVNFNFNGLTGTGVLTESNKKFLPFQQFGRDIADTTDAVRDPQTLEILDITPCSFGGVSVITPGTNTSNQVAVLYQDVNCTEVPVAIHADQLTPTWRVYSTGSNVFQTRAGCLIGAEHVNNSYECDIPIGAGICASYQTQTNSPRRARSVASQSIIAYTMSLGAENSVAYSNNSIAIPTNFTISVTTEILPVSMTKTSVDCTMYICGDSTECSNLLLQYGSFCTQLNRALTGIAVEQDKNTQEVFAQVKQIYKTPPIKDFGGFNFSQILPDPSKPSKRSFIEDLLFNKVTLADAGFIKQYGDCLGDIAARDLICAQKFNGLTVLPPLLTDEMIAQYTSALLAGTITSGWTFGAGAALQIPFAMQMAYRFNGIGVTQNVLYENQKLIANQFNSAIGKIQDSLSSTASALGKLQDVVNQNAQALNTLVKQLSSNFGAISSVLNDILSRLDPPEAEVQIDRLITGRLQSLQTYVTQQLIRAAEIRASANLAATKMSECVLGQSKRVDFCGKGYHLMSFPQSAPHGVVFLHVTYVPAQEKNFTTAPAICHDGKAHFPREGVFVSNGTHWFVTQRNFYEPQIITTDNTFVSGNCDVVIGIVNNTVYDPLQPELDSFKEELDKYFKNHTSPDVDLGDIPGINASVVNIQKEIDRLNEVAKNLNESLIDLQELGKYEQYIKGGGGSDIDPYKEFGSSYQLLNFLPLDFFPDLNALVDTATALYEEELTGREHCSPHHTAIRQALVCWDELTKLIAWMSSNITSEQVRTIIVNHVNDTWGLKVRQSLWFHLSCLTFGQHTVQEFLVSFGVWIRTPAPYRPPNAPILSTLPEHTVIC

SEQ ID NO: 6753 - protein, 1365 aa, Artificial Sequence
  SARS-CoV-2/USA/WA-UW261/2020__EPI_ISL_418046 spike protein (1-1211)(K986P_V987P) WhcAg construct
MFVFLVLLPLVSSQCVNLTTRTQLPPAYTNSFTRGVYYPDKVFRSSVLHSTQDLFLPFFSNVTWFHAIHVSGTNGTKRFDNPVLPFNDGVYFASTEKSNIIRGWIFGTTLDSKTQSLLIVNNATNVVIKVCEFQFCNDPFLGVYYHKNNKSWMESEFRVYSSANNCTFEYVSQPFLMDLEGKQGNFKNLREFVFKNIDGYFKIYSKHTPINLVRDLPQGFSALEPLVDLPIGINITRFQTLLALHRSYLTPGDSSSGWTAGAAAYYVGYLQPRTFLLKYNENGTITDAVDCALDPLSETKCTLKSFTVEKGIYQTSNFRVQPTESIVRFPNITNLCPFGEVFNATRFTSVYAWNRKRISNCVADYSVLYNSASFSTFKCYGVSPTKLNDLCFTNVYADSFVIRGDEVRQIAPGQTGKIADYNYKLPDDFTGCVIAWNSNNLDSKVGGNYNYLYRLFRKSNLKPFERDISTEIYQAGSTPCNGVEGFNCYFPLQSYGFQPTNGVGYQPYRVVVLSFELLHAPATVCGPKKSTNLVKNKCVNFNFNGLTGTGVLTESNKKFLPFQQFGRDIADTTDAVRDPQTLEILDITPCSFGGVSVITPGTNTSNQVAVLYQDVNCTEVPVAIHADQLTPTWRVYSTGSNVFQTRAGCLIGAEHVNNSYECDIPIGAGICASYQTQTNSPRRARSVASQSIIAYTMSLGAENSVAYSNNSIAIPTNFTISVTTEILPVSMTKTSVDCTMYICGDSTECSNLLLQYGSFCTQLNRALTGIAVEQDKNTQEVFAQVKQIYKTPPIKDFGGFNFSQILPDPSKPSKRSFIEDLLFNKVTLADAGFIKQYGDCLGDIAARDLICAQKFNGLTVLPPLLTDEMIAQYTSALLAGTITSGWTFGAGAALQIPFAMQMAYRFNGIGVTQNVLYENQKLIANQFNSAIGKIQDSLSSTASALGKLQDVVNQNAQALNTLVKQLSSNFGAISSVLNDILSRLDPPEAEVQIDRLITGRLQSLQTYVTQQLIRAAEIRASANLAATKMSECVLGQSKRVDFCGKGYHLMSFPQSAPHGVVFLHVTYVPAQEKNFTTAPAICHDGKAHFPREGVFVSNGTHWFVTQRNFYEPQIITTDNTFVSGNCDVVIGIVNNTVYDPLQPELDSFKEELDKYFKNHTSPDVDLGDISGINASVVNIQKEIDRLNEVAKNLNESLIDLQELGKYEQYIKGGGGSDIDPYKEFGSSYQLLNFLPLDFFPDLNALVDTATALYEEELTGREHCSPHHTAIRQALVCWDELTKLIAWMSSNITSEQVRTIIVNHVNDTWGLKVRQSLWFHLSCLTFGQHTVQEFLVSFGVWIRTPAPYRPPNAPILSTLPEHTVIC

SEQ ID NO: 6754 - protein, 1365 aa, Artificial Sequence
  SARS-CoV-2/Portugal/PT0035/2020__EPI_ISL_418020 spike protein (1-1211)(K986P_V987P) WhcAg construct
MFVFLVLLPLVSSQCVNLTTRTQLPPAYTNSFTRGVYYPDKVFRSSVLHSTQDLFLPFFSNVTWFHAIHVSGTNGTKRFDNPVLPFNDGVYFASTEKSNIIRGWIFGTTLDSKTQSLLIVNNATNVVIKVCEFQFCNDPFLGVYYHKNNKSWMESEFRVYSSANNCTFEYVSQPFLMDLEGKQGNFKNLREFVFKNIDGYFKIYSKHTPINLVRDLPQGFSALEPLVDLPIGINITRFQTLLALHRSYLTPGDSSSGWTAGAAAYYVGYLQPRTFLLKYNENGTITDAVDCALDPLSETKCTLKSFTVEKGIYQTSNFRVQPTESIVRFPNITNLCPFGEVFNATRFASVYAWNRKRISNCVADYSVLYNSASFSTFKCYGVSPTKLNDLCFTNVYADSFVIRGDEVRQIAPGQTGKIADYNYKLPDDFTGCVIAWNSNNLDSKVGGNYNYLYRLFRKSNLKPFERDISTEIYQAGSTPCNGVEGFNCYFPLQSYGFQPTNGVGYQPYRVVVLSFELLHAPATVCGPKKSTNLVKNKCVNFNFNGLTGTGVLTESNKKFLPFQQFGRDIADTTDAVRDPQTLEILDITPCSFGGVSVITPGTNTSNQVAVLYQDVNCTEVPVAIHADQLTPTWRVYSTGSNVFQTRAGCLIGAEHVNNSYECDIPIGAGICASYQTQTNSPRRARSVASQSIIAYTMSLGAENSVAYSNNSIAIPTNFTISVTTEILPVSMTKTSVDCTMYICGDSTECSNLLLQYGSFCTQLNRALTGIAVEQDKNTQEVFAQVKQIYKTPPIKDFGGFNFSQILPDPSKPSKRSFIEDLLFNKVTLADAGFIKQYGDCLGDISARDLICAQKFNGLTVLPPLLTDEMIAQYTSALLAGTITSGWTFGAGAALQIPFAMQMAYRFNGIGVTQNVLYENQKLIANQFNSAIGKIQDSLSSTASALGKLQDVVNQNAQALNTLVKQLSSNFGAISSVLNDILSRLDPPEAEVQIDRLITGRLQSLQTYVTQQLIRAAEIRASANLAATKMSECVLGQSKRVDFCGKGYHLMSFPQSAPHGVVFLHVTYVPAQEKNFTTAPAICHDGKAHFPREGVFVSNGTHWFVTQRNFYEPQIITTDNTFVSGNCDVVIGIVNNTVYDPLQPELDSFKEELDKYFKNHTSPDVDLGDISGINASVVNIQKEIDRLNEVAKNLNESLIDLQELGKYEQYIKGGGGSDIDPYKEFGSSYQLLNFLPLDFFPDLNALVDTATALYEEELTGREHCSPHHTAIRQALVCWDELTKLIAWMSSNITSEQVRTIIVNHVNDTWGLKVRQSLWFHLSCLTFGQHTVQEFLVSFGVWIRTPAPYRPPNAPILSTLPEHTVIC

SEQ ID NO: 6755 - protein, 1365 aa, Artificial Sequence
  SARS-CoV-2/USA/NY-NYUMC7/2020__EPI_ISL_418192 spike protein (1-1211)(K986P_V987P) WhcAg construct
MFVFLVLLPLVSSQCVNLTTRTQLPPAYTNSFTRGVYYPDKVFRSSVLHSTQDLFLPFFSNVTWFHAIHVSGTNGTKRFDNPVLPFNDGVYFASTEKSNIIRGWIFGTTLDSKTQSLLIVNNATNVVIKVCEFQFCNDPFLGVYHHKNNKSWMESEFRVYSSANNCTFEYVSQPFLMDLEGKQGNFKNLREFVFKNIDGYFKIYSKHTPINLVRDLPQGFSALEPLVDLPIGINITRFQTLLALHRSYLTPGDSSSGWTAGAAAYYVGYLQPRTFLLKYNENGTITDAVDCALDPLSETKCTLKSFTVEKGIYQTSNFRVQPTESIVRFPNITNLCPFGEVFNATRFASVYAWNRKRISNCVADYSVLYNSASFSTFKCYGVSPTKLNDLCFTNVYADSFVIRGDEVRQIAPGQTGKIADYNYKLPDDFTGCVIAWNSNNLDSKVGGNYNYLYRLFRKSNLKPFERDISTEIYQAGSTPCNGVEGFNCYFPLQSYGFQPTNGVGYQPYRVVVLSFELLHAPATVCGPKKSTNLVKNKCVNFNFNGLTGTGVLTESNKKFLPFQQFGRDIADTTDAVRDPQTLEILDITPCSFGGVSVITPGTNTSNQVAVLYQGVNCTEVPVAIHADQLTPTWRVYSTGSNVFQTRAGCLIGAEHVNNSYECDIPIGAGICASYQTQTNSPRRARSVASQSIIAYTMSLGAENSVAYSNNSIAIPTNFTISVTTEILPVSMTKTSVDCTMYICGDSTECSNLLLQYGSFCTQLNRALTGIAVEQDKNTQEVFAQVKQIYKTPPIKDFGGFNFSQILPDPSKPSKRSFIEDLLFNKVTLADAGFIKQYGDCLGDIAARDLICAQKFNGLTVLPPLLTDEMIAQYTSALLAGTITSGWTFGAGAALQIPFAMQMAYRFNGIGVTQNVLYENQKLIANQFNSAIGKIQDSLSSTASALGKLQDVVNQNAQALNTLVKQLSSNFGAISSVLNDILSRLDPPEAEVQIDRLITGRLQSLQTYVTQQLIRAAEIRASANLAATKMSECVLGQSKRVDFCGKGYHLMSFPQSAPHGVVFLHVTYVPAQEKNFTTAPAICHDGKAHFPREGVFVSNGTHWFVTQRNFYEPQIITTDNTFVSGNCDVVIGIVNNTVYDPLQPELDSFKEELDKYFKNHTSPDVDLGDISGINASVVNIQKEIDRLNEVAKNLNESLIDLQELGKYEQYIKGGGGSDIDPYKEFGSSYQLLNFLPLDFFPDLNALVDTATALYEEELTGREHCSPHHTAIRQALVCWDELTKLIAWMSSNITSEQVRTIIVNHVNDTWGLKVRQSLWFHLSCLTFGQHTVQEFLVSFGVWIRTPAPYRPPNAPILSTLPEHTVIC

SEQ ID NO: 6756 - protein, 1365 aa, Artificial Sequence
  SARS-CoV-2/Iceland/189/2020__EPI_ISL_417709 spike protein (1-1211)(K986P_V987P) WhcAg construct
MFVFLVLLPLVSSQCVNLTTRTQLPPAYTNSFTRGVYYPDKVFRSSVLHSTQDLFLPFFSNVTWFHAIHVSGTNGTKRFDNPVLPFNDGVYFASTEKSNIIRGWIFGTTLDSKTQSLLIVNNATNVVIKVCEFQFCNDPFLGVYYHKNNKSWMESEFRVYSSANNCTFEYVSQPFLMDLEGKQGNFKNLREFVFKNIDGYFKIYSKHTPINLVRDLPQGFSALEPLVDLPIGINITRFQTLLALHRSYLTPGDSSSGWTAGAAAYYVGYLQPRTFLLKYNENGTITDAVDCALDPLSETKCTLKSFTVEKGIYQTSNFRVQPTESIVRFPNITNLCPFGEVFNATRFASVYAWNRKRISNCVADYSVLYNSASFSTFKCYGVSPTKLNDLCFTNVYADSFVIRGDEVRQIAPGQTGKIADYNYKLPDDFTGCVIAWNSNNLDSKVGGNYNYLYRLFRKSNLKPFERDISTEIYQAGSTPCNGVEGFNCYFPLQSYGFQPTNGVGYQPYRVVVLSFELLHAPATVCGPKKSTNLVKNKCVNFNFNGLTGTGVLTESNKKFLPFQQFGRDIADTTDAVRDPQTLEILDITPCSFGGVSVITPGTNTSNQVAVLYQGVNCTEVPVAIHADQLTPTWRVYSTGSNVFQTRAGCLIGAEHVNNSYECDIPIGAGICASYQTQTNSPRRARSVASQSIIAYTMSLGAENSVAYSNNSIAIPTNFTISVTTEILPVSMTKTSVDCTMYICGDSTECSNLLLQYGSFCTQLNRALTGIAVEQDKNTQEVFAQVKQIYKTPPIKDFGGFNFSQILPDPSKPSKRSFIEDLLFNKVTLADAGFTKQYGDCLGDIAARDLICAQKFNGLTVLPPLLTDEMIAQYTSALLAGTITSGWTFGAGAALQIPFAMQMAYRFNGIGVTQNVLYENQKLIANQFNSAIGKIQDSLSSTASALGKLQDVVNQNAQALNTLVKQLSSNFGAISSVLNDILSRLDPPEAEVQIDRLITGRLQSLQTYVTQQLIRAAEIRASANLAATKMSECVLGQSKRVDFCGKGYHLMSFPQSAPHGVVFLHVTYVPAQEKNFTTAPAICHDGKAHFPREGVFVSNGTHWFVTQRNFYEPQIITTDNTFVSGNCDVVIGIVNNTVYDPLQPELDSFKEELDKYFKNHTSPDVDLGDISGINASVVNIQKEIDRLNEVAKNLNESLIDLQELGKYEQYIKGGGGSDIDPYKEFGSSYQLLNFLPLDFFPDLNALVDTATALYEEELTGREHCSPHHTAIRQALVCWDELTKLIAWMSSNITSEQVRTIIVNHVNDTWGLKVRQSLWFHLSCLTFGQHTVQEFLVSFGVWIRTPAPYRPPNAPILSTLPEHTVIC

SEQ ID NO: 6757 - protein, 1365 aa, Artificial Sequence
  SARS-CoV-2/Australia/NSW56/2020__EPI_ISL_417408 spike protein (1-1211)(K986P_V987P) WhcAg construct
MFVFLVLLPLVSSQCVNLTTRTQLPPAYTNSFTRGVYYPDKVFRSSVLHSTQDLFLPFFSNVTWFHAIHVSGTNGTKRFDNPVLPFNDGVYFASTEKSNIIRGWIFGTTLDSKTQSLLIVNNATNVVIKVCEFQFCNDPFLGVYYHKNNKSWMESEFRVYSSANNCTFEYVSQPFLMDLEGKQGNFKNLREFVFKNIDGYFKIYSKHTPINLVRDLPQGFSALEPLVDLPIGINITRFQTLLALHRSYLTPGDSSSGWTAGAAAYYVGYLQPRTFLLKYNENGTITDAVDCALDPLSETKCTLKSFTVEKGIYQTSNFRVQPTESIVRFPNITNLCPFGEVFNATRFASVYAWNRKRISNCVADYSVLYNSASFSTFKCYGVSPTKLNDLCFTNVYADSFVIRGDEVRQIAPGQTGKIADYNYKLPDDFTGCVIAWNSNNLDSKVGGNYNYLYRLFRKSNLKPFERDISTEIYQAGSTPCNGVEGFNCYFPLQSYGFQPTNGVGYQPYRVVVLSFELLHAPATVCGPKKSTNLVKNKCVNFNFNGLTGTGVLTESNKKFLPFQQFGRDIADTTDAVRDPQTLEILDITPCSFGGVSVITPGTNTSNQVAVLYQDVNCTEVPVAIHADQLTPTWRVYSTGSNVFQTRAGCLIGAEHVNNSYECDIPIGAGICASYQTQTNSPRRARSVASQSIIAYTMSLGAENSVAYSNNSIAIPTNFTISVTTEILPVSMTKTSVDCTMYICGDSTECSNLLLQYGSFCTQLNRALTGIAVEQDKNTQEVFAQVKQIYKTPPIKDFGGFNFSQILPDSSKPSKRSFIEDLLFNKVTLADAGFIKQYGDCLGDIAARDLICAQKFNGLTVLPPLLTDEMIAQYTSALLAGTITSGWTFGAGAALQIPFAMQMAYRFNGIGVTQNVLYENQKLIANQFNSAIGKIQDSLSSTASALGKLQDVVNQNAQALNTLVKQLSSNFGAISSVLNDILSRLDPPEAEVQIDRLITGRLQSLQTYVTQQLIRAAEIRASANLAATKMSECVLGQSKRVDFCGKGYHLMSFPQSAPHGVVFLHVTYVPAQEKNFTTAPAICHDGKAHFPREGVFVSNGTHWFVTQRNFYEPQIITTDNTFVSGNCDVVIGIVNNTVYDPLQPELDSFKEELDKYFKNHTSPDVDLGDISGINASVVNIQKEIDRLNEVAKNLNESLIDLQELGKYEQYIKGGGGSDIDPYKEFGSSYQLLNFLPLDFFPDLNALVDTATALYEEELTGREHCSPHHTAIRQALVCWDELTKLIAWMSSNITSEQVRTIIVNHVNDTWGLKVRQSLWFHLSCLTFGQHTVQEFLVSFGVWIRTPAPYRPPNAPILSTLPEHTVIC

SEQ ID NO: 6758 - protein, 1365 aa, Artificial Sequence
  SARS-CoV-2/Iceland/280/2020__EPI_ISL_417608 spike protein (1-1211)(K986P_V987P) WhcAg construct
MFVFLVLLPLVSSQCVNLTTRTQLPPAYTNSFTRGVYYPDKVFRSSVLHSTQDLFLPFFSNVTWFHAIHVSGTNGTKRFDNPVLPFNDGVYFASTEKSNIIRGWIFGTTLDSKTQSLLIVNNATNVVIKVCEFQFCNDPFLGVYYHKNNKSWMESEFRVYSSANNCTFEYVSQPFLMDLEGKQGNFKNLREFVFKNIDGYFKIYSKHTPINLVRDLPQGFSALEPLVDLPIGINITRFQTLLALHRSYLTPGDSSSGWTAGAAAYYVGYLQPRTFLLKYNENGTITDAVDCALDPLSETKCTLKSFTVEKGIYQTSNFRVQPTESIVRFPNITNLCPFGEVFNATRFASVYAWNRKRISNCVADYSVLYNSASFSTFKCYGVSPTKLNDLCFTNVYADSFVIRGDEVRQIAPGQTGKIADYNYKLPDDFTGCVIAWNSNNLDSKVGGNYNYLYRLFRKSNLKPFERDISTEIYQAGSTPCNGVEGFNCYFPLQSYGFQPTNGVGYQPYRVVVLSFELLHAPATVCGPKKSTNLVKNKCVNFNFNGLTGTGVLTESNKKFLPFQQFGRDIADTTDAVRDPQTLEILDITPCSFGGVSVITPGTNTSNQVAVLYQGVNCTEVPVAIHADQLTPTWRVYSTGSNVFQTRAGCLIGAEHVNNSYECDIPIGAGICASYHTQTNSPRRARSVASQSIIAYTMSLGAENSVAYSNNSIAIPTNFTISVTTEILPVSMTKTSVDCTMYICGDSTECSNLLLQYGSFCTQLNRALTGIAVEQDKNTQEVFAQVKQIYKTPPIKDFGGFNFSQILPDPSKPSKRSFIEDLLFNKVTLADAGFIKQYGDCLGDIAARDLICAQKFNGLTVLPPLLTDEMIAQYTSALLAGTITSGWTFGAGAALQIPFAMQMAYRFNGIGVTQNVLYENQKLIANQFNSAIGKIQDSLSSTASALGKLQDVVNQNAQALNTLVKQLSSNFGAISSVLNDILSRLDPPEAEVQIDRLITGRLQSLQTYVTQQLIRAAEIRASANLAATKMSECVLGQSKRVDFCGKGYHLMSFPQSAPHGVVFLHVTYVPAQEKNFTTAPAICHDGKAHFPREGVFVSNGTHWFVTQRNFYEPQIITTDNTFVSGNCDVVIGIVNNTVYDPLQPELDSFKEELDKYFKNHTSPDVDLGDISGINASVVNIQKEIDRLNEVAKNLNESLIDLQELGKYEQYIKGGGGSDIDPYKEFGSSYQLLNFLPLDFFPDLNALVDTATALYEEELTGREHCSPHHTAIRQALVCWDELTKLIAWMSSNITSEQVRTIIVNHVNDTWGLKVRQSLWFHLSCLTFGQHTVQEFLVSFGVWIRTPAPYRPPNAPILSTLPEHTVIC

SEQ ID NO: 6759 - protein, 1365 aa, Artificial Sequence; identical to SEQ ID NO: 6714
  SARS-CoV-2/Iceland/247/2020__EPI_ISL_417575 spike protein (1-1211)(K986P_V987P) WhcAg construct

SEQ ID NO: 6760 - protein, 1365 aa, Artificial Sequence
  SARS-CoV-2/Iceland/238/2020__EPI_ISL_417566 spike protein (1-1211)(K986P_V987P) WhcAg construct
MFVFLVLLPLVSSQCVNLTTRTQLPPAYTNSFTRGVYYPDKVFRSSVLHSTQDLFLPFFSNVTWFHAIHVSGTNGTKRFDNPVLPFNDGVYFASTEKSNIIRGWIFGTTLDSKTQSLLIVNNATNVVIKVCEFQFCNDPFLGVYYHKNNKSWMESEFRVYSSANNCTFEYVSQPFLMDLEGKQGNFKNLREFVFKNIDGYFKIYSKHTPINLVRDLPQGFSALEPLVDLPIGINITRFQTLLALHRSYLTPGDSSSGWTAGAAAYYVGYLQPRTFLLKYNENGTITDAVDCALDPLSETKCTLKSFTVEKGIYQTSNFRVQPTESIVRFPNITNLCPFGEVFNATRFASVYAWNRKRISNCVADYSVLYNSASFSTFKCYGVSPTKLNDLCFTNVYADSFVIRGDEVRQIAPGQTGKIADYNYKLPDDFTGCVIAWNSNNLDSKVGGNYNYLYRLFRKSNLKPFERDISTEIYQAGSTPCNGVEGFNCYFPLQSYGFQPTNGVGYQPYRVVVLSFELLHAPATVCGPKKSTNLVKNKCVNFNFNGLTGTGVLTESNKKFLPFQQFGRDIADTTDAVRDPQTLEILDITPCSFGGVSVITPGTNTSNQVAVLYQGVNCTEVPVAIHADQLTPTWRVYSTGSNVFQTRAGCLIGAEHVNNSYECDIPIGAGICASYQTQTNSPRRARSVASQSIIAYTMSLGAENSVAYSNNSIAIPTNFTISVTTEILPVSMTKTSVDCTMYICGDSTECSNLLLQYGSFCTQLNRALTGIAVEQDKNTQEVFAQVKQIYKTPPIKDFGGFNFSQILPDPSKPSKRSFIEDLLFNKVTLADVGFIKQYGDCLGDIAARDLICAQKFNGLTVLPPLLTDEMIAQYTSALLAGTITSGWTFGAGAALQIPFAMQMAYRFNGIGVTQNVLYENQKLIANQFNSAIGKIQDSLSSTASALGKLQDVVNQNAQALNTLVKQLSSNFGAISSVLNDILSRLDPPEAEVQIDRLITGRLQSLQTYVTQQLIRAAEIRASANLAATKMSECVLGQSKRVDFCGKGYHLMSFPQSAPHGVVFLHVTYVPAQEKNFTTAPAICHDGKAHFPREGVFVSNGTHWFVTQRNFYEPQIITTDNTFVSGNCDVVIGIVNNTVYDPLQPELDSFKEELDKYFKNHTSPDVDLGDISGINASVVNIQKEIDRLNEVAKNLNESLIDLQELGKYEQYIKGGGGSDIDPYKEFGSSYQLLNFLPLDFFPDLNALVDTATALYEEELTGREHCSPHHTAIRQALVCWDELTKLIAWMSSNITSEQVRTIIVNHVNDTWGLKVRQSLWFHLSCLTFGQHTVQEFLVSFGVWIRTPAPYRPPNAPILSTLPEHTVIC

SEQ ID NO: 6761 - protein, 1365 aa, Artificial Sequence
  SARS-CoV-2/Greece/16/2020__EPI_ISL_418265 spike protein (1-1211)(K986P_V987P) WhcAg construct
MFVFLVLLPLVSSQCVNLTTRTQLPPAYTNSFTRGVYYPDKVFRSSVLHSTQDLFLPFFSNVTWFHAIHVSGTNGTKRFDNPVLPFNDGVYFASTEKSNIIRGWIFGTTLDSKTQSLLIVNNATNVVIKVCEFQFCNDPFLGVYYHKNNKSWMESEFRVYSSANNCTFEYVSQPFLMDLEGKQGNFKNLREFVFKNVDGYFKIYSKHTPINLVRDLPQGFSALEPLVDLPIGINITRFQTLLALHRSYLTPGDSSSGWTAGAAAYYVGYLQPRTFLLKYNENGTITDAVDCALDPLSETKCTLKSFTVEKGIYQTSNFRVQPTESIVRFPNITNLCPFGEVFNATRFASVYAWNRKRISNCVADYSVLYNSASFSTFKCYGVSPTKLNDLCFTNVYADSFVIRGDEVRQIAPGQTGKIADYNYKLPDDFTGCVIAWNSNNLDSKVGGNYNYLYRLFRKSNLKPFERDISTEIYQAGSTPCNGVEGFNCYFPLQSYGFQPTNGVGYQPYRVVVLSFELLHAPATVCGPKKSTNLVKNKCVNFNFNGLTGTGVLTESNKKFLPFQQFGRDIADTTDAVRDPQTLEILDITPCSFGGVSVITPGTNTSNQVAVLYQDVNCTEVPVAIHADQLTPTWRVYSTGSNVFQTRAGCLIGAEHVNNSYECDIPIGAGICASYQTQTNSPRRARSVASQSIIAYTMSLGAENSVAYSNNSIAIPTNFTISVTTEILPVSMTKTSVDCTMYICGDSTECSNLLLQYGSFCTQLNRALTGIAVEQDKNTQEVFAQVKQIYKTPPIKDFGGFNFSQILPDPSKPSKRSFIEDLLFNKVTLADAGFIKQYGDCLGDIAARDLICAQKFNGLTVLPPLLTDEMIAQYTSALLAGTITSGWTFGAGAALQIPFAMQMAYRFNGIGVTQNVLYENQKLIANQFNSAIGKIQDSLSSTASALGKLQDVVNQNAQALNTLVKQLSSNFGAISSVLNDILSRLDPPEAEVQIDRLITGRLQSLQTYVTQQLIRAAEIRASANLAATKMSECVLGQSKRVDFCGKGYHLMSFPQSAPHGVVFLHVTYVPAQEKNFTTAPAICHDGKAHFPREGVFVSNGTHWFVTQRNFYEPQIITTDNTFVSGNCDVVIGIVNNTVYDPLQPELDSFKEELDKYFKNHTSPDVDLGDISGINASVVNIQKEIDRLNEVAKNLNESLIDLQELGKYEQYIKGGGGSDIDPYKEFGSSYQLLNFLPLDFFPDLNALVDTATALYEEELTGREHCSPHHTAIRQALVCWDELTKLIAWMSSNITSEQVRTIIVNHVNDTWGLKVRQSLWFHLSCLTFGQHTVQEFLVSFGVWIRTPAPYRPPNAPILSTLPEHTVIC

SEQ ID NO: 6762 - protein, 1365 aa, Artificial Sequence
  SARS-CoV-2/Iceland/319/2020__EPI_ISL_417648 spike protein (1-1211)(K986P_V987P) WhcAg construct
MFVFLVLLPLVSSQCVNLTTRTQLPPAYTNSFTRGVYYPDKVFRSSVLHSTQDLFLPFFSNVTWFHAIHVSGTNGTKRFDNPVLPFNDGVYFASTEKSNIIRGWIFGTTLDSKTQSLLIVNNATNVVIKVCEFQFCNDPFLGVYYHKNNKSWMESEFRVYSSANNCTFEYVSQPFLIDLEGKQGNFKNLREFVFKNIDGYFKIYSKHTPINLVRDLPQGFSALEPLVDLPIGINITRFQTLLALHRSYLTPGDSSSGWTAGAAAYYVGYLQPRTFLLKYNENGTITDAVDCALDPLSETKCTLKSFTVEKGIYQTSNFRVQPTESIVRFPNITNLCPFGEVFNATRFASVYAWNRKRISNCVADYSVLYNSASFSTFKCYGVSPTKLNDLCFTNVYADSFVIRGDEVRQIAPGQTGKIADYNYKLPDDFTGCVIAWNSNNLDSKVGGNYNYLYRLFRKSNLKPFERDISTEIYQAGSTPCNGVEGFNCYFPLQSYGFQPTNGVGYQPYRVVVLSFELLHAPATVCGPKKSTNLVKNKCVNFNFNGLTGTGVLTESNKKFLPFQQFGRDIADTTDAVRDPQTLEILDITPCSFGGVSVITPGTNTSNQVAVLYQGVNCTEVPVAIHADQLTPTWRVYSTGSNVFQTRAGCLIGAEHVNNSYECDIPIGAGICASYQTQTNSPRRARSVASQSIIAYTMSLGAENSVAYSNNSIAIPTNFTISVTTEILPVSMTKTSVDCTMYICGDSTECSNLLLQYGSFCTQLNRALTGIAVEQDKNTQEVFAQVKQIYKTPPIKDFGGFNFSQILPDPSKPSKRSFIEDLLFNKVTLADAGFIKQYGDCLGDIAARDLICAQKFNGLTVLPPLLTDEMIAQYTSALLAGTITSGWTFGAGAALQIPFAMQMAYRFNGIGVTQNVLYENQKLIANQFNSAIGKIQDSLSSTASALGKLQDVVNQNAQALNTLVKQLSSNFGAISSVLNDILSRLDPPEAEVQIDRLITGRLQSLQTYVTQQLIRAAEIRASANLAATKMSECVLGQSKRVDFCGKGYHLMSFPQSAPHGVVFLHVTYVPAQEKNFTTAPAICHDGKAHFPREGVFVSNGTHWFVTQRNFYEPQIITTDNTFVSGNCDVVIGIVNNTVYDPLQPELDSFKEELDKYFKNHTSPDVDLGDISGINASVVNIQKEIDRLNEVAKNLNESLIDLQELGKYEQYIKGGGGSDIDPYKEFGSSYQLLNFLPLDFFPDLNALVDTATALYEEELTGREHCSPHHTAIRQALVCWDELTKLIAWMSSNITSEQVRTIIVNHVNDTWGLKVRQSLWFHLSCLTFGQHTVQEFLVSFGVWIRTPAPYRPPNAPILSTLPEHTVIC

SEQ ID NO: 6763 - protein, 1365 aa, Artificial Sequence
  SARS-CoV-2/Congo/94/2020__EPI_ISL_417947 spike protein (1-1211)(K986P_V987P) WhcAg construct
MFVFLVLLPLVSSQCVNLTTRTQLPPAYTNSFTRGVYYPDKVFRSSVLHSTQDLFLPFFSNVTWFHAIHVSGTNGTKRFDNPVLPFNDGVYFASTEKSNIIRGWIFGTTLDSKTQSLLIVNNATNVVIKVCEFQFCNDPFLGVYYHKNNKSWMESEFRVYSSANNCTFEYVSQPFLMDLEGKQGNFKNLREFVFKNIDGYFKIYSKHTPINLVRDLPQGFSALEPLVDLPIGINITRFQTLLALHRSYLTPGDSSSGWTAGAAAYYVGYLQPRTFLLKYNENGTITDAVDCALDPLSETKCTLKSFTVEKGIYQTSNFRVQPTESIVRFPNITNLCPFGEVFNATRFASVYAWNRKRISNCVADYSVLYNSASFSTFKCYGVSPTKLNDLCFTNVYADSFVIRGDEVRQIAPGQTGKIADYNYKLPDDFTGCVIAWNSNNLDSKVGGNYNYLYRLFRKSNLKPFERDISTEIYQAGSTPCNGVEGFNCYFPLQSYGFQPTNGVGYQPYRVVVLSFELLHAPATVCGPKKSTNLVKNKCVNFNFNGLTGTGVLTESNKKFLPFQQFGRDIADTTDAVRDPQTLEILDITPCSFGGVSVITPGTNTSNQVAVLYQGVNCTEVPVAIHADQLTPTWRVYSTGSNVFQTRAGCLIGAEHVNNSYECDIPIGAGICASYQTQTNSPRRARSVASQSIIAYTMSLGAENSVAYSNNSIAIPTNFTISVTTEILPVSMTKTSVDCTMYICGDSTECSNLLLQYGSFCTQLNRALTGIAVEQDKNTQEVFAQVKQIYKTPPIKDFGGFNFSQILPDPSKPSKRSFIEDILFNKVTLADAGFIKQYGDCLGDIAARDLICAQKFNGLTVLPPLLTDEMIAQYTSALLAGTITSGWTFGAGAALQIPFAMQMAYRFNGIGVTQNVLYENQKLIANQFNSAIGKIQDSLSSTASALGKLQDVVNQNAQALNTLVKQLSSNFGAISSVLNDILSRLDPPEAEVQIDRLITGRLQSLQTYVTQQLIRAAEIRASANLAATKMSECVLGQSKRVDFCGKGYHLMSFPQSAPHGVVFLHVTYVPAQEKNFTTAPAICHDGKAHFPREGVFVSNGTHWFVTQRNFYEPQIITTDNTFVSGNCDVVIGIVNNTVYDPLQPELDSFKEELDKYFKNHTSPDVDLGDISGINASVVNIQKEIDRLNEVAKNLNESLIDLQELGKYEQYIKGGGGSDIDPYKEFGSSYQLLNFLPLDFFPDLNALVDTATALYEEELTGREHCSPHHTAIRQALVCWDELTKLIAWMSSNITSEQVRTIIVNHVNDTWGLKVRQSLWFHLSCLTFGQHTVQEFLVSFGVWIRTPAPYRPPNAPILSTLPEHTVIC

SEQ ID NO: 6764 - protein, 1365 aa, Artificial Sequence
  SARS-CoV-2/Congo/158/2020__EPI_ISL_417950 spike protein (1-1211)(K986P_V987P) WhcAg construct
MFVFLVLLPLVSSQCVNLTTRTQLPPAYTNSFTRGVYYPDKVFRSSVLHSTQDLFLPFFSNVTWFHAIHVSGTNGTKRFDNPVLPFNDGVYFASTEKSNIIRGWIFGTTLDSKTQSLLIVNNATNVVIKVCEFQFCNDPFLGVYYHKNNKSWMESEFRVYSSANNCTFEYVSQPFLMDLEGKQGNFKNLREFVFKNIDGYFKIYSKHTPINLVRDLPQGFSALEPLVDLPIGINITRFQTLLALHRSYLTPGDSSSGWTAGAAAYYVGYLQPRTFLLKYNENGTITDAVDCALDPLSETKCTLKSFTVEKGIYQTSNFRVQPTESIVRFPNITNLCPFGEVFNATRFASVYAWNRKRISNCVADYSVLYNSASFSTFKCYGVSPTKLNDLCFTNVYADSFVIRGDEVRQIAPGQTGKIADYNYKLPDDFTGCVIAWNSNNLDSKVGGNYNYLYRLFRKSNLKPFERDISTEIYQAGSTPCNGVEGFNCYFPLQSYGFQPTNGVGYQPYRVVVLSFELLHAPATVCGPKKSTNLVKNKCVNFNFNGLTGTGVLTESNKKFLPFQQFGRDIADTTDAVRDPQTLEILDITPCSFGGVSVITPGTNTSNQVAVLYQDVNCTEVPVAIHADQLTPTWRVYSTGSNVFQTRAGCLIGAEHVNNSYECDIPIGAGICASYQTQTNSPRRARSVASQSIIAYTMSLGAENSVAYSNNSIAIPTNFTISVTTEILPVSMTKTSVDCTMYICGDSTECSNLLLQYGSFCTQLNRALTGIAVEQDKNTQEVFAQVKQIYKTPPIKDFGGFNFSQILPDPSKPSKRSFIEDLLFNKVTLADAGFIKQYGDCLGDIAARDLICAQKFNGLTVLPPLLTDEMIAQYTSALLAGTITSGWTFGAGAALQIPFAMQMAYRFNGIGVTQNVLYENQKLIANQFNSAIGKIQDSLSSTASALGKLQDVVNQNAQALNTLVKQLSSNFGAISSVLNDILSRLDPPEAEVQIDRLITGRLQSLQTYVTQQLIRAAEIRASANLAATKMSECVLGQSKRVDFCGKGYHLMSFPQSAPHGVVFLHVTYVPAQEKNFTTAPAICHDGKAHFPREGVFVSNGTHWFVTQRNFYEPQIITTDNTFLSGNCDVVIGIVNNTVYDPLQPELDSFKEELDKYFKNHTSPDVDLGDISGINASVVNIQKEIDRLNEVAKNLNESLIDLQELGKYEQYIKGGGGSDIDPYKEFGSSYQLLNFLPLDFFPDLNALVDTATALYEEELTGREHCSPHHTAIRQALVCWDELTKLIAWMSSNITSEQVRTIIVNHVNDTWGLKVRQSLWFHLSCLTFGQHTVQEFLVSFGVWIRTPAPYRPPNAPILSTLPEHTVIC

SEQ ID NO: 6765 - protein, 1365 aa, Artificial Sequence
  SARS-CoV-2/USA/UT-00034/2020__EPI_ISL_417977 spike protein (1-1211)(K986P_V987P) WhcAg construct
MFVFLVLLPLVSSQCVNLTTRTQLPPAYTNSFTRGVYYPDKVFRSSVLHSTQDLFLPFFSNVTWFHAIHVSGTNGTKRFDNPVLPFNDGVYFASTEKSNIIRGWIFGTTLDSKTQSLLIVNNATNVVIKVCEFQFCNDPFLGVYYYKNNKSWMESEFRVYSSANNCTFEYVSQPFLMDLEGKQGNFKNLREFVFKNIDGYFKIYSKHTPINLVRDLPQGFSALEPLVDLPIGINITRFQTLLALHRSYLTPGDSSSGWTAGAAAYYVGYLQPRTFLLKYNENGTITDAVDCALDPLSETKCTLKSFTVEKGIYQTSNFRVQPTESIVRFPNITNLCPFGEVFNATRFASVYAWNRKRISNCVADYSVLYNSASFSTFKCYGVSPTKLNDLCFTNVYADSFVIRGDEVRQIAPGQTGKIADYNYKLPDDFTGCVIAWNSNNLDSKVGGNYNYLYRLFRKSNLKPFERDISTEIYQAGSTPCNGVEGFNCYFPLQSYGFQPTNGVGYQPYRVVVLSFELLHAPATVCGPKKSTNLVKNKCVNFNFNGLTGTGVLTESNKKFLPFQQFGRDIADTTDAVRDPQTLEILDITPCSFGGVSVITPGTNTSNQVAVLYQGVNCTEVPVAIHADQLTPTWRVYSTGSNVFQTRAGCLIGAEHVNNSYECDIPIGAGICASYQTQTNSPRRARSVASQSIIAYTMSLGAENSVAYSNNSIAIPTNFTISVTTEILPVSMTKTSVDCTMYICGDSTECSNLLLQYGSFCTQLNRALTGIAVEQDKNTQEVFAQVKQIYKTPPIKDFGGFNFSQILPDPSKPSKRSFIEDLLFNKVTLADAGFIKQYGDCLGDIAARDLICAQKFNGLTVLPPLLTDEMIAQYTSALLAGTITSGWTFGAGAALQIPFAMQMAYRFNGIGVTQNVLYENQKLIANQFNSAIGKIQDSLSSTASALGKLQDVVNQNAQALNTLVKQLSSNFGAISSVLNDILSRLDPPEAEVQIDRLITGRLQSLQTYVTQQLIRAAEIRASANLAATKMSECVLGQSKRVDFCGKGYHLMSFPQSAPHGVVFLHVTYVPAQEKNFTTAPAICHDGKAHFPREGVFVSNGTHWFVTQRNFYEPQIITTDNTFVSGNCDVVIGIVNNTVYDPLQPELDSFKEELDKYFKNHTSPDVDLGDISGINASVVNIQKEIDRLNEVAKNLNESLIDLQELGKYEQYIKGGGGSDIDPYKEFGSSYQLLNFLPLDFFPDLNALVDTATALYEEELTGREHCSPHHTAIRQALVCWDELTKLIAWMSSNITSEQVRTIIVNHVNDTWGLKVRQSLWFHLSCLTFGQHTVQEFLVSFGVWIRTPAPYRPPNAPILSTLPEHTVIC

SEQ ID NO: 6766 - protein, 1365 aa, Artificial Sequence
  SARS-CoV-2/USA/UT-00033/2020__EPI_ISL_417976 spike protein (1-1211)(K986P_V987P) WhcAg construct
MFVFLVLLPLVSSQCVNLTTRTQLPPAYTNSFTRGVYYPDKVFRSSVLHSTQDLFLPFFSNVTWFHAIHVSGTNGTKRFDNPVLPFNDGVYFASTEKSNIIRGWIFGTTLDSKTQSLLIVNNATNVVIKVCEFQFCNDPFLGVYYHKNNKSWMESEFRVYSSANNCTFEYVSQPFLMDLEGKQGNFKNLREFVFKNIDGYFKIYSKHTPINLVRDLPQGFSALEPLVDLPIGINITRFQTLLALHRSYLTPGDSSSGLTAGAAAYYVGYLQPRTFLLKYNENGTITDAVDCALDPLSETKCTLKSFTVEKGIYQTSNFRVQPTESIVRFPNITNLCPFGEVFNATRFASVYAWNRKRISNCVADYSVLYNSASFSTFKCYGVSPTKLNDLCFTNVYADSFVIRGDEVRQIAPGQTGKIADYNYKLPDDFTGCVIAWNSNNLDSKVGGNYNYLYRLFRKSNLKPFERDISTEIYQAGSTPCNGVEGFNCYFPLQSYGFQPTNGVGYQPYRVVVLSFELLHAPATVCGPKKSTNLVKNKCVNFNFNGLTGTGVLTESNKKFLPFQQFGRDIADTTDAVRDPQTLEILDITPCSFGGVSVITPGTNTSNQVAVLYQGVNCTEVPVAIHADQLTPTWRVYSTGSNVFQTRAGCLIGAEHVNNSYECDIPIGAGICASYQTQTNSPRRARSVASQSIIAYTMSLGAENSVAYSNNSIAIPTNFTISVTTEILPVSMTKTSVDCTMYICGDSTECSNLLLQYGSFCTQLNRALTGIAVEQDKNTQEVFAQVKQIYKTPPIKDFGGFNFSQILPDPSKPSKRSFIEDLLFNKVTLADAGFIKQYGDCLGDIAARDLICAQKFNGLTVLPPLLTDEMIAQYTSALLAGTITSGWTFGAGAALQIPFAMQMAYRFNGIGVTQNVLYENQKLIANQFNSAIGKIQDSLSSTASALGKLQDVVNQNAQALNTLVKQLSSNFGAISSVLNDILSRLDPPEAEVQIDRLITGRLQSLQTYVTQQLIRAAEIRASANLAATKMSECVLGQSKRVDFCGKGYHLMSFPQSAPHGVVFLHVTYVPAQEKNFTTAPAICHDGKAHFPREGVFVSNGTHWFVTQRNFYEPQIITTDNTFVSGNCDVVIGIVNNTVYDPLQPELDSFKEELDKYFKNHTSPDVDLGDISGINASVVNIQKEIDRLNEVAKNLNESLIDLQELGKYEQYIKGGGGSDIDPYKEFGSSYQLLNFLPLDFFPDLNALVDTATALYEEELTGREHCSPHHTAIRQALVCWDELTKLIAWMSSNITSEQVRTIIVNHVNDTWGLKVRQSLWFHLSCLTFGQHTVQEFLVSFGVWIRTPAPYRPPNAPILSTLPEHTVIC

SEQ ID NO: 6767 - protein, 1365 aa, Artificial Sequence
  SARS-CoV-2/USA/WI-13/2020__EPI_ISL_417516 spike protein (1-1211)(K986P_V987P) WhcAg construct
MFVFLVLLPLVSSQCVNLTTRTQLPPAYTNSFTRGVYYPDKVFRSSVLHSTQDLFLPFFSNVTWFHAIHVSGTNGTKRFDNPVLPFNDGVYFASTEKSNIIRGWIFGTTLDSKTQSLLIVNNATNVVIKVCEFQFCNDPFLGVYYHKNNKSWMESEFRVYSSANNCTFEYVSQPFLMDLEGKQGNFKNLREFVFKNIDGYFKIYSKHTPINLVRDLPQGFSALEPLVDLPIGINITRFQTLLALHRSYLTPGDSSSGWTAGAAAYYVGYLQPRTFLLKYNENGTITDAVDCALDPLSETKCTLKSFTVEKGIYQTSNFRVLPTESIVRFPNITNLCPFGEVFNATRFASVYAWNRKRISNCVADYSVLYNSASFSTFKCYGVSPTKLNDLCFTNVYADSFVIRGDEVRQIAPGQTGKIADYNYKLPDDFTGCVIAWNSNNLDSKVGGNYNYLYRLFRKSNLKPFERDISTEIYQAGSTPCNGVEGFNCYFPLQSYGFQPTNGVGYQPYRVVVLSFELLHAPATVCGPKKSTNLVKNKCVNFNFNGLTGTGVLTESNKKFLPFQQFGRDIADTTDAVRDPQTLEILDITPCSFGGVSVITPGTNTSNQVAVLYQGVNCTEVPVAIHADQLTPTWRVYSTGSNVFQTRAGCLIGAEHVNNSYECDIPIGAGICASYQTQTNSPRRARSVASQSIIAYTMSLGAENSVAYSNNSIAIPTNFTISVTTEILPVSMTKTSVDCTMYICGDSTECSNLLLQYGSFCTQLNRALTGIAVEQDKNTQEVFAQVKQIYKTPPIKDFGGFNFSQILPDPSKPSKRSFIEDLLFNKVTLADAGFIKQYGDCLGDIAARDLICAQKFNGLTVLPPLLTDEMIAQYTSALLAGTITSGWTFGAGAALQIPFAMQMAYRFNGIGVTQNVLYENQKLIANQFNSAIGKIQDSLSSTASALGKLQDVVNQNAQALNTLVKQLSSNFGAISSVLNDILSRLDPPEAEVQIDRLITGRLQSLQTYVTQQLIRAAEIRASANLAATKMSECVLGQSKRVDFCGKGYHLMSFPQSAPHGVVFLHVTYVPAQEKNFTTAPAICHDGKAHFPREGVFVSNGTHWFVTQRNFYEPQIITTDNTFVSGNCDVVIGIVNNTVYDPLQPELDSFKEELDKYFKNHTSPDVDLGDISGINASVVNIQKEIDRLNEVAKNLNESLIDLQELGKYEQYIKGGGGSDIDPYKEFGSSYQLLNFLPLDFFPDLNALVDTATALYEEELTGREHCSPHHTAIRQALVCWDELTKLIAWMSSNITSEQVRTIIVNHVNDTWGLKVRQSLWFHLSCLTFGQHTVQEFLVSFGVWIRTPAPYRPPNAPILSTLPEHTVIC

SEQ ID NO: 6768 - protein, 1364 aa, Artificial Sequence
  SARS-CoV-2/India/1-27/2020__EPI_ISL_413522 spike protein (1-1210)(K985P_V986P) WhcAg construct
MFVFLVLLPLVSSQCVNLTTRTQLPPAYTNSFTRGVYYPDKVFRSSVLHSTQDLFLPFFSNVTWFHAIHVSGTNGTKRFDNPVLPFNDGVYFASTEKSNIIRGWIFGTTLDSKTQSLLIVNNATNVVIKVCEFQFCNDPFLGVYHKNNKSWMESEFRVYSSANNCTFEYVSQPFLMDLEGKQGNFKNLREFVFKNIDGYFKIYSKHTPINLVRDLPQGFSALEPLVDLPIGINITRFQTLLALHRSYLTPGDSSSGWTAGAAAYYVGYLQPRTFLLKYNENGTITDAVDCALDPLSETKCTLKSFTVEKGIYQTSNFRVQPTESIVRFPNITNLCPFGEVFNATRFASVYAWNRKRISNCVADYSVLYNSASFSTFKCYGVSPTKLNDLCFTNVYADSFVIRGDEVIQIAPGQTGKIADYNYKLPDDFTGCVIAWNSNNLDSKVGGNYNYLYRLFRKSNLKPFERDISTEIYQAGSTPCNGVEGFNCYFPLQSYGFQPTNGVGYQPYRVVVLSFELLHAPATVCGPKKSTNLVKNKCVNFNFNGLTGTGVLTESNKKFLPFQQFGRDIADTTDAVRDPQTLEILDITPCSFGGVSVITPGTNTSNQVAVLYQDVNCTEVPVAIHADQLTPTWRVYSTGSNVFQTRAGCLIGAEHVNNSYECDIPIGAGICASYQTQTNSPRRARSVASQSIIAYTMSLGAENSVAYSNNSIAIPTNFTISVTTEILPVSMTKTSVDCTMYICGDSTECSNLLLQYGSFCTQLNRALTGIAVEQDKNTQEVFAQVKQIYKTPPIKDFGGFNFSQILPDPSKPSKRSFIEDLLFNKVTLADAGFIKQYGDCLGDIAARDLICAQKFNGLTVLPPLLTDEMIAQYTSALLAGTITSGWTFGAGAALQIPFAMQMAYRFNGIGVTQNVLYENQKLIANQFNSAIGKIQDSLSSTASALGKLQDVVNQNAQALNTLVKQLSSNFGAISSVLNDILSRLDPPEAEVQIDRLITGRLQSLQTYVTQQLIRAAEIRASANLAATKMSECVLGQSKRVDFCGKGYHLMSFPQSAPHGVVFLHVTYVPAQEKNFTTAPAICHDGKAHFPREGVFVSNGTHWFVTQRNFYEPQIITTDNTFVSGNCDVVIGIVNNTVYDPLQPELDSFKEELDKYFKNHTSPDVDLGDISGINASVVNIQKEIDRLNEVAKNLNESLIDLQELGKYEQYIKGGGGSDIDPYKEFGSSYQLLNFLPLDFFPDLNALVDTATALYEEELTGREHCSPHHTAIRQALVCWDELTKLIAWMSSNITSEQVRTIIVNHVNDTWGLKVRQSLWFHLSCLTFGQHTVQEFLVSFGVWIRTPAPYRPPNAPILSTLPEHTVIC

SEQ ID NO: 6769 - protein, 1359 aa, Artificial Sequence
  SARS-CoV-2/pangolin/Guangxi/P4L/2017__EPI_ISL_410538 spike protein (1-1205)(K980P_V981P) WhcAg construct
MFVFLFVLPLVSSQCVNLTTRTGIPPGYTNSSTRGVYYPDKVFRSSILHLTQDLFLPFFSNVTWFNTINYQGGFKKFDNPVLPFNDGVYFASTEKSNIIRGWIFGTTLDARTQSLLIVNNATNVVIKVCEFQFCTDPFLGVYYHNNNKTWVENEFRVYSSANNCTFEYISQPFLMDLEGKQGNFKNLREFVFKNVDGYFKIYSKHTPIDLVRDLPRGFAALEPLVDLPIGINITRFQTLLALHRSYLTPGNLESGWTTGAAAYYVGYLQQRTFLLSYNQNGTITDAVDCSLDPLSETKCTLKSLTVEKGIYQTSNFRVQPTISIVRFPNITNLCPFGEVFNASKFASVYAWNRKRISNCVADYSVLYNSTSFSTFKCYGVSPTKLNDLCFTNVYADSFVVKGDEVRQIAPGQTGVIADYNYKLPDDFTGCVIAWNSVKQDALTGGNYGYLYRLFRKSKLKPFERDISTEIYQAGSTPCNGQVGLNCYYPLERYGFHPTTGVNYQPFRVVVLSFELLNGPATVCGPKLSTTLVKDKCVNFNFNGLTGTGVLTTSKKQFLPFQQFGRDISDTTDAVRDPQTLEILDITPCSFGGVSVITPGTNTSNQVAVLYQDVNCTEVPMAIHAEQLTPAWRVYSAGANVFQTRAGCLVGAEHVNNSYECDIPVGAGICASYHSMSSLRSVNQRSIIAYTMSLGAENSVAYSNNSIAIPTNFTISVTTEILPVSMTKTSVDCTMYICGDSIECSNLLLQYGSFCTQLNRALTGIAVEQDKNTQEVFAQVKQIYKTPPIKDFGGFNFSQILPDPSKPSKRSFIEDLLFNKVTLADAGFIKQYGDCLGDIAARDLICAQKFNGLTVLPPLLTDEMIAQYTSALLAGTITSGWTFGAGAALQIPFAMQMAYRFNGIGVTQNVLYENQKLIANQFNSAIGKIQDSLSSTASALGKLQDVVNQNAQALNTLVKQLSSNFGAISSVLNDILSRLDPPEAEVQIDRLITGRLQSLQTYVTQQLIRAAEIRASANLAATKMSECVLGQSKRVDFCGKGYHLMSFPQSAPHGVVFLHVTYVPAQEKNFTTAPAICHEGKAHFPREGVFVSNGTHWFITQRNFYEPQIITTDNTFVSGSCDVVIGIVNNTVYDPLQPELDSFKEELDKYFKNHTSPDVDLGDISGINASVVNIQKEIDRLNEVAKNLNESPIDLQELGKYEQYIKGGGGSDIDPYKEFGSSYQLLNFLPLDFFPDLNALVDTATALYEEELTGREHCSPHHTAIRQALVCWDELTKLIAWMSSNITSEQVRTIIVNHVNDTWGLKVRQSLWFHLSCLTFGQHTVQEFLVSFGVWIRTPAPYRPPNAPILSTLPEHTVIC

SEQ ID NO: 6770 - protein, 1359 aa, Artificial Sequence
  SARS-CoV-2/pangolin/Guangxi/P5L/2017__EPI_ISL_410540 spike protein (1-1205)(K980P_V981P) WhcAg construct
MFVFLFVLPLVSSQCVNLTTRTGIPPGYTNSSTRGVYYPDKVFRSSILHLTQDLFLPFFSNVTWFNTINYQGGFKKFDNPVLPFNDGVYFASTEKSNIIRGWIFGTTLDARTQSLLIVNNATNVVIKVCEFQFCTDPFLGVYYHNNNKTWVENEFRVYSSANNCTFEYISQPFLMDLEGKQGNFKNLREFVFKNVDGYFKIYSKHTPIDLVRDLPRGFAALEPLVDLPIGINITRFQTLLALHRSYLTPGKLESGWTTGAAAYYVGYLQQRTFLLSYNQNGTITDAVDCSLDPLSETKCTLKSLTVEKGIYQTSNFRVQPTISIVRFPNITNLCPFGEVFNASKFASVYAWNRKRISNCVADYSVLYNSTSFSTFKCYGVSPTKLNDLCFTNVYADSFVVKGDEVRQIAPGQTGVIADYNYKLPDDFTGCVIAWNSVKQDALTGGNYGYLYRLFRKSKLKPFERDISTEIYQAGSTPCNGQVGLNCYYPLERYGFHPTTGVNYQPFRVVVLSFELLNGPATVCGPKLSTTLVKDKCVNFNFNGLTGTGVLTTSKKQFLPFQQFGRDISDTTDAVRDPQTLEILDITPCSFGGVSVITPGTNTSNQVAVLYQDVNCTEVPMAIHAEQLTPAWRVYSAGANVFQTRAGCLVGAEHVNNSYECDIPVGAGICASYHSMSSFRSVNQRSIIAYTMSLGAENSVAYSNNSIAIPTNFTISVTTEILPVSMTKTSVDCTMYICGDSIECSNLLLQYGSFCTQLNRALTGIAVEQDKNTQEVFAQVKQIYKTPPIKDFGGFNFSQILPDPSKPSKRSFIEDLLFNKVTLADAGFIKQYGDCLGDIAARDLICAQKFNGLTVLPPLLTDEMIAQYTSALLAGTITSGWTFGAGAALQIPFAMQMAYRFNGIGVTQNVLYENQKLIANQFNSAIGKIQDSLSSTASALGKLQDVVNQNAQALNTLVKQLSSNFGAISSVLNDILSRLDPPEAEVQIDRLITGRLQSLQTYVTQQLIRAAEIRASANLAATKMSECVLGQSKRVDFCGKGYHLMSFPQSAPHGVVFLHVTYVPAQEKNFTTAPAICHEGKAHFPREGVFVSNGTHWFITQRNFYEPQIITTDNTFVSGSCDVVIGIVNNTVYDPLQPELDSFKEELDKYFKNHTSPDVDLGDISGINASVVNIQKEIDRLNEVAKNLNESLIDLQELGKYEQYIKGGGGSDIDPYKEFGSSYQLLNFLPLDFFPDLNALVDTATALYEEELTGREHCSPHHTAIRQALVCWDELTKLIAWMSSNITSEQVRTIIVNHVNDTWGLKVRQSLWFHLSCLTFGQHTVQEFLVSFGVWIRTPAPYRPPNAPILSTLPEHTVIC

SEQ ID NO: 6771 - protein, 1359 aa, Artificial Sequence
  SARS-CoV-2/pangolin/Guangxi/P5E/2017__EPI_ISL_410541 spike protein (1-1205)(K980P_V981P) WhcAg construct
MFVFLFVLPLVSSQCVNLTTRTGIPPGYTNSSTRGVYYPDKVFRSSILHLTQDLFLPFFSNVTWFNTITYQGGSKKFDNPVLPFNDGVYFASTEKSNIIRGWIFGTTLDARTQSLLIVNNATNVVIKVCEFQFCTDPFLGVYYHNNNKTWVENEFRVYSSANNCTFEYISQPFLMDLEGKQGNFKNLREFVFKNVDGYFKIYSKHTPIDLVRDLPRGFAALEPLVDLPIGINITRFQTLLALHRSYLTPGKLESGWTTGAAAYYVGYLQQRTFLLSYNQNGTITDAVDCSLDPLSETKCTLKSLTVEKGIYQTSNFRVQPTISIVRFPNITNLCPFGEVFNASKFASVYAWNRKRISNCVADYSVLYNSTSFSTFKCYGVSPTKLNDLCFTNVYADSFVVKGDEVRQIAPGQTGVIADYNYKLPDDFTGCVIAWNSVKQDALTGDNYGYLYRLFRKSKLKPFERDISTEIYQAGSTPCNGQVGLNCYYPLERYGFHPTTGVNYQPFRVVVLSFELLNGPATVCGPKLSTTLVKDKCVNFNFNGLTGTGVLTTSKKQFLPFQQFGRDISDTTDAVRDPQTLEILDITPCSFGGVSVITPGTNTSNQVAVLYQDVNCTEVPMAIHAEQLTPAWRVYSAGANVFQTRAGCLVGAEHVNNSYECDIPVGAGICASYHSMSSFRSVNQRSIIAYTMSLGAENSVAYSNNSIAIPTNFTISVTTEILPVSMTKTSVDCTMYICGDSIECSNLLLQYGSFCTQLNRALTGIAVEQDKNTQEVFAQVKQIYKTPPIKDFGGFNFSQILPDPSKPSKRSFIEDLLFNKVTLADAGFIKQYGDCLGDIAARDLICAQKFNGLTVLPPLLTDEMIAQYTSALLAGTITSGWTFGAGAALQIPFAMQMAYRFNGIGVTQNVLYENQKLIANQFNSAIGKIQDSLSSTASALGKLQDVVNQNAQALNTLVKQLSSNFGAISSVLNDILSRLDPPEAEVQIDRLITGRLQSLQTYVTQQLIRAAEIRASANLAATKMSECVLGQSKRVDFCGKGYHLMSFPQSAPHGVVFLHVTYVPAQEKNFTTAPAICHEGKAHFPREGVFVSNGTHWFITQRNFYEPQIITTDNTFVSGSCDVVIGIVNNTVYDPLQPELDSFKEELDKYFKNHTSPDVDLGDISGINASVVNIQKEIDRLNEVAKNLNESLIDLQELGKYEQYIKGGGGSDIDPYKEFGSSYQLLNFLPLDFFPDLNALVDTATALYEEELTGREHCSPHHTAIRQALVCWDELTKLIAWMSSNITSEQVRTIIVNHVNDTWGLKVRQSLWFHLSCLTFGQHTVQEFLVSFGVWIRTPAPYRPPNAPILSTLPEHTVIC

SEQ ID NO: 6772 - protein, 1357 aa, Artificial Sequence
  SARS-CoV-2/pangolin/Guangxi/P1E/2017__EPI_ISL_410539 spike protein (1-1203)(K978P_V979P) WhcAg construct
MFVFLFVLPLVSSQCVNLTTRTGIQPGYTNSSTRGVYYPDKVFRSSILHLTQDLFLPFFSNVTWFNTINYQGGFKKFDNPVLPFNDGVYFASTEKSNIIRGWIFGTTLDARTQSLLIVNNATNVVIKVCEFQFCTDPFLGVYYHNNNKTWVENEFRVYSSANNCTFEYISQPFLMDLEGKQGNFKNLREFVFKNVDGYFKIYSKHTPIDLVRDLPRGFAALEPLVDLPIGINITRFQTLLALHRSYLTPGKLESGWTTGAAAYYVGYLQQRTFLLSYNQNGTITDAVDCSLDPLSETKCTLKSLTVEKGIYQTSNFRVQPTISIVRFPNITNLCPFGEVFNASKFASVYAWNRKRISNCVADYSVLYNSTSFSTFKCYGVSPTKLNDLCFTNVYADSFVVKGDEVRQIAPGQTGVIADYNYKLPDDFTGCVIAWNSVKQDALTGGNYLYRLFRKSKLKPFERDISTEIYQAGSTPCNGQVGLNCYYPLERYGFHPTTGVNYQPFRVVVLSFELLNGPATVCGPKLSTTLVKDKCVNFNFNGLTGTGVLTTSKKQFLPFQQFGRDISDTTDAVRDPQTLEILDITPCSFGGVSVITPGTNTSNQVAVLYQDVNCTEVPMAIHAEQLTPAWRVYSAGANVFQTRAGCLVGAEHVNNSYECDIPVGAGICASYHSMSSLRSVNQRSIIAYTMSLGAENSVAYSNNSIAIPTNFTISVTTEILPVSMTKTSVDCTMYICGDSIECSNLLLQYGSFCTQLNRALTGIAVEQDKNTQEVFAQVKQIYKTPPIKDFGGFNFSQILPDPSKPSKRSFIEDLLFNKVTLADAGFIKQYGDCLGDIAARDLICAQKFNGLTVLPPLLTDEMIAQYTSALLAGTITSGWTFGAGAALQIPFAMQMAYRFNGIGVTQNVLYENQKLIANQFNSAIGKIQDSLSSTASALGKLQDVVNQNAQALNTLVKQLSSNFGAISSVLNDILSRLDPPEAEVQIDRLITGRLQSLQTYVTQQLIRAAEIRASANLAATKMSECVLGQSKRVDFCGKGYHLMSFPQSAPHGVVFLHVTYVPAQEKNFTTAPAICHEGKAHFPREGVFVSNGTHWFITQRNFYEPQIITTDNTFVSGSCDVVIGIVNNTVYDPLQPELDSFKEELDKYFKNHTSPDVDLGDISGINASVVNIQKEIDRLNEVAKNLNESLIDLQELGKYEQYIKGGGGSDIDPYKEFGSSYQLLNFLPLDFFPDLNALVDTATALYEEELTGREHCSPHHTAIRQALVCWDELTKLIAWMSSNITSEQVRTIIVNHVNDTWGLKVRQSLWFHLSCLTFGQHTVQEFLVSFGVWIRTPAPYRPPNAPILSTLPEHTVIC

SEQ ID NO: 6773 - protein, 1365 aa, Artificial Sequence
  SARS-CoV-2/Wuhan/WIV05/2019__EPI_ISL_402128 spike protein (1-1211)(K986P_V987P_T887W_A1020W) WhcAg construct
MFVFLVLLPLVSSQCVNLTTRTQLPPAYTNSFTRGVYYPDKVFRSSVLHSTQDLFLPFFSNVTWFHAIHVSGTNGTKRFDNPVLPFNDGVYFASTEKSNIIRGWIFGTTLDSKTQSLLIVNNATNVVIKVCEFQFCNDPFLGVYYHKNNKSWMESEFRVYSSANNCTFEYVSQPFLMDLEGKQGNFKNLREFVFKNIDGYFKIYSKHTPINLVRDLPQGFSALEPLVDLPIGINITRFQTLLALHRSYLTPGDSSSGWTAGAAAYYVGYLQPRTFLLKYNENGTITDAVDCALDPLSETKCTLKSFTVEKGIYQTSNFRVQPTESIVRFPNITNLCPFGEVFNATRFASVYAWNRKRISNCVADYSVLYNSASFSTFKCYGVSPTKLNDLCFTNVYADSFVIRGDEVRQIAPGQTGKIADYNYKLPDDFTGCVIAWNSNNLDSKVGGNYNYLYRLFRKSNLKPFERDISTEIYQAGSTPCNGVEGFNCYFPLQSYGFQPTNGVGYQPYRVVVLSFELLHAPATVCGPKKSTNLVKNKCVNFNFNGLTGTGVLTESNKKFLPFQQFGRDIADTTDAVRDPQTLEILDITPCSFGGVSVITPGTNTSNQVAVLYQDVNCTEVPVAIHADQLTPTWRVYSTGSNVFQTRAGCLIGAEHVNNSYECDIPIGAGICASYQTQTNSPRRARSVASQSIIAYTMSLGAENSVAYSNNSIAIPTNFTISVTTEILPVSMTKTSVDCTMYICGDSTECSNLLLQYGSFCTQLNRALTGIAVEQDKNTQEVFAQVKQIYKTPPIKDFGGFNFSQILPDPSKPSKRSFIEDLLFNKVTLADAGFIKQYGDCLGDIAARDLICAQKFNGLTVLPPLLTDEMIAQYTSALLAGTITSGWWFGAGAALQIPFAMQMAYRFNGIGVTQNVLYENQKLIANQFNSAIGKIQDSLSSTASALGKLQDVVNQNAQALNTLVKQLSSNFGAISSVLNDILSRLDPPEAEVQIDRLITGRLQSLQTYVTQQLIRAAEIRWSANLAATKMSECVLGQSKRVDFCGKGYHLMSFPQSAPHGVVFLHVTYVPAQEKNFTTAPAICHDGKAHFPREGVFVSNGTHWFVTQRNFYEPQIITTDNTFVSGNCDVVIGIVNNTVYDPLQPELDSFKEELDKYFKNHTSPDVDLGDISGINASVVNIQKEIDRLNEVAKNLNESLIDLQELGKYEQYIKGGGGSDIDPYKEFGSSYQLLNFLPLDFFPDLNALVDTATALYEEELTGREHCSPHHTAIRQALVCWDELTKLIAWMSSNITSEQVRTIIVNHVNDTWGLKVRQSLWFHLSCLTFGQHTVQEFLVSFGVWIRTPAPYRPPNAPILSTLPEHTVIC

SEQ ID NO: 6774 - protein, 1361 aa, Artificial Sequence
  SARS-CoV-2/bat/Yunnan/RaTG13/2013__EPI_ISL_402131 spike protein (1-1207)(K982P_V983P_T883W_A1016W) WhcAg construct
MFVFLVLLPLVSSQCVNLTTRTQLPPAYTNSSTRGVYYPDKVFRSSVLHLTQDLFLPFFSNVTWFHAIHVSGTNGIKRFDNPVLPFNDGVYFASTEKSNIIRGWIFGTTLDSKTQSLLIVNNATNVVIKVCEFQFCNDPFLGVYYHKNNKSWMESEFRVYSSANNCTFEYVSQPFLMDLEGKQGNFKNLREFVFKNIDGYFKIYSKHTPINLVRDLPPGFSALEPLVDLPIGINITRFQTLLALHRSYLTPGDSSSGWTAGAAAYYVGYLQPRTFLLKYNENGTITDAVDCALDPLSETKCTLKSFTVEKGIYQTSNFRVQPTDSIVRFPNITNLCPFGEVFNATTFASVYAWNRKRISNCVADYSVLYNSTSFSTFKCYGVSPTKLNDLCFTNVYADSFVITGDEVRQIAPGQTGKIADYNYKLPDDFTGCVIAWNSKHIDAKEGGNFNYLYRLFRKANLKPFERDISTEIYQAGSKPCNGQTGLNCYYPLYRYGFYPTDGVGHQPYRVVVLSFELLNAPATVCGPKKSTNLVKNKCVNFNFNGLTGTGVLTESNKKFLPFQQFGRDIADTTDAVRDPQTLEILDITPCSFGGVSVITPGTNASNQVAVLYQDVNCTEVPVAIHADQLTPTWRVYSTGSNVFQTRAGCLIGAEHVNNSYECDIPIGAGICASYQTQTNSRSVASQSIIAYTMSLGAENSVAYSNNSIAIPTNFTISVTTEILPVSMTKTSVDCTMYICGDSTECSNLLLQYGSFCTQLNRALTGIAVEQDKNTQEVFAQVKQIYKTPPIKDFGGFNFSQILPDPSKPSKRSFIEDLLFNKVTLADAGFIKQYGDCLGDIAARDLICAQKFNGLTVLPPLLTDEMIAQYTSALLAGTITSGWWFGAGAALQIPFAMQMAYRFNGIGVTQNVLYENQKLIANQFNSAIGKIQDSLSSTASALGKLQDVVNQNAQALNTLVKQLSSNFGAISSVLNDILSRLDPPEAEVQIDRLITGRLQSLQTYVTQQLIRAAEIRWSANLAATKMSECVLGQSKRVDFCGKGYHLMSFPQSAPHGVVFLHVTYVPAQEKNFTTAPAICHDGKAHFPREGVFVSNGTHWFVTQRNFYEPQIITTDNTFVSGSCDVVIGIVNNTVYDPLQPELDSFKEELDKYFKNHTSPDVDLGDISGINASVVNIQKEIDRLNEVAKNLNESLIDLQELGKYEQYIKGGGGSDIDPYKEFGSSYQLLNFLPLDFFPDLNALVDTATALYEEELTGREHCSPHHTAIRQALVCWDELTKLIAWMSSNITSEQVRTIIVNHVNDTWGLKVRQSLWFHLSCLTFGQHTVQEFLVSFGVWIRTPAPYRPPNAPILSTLPEHTVIC

SEQ ID NO: 6775 - protein, 1365 aa, Artificial Sequence
  SARS-CoV-2/Wuhan/HBCDC-HB-01/2019__EPI_ISL_402132 spike protein (1-1211)(K986P_V987P_T887W_A1020W) WhcAg construct
MFVFLVLLPLVSSQCVNLTTRTQLPPAYTNSITRGVYYPDKVFRSSVLHSTQDLFLPFFSNVTWFHAIHVSGTNGTKRFDNPVLPFNDGVYFASTEKSNIIRGWIFGTTLDSKTQSLLIVNNATNVVIKVCEFQFCNDPFLGVYYHKNNKSWMESEFRVYSSANNCTFEYVSQPFLMDLEGKQGNFKNLREFVFKNIDGYFKIYSKHTPINLVRDLPQGFSALEPLVDLPIGINITRFQTLLALHRSYLTPGDSSSGWTAGAAAYYVGYLQPRTFLLKYNENGTITDAVDCALDPLSETKCTLKSFTVEKGIYQTSNFRVQPTESIVRFPNITNLCPFGEVFNATRFASVYAWNRKRISNCVADYSVLYNSASFSTFKCYGVSPTKLNDLCFTNVYADSFVIRGDEVRQIAPGQTGKIADYNYKLPDDFTGCVIAWNSNNLDSKVGGNYNYLYRLFRKSNLKPFERDISTEIYQAGSTPCNGVEGFNCYFPLQSYGFQPTNGVGYQPYRVVVLSFELLHAPATVCGPKKSTNLVKNKCVNFNFNGLTGTGVLTESNKKFLPFQQFGRDIADTTDAVRDPQTLEILDITPCSFGGVSVITPGTNTSNQVAVLYQDVNCTEVPVAIHADQLTPTWRVYSTGSNVFQTRAGCLIGAEHVNNSYECDIPIGAGICASYQTQTNSPRRARSVASQSIIAYTMSLGAENSVAYSNNSIAIPTNFTISVTTEILPVSMTKTSVDCTMYICGDSTECSNLLLQYGSFCTQLNRALTGIAVEQDKNTQEVFAQVKQIYKTPPIKDFGGFNFSQILPDPSKPSKRSFIEDLLFNKVTLADAGFIKQYGDCLGDIAARDLICAQKFNGLTVLPPLLTDEMIAQYTSALLAGTITSGWWFGAGAALQIPFAMQMAYRFNGIGVTQNVLYENQKLIANQFNSAIGKIQDSLSSTASALGKLQDVVNQNAQALNTLVKQLSSNFGAISSVLNDILSRLDPPEAEVQIDRLITGRLQSLQTYVTQQLIRAAEIRWSANLAATKMSECVLGQSKRVDFCGKGYHLMSFPQSAPHGVVFLHVTYVPAQEKNFTTAPAICHDGKAHFPREGVFVSNGTHWFVTQRNFYEPQIITTDNTFVSGNCDVVIGIVNNTVYDPLQPELDSFKEELDKYFKNHTSPDVDLGDISGINASVVNIQKEIDRLNEVAKNLNESLIDLQELGKYEQYIKGGGGSDIDPYKEFGSSYQLLNFLPLDFFPDLNALVDTATALYEEELTGREHCSPHHTAIRQALVCWDELTKLIAWMSSNITSEQVRTIIVNHVNDTWGLKVRQSLWFHLSCLTFGQHTVQEFLVSFGVWIRTPAPYRPPNAPILSTLPEHTVIC

SEQ ID NO: 6776 - protein, 1365 aa, Artificial Sequence
  SARS-CoV-2/Guangdong/20SF028/2020__EPI_ISL_403936 spike protein (1-1211)(K986P_V987P_T887W_A1020W) WhcAg construct
MFVFLVLLPLVSSQCVNLTTRTQLPPAYTNSFTRGVYYPDKVFRSSVLYSTQDLFLPFFSNVTWFHAIHVSGTNGTKRFDNPVLPFNDGVYFASTEKSNIIRGWIFGTTLDSKTQSLLIVNNATNVVIKVCEFQFCNDPFLGVYYHKNNKSWMESEFRVYSSANNCTFEYVSQPFLMDLEGKQGNFKNLREFVFKNIDGYFKIYSKHTPINLVRDLPQGFSALEPLVDLPIGINITRFQTLLALHRSYLTPGDSSSGWTAGAAAYYVGYLQPRTFLLKYNENGTITDAVDCALDPLSETKCTLKSFTVEKGIYQTSNFRVQPTESIVRFPNITNLCPFGEVFNATRFASVYAWNRKRISNCVADYSVLYNSASFSTFKCYGVSPTKLNDLCFTNVYADSFVIRGDEVRQIAPGQTGKIADYNYKLPDDFTGCVIAWNSNNLDSKVGGNYNYLYRLFRKSNLKPFERDISTEIYQAGSTPCNGVEGFNCYFPLQSYGFQPTNGVGYQPYRVVVLSFELLHAPATVCGPKKSTNLVKNKCVNFNFNGLTGTGVLTESNKKFLPFQQFGRDIADTTDAVRDPQTLEILDITPCSFGGVSVITPGTNTSNQVAVLYQDVNCTEVPVAIHADQLTPTWRVYSTGSNVFQTRAGCLIGAEHVNNSYECDIPIGAGICASYQTQTNSPRRARSVASQSIIAYTMSLGAENSVAYSNNSIAIPTNFTISVTTEILPVSMTKTSVDCTMYICGDSTECSNLLLQYGSFCTQLNRALTGIAVEQDKNTQEVFAQVKQIYKTPPIKDFGGFNFSQILPDPSKPSKRSFIEDLLFNKVTLADAGFIKQYGDCLGDIAARDLICAQKFNGLTVLPPLLTDEMIAQYTSALLAGTITSGWWFGAGAALQIPFAMQMAYRFNGIGVTQNVLYENQKLIANQFNSAIGKIQDSLSSTASALGKLQDVVNQNAQALNTLVKQLSSNFGAISSVLNDILSRLDPPEAEVQIDRLITGRLQSLQTYVTQQLIRAAEIRWSANLAATKMSECVLGQSKRVDFCGKGYHLMSFPQSAPHGVVFLHVTYVPAQEKNFTTAPAICHDGKAHFPREGVFVSNGTHWFVTQRNFYEPQIITTDNTFVSGNCDVVIGIVNNTVYDPLQPELDSFKEELDKYFKNHTSPDVDLGDISGINASVVNIQKEIDRLNEVAKNLNESLIDLQELGKYEQYIKGGGGSDIDPYKEFGSSYQLLNFLPLDFFPDLNALVDTATALYEEELTGREHCSPHHTAIRQALVCWDELTKLIAWMSSNITSEQVRTIIVNHVNDTWGLKVRQSLWFHLSCLTFGQHTVQEFLVSFGVWIRTPAPYRPPNAPILSTLPEHTVIC

SEQ ID NO: 6777 - protein, 1365 aa, Artificial Sequence
  SARS-CoV-2/Shenzhen/SZTH-001/2020__EPI_ISL_406592 spike protein (1-1211)(K986P_V987P_T887W_A1020W) WhcAg construct
MFVFLVLLPLVSSQCVNLTTRTQLPPAYTNSFTRGVYYPDKVFRSSVLHSTQDLFLPFFSNVTWFHAIHVSGTNGTKRFDNPVLPFNDGVYFASTEKSNIIRGWIFGTTLDSKTQSLLIVNNATNVVIKVCEFQFCNDPFLGVYYHKNNKSWMESEFRVYSSANNCTFEYVSQPFLMDLEGKQGNFKNLREFVFKNIDGYFKIYSKHTPINLVRDLPQGFSALEPLVDLPIGINITRFQTLLALHRSYLTPGDSSSGWTAGAAAYYVGYLQPRTFLLKYNENGTITDAVDCALDPLSETKCTLKSFTVEKGIYQTSNFRVQPTESIVRFPNITNLCPFGEVFNATRFASVYAWNRKRISNCVADYSVLYNSASFSTFKCYGVSPTKLNDLCFTNVYADSFVIRGDEVRQIAPGQTGKIADYNYKLPDDFTGCVIAWNSNNLDSKVGGNYNYLYRLFRKSNLKPFERDISTEIYQAGSTPCNGVEGFNCYFPLQSYGFQPTNGVGYQPYRVVVLSFELLHAPATVCGPKKSTNLVKNKCVNFNFNGLTGTGVLTESNKKFLPFQQFGRDIADTTDAVRDPQTLEILDITPCSFGGVSVITPGTNTSNQVAVLYQDVNCTEVPVAIHADQLTPTWRVYSTGSNVFQTRAGCLIGAEHVNNSYECDIPIGAGICASYQTQTNSPRRARSVASQSIIAYTMSLGAENSVAYSNNSIAIPTNFTISVTTEILPVSMTKTSVDCTMYICGDSTECSNLLLQYGSFCTQLNRALTGIAVEQDKNTQEVFAQVKQIYKTPPIKDFGGFNFSQILPDPSKPSKRSFIEDLLFNKVTLADAGFIKQYGDCLGDIAARDLICAQKFNGLTVLPPLLTDEMIAQYTSALLAGTITSGWWFGAGAALQIPFAMQMAYRFNGIGVTQNVLYENQKLIANQFNSAIGKIQDSLSSTASALGKLQDVVNQNAQALNTLVKQLSSNFGAISSVLNDILSRLDPPEAEVQIDRLITGRLQSLQTYVTQQLIRAAEIRWSANLAATKMSECVLGQSKRVDFCGKGYHLMSFPQSAPHGVVFLHVTYVPAQEKNFTTAPAICHDGKAHFPREGVFVSNGTHWFVTQRNFYEPQIITTDNTFVSGNCDVLIGIVNNTVYDPLQPELDSFKEELDKYFKNHTSPDVDLGDISGINASVVNIQKEIDRLNEVAKNLNESLIDLQELGKYEQYIKGGGGSDIDPYKEFGSSYQLLNFLPLDFFPDLNALVDTATALYEEELTGREHCSPHHTAIRQALVCWDELTKLIAWMSSNITSEQVRTIIVNHVNDTWGLKVRQSLWFHLSCLTFGQHTVQEFLVSFGVWIRTPAPYRPPNAPILSTLPEHTVIC

SEQ ID NO: 6778 - protein, 1365 aa, Artificial Sequence
  SARS-CoV-2/Shenzhen/SZTH-004/2020__EPI_ISL_406595 spike protein (1-1211)(K986P_V987P_T887W_A1020W) WhcAg construct
MFVFLVLLPLVSSQCVNLTTRTQLPPAYTNSFTRGVYYPDKVFRSSVLHSTQDLFLPFFSNVTWFHAIHVSGTNGTKRFDNPVLPFNDGVYFASTEKSNIIRGWIFGTTLDSKTQSLLIVNNATNVVIKVCEFQFCNDPFLGVYYHKNNKSWMESEFRVYSSANNCTFEYVSQPFLMDLEGKQGNFKNLREFVFKNIDGYFKIYSKHTPINLVRDLPQGFSALEPLVDLPIGINITRFQTLLALHRSYLTPGDSSSGWTAGAAAYYVGYLQPRTFLLKYNENGTITDAVDCALDPLSETKCTLKSFTVEKGIYQTSNFRVQPTESIVRFPNITNLCPFGEVFNATRFASVYAWDRKRISNCVAYYSVLYNSASFSTFKCYGVSPTKLNDLCFTNVYADSFVIRGDEVRQIAPGQTGKIADYNYKLPDDFTGCVIAWNSNNLDSKVGGNYNYLYRLFRKSNLKPFERDISTEIYQAGSTPCNGVEGFNCYFPLQSYGFQPTNGVGYQPYRVVVLSFELLHAPATVCGPKKSTNLVKNKCVNFNFNGLTGTGVLTESNKKFLPFQQFGRDIADTTDAVRDPQTLEILDITPCSFGGVSVITPGTNTSNQVAVLYQDVNCTEVPVAIHADQLTPTWRVYSTGSNVFQTRAGCLIGAEHVNNSYECDIPIGAGICASYQTQTNSPRRARSVASQSIIAYTMSLGAENSVAYSNNSIAIPTNFTISVTTEILPVSMTKTSVDCTMYICGDSTECSNLLLQYGSFCTQLNRALTGIAVEQDKNTQEVFAQVKQIYKTPPIKDFGGFNFSQILPDPSKPSKRSFIEDLLFNKVTLADAGFIKQYGDCLGDIAARDLICAQKFNGLTVLPPLLTDEMIAQYTSALLAGTITSGWWFGAGAALQIPFAMQMAYRFNGIGVTQNVLYENQKLIANQFNSAIGKIQDSLSSTASALGKLQDVVNQNAQALNTLVKQLSSNFGAISSVLNDILSRLDPPEAEVQIDRLITGRLQSLQTYVTQQLIRAAEIRWSANLAATKMSECVLGQSKRVDFCGKGYHLMSFPQSAPHGVVFLHVTYVPAQEKNFTTAPAICHDGKAHFPREGVFVSNGTHWFVTQRNFYEPQIITTDNTFVSGNCDVVIGIVNNTVYDPLQPELDSFKEELDKYFKNHTSPDVDLGDISGINASVVNIQKEIDRLNEVAKNLNESLIDLQELGKYEQYIKGGGGSDIDPYKEFGSSYQLLNFLPLDFFPDLNALVDTATALYEEELTGREHCSPHHTAIRQALVCWDELTKLIAWMSSNITSEQVRTIIVNHVNDTWGLKVRQSLWFHLSCLTFGQHTVQEFLVSFGVWIRTPAPYRPPNAPILSTLPEHTVIC

SEQ ID NO: 6779 - protein, 1365 aa, Artificial Sequence
  SARS-CoV-2/France/IDF0372/2020__EPI_ISL_406596 spike protein (1-1211)(K986P_V987P_T887W_A1020W) WhcAg construct
MFVFLVLLPLVSSQCVNLTTRTQLPPAYTNSFTRGVYYPDKVFRSSVLHSTQDLFLPFFSNVTWFHAIHVSGTNGTKRFDNPVLPFNDGVYFASTEKSNIIRGWIFGTTLDSKTQSLLIVNNATNVVIKVCEFQFCNDPFLGVYYHKNNKSWMESEFRVYSSANNCTFEYVSQPFLMDLEGKQGNFKNLREFVFKNIDGYFKIYSKHTPINLVRDLPQGFSALEPLVDLPIGINITRFQTLLALHRSYLTPGDSSSGWTAGAAAYYVGYLQPRTFLLKYNENGTITDAVDCALDPLSETKCTLKSFTVEKGIYQTSNFRVQPTESIVRFPNITNLCPFGEVFNATRFASVYAWNRKRISNCVADYSFLYNSASFSTFKCYGVSPTKLNDLCFTNVYADSFVIRGDEVRQIAPGQTGKIADYNYKLPDDFTGCVIAWNSNNLDSKVGGNYNYLYRLFRKSNLKPFERDISTEIYQAGSTPCNGVEGFNCYFPLQSYGFQPTNGVGYQPYRVVVLSFELLHAPATVCGPKKSTNLVKNKCVNFNFNGLTGTGVLTESNKKFLPFQQFGRDIADTTDAVRDPQTLEILDITPCSFGGVSVITPGTNTSNQVAVLYQDVNCTEVPVAIHADQLTPTWRVYSTGSNVFQTRAGCLIGAEHVNNSYECDIPIGAGICASYQTQTNSPRRARSVASQSIIAYTMSLGAENSVAYSNNSIAIPTNFTISVTTEILPVSMTKTSVDCTMYICGDSTECSNLLLQYGSFCTQLNRALTGIAVEQDKNTQEVFAQVKQIYKTPPIKDFGGFNFSQILPDPSKPSKRSFIEDLLFNKVTLADAGFIKQYGDCLGDIAARDLICAQKFNGLTVLPPLLTDEMIAQYTSALLAGTITSGWWFGAGAALQIPFAMQMAYRFNGIGVTQNVLYENQKLIANQFNSAIGKIQDSLSSTASALGKLQDVVNQNAQALNTLVKQLSSNFGAISSVLNDILSRLDPPEAEVQIDRLITGRLQSLQTYVTQQLIRAAEIRWSANLAATKMSECVLGQSKRVDFCGKGYHLMSFPQSAPHGVVFLHVTYVPAQEKNFTTAPAICHDGKAHFPREGVFVSNGTHWFVTQRNFYEPQIITTDNTFVSGNCDVVIGIVNNTVYDPLQPELDSFKEELDKYFKNHTSPDVDLGDISGINASVVNIQKEIDRLNEVAKNLNESLIDLQELGKYEQYIKGGGGSDIDPYKEFGSSYQLLNFLPLDFFPDLNALVDTATALYEEELTGREHCSPHHTAIRQALVCWDELTKLIAWMSSNITSEQVRTIIVNHVNDTWGLKVRQSLWFHLSCLTFGQHTVQEFLVSFGVWIRTPAPYRPPNAPILSTLPEHTVIC

SEQ ID NO: 6780 - protein, 1365 aa, Artificial Sequence
  SARS-CoV-2/Australia/VIC01/2020__EPI_ISL_406844 spike protein (1-1211)(K986P_V987P_T887W_A1020W) WhcAg construct
MFVFLVLLPLVSSQCVNLTTRTQLPPAYTNSFTRGVYYPDKVFRSSVLHSTQDLFLPFFSNVTWFHAIHVSGTNGTKRFDNPVLPFNDGVYFASTEKSNIIRGWIFGTTLDSKTQSLLIVNNATNVVIKVCEFQFCNDPFLGVYYHKNNKSWMESEFRVYSSANNCTFEYVSQPFLMDLEGKQGNFKNLREFVFKNIDGYFKIYSKHTPINLVRDLPQGFSALEPLVDLPIGINITRFQTLLALHRRYLTPGDSSSGWTAGAAAYYVGYLQPRTFLLKYNENGTITDAVDCALDPLSETKCTLKSFTVEKGIYQTSNFRVQPTESIVRFPNITNLCPFGEVFNATRFASVYAWNRKRISNCVADYSVLYNSASFSTFKCYGVSPTKLNDLCFTNVYADSFVIRGDEVRQIAPGQTGKIADYNYKLPDDFTGCVIAWNSNNLDSKVGGNYNYLYRLFRKSNLKPFERDISTEIYQAGSTPCNGVEGFNCYFPLQSYGFQPTNGVGYQPYRVVVLSFELLHAPATVCGPKKSTNLVKNKCVNFNFNGLTGTGVLTESNKKFLPFQQFGRDIADTTDAVRDPQTLEILDITPCSFGGVSVITPGTNTSNQVAVLYQDVNCTEVPVAIHADQLTPTWRVYSTGSNVFQTRAGCLIGAEHVNNSYECDIPIGAGICASYQTQTNSPRRARSVASQSIIAYTMSLGAENSVAYSNNSIAIPTNFTISVTTEILPVSMTKTSVDCTMYICGDSTECSNLLLQYGSFCTQLNRALTGIAVEQDKNTQEVFAQVKQIYKTPPIKDFGGFNFSQILPDPSKPSKRSFIEDLLFNKVTLADAGFIKQYGDCLGDIAARDLICAQKFNGLTVLPPLLTDEMIAQYTSALLAGTITSGWWFGAGAALQIPFAMQMAYRFNGIGVTQNVLYENQKLIANQFNSAIGKIQDSLSSTASALGKLQDVVNQNAQALNTLVKQLSSNFGAISSVLNDILSRLDPPEAEVQIDRLITGRLQSLQTYVTQQLIRAAEIRWSANLAATKMSECVLGQSKRVDFCGKGYHLMSFPQSAPHGVVFLHVTYVPAQEKNFTTAPAICHDGKAHFPREGVFVSNGTHWFVTQRNFYEPQIITTDNTFVSGNCDVVIGIVNNTVYDPLQPELDSFKEELDKYFKNHTSPDVDLGDISGINASVVNIQKEIDRLNEVAKNLNESLIDLQELGKYEQYIKGGGGSDIDPYKEFGSSYQLLNFLPLDFFPDLNALVDTATALYEEELTGREHCSPHHTAIRQALVCWDELTKLIAWMSSNITSEQVRTIIVNHVNDTWGLKVRQSLWFHLSCLTFGQHTVQEFLVSFGVWIRTPAPYRPPNAPILSTLPEHTVIC

SEQ ID NO: 6781 - protein, 1365 aa, Artificial Sequence
  SARS-CoV-2/Germany/BavPat1/2020__EPI_ISL_406862 spike protein (1-1211)(K986P_V987P_T887W_A1020W) WhcAg construct
MFVFLVLLPLVSSQCVNLTTRTQLPPAYTNSFTRGVYYPDKVFRSSVLHSTQDLFLPFFSNVTWFHAIHVSGTNGTKRFDNPVLPFNDGVYFASTEKSNIIRGWIFGTTLDSKTQSLLIVNNATNVVIKVCEFQFCNDPFLGVYYHKNNKSWMESEFRVYSSANNCTFEYVSQPFLMDLEGKQGNFKNLREFVFKNIDGYFKIYSKHTPINLVRDLPQGFSALEPLVDLPIGINITRFQTLLALHRSYLTPGDSSSGWTAGAAAYYVGYLQPRTFLLKYNENGTITDAVDCALDPLSETKCTLKSFTVEKGIYQTSNFRVQPTESIVRFPNITNLCPFGEVFNATRFASVYAWNRKRISNCVADYSVLYNSASFSTFKCYGVSPTKLNDLCFTNVYADSFVIRGDEVRQIAPGQTGKIADYNYKLPDDFTGCVIAWNSNNLDSKVGGNYNYLYRLFRKSNLKPFERDISTEIYQAGSTPCNGVEGFNCYFPLQSYGFQPTNGVGYQPYRVVVLSFELLHAPATVCGPKKSTNLVKNKCVNFNFNGLTGTGVLTESNKKFLPFQQFGRDIADTTDAVRDPQTLEILDITPCSFGGVSVITPGTNTSNQVAVLYQGVNCTEVPVAIHADQLTPTWRVYSTGSNVFQTRAGCLIGAEHVNNSYECDIPIGAGICASYQTQTNSPRRARSVASQSIIAYTMSLGAENSVAYSNNSIAIPTNFTISVTTEILPVSMTKTSVDCTMYICGDSTECSNLLLQYGSFCTQLNRALTGIAVEQDKNTQEVFAQVKQIYKTPPIKDFGGFNFSQILPDPSKPSKRSFIEDLLFNKVTLADAGFIKQYGDCLGDIAARDLICAQKFNGLTVLPPLLTDEMIAQYTSALLAGTITSGWWFGAGAALQIPFAMQMAYRFNGIGVTQNVLYENQKLIANQFNSAIGKIQDSLSSTASALGKLQDVVNQNAQALNTLVKQLSSNFGAISSVLNDILSRLDPPEAEVQIDRLITGRLQSLQTYVTQQLIRAAEIRWSANLAATKMSECVLGQSKRVDFCGKGYHLMSFPQSAPHGVVFLHVTYVPAQEKNFTTAPAICHDGKAHFPREGVFVSNGTHWFVTQRNFYEPQIITTDNTFVSGNCDVVIGIVNNTVYDPLQPELDSFKEELDKYFKNHTSPDVDLGDISGINASVVNIQKEIDRLNEVAKNLNESLIDLQELGKYEQYIKGGGGSDIDPYKEFGSSYQLLNFLPLDFFPDLNALVDTATALYEEELTGREHCSPHHTAIRQALVCWDELTKLIAWMSSNITSEQVRTIIVNHVNDTWGLKVRQSLWFHLSCLTFGQHTVQEFLVSFGVWIRTPAPYRPPNAPILSTLPEHTVIC

SEQ ID NO: 6782 - protein, 1365 aa, Artificial Sequence
  SARS-CoV-2/Wuhan/HBCDC-HB-02/2020__EPI_ISL_412978 spike protein (1-1211)(K986P_V987P_T887W_A1020W) WhcAg construct
MFVFLVLLPLVSSQCVNLTTRTQLPPAYTNSFTRGVYYPDKVFRSSVLHSTQDLFLPFFSNVTWFHAIHVSGTNGTKRFDNPVLPFNDGVYFASTEKSNIIRGWIFGTTLDSKTQSLLIVNNATNVVIKVCEFQFCNDPFLGVYYHKNNKSWMESEFRVYSSANNCTFEYVSQPFLMDLEGKQGNFKNLREFVFKNIDGYFKIYSKHTPINLVRDLPQGFSALEPLVDLPIGINITRFQTLLALHRSYLTPGDSSSGWTAGAAAYYVGYLQPRTFLLKYNENGTITDAVDCALDPLSETKCTLKSFTVEKGIYQTSNFRVQPTESIVRFPNITNLCPFGEVFNATRFASVYAWNRKRISNCVADYSVLYNSASFSTFKCYGVSPTKLNDLCFTNVYADSFVIRGDEVRQIAPGQTGKIADYNYKLPDDFTGCVIAWNSNNLDSKVGGNYNYLYRLFRKSNLKPFERDISTEIYQAGSTPCNGVEGFNCYFPLQSYGFQPTNGVGYQPYRVVVLSFELLHAPATVCGPKKSTNLVKNKCVNFNFNGLTGTGVLTESNKKFLPFQQFGRDIADTTDAVRDPQTLEILDITPCSFGGVSVITPGTNTSNQVAVLYQDVNCTEVPVAIHADQLTPTWRVYSTGSNVFQTRAGCLIGAEHVNNSYECDIPIGAGICASYQTQTNSPRRARSVASQSIIAYTMSLGAENSVAYSNNSIAIPTNFTISVTTEILPVSMTKTSVDCTMYICGDSTECSNFLLQYGSFCTQLNRALTGIAVEQDKNTQEVFAQVKQIYKTPPIKDFGGFNFSQILPDPSKPSKRSFIEDLLFNKVTLADAGFIKQYGDCLGDIAARDLICAQKFNGLTVLPPLLTDEMIAQYTSALLAGTITSGWWFGAGAALQIPFAMQMAYRFNGIGVTQNVLYENQKLIANQFNSAIGKIQDSLSSTASALGKLQDVVNQNAQALNTLVKQLSSNFGAISSVLNDILSRLDPPEAEVQIDRLITGRLQSLQTYVTQQLIRAAEIRWSANLAATKMSECVLGQSKRVDFCGKGYHLMSFPQSAPHGVVFLHVTYVPAQEKNFTTAPAICHDGKAHFPREGVFVSNGTHWFVTQRNFYEPQIITTDNTFVSGNCDVVIGIVNNTVYDPLQPELDSFKEELDKYFKNHTSPDVDLGDISGINASVVNIQKEIDRLNEVAKNLNESLIDLQELGKYEQYIKGGGGSDIDPYKEFGSSYQLLNFLPLDFFPDLNALVDTATALYEEELTGREHCSPHHTAIRQALVCWDELTKLIAWMSSNITSEQVRTIIVNHVNDTWGLKVRQSLWFHLSCLTFGQHTVQEFLVSFGVWIRTPAPYRPPNAPILSTLPEHTVIC

SEQ ID NO: 6783 - protein, 1365 aa, Artificial Sequence
  SARS-CoV-2/Australia/QLD02/2020__EPI_ISL_407896 spike protein (1-1211)(K986P_V987P_T887W_A1020W) WhcAg construct
MFVFLVLLPLVSSQCVNLTTRTQLPPAYTNSFTRGVYYPDKVFRSSVLHSTQDLFLPFFSNVTWFHAIHVSGTNGTKRFDNPVLPFNDGVYFASTEKSNIIRGWIFGTTLDSKTQSLLIVNNATNVVIKVCEFQFCNDPFLGVYYHKNNKSWMESEFRVYSSANNCTFEYVSQPFLMDLEGKQGNFKNLREFVFKNIDGYFKIYSKHTPINLVRDLPQGFSALEPLVDLPIGINITRFQTLLALHRSYLTPGDSSSGWTAGAAAYYVGYLQPRTFLLKYNENGTITDAVDCALDPLSETKCTLKSFTVEKGIYQTSNFRVQPTESIVRFPNITNLCPFGEVFNATRFASVYAWNRKRISNCVADYSVLYNSASFSTFKCYGVSPTKLNDLCFTNVYADSFVIRGDEVRQIAPGQTGKIADYNYKLPDDFTGCVIAWNSNNLDSKVGGNYNYLYRLFRKSNLKPFERDISTEIYQAGSTPCNGVEGFNCYFPLQSYGFQPTNGVGYQPYRVVVLSFELLHAPATVCGPKKSTNLVKNKCVNFNFNGLTGTGVLTESNKKFLPFQQFGRDIADTTDAVRDPQTLEILDITPCSFGGVSVITPGTNTSNQVAVLYQDVNCTEVPVAIHADQLTPTWRVYSTGSNVFQTRAGCLIGAEHVNNSYECDIPIGAGICASYQTQTNSPRRARSVASQSIIAYTMSLGAENSVAYSNNSIAIPTNFTISVTTEILPVSMTKTSVDCTMYICGDSTECSNLLLQYGSFCTQLNRALTGIAVEQDKNTQEVFAQVKQIYKTPPIKDFGGFNFSQILPDPSKPSKRSFIEDLLFNKVTLADAGFIKQYGDCLGDIAARDLICAQKFNGLTVLPPLLTDEMIAQYTSALLAGTITSGWWFGAGAALQIPFAMQMAYRFNGIGVTQNVLYENQKLIANQFNSAIGKIQDSLSSTASALGKLQDVVNQNAQALNTLVKQLSSNFGAISSVLNDILSRLDPPEAEVQIDRLITGRLQSLQTYVTQQLIRAAEIRWSANLAATKMSECVLGQSKRVDFCGKGYHLMSFPQSAPHGVVFLHVTYVPAQEKNFTTAPAICHDGKAHFPREGVFVSNGTHWFVTQRNFYEPQIITTDNTFVSGNCDVVIGIVNNTVYDPLQLELDSFKEELDKYFKNHTSPDVDLGDISGINASVVNIQKEIDRLNEVAKNLNESLIDLQELGKYEQYIKGGGGSDIDPYKEFGSSYQLLNFLPLDFFPDLNALVDTATALYEEELTGREHCSPHHTAIRQALVCWDELTKLIAWMSSNITSEQVRTIIVNHVNDTWGLKVRQSLWFHLSCLTFGQHTVQEFLVSFGVWIRTPAPYRPPNAPILSTLPEHTVIC

SEQ ID NO: 6784 - protein, 1365 aa, Artificial Sequence
  SARS-CoV-2/India/1-31/2020__EPI_ISL_413523 spike protein (1-1211)(K986P_V987P_T887W_A1020W) WhcAg construct
MFVFLVLLPLVSSQCVNLTTRTQLPPAYTNSFTRGVYYPDKVFRSSVLHSTQDLFLPFFSNVTWFHAIHVSGTNGTKRFDNPVLPFNDGVYFASTEKSNIIRGWIFGTTLDSKTQSLLIVNNATNVVIKVCEFQFCNDPFLGVYYHKNNKSWMESEFRVYSSANNCTFEYVSQPFLMDLEGKQGNFKNLREFVFKNIDGYFKIYSKHTPINLVRDLPQGFSALEPLVDLPIGINITRFQTLLALHRSYLTPGDSSSGWTAGAAAYYVGYLQPRTFLLKYNENGTITDAVDCALDPLSETKCTLKSFTVEKGIYQTSNFRVQPTESIVRFPNITNLCPFGEVFNATRFASVYAWNRKRISNCVADYSVLYNSASFSTFKCYGVSPTKLNDLCFTNVYADSFVIRGDEVRQIAPGQTGKIADYNYKLPDDFTGCVIAWNSNNLDSKVGGNYNYLYRLFRKSNLKPFERDISTEIYQAGSTPCNGVEGFNCYFPLQSYGFQPTNGVGYQPYRVVVLSFELLHAPATVCGPKKSTNLVKNKCVNFNFNGLTGTGVLTESNKKFLPFQQFGRDIADTTDAVRDPQTLEILDITPCSFGGVSVITPGTNTSNQVAVLYQDVNCTEVPVAIHADQLTPTWRVYSTGSNVFQTRAGCLIGAEHVNNSYECDIPIGAGICASYQTQTNSPRRARSVASQSIIAYTMSLGAENSVAYSNNSIAIPTNFTISVTTEILPVSMTKTSVDCTMYICGDSTECSNLLLQYGSFCTQLNRALTGIAVEQDKNTQEVFAQVKQIYKTPPIKDFGGFNFSQILPDPSKPSKRSFIEDLLFNKVTLADAGFIKQYGDCLGDIAARDLICAQKFNGLTVLPPLLTDEMIAQYTSALLAGTITSGWWFGAGAALQIPFAMQMAYRFNGIGVTQNVLYENQKLIANQFNSVIGKIQDSLSSTASALGKLQDVVNQNAQALNTLVKQLSSNFGAISSVLNDILSRLDPPEAEVQIDRLITGRLQSLQTYVTQQLIRAAEIRWSANLAATKMSECVLGQSKRVDFCGKGYHLMSFPQSAPHGVVFLHVTYVPAQEKNFTTAPAICHDGKAHFPREGVFVSNGTHWFVTQRNFYEPQIITTDNTFVSGNCDVVIGIVNNTVYDPLQPELDSFKEELDKYFKNHTSPDVDLGDISGINASVVNIQKEIDRLNEVAKNLNESLIDLQELGKYEQYIKGGGGSDIDPYKEFGSSYQLLNFLPLDFFPDLNALVDTATALYEEELTGREHCSPHHTAIRQALVCWDELTKLIAWMSSNITSEQVRTIIVNHVNDTWGLKVRQSLWFHLSCLTFGQHTVQEFLVSFGVWIRTPAPYRPPNAPILSTLPEHTVIC

SEQ ID NO: 6785 - protein, 1365 aa, Artificial Sequence
  SARS-CoV-2/Guangdong/GD2020087-P0008/2020__EPI_ISL_413863 spike protein (1-1211)(K986P_V987P_T887W_A1020W) WhcAg construct
MFVFLVLLPLVSSQCVNLTTRTQLPPAYTNSFTRGVYYPDKVFRSSVLHSTQDLFLPFFSNVTWFHAIHVSGTNGTKRFDNPVLPFNDGVYFASTEKSNIIRGWIFGTTLDSKTQSLLIVNNATNVVIKVCEFQFCNDPFLGVYYHKNNKSWMESEFRVYSSANNCTFEYVSQPFLMDLEGKQGNFKNLREFVFKNIDGYFKIYSKHTPINLVRDLPQGFSALEPLVDLPIGINITRFQTLLALHRSYLTPGDSSSGWTAGAAAYYVGYLQPRTFLLKYNENGTITDAVDCALDPLSETKCTLKSFTVEKGIYQTSNFRVQPTESIVRFPNITNLCPFGEVFNATRFASVYAWNRKRISNCVADYSVLYNSASFSTFKCYGVSPTKLNDLCFTNVYADSFVIRGDEVREIAPGQTGKIADYNYKLPDDFTGCVIAWNSNNLDSKVGGNYNYLYRLFRKSNLKPFERDISTEIYQAGSTPCNGVEGFNCYFPLQSYGFQPTNGVGYQPYRVVVLSFELLHAPATVCGPKKSTNLVKNKCVNFNFNGLTGTGVLTESNKKFLPFQQFGRDIADTTDAVRDPQTLEILDITPCSFGGVSVITPGTNTSNQVAVLYQDVNCTEVPVAIHADQLTPTWRVYSTGSNVFQTRAGCLIGAEHVNNSYECDIPIGAGICASYQTQTNSPRRARSVASQSIIAYTMSLGAENSVAYSNNSIAIPTNFTISVTTEILPVSMTKTSVDCTMYICGDSTECSNLLLQYGSFCTQLNRALTGIAVEQDKNTQEVFAQVKQIYKTPPIKDFGGFNFSQILPDPSKPSKRSFIEDLLFNKVTLADAGFIKQYGDCLGDIAARDLICAQKFNGLTVLPPLLTDEMIAQYTSALLAGTITSGWWFGAGAALQIPFAMQMAYRFNGIGVTQNVLYENQKLIANQFNSAIGKIQDSLSSTASALGKLQDVVNQNAQALNTLVKQLSSNFGAISSVLNDILSRLDPPEAEVQIDRLITGRLQSLQTYVTQQLIRAAEIRWSANLAATKMSECVLGQSKRVDFCGKGYHLMSFPQSAPHGVVFLHVTYVPAQEKNFTTAPAICHDGKAHFPREGVFVSNGTHWFVTQRNFYEPQIITTDNTFVSGNCDVVIGIVNNTVYDPLQPELDSFKEELDKYFKNHTSPDVDLGDISGINASVVNIQKEIDRLNEVAKNLNESLIDLQELGKYEQYIKGGGGSDIDPYKEFGSSYQLLNFLPLDFFPDLNALVDTATALYEEELTGREHCSPHHTAIRQALVCWDELTKLIAWMSSNITSEQVRTIIVNHVNDTWGLKVRQSLWFHLSCLTFGQHTVQEFLVSFGVWIRTPAPYRPPNAPILSTLPEHTVIC

SEQ ID NO: 6786 - protein, 1365 aa, Artificial Sequence
  SARS-CoV-2/Sweden/01/2020__EPI_ISL_411951 spike protein (1-1211)(K986P_V987P_T887W_A1020W) WhcAg construct
MFVFLVLLPLVSSQCVNLTTRTQLPPAYTNSFTRGVYYPDKVFRSSVLHSTQDLFLPFFSNVTWFHAIHVSGTNGTKRFDNPVLPFNDGVYFASTEKSNIIRGWIFGTTLDSKTQSLLIVNNATNVVIKVCEFQFCNDPFLGVYYHKNNKSWMESEFRVYSSANNCTFEYVSQPFLMDLEGKQGNFKNLREFVFKNIDGYFKIYSKHTPINLVRDLPQGFSALEPLVDLPIGINITRFQTLLALHRSYLTPGDSSSGWTAGAAAYYVGYLQPRTFLLKYNENGTITDAVDCALDPLSETKCTLKSFTVEKGIYQTSNFRVQPTESIVRFPNITNLCPFGEVFNATRFASVYAWNRKRISNCVADYSVLYNSASFSTFKCYGVSPTKLNDLCFTNVYADSFVIRGDEVRQIAPGQTGKIADYNYKLPDDFTGCVIAWNSNNLDSKVGGNYNYLYRLFRKSNLKPFERDISTEIYQAGSTPCNGVEGFNCYFPLQSYGFQPTNGVGYQPYRVVVLSFELLHAPATVCGPKKSTNLVKNKCVNFNFNGLTGTGVLTESNKKFLPFQQFGRDIADTTDAVRDPQTLEILDITPCSFGGVSVITPGTNTSNQVAVLYQDVNCTEVPVAIHADQLTPTWRVYSTGSNVFQTRAGCLIGAEHVNNSYECDIPIGAGICASYQTQTNSPRRARSVASQSIIAYTMSLGAENSVAYSNNSIAIPTNFTISVTTEILPVSMTKTSVDCTMYICGDSTECSNLLLQYGSFCTQLNRALTGIAVEQDKNTQEVFAQVKQIYKTPPIKDCGGFNFSQILPDPSKPSKRSFIEDLLFNKVTLADAGFIKQYGDCLGDIAARDLICAQKFNGLTVLPPLLTDEMIAQYTSALLAGTITSGWWFGAGAALQIPFAMQMAYRFNGIGVTQNVLYENQKLIANQFNSAIGKIQDSLSSTASALGKLQDVVNQNAQALNTLVKQLSSNFGAISSVLNDILSRLDPPEAEVQIDRLITGRLQSLQTYVTQQLIRAAEIRWSANLAATKMSECVLGQSKRVDFCGKGYHLMSFPQSAPHGVVFLHVTYVPAQEKNFTTAPAICHDGKAHFPREGVFVSNGTHWFVTQRNFYEPQIITTDNTFVSGNCDVVIGIVNNTVYDPLQPELDSFKEELDKYFKNHTSPDVDLGDISGINASVVNIQKEIDRLNEVAKNLNESLIDLQELGKYEQYIKGGGGSDIDPYKEFGSSYQLLNFLPLDFFPDLNALVDTATALYEEELTGREHCSPHHTAIRQALVCWDELTKLIAWMSSNITSEQVRTIIVNHVNDTWGLKVRQSLWFHLSCLTFGQHTVQEFLVSFGVWIRTPAPYRPPNAPILSTLPEHTVIC

SEQ ID NO: 6787 - protein, 1365 aa, Artificial Sequence
  SARS-CoV-2/Tianmen/HBCDC-HB-07/2020__EPI_ISL_412983 spike protein (1-1211)(K986P_V987P_T887W_A1020W) WhcAg construct
MFVFLVLLPLVSSQCVNLTTRTQLPPAYTNSFTRGVYYPDKVFRSSVLHSTQDLFLPFFSNVTWFHAIHVSGTNGTKRFDNPVLPFNDGVYFASTEKSNIIRGWIFGTTLDSKTQSLLIVNNATNVVIKVCEFQFCNDPFLGVYYHKNNKSWMESEFRVYSSANNCTFEYVSQPFLMDLEGKQGNFKNLREFVFKNIDGYFKIYSKHTPINLVRDLPQGFSALEPLVDLPIGINITRFQTLLALHRSYLTPGDSSSGWTAGAAAYYVGYLQPRTFLLKYNENGTITDAVDCALDPLSETKCTLKSFTVEKGIYQTSNFRVQPTESIVRFPNITNLCPFGEVFNATRFASVYAWNRKRISNCVADYSVLYNSASFSTFKCYGVSPTKLNDLCFTNVYADSFVIRGDEVRQIAPGQTGKIADYNYKLPDDFTGCVIAWNSNNLDSKVGGNYNYLYRLFRKSNLKPFERDISTEIYQAGSTPCNGVEGFNCYFPLQSYGFQPTNGVGYQPYRVVVLSFELLHAPATVCGPKKSTNLVKNKCVNFNFNGLTGTGVLTESNKKFLPFQQFGRDIADTTDAVRDPQTLEILDITPCSFGGVSVITPGTNTSNQVAVLYQDLNCTEVPVAIHADQLTPTWRVYSTGSNVFQTRAGCLIGAEHVNNSYECDIPIGAGICASYQTQTNSPRRARSVASQSIIAYTMSLGAENSVAYSNNSIAIPTNFTISVTTEILPVSMTKTSVDCTMYICGDSTECSNLLLQYGSFCTQLNRALTGIAVEQDKNTQEVFAQVKQIYKTPPIKDFGGFNFSQILPDPSKPSKRSFIEDLLFNKVTLADAGFIKQYGDCLGDIAARDLICAQKFNGLTVLPPLLTDEMIAQYTSALLAGTITSGWWFGAGAALQIPFAMQMAYRFNGIGVTQNVLYENQKLIANQFNSAIGKIQDSLSSTASALGKLQDVVNQNAQALNTLVKQLSSNFGAISSVLNDILSRLDPPEAEVQIDRLITGRLQSLQTYVTQQLIRAAEIRWSANLAATKMSECVLGQSKRVDFCGKGYHLMSFPQSAPHGVVFLHVTYVPAQEKNFTTAPAICHDGKAHFPREGVFVSNGTHWFVTQRNFYEPQIITTDNTFVSGNCDVVIGIVNNTVYDPLQPELDSFKEELDKYFKNHTSPDVDLGDISGINASVVNIQKEIDRLNEVAKNLNESLIDLQELGKYEQYIKGGGGSDIDPYKEFGSSYQLLNFLPLDFFPDLNALVDTATALYEEELTGREHCSPHHTAIRQALVCWDELTKLIAWMSSNITSEQVRTIIVNHVNDTWGLKVRQSLWFHLSCLTFGQHTVQEFLVSFGVWIRTPAPYRPPNAPILSTLPEHTVIC

SEQ ID NO: 6788 - protein, 1365 aa, Artificial Sequence
  SARS-CoV-2/Hong Kong/case42_VM20002493/2020__EPI_ISL_414527 spike protein (1-1211)(K986P_V987P_T887W_A1020W) WhcAg construct
MFVFLVLLPLVSSQCVNLTTRTQLPPAYTNSFTRGVYYPDKVFRSSVLHSTQDLFLPFFSNVTWFHAIHVSGTNGTKRFDNPVLPFNDGVYFASTEKSNIIRGWIFGTTLDSKTQSLLIVNNATNVVIKVCEFQFCNDPFLGVYYHKNNKSWMESEFRVYSSANNCTFEYVSQPFLMDLEGKQGNFKNLREFVFKNIDGYFKIYSKHTPINLVRDLPQGFSALEPLVDLPIGINITRFQTLLALHRSYLTPGDSSSGWTAGAAAYYVGYLQPRTFLLKYNENGTITDAVDCALDPLSETKCTLKSFTVEKGIYQTSNFRVQPTESIVRFPNITNLCPFGEVFNATRFASVYAWNRKRISNCVADYSVLYNSASFSTFKCYGVSPTKLNDLCFTNVYADSFVIRGDEVRQIAPGQTGKIADYNYKLPDDFTGCVIAWNSNNLDSKVGGNYNYLYRLFRKSNLKPFERDISTEIYQAGSTPCNGVEGFNCYFPLQSYGFQPTNGVGYQPYRVVVLSFELLHAPATVCGPKKSTNLVKNKCVNFNFNGLTGTGVLTESNKKFLPFQQFGRDIADTTDAVRDPQTLEILDITPCSFGGVSVITPGTNTSNQVAVLYQDVNCTEVPVAIHADQLTPTWRVYSTGSNVFQTRAGCLIGAEHVNNSYECDIPIGAGICASYQTQTNSPRRARSVASQSIIAYTMSLGAENSVAYSNNSIAIPTNFAISVTTEILPVSMTKTSVDCTMYICGDSTECSNLLLQYGSFCTQLNRALTGIAVEQDKNTQEVFAQVKQIYKTPPIKDFGGFNFSQILPDPSKPSKRSFIEDLLFNKVTLADAGFIKQYGDCLGDIAARDLICAQKFNGLTVLPPLLTDEMIAQYTSALLAGTITSGWWFGAGAALQIPFAMQMAYRFNGIGVTQNVLYENQKLIANQFNSAIGKIQDSLSSTASALGKLQDVVNQNAQALNTLVKQLSSNFGAISSVLNDILSRLDPPEAEVQIDRLITGRLQSLQTYVTQQLIRAAEIRWSANLAATKMSECVLGQSKRVDFCGKGYHLMSFPQSAPHGVVFLHVTYVPAQEKNFTTAPAICHDGKAHFPREGVFVSNGTHWFVTQRNFYEPQIITTDNTFVSGNCDVVIGIVNNTVYDPLQPELDSFKEELDKYFKNHTSPDVDLGDISGINASVVNIQKEIDRLNEVAKNLNESLIDLQELGKYEQYIKGGGGSDIDPYKEFGSSYQLLNFLPLDFFPDLNALVDTATALYEEELTGREHCSPHHTAIRQALVCWDELTKLIAWMSSNITSEQVRTIIVNHVNDTWGLKVRQSLWFHLSCLTFGQHTVQEFLVSFGVWIRTPAPYRPPNAPILSTLPEHTVIC

SEQ ID NO: 6789 - protein, 1365 aa, Artificial Sequence
  SARS-CoV-2/USA/CruiseA-23/2020__EPI_ISL_414482 spike protein (1-1211)(K986P_V987P_T887W_A1020W) WhcAg construct
MFVFLVLLPLVSSQCVNLTTRTQLPPAYTNSFTRGVYYPDKVFRSSVLHSTQDLFLPFFSNVTWFHAIHVSGTNGTKRFDNPVLPFNDGVYFASTEKSNIIRGWIFGTTLDSKTQSLLIVNNATNVVIKVCEFQFCNDPFLGVYYHKNNKSWMESEFRVYSSANNCTFEYVSQPFLMDLEVKQGNFKNLREFVFKNIDGYFKIYSKHTPINLVRDLPQGFSALEPLVDLPIGINITRFQTLLALHRSYLTPGDSSSGWTAGAAAYYVGYLQPRTFLLKYNENGTITDAVDCALDPLSETKCTLKSFTVEKGIYQTSNFRVQPTESIVRFPNITNLCPFGEVFNATRFASVYAWNRKRISNCVADYSVLYNSASFSTFKCYGVSPTKLNDLCFTNVYADSFVIRGDEVRQIAPGQTGKIADYNYKLPDDFTGCVIAWNSNNLDSKVGGNYNYLYRLFRKSNLKPFERDISTEIYQAGSTPCNGVEGFNCYFPLQSYGFQPTNGVGYQPYRVVVLSFELLHAPATVCGPKKSTNLVKNKCVNFNFNGLTGTGVLTESNKKFLPFQQFGRDIADTTDAVRDPQTLEILDITPCSFGGVSVITPGTNTSNQVAVLYQDVNCTEVPVAIHADQLTPTWRVYSTGSNVFQTRAGCLIGAEHVNNSYECDIPIGAGICASYQTQTNSPRRARSVASQSIIAYTMSLGAENSVAYSNNSIAIPTNFTISVTTEILPVSMTKTSVDCTMYICGDSTECSNLLLQYGSFCTQLNRALTGIAVEQDKNTQEVFAQVKQIYKTPPIKDFGGFNFSQILPDPSKPSKRSFIEDLLFNKVTLADAGFIKQYGDCLGDIAARDLICAQKFNGLTVLPPLLTDEMIAQYTSALLAGTITSGWWFGAGAALQIPFAMQMAYRFNGIGVTQNVLYENQKLIANQFNSAIGKIQDSLSSTASALGKLQDVVNQNAQALNTLVKQLSSNFGAISSVLNDILSRLDPPEAEVQIDRLITGRLQSLQTYVTQQLIRAAEIRWSANLAATKMSECVLGQSKRVDFCGKGYHLMSFPQSAPHGVVFLHVTYVPAQEKNFTTAPAICHDGKAHFPREGVFVSNGTHWFVTQRNFYEPQIITTDNTFVSGNCDVVIGIVNNTVYDPLQPELDSFKEELDKYFKNHTSPDVDLGDISGINASVVNIQKEIDRLNEVAKNLNESLIDLQELGKYEQYIKGGGGSDIDPYKEFGSSYQLLNFLPLDFFPDLNALVDTATALYEEELTGREHCSPHHTAIRQALVCWDELTKLIAWMSSNITSEQVRTIIVNHVNDTWGLKVRQSLWFHLSCLTFGQHTVQEFLVSFGVWIRTPAPYRPPNAPILSTLPEHTVIC

SEQ ID NO: 6790 - protein, 1365 aa, Artificial Sequence
  SARS-CoV-2/Hong Kong/case85_VM20002868/2020__EPI_ISL_414519 spike protein (1-1211)(K986P_V987P_T887W_A1020W) WhcAg construct
MFVFLVLVPLVSSQCVNLTTRTQLPPAYTNSFTRGVYYPDKVFRSSVLHSTQDLFLPFFSNVTWFHAIHVSGTNGTKRFDNPVLPFNDGVYFASTEKSNIIRGWIFGTTLDSKTQSLLIVNNATNVVIKVCEFQFCNDPFLGVYYHKNNKSWMESEFRVYSSANNCTFEYVSQPFLMDLEGKQGNFKNLREFVFKNIDGYFKIYSKHTPINLVRDLPQGFSALEPLVDLPIGINITRFQTLLALHRSYLTPGDSSSGWTAGAAAYYVGYLQPRTFLLKYNENGTITDAVDCALDPLSETKCTLKSFTVEKGIYQTSNFRVQPTESIVRFPNITNLCPFGEVFNATRFASVYAWNRKRISNCVADYSVLYNSASFSTFKCYGVSPTKLNDLCFTNVYADSFVIRGDEVRQIAPGQTGKIADYNYKLPDDFTGCVIAWNSNNLDSKVGGNYNYLYRLFRKSNLKPFERDISTEIYQAGSTPCNGVEGFNCYFPLQSYGFQPTNGVGYQPYRVVVLSFELLHAPATVCGPKKSTNLVKNKCVNFNFNGLTGTGVLTESNKKFLPFQQFGRDIADTTDAVRDPQTLEILDITPCSFGGVSVITPGTNTSNQVAVLYQDVNCTEVPVAIHADQLTPTWRVYSTGSNVFQTRAGCLIGAEHVNNSYECDIPIGAGICASYQTQTNSPRRARSVASQSIIAYTMSLGAENSVAYSNNSIAIPTNFTISVTTEILPVSMTKTSVDCTMYICGDSTECSNLLLQYGSFCTQLNRALTGIAVEQDKNTQEVFAQVKQIYKTPPIKDFGGFNFSQILPDPSKPSKRSFIEDLLFNKVTLADAGFIKQYGDCLGDIAARDLICAQKFNGLTVLPPLLTDEMIAQYTSALLAGTITSGWWFGAGAALQIPFAMQMAYRFNGIGVTQNVLYENQKLIANQFNSAIGKIQDSLSSTASALGKLQDVVNQNAQALNTLVKQLSSNFGAISSVLNDILSRLDPPEAEVQIDRLITGRLQSLQTYVTQQLIRAAEIRWSANLAATKMSECVLGQSKRVDFCGKGYHLMSFPQSAPHGVVFLHVTYVPAQEKNFTTAPAICHDGKAHFPREGVFVSNGTHWFVTQRNFYEPQIITTDNTFVSGNCDVVIGIVNNTVYDPLQPELDSFKEELDKYFKNHTSPDVDLGDISGINASVVNIQKEIDRLNEVAKNLNESLIDLQELGKYEQYIKGGGGSDIDPYKEFGSSYQLLNFLPLDFFPDLNALVDTATALYEEELTGREHCSPHHTAIRQALVCWDELTKLIAWMSSNITSEQVRTIIVNHVNDTWGLKVRQSLWFHLSCLTFGQHTVQEFLVSFGVWIRTPAPYRPPNAPILSTLPEHTVIC

SEQ ID NO: 6791 - protein, 1365 aa, Artificial Sequence; identical to SEQ ID NO: 6781
  SARS-CoV-2/England/200990660/2020__EPI_ISL_414523 spike protein (1-1211)(K986P_V987P_T887W_A1020W) WhcAg construct

SEQ ID NO: 6792 - protein, 1365 aa, Artificial Sequence
  SARS-CoV-2/Australia/NSW09/2020__EPI_ISL_413595 spike protein (1-1211)(K986P_V987P_T887W_A1020W) WhcAg construct
MFVFLVLLPLVSSQCVNLTTRTQLPPAYTNSFTRGVYYPDKVFRSSVLHSTQDLFLPFFSNVTWFHAIHVSGTNGTKRFDNPVLPFNDGVYFASTEKSNIIRGWIFGTTLDSKTQSLLIVNNATNVVIKVCEFQFCNDPFLGVYYHKNNKSWMESEFRVYSSANNCTFEYVSQPFLMDLEGKQGNFKNLREFVFKNIDGYFKIYSKHTPINLVRDLPQGFSALEPLVDLPIGINITRFQTLLALHRSYLTPGDSSSGWTAGAAAYYVGYLQPRTFLLKYNENGTITDAVDCALDPLSETKCTLKSFTVEKGIYQTSNFRVQPTESIVRFPNITNLCPFGEVFNATRFASVYAWNRKRISNCVADYSVLYNSASFSTFKCYGVSPTKLNDLCFTNVYADSFVIRGDEVRQIAPGQTGKIADYNYKLPDDFTGCVIAWNSNNLDSKVGGNYNYLYRLFRKSNLKPFERDISTEIYQAGSTPCNGVEGFNCYFPLQSYGFQPTNGVGYQPYRVVVLSFELLHAPATVCGPKKSTNLVKNKCVNFNFNGLTGTGVLTESNKKFLPFQQFGRDIADTTDAVRDPQTLEILDITPCSFGGVSVITPGTNTSNQVAVLYQDVNCTEVPVAIHADQLTPTWRVYSTGSNVFQTRAGCLIGAEHVNNSYECDIPIGAGICASYQTQTNSPRRARSVASQSIIAYTMSLGAENSVAYSNNSIAIPTNFTISVTTEILPVSMTKTSVDCTMYICGDSTECSNLLLQYGSFCTQLNRALTGIAVEQDKNTQEVFAQVKQIYKTPPIKDFGGFNFSQILPDPSKPSKRSFIEDLLFNKVTLADAGFIKQYGDCLGDIAARDLICAQKFNGLTVLPPLLTDEMIAQYTSALLAGTITSGWWFGAGAALQIPFAMQMAYRFNGIGVTQNVLYENQKLIANQFNSAIGKIQDSLSFTASALGKLQDVVNQNAQALNTLVKQLSSNFGAISSVLNDILSRLDPPEAEVQIDRLITGRLQSLQTYVTQQLIRAAEIRWSANLAATKMSECVLGQSKRVDFCGKGYHLMSFPQSAPHGVVFLHVTYVPAQEKNFTTAPAICHDGKAHFPREGVFVSNGTHWFVTQRNFYEPQIITTDNTFVSGNCDVVIGIVNNTVYDPLQPELDSFKEELDKYFKNHTSPDVDLGDISGINASVVNIQKEIDRLNEVAKNLNESLIDLQELGKYEQYIKGGGGSDIDPYKEFGSSYQLLNFLPLDFFPDLNALVDTATALYEEELTGREHCSPHHTAIRQALVCWDELTKLIAWMSSNITSEQVRTIIVNHVNDTWGLKVRQSLWFHLSCLTFGQHTVQEFLVSFGVWIRTPAPYRPPNAPILSTLPEHTVIC

SEQ ID NO: 6793 - protein, 1365 aa, Artificial Sequence; identical to SEQ ID NO: 6773
  SARS-CoV-2/Australia/NSW10/2020__EPI_ISL_413596 spike protein (1-1211)(K986P_V987P_T887W_A1020W) WhcAg construct

SEQ ID NO: 6794 - protein, 1365 aa, Artificial Sequence
  SARS-CoV-2/Switzerland/1000477797/2020__EPI_ISL_413023 spike protein (1-1211)(K986P_V987P_T887W_A1020W) WhcAg construct
MFVFLVLLPLVSSQCVNLTTRTQLPPAYTNSFTRGVYYPDKVFRSSVLHSTQDLFLPFFSNVTWFHAIHVSGTNGTKRFDNPVLPFNDGVYFASTEKSNIIRGWIFGTTLDSKTQSLLIVNNATNVVIKVCEFQFCNDPFLGVYYHKNNKSWMESEFRVYSSANNCTFEYVSQPFLMDLEGKQGNFKNLREFVFKNIDGYFNIYSKHTPINLVRDLPQGFSALEPLVDLPIGINITRFQTLLALHRSYLTPGDSSSGWTAGAAAYYVGYLQPRTFLLKYNENGTITDAVDCALDPLSETKCTLKSFTVEKGIYQTSNFRVQPTESIVRFPNITNLCPFGEVFNATRFASVYAWNRKRISNCVADYSVLYNSASFSTFKCYGVSPTKLNDLCFTNVYADSFVIRGDEVRQIAPGQTGKIADYNYKLPDDFTGCVIAWNSNNLDSKVGGNYNYLYRLFRKSNLKPFERDISTEIYQAGSTPCNGVEGFNCYFPLQSYGFQPTNGVGYQPYRVVVLSFELLHAPATVCGPKKSTNLVKNKCVNFNFNGLTGTGVLTESNKKFLPFQQFGRDIADTTDAVRDPQTLEILDITPCSFGGVSVITPGTNTSNQVAVLYQGVNCTEVPVAIHADQLTPTWRVYSTGSNVFQTRAGCLIGAEHVNNSYECDIPIGAGICASYQTQTNSPRRARSVASQSIIAYTMSLGAENSVAYSNNSIAIPTNFTISVTTEILPVSMTKTSVDCTMYICGDSTECSNLLLQYGSFCTQLNRALTGIAVEQDKNTQEVFAQVKQIYKTPPIKDFGGFNFSQILPDPSKPSKRSFIEDLLFNKVTLADAGFIKQYGDCLGDIAARDLICAQKFNGLTVLPPLLTDEMIAQYTSALLAGTITSGWWFGAGAALQIPFAMQMAYRFNGIGVTQNVLYENQKLIANQFNSAIGKIQDSLSSTASALGKLQDVVNQNAQALNTLVKQLSSNFGAISSVLNDILSRLDPPEAEVQIDRLITGRLQSLQTYVTQQLIRAAEIRWSANLAATKMSECVLGQSKRVDFCGKGYHLMSFPQSAPHGVVFLHVTYVPAQEKNFTTAPAICHDGKAHFPREGVFVSNGTHWFVTQRNFYEPQIITTDNTFVSGNCDVVIGIVNNTVYDPLQPELDSFKEELDKYFKNHTSPDVDLGDISGINASVVNIQKEIDRLNEVAKNLNESLIDLQELGKYEQYIKGGGGSDIDPYKEFGSSYQLLNFLPLDFFPDLNALVDTATALYEEELTGREHCSPHHTAIRQALVCWDELTKLIAWMSSNITSEQVRTIIVNHVNDTWGLKVRQSLWFHLSCLTFGQHTVQEFLVSFGVWIRTPAPYRPPNAPILSTLPEHTVIC

SEQ ID NO: 6795 - protein, 1365 aa, Artificial Sequence
  SARS-CoV-2/Belgium/BA-02291/2020__EPI_ISL_415159 spike protein (1-1211)(K986P_V987P_T887W_A1020W) WhcAg construct
MFVFLVLLPLVSSQCVNLTTRTQLPPAYTNSFTRGVYYPDKVFRSSVLHSTQDLFLPFFSNVTWFHAIHVSGTNGTKRFDNPVLPFNDGVYFASTEKSNIIRGWIFGTTLDSKTQSLLIVNNATNVVIKVCEFQFCNDPFLGVYYHKNNKSWMESEFRVYSSANNCTFEYVSQPFLMDLEGKQGNFKNLREFVFKNIDGYFKIYSKHTPINLVRDLPQGFSALEPLVDLPIGINITRFQTLLALHRSYLTPGDSSSGWTAGAAAYYVGYLQPRTFLLKYNENGTITDAVDCALDPLSETKCTLKSFTVEKGIYQTSNFRVQPTESIVRFPNITNLCPFGEVFNATRFASVYAWNRKRISNCVADYSVLYNSASFSTFKCYGVSPTKLNDLCFTNVYADSFVIRGDEVRQIAPGQTGKIADYNYKLPDDFTGCVIAWNSNNLDSKVGGNYNYLYRLFRRSNLKPFERDISTEIYQAGSTPCNGVEGFNCYFPLQSYGFQPTNGVGYQPYRVVVLSFELLPAPATVCGPKKSTNLVKNKCVNFNFNGLTGTGVLTESNKKFLPFQQFGRDIADTTDAVRDPQTLEILDITPCSFGGVSVITPGTNTSNQVAVLYQGVNCTEVPVAIHADQLTPTWRVYSTGSNVFQTRAGCLIGAEHVNNSYECDIPIGAGICASYQTQTNSPRRARSVASQSIIAYTMSLGAENSVAYSNNSIAIPTNFTISVTTEILPVSMTKTSVDCTMYICGDSTECSNLLLQYGSFCTQLNRALTGIAVEQDKNTQEVFAQVKQIYKTPPIKDFGGFNFSQILPDPSKPSKRSFIEDLLFNKVTLADAGFIKQYGDCLGDIAARDLICAQKFNGLTVLPPLLTDEMIAQYTSALLAGTITSGWWFGAGAALQIPFAMQMAYRFNGIGVTQNVLYENQKLIANQFNSAIGKIQDSLSSAAPALGKLQDVVNQNAQALNTLVKQLSSNFGAISSVLNDILSRLDPPEAEVQIDRLITGRLQSLQTYVTQQLIRAAEIRWSANLAATKMSECVLGQSKRVDFCGKGYHLMSFPQSAPHGVVFLHVTYVPAQEKNFTTAPAICHDGKAHFPREGVFVSNGTHWFVTQRNFYEPQIITTDNTFVSGNCDVVIGIVNNTVYDPLQPELDSFKEELDKYFKNHTSPDVDLGDISGINASVVNIQKEIDRLNEVAKNLNESLIDLQELGKYEQYIKGGGGSDIDPYKEFGSSYQLLNFLPLDFFPDLNALVDTATALYEEELTGREHCSPHHTAIRQALVCWDELTKLIAWMSSNITSEQVRTIIVNHVNDTWGLKVRQSLWFHLSCLTFGQHTVQEFLVSFGVWIRTPAPYRPPNAPILSTLPEHTVIC

SEQ ID NO: 6796 - protein, 1365 aa, Artificial Sequence
  SARS-CoV-2/USA/WA8-UW5/2020__EPI_ISL_413486 spike protein (1-1211)(K986P_V987P_T887W_A1020W) WhcAg construct
MFVFLVLLPLVSSQCVNLTTRTQLPPAYTNSFTRGVYYPDKVFRSSVLHSTQDLFLPFFSNVTWFHAIHVSGTNGTKRFDNPVLPFNDGVYFASTEKSNIIRGWIFGTTLDSKTQSLLIVNNATNVVIKVCEFQFCNDPFLGVYYHKNNKSWMESEFRVYSSANNCTFEYVSQPFLMDLEGKQGNFKNLREFVFKNIDGYFKIYSKHTPINLVRDLPQGFSALEPLVDLPIGINITRFQTLLALHRSYLTPGDSSSGWTAGAAAYYVGYLQPRTFLLKYNENGTITDAVDCALDPLSETKCTLKSFTVEKGIYQTSNFRVQPTESIVRFPNITNLCPFGEVFNATRFASVYAWNRKRISNCVADYSVLYNSASFSTFKCYGVSPTKLNDLCFTNVYADSFVIRGDEVRQIAPGQTGKIADYNYKLPDDFTGCVIAWNSNNLDSKVGGNYNYLYRLFRKSNLKPFERDISTEIYQAGSTPCNGVEGFNCYFPLQSYGFQPTNGVGYQPYRVVVLSFELLHAPATVCGPKKSTNLVKNKCVNFNFNGLTGTGVLTESNKKFLPFQQFGRDIADTTDAVRDPQTLEILDITPCSFGGVSVITPGTNTSNQVAVLYQDVNCTEVPVAIHADQLTPTWRVYSTGSNVFQTRAGCLIGAEYVNNSYECDIPIGAGICASYQTQTNSPRRARSVASQSIIAYTMSLGAENSVAYSNNSIAIPTNFTISVTTEILPVSMTKTSVDCTMYICGDSTECSNLLLQYGSFCTQLNRALTGIAVEQDKNTQEVFAQVKQIYKTPPIKDFGGFNFSQILPDPSKPSKRSFIEDLLFNKVTLADAGFIKQYGDCLGDIAARDLICAQKFNGLTVLPPLLTDEMIAQYTSALLAGTITSGWWFGAGAALQIPFAMQMAYRFNGIGVTQNVLYENQKLIANQFNSAIGKIQDSLSSTASALGKLQDVVNQNAQALNTLVKQLSSNFGAISSVLNDILSRLDPPEAEVQIDRLITGRLQSLQTYVTQQLIRAAEIRWSANLAATKMSECVLGQSKRVDFCGKGYHLMSFPQSAPHGVVFLHVTYVPAQEKNFTTAPAICHDGKAHFPREGVFVSNGTHWFVTQRNFYEPQIITTDNTFVSGNCDVVIGIVNNTVYDPLQPELDSFKEELDKYFKNHTSPDVDLGDISGINASVVNIQKEIDRLNEVAKNLNESLIDLQELGKYEQYIKGGGGSDIDPYKEFGSSYQLLNFLPLDFFPDLNALVDTATALYEEELTGREHCSPHHTAIRQALVCWDELTKLIAWMSSNITSEQVRTIIVNHVNDTWGLKVRQSLWFHLSCLTFGQHTVQEFLVSFGVWIRTPAPYRPPNAPILSTLPEHTVIC

SEQ ID NO: 6797 - protein, 1365 aa, Artificial Sequence
  SARS-CoV-2/England/20102000506/2020__EPI_ISL_415147 spike protein (1-1211)(K986P_V987P_T887W_A1020W) WhcAg construct
MFVFLVLLPLVSSQCVNLTTRTQLPPAYTNSFTRGVYYPDKVFRSSVLHSTQDLFLPFFSNVTWFHAIHVSGTNGTKRFDNPVLPFNDGVYFASTEKSNIIRGWIFGTTLDSKTQSLLIVNNATNVVIKVCEFQFCNDPFLGVYYHKNNKSWMESEFRVYSSANNCTFEYVSQPFLMDLEGKQGNFKNLREFVFKNIDGYFKIYSKHTPINLVRDLPQGFSALEPLVDLPIGINITRFQTLLALHRSYLTPGDSSSGWTAGAAAYYVGYLQPRTFLLKYNENGTITDAVDCALDPLSETKCTLKSFTVEKGIYQTSNFRVQPTESIVRFPNITNLCPFGEVFNATRFASVYAWNRKRISNCVADYSVLYNSASFSTFKCYGVSPTKLNDLCFTNVYADSFVIRGDEVRQIAPGQTGKIADYNYKLPDDFTGCVIAWNSNNLDSKVGGNYNYLYRLFRKSNLKPFERDISTEIYQAGSTPCNGVEGFNCYFPLQSYGFQPTNGVGYQPYRVVVLSFELLHAPATVCGPKKSTNLVKNKCVNFNFNGLTGTGVLTESNKKFLPFQQFGRDIADTTDAVRDPQTLEILDITPCSFGGVSVITPGTNTSNQVAVLYQGVNCTEVPVAIHADQLTPTWRVYSTGSNVFQTRAGCLIGAEHVNNSYECDIPIGAGICASYQTQTNSPRRARSVASQSIIAYTMSLGAENSVAYSNNSIAIPTNFTISVTTEILPVSMTKTSVDCTMYICGDSTECSNLLLQYGSFCTQLNRALTGIAVEQDKNTQEVFAQVKQIYKTPPIKDFGGFNFSQILPDPSKPSKRSFIEDLLFNKVTLADAGFIKQYGYCLGDIAARDLICAQKFNGLTVLPPLLTDEMIAQYTSALLAGTITSGWWFGAGAALQIPFAMQMAYRFNGIGVTQNVLYENQKLIANQFNSAIGKIQDSLSSTASALGKLQDVVNQNAQALNTLVKQLSSNFGAISSVLNDILSRLDPPEAEVQIDRLITGRLQSLQTYVTQQLIRAAEIRWSANLAATKMSECVLGQSKRVDFCGKGYHLMSFPQSAPHGVVFLHVTYVPAQEKNFTTAPAICHDGKAHFPREGVFVSNGTHWFVTQRNFYEPQIITTDNTFVSGNCDVVIGIVNNTVYDPLQPELDSFKEELDKYFKNHTSPDVDLGDISGINASVVNIQKEIDRLNEVAKNLNESLIDLQELGKYEQYIKGGGGSDIDPYKEFGSSYQLLNFLPLDFFPDLNALVDTATALYEEELTGREHCSPHHTAIRQALVCWDELTKLIAWMSSNITSEQVRTIIVNHVNDTWGLKVRQSLWFHLSCLTFGQHTVQEFLVSFGVWIRTPAPYRPPNAPILSTLPEHTVIC

SEQ ID NO: 6798 - protein, 1365 aa, Artificial Sequence
  SARS-CoV-2/Belgium/VAG-03013/2020__EPI_ISL_415155 spike protein (1-1211)(K986P_V987P_T887W_A1020W) WhcAg construct
MFVFLVLLPLVSSQCVNLTTRTQLPPAYTNSFTRGVYYPDKVFRSSVLHSTQDLFLPFFSNVTWFHAIHVSGTNGTKRFDNPVLPFNDGVYFASTEKSNIIRGWIFGTTLDSKTQSLLIVNNATNVVIKVCEFQFCNDPFLGVYYHKNNKSWMESEFRVYSSANNCTFEYVSQPFLMDLEGKQGNFKNLREFVFKNIDGYFKIYSKHTPINLVRDLPQGFSALEPLVDLPIGINITRFQTLLALHRSYLTPGDSSSGWTAGAAAYYVGYLQPRTFLLKYNENGTITDAVDCALDPLSETKCTLKSFTVEKGIYQTSNFRVQPTESIVRFPNITNLCPFGEVFNATRFASVYAWNRKRISNCVADYSVLYNSASFSTFKCYGVSPTKLNDLCFTNVYADSFVIRGDEVRQIAPGQTGKIADYNYKLPDDFTGCVIAWNSNNLDSKVGGNYNYLYRLFRKSNLKPFERDISTEIYQAGSTPCNGVEGFNCYFPLQSYGFQPTNGVGYQPYRVVVLSFELLHAPATVCGPKKSTNLVKNKCVNFNFNGLTGTGVLTESNKKFLPFQQFGRDIADTTDAVRDPQTLEILDITPCSFGGVSVITPGTNTSNQVAVLYQGVNCTEVPVAIHADQLTPTWRVYSTGSNVFQTRAGCLIGAEHVNNSYECDIPIGAGICASYQTQTNSPRRARSVASQSIIAYTMSLGAENSVAYSNNSIAIPTNFTISVTTEILPVSMTKTSVDCTMYICGDSTECSNLLLQYGSFCTQLNRALTGIAVEQDKNTQEVFAQVKQIYKTPPIKDFGGFNFSQILPDPSKPSKRSFIEDLLFNKVTLADAGFIKQYGDCLGDIAARDLICAQKFNGLTVLPPLLTDEMIAQYTSALLAGTITSGWWFGAGAALQIPFAMQMAYRFNGIGVTQNVLYENQKLIANQFNSAIGKIQDSLSSTATALGKLQDVVNQNAQALNTLVKQLSSNFGAISSVLNDILSRLDPPEAEVQIDRLITGRLQSLQTYVTQQLIRAAEIRWSANLAATKMSECVLGQSKRVDFCGKGYHLMSFPQSAPHGVVFLHVTYVPAQEKNFTTAPAICHDGKAHFPREGVFVSNGTHWFVTQRNFYEPQIITTDNTFVSGNCDVVIGIVNNTVYDPLQPELDSFKEELDKYFKNHTSPDVDLGDISGINASVVNIQKEIDRLNEVAKNLNESLIDLQELGKYEQYIKGGGGSDIDPYKEFGSSYQLLNFLPLDFFPDLNALVDTATALYEEELTGREHCSPHHTAIRQALVCWDELTKLIAWMSSNITSEQVRTIIVNHVNDTWGLKVRQSLWFHLSCLTFGQHTVQEFLVSFGVWIRTPAPYRPPNAPILSTLPEHTVIC

SEQ ID NO: 6799 - protein, 1365 aa, Artificial Sequence
  SARS-CoV-2/Belgium/BC-03016/2020__EPI_ISL_415157 spike protein (1-1211)(K986P_V987P_T887W_A1020W) WhcAg construct
MFVFLVLLPLVSSQCVNLTTRTQLPPAYTNSFTRGVYYPDKVFRSSVLHSTQDLFLPFFSNVTWFHAIHVSGTNGTKRFDNPVLPFNDGVYFASTEKSNIIRGWIFGTTLDSKTQSLLIVNNATNVVIKVCEFQFCNDPFLGVYYHKNNKSWMESEFRVYSSANNCTFEYVSQPFLMDLEGKQGNFKNLREFVFKNIDGYFKIYSKHTPINLVRDLPQGFSALEPLVDLPIGINITRFQTLLALHRSYLTPGDSSSGWTAGAAAYYVGYLQPRTFLLKYNENGTITDAVDCALDPLSETKCTLKSFTVEKGIYQTSNFRVQPTESIVRFPNITNLCPFGEVFNATRFASVYAWNRKRISNCVADYSVLYNSASFSTFKCYGVSPTKLNDLCFTNVYADSFVIRGDEVRQIAPGQTGKIADYNYKLPDDFTGCVIAWNSNNLDSKVGGNYNYLYRLFRKSNLKPFERDISTEIYQAGSTPCNGVEGFNCYFPLQSYGFQPTNGVGYQPYRVVVLSFELLHAPATVCGPKKSTNLVKNKCVNFNFNGLTGTGVLTESNKKFLPFQQFGRDIADTTDAVRDPQTLEILDITPCSFGGVSVITPGTNTSNQVAVLYQGVNCTEVPVAIHADQLTPTWRVYSTGSNVFQTRAGCLIGAEHVNNSYECDIPIGAGICASYQTQTNSPRRARSVASQSIIAYTMSLGAENSVAYSNNSIAIPTNFTISVTTEILPVSMTKTSVDCTMYICGDSTECSNLLLQYGSFCTQLNRALTGIAVEQDKNTQEVFAQVKQIYKTPPIKDFGGFNFSQILPDPSKPSKRSFIEDLLFNKVTLADAGFIKQYGDCLGDIAARDLICAQKFNGLTVLPPLLTDEMIAQYTSALLAGTITSGWWFGAGAALQIPFAMQMAYRFNGIGVTQNVLYENQKLIANQFNSAIGKIQDSLSSTAPALGKLQDVVNQNAQALNTLVKQLSSNFGAISSVLNDILSRLDPPEAEVQIDRLITGRLQSLQTYVTQQLIRAAEIRWSANLAATKMSECVLGQSKRVDFCGKGYHLMSFPQSAPHGVVFLHVTYVPAQEKNFTTAPAICHDGKAHFPREGVFVSNGTHWFVTQRNFYEPQIITTDNTFVSGNCDVVIGIVNNTVYDPLQPELDSFKEELDKYFKNHTSPDVDLGDISGINASVVNIQKEIDRLNEVAKNLNESLIDLQELGKYEQYIKGGGGSDIDPYKEFGSSYQLLNFLPLDFFPDLNALVDTATALYEEELTGREHCSPHHTAIRQALVCWDELTKLIAWMSSNITSEQVRTIIVNHVNDTWGLKVRQSLWFHLSCLTFGQHTVQEFLVSFGVWIRTPAPYRPPNAPILSTLPEHTVIC

SEQ ID NO: 6800 - protein, 1365 aa, Artificial Sequence
  SARS-CoV-2/Germany/BavPat3/2020__EPI_ISL_414521 spike protein (1-1211)(K986P_V987P_T887W_A1020W) WhcAg construct
MFVFLVLLPLVSSQCVNLTTRTQLPPAYTNSFTRGVYYPDKVFRSSVLHSTQDLFLPFFSNVTWFHAIHVSGTNGTKRFDNPVLPFNDGVYFASTEKSNIIRGWIFGTTLDSKTQSLLIVNNATNVVIKVCEFQFCNDPFLGVYYHKNNKSWMESEFRVYSSANNCTFEYVSQPFLMDLEGKQGNFKNLREFVFKNIDGYFKIYSKHTPINLVRDLPQGFSALEPLVDLPIGINITRFQTLLALHRSYLTPGDSSSGWTAGAAAYYVGYLQPRTFLLKYNENGTITDAVDCALDPLSETKCTLKSFTVEKGIYQTSNFRVQPTESIVRFPNITNLCPFGEVFNATRFASVYAWNRKRISNCVADYSVLYNSASFSTFKCYGVSPTKLNDLCFTNVYADSFVIRGDEVRQIAPGQTGKIADYNYKLPDDFTGCVIAWNSNNLDSKVGGNYNYLYRLFRKSNLKPFERDISTEIYQAGSTPCNGVEGFNCYFPLQSYGFQPTNGVGYQPYRVVVLSFELLHAPATVCGPKKSTNLVKNKCVNFNFNGLTGTGVLTESNKKFLPFQQFGRDIADTTDAVRDPQTLEILDITPCSFGGVSVITPGTNTSNQVAVLYQDVNCTEVPVAIHADQLTPTWRVYSTGSNVFQTRAGCLIGAEHVNNSYECDIPIGAGICASYQTQTNSPRRARSVASQSIIAYTMSLGAENSVAYSNNSIAIPTNFTISVTTEILPVSMTKTSVDCTMYICGDSTECSNLLLQYGSFCTQLNRALTGIAVEQDKNTQQVFAQVKQIYKTPPIKDFGGFNFSQILPDPSKPSKRSFIEDLLFNKVTLADAGFIKQYGDCLGDIAARDLICAQKFNGLTVLPPLLTDEMIAQYTSALLAGTITSGWWFGAGAALQIPFAMQMAYRFNGIGVTQNVLYENQKLIANQFNSAIGKIQDSLSSTASALGKLQDVVNQNAQALNTLVKQLSSNFGAISSVLNDILSRLDPPEAEVQIDRLITGRLQSLQTYVTQQLIRAAEIRWSANLAATKMSECVLGQSKRVDFCGKGYHLMSFPQSAPHGVVFLHVTYVPAQEKNFTTAPAICHDGKAHFPREGVFVSNGTHWFVTQRNFYEPQIITTDNTFVSGNCDVVIGIVNNTVYDPLQPELDSFKEELDKYFKNHTSPDVDLGDISGINASVVNIQKEIDRLNEVAKNLNESLIDLQELGKYEQYIKGGGGSDIDPYKEFGSSYQLLNFLPLDFFPDLNALVDTATALYEEELTGREHCSPHHTAIRQALVCWDELTKLIAWMSSNITSEQVRTIIVNHVNDTWGLKVRQSLWFHLSCLTFGQHTVQEFLVSFGVWIRTPAPYRPPNAPILSTLPEHTVIC

SEQ ID NO: 6801 - protein, 1365 aa, Artificial Sequence
  SARS-CoV-2/France/HF1805/2020__EPI_ISL_414628 spike protein (1-1211)(K986P_V987P_T887W_A1020W) WhcAg construct
MFVFLVLLPLVSSQCVNLTTRTQLPPAYTNSFTRGVYYPDKVFRSSVLHSTQDLFLPFFSNVTWFHAIHVSGTNGTKRFDNPVLPFNDGVYFASTEKSNIIRGWIFGTTLDSKTQSLLIVNNATNVVIKVCEFQFCNDPFLGVYYHKNNKSWMESEFRVYSSANNCTFEYVSQPFLMDLEGKQGNFKNLREFVFKNIDGYFKIYSKHTPINLVRDLPQGFSALEPLVDLPIGINITRFQTLLALHRSYLTPGDSSSGWTAGAAAYYVGYLQPRTFLLKYNENGTITDAVDCALDPLSETKCTLKSFTVEKGIYQTSNFRVQPTESIVRFPNITNLCPFGEVFNATRFASVYAWNRKRISNCVADYSVLYNSASFSTFKCYGVSPTKLNDLCFTNVYADSFVIRGDEVRQIAPGQTGKIADYNYKLPDDFTGCVIAWNSNNLDSKVGGNYNYLYRLFRKSNLKPFERDISTEIYQAGSTPCNGVEGFNCYFPLQSYGFQPTNGVGYQPYRVVVLSFELLHAPATVCGPKKSTNLVKNKCVNFNFNGLTGTGVLTESNKKFLPFQQFGRDIADTTDAVRDPQTLEILDITPCSFGGVSVITPGTNTSNQVAVLYQGVNCTEVPVAIHADQLTPTWRVYSTGSNVFQTRAGCLIGAEHVNNSYECDIPIGAGICASYQTQTNSPRRARSVASQSIIAYTMSLGAENSVAYSNNSIAIPTNFTISVTTEILPVSMTKTSVDCTMYICGDSTECSNLLLQYGSFCTQLNRALTGIAVEQDKNTQEVFAQVKQIYKTPPIKDFGGFNFSQILPDPSKPSKRSFIEDLLFNKVTLADAGFIKQYGDCLGDIAARDLICAQKFNGLTVLPPLLTDEMIAQYTSALLAGTITSGWWFGAGAALQIPFAMQMAYRFNGIGVTQNVLYENQKLIANQFNSAIGKIQDSLSSTASALGKLQDVVNQNAQALNTLVKQLSSNFGAISSVLNDILSRLDPPEAEVQIDRLITGRLQSLQTYVTQQLIRAAEIRWSANLAATKMSECVLGQSKRVDFCGKGYHLMSFPQSAPHGVVFLHVTYVPAQEKNFTTAPAICHDGKAHFPREGVFVSNGTHWFVTQRNFYEPQIITTDNTFVSGNCDVVIGVVNNTVYDPLQPELDSFKEELDKYFKNHTSPDVDLGDISGINASVVNIQKEIDRLNEVAKNLNESLIDLQELGKYEQYIKGGGGSDIDPYKEFGSSYQLLNFLPLDFFPDLNALVDTATALYEEELTGREHCSPHHTAIRQALVCWDELTKLIAWMSSNITSEQVRTIIVNHVNDTWGLKVRQSLWFHLSCLTFGQHTVQEFLVSFGVWIRTPAPYRPPNAPILSTLPEHTVIC

SEQ ID NO: 6802 - protein, 1365 aa, Artificial Sequence
  SARS-CoV-2/Netherlands/ZuidHolland_9/2020__EPI_ISL_414445 spike protein (1-1211)(K986P_V987P_T887W_A1020W) WhcAg construct
MFVFLVLLPLVSSQCVNLTTRTQLPPAYTNSFTRGVYYPDKVFRSSVLHSTQDLFLPFFSNVTWFHAIHVSGTNGTKRFDNPVLPFNDGVYFASTEKSNIIRGWIFGTTLDSKTQSLLIVNNATNVVIKVCEFQFCNDPFLGVYYHKNNKSWMESEFRVYSSANNCTFEYVSQPFLMDLEGKQGNFKNLREFVFKNIDGYFKIYSKHTPINLVRDLPQGFSALEPLVDLPIGINITRFQTLLALHRSYLTPGDSSSGWTAGAAAYYVGYLQPRTFLLKYNENGTITDAVDCALDPLSETKCTLKSFTVEKGIYQTSNFRVQPTESIVRFPNITNLCPFGEVFNATRFASVYAWNRKRISNCVADYSVLYNSASFSTFKCYGVSPTKLNDLCFTNVYADSFVIRGDEVRQIAPGQTGKIADYNYKLPDDFTGCVIAWNSNNLDSKVGGNYNYLYRLFRKSNLKPFERDISTEIYQAGSTPCNGVEGFNCYFPLQSYGFQPTNGVGYQPYRVVVLSFELLHAPATVCGPKKSTNLVKNKCVNFNFNGLTGTGVLTESNKKFLPFQQFGRDIADTTDAVRDPQTLEILDITPCSFGGVSVITPGTNTSNQVAVLYQGVNCTEVPVAIHADQLTPTWRVYSTGSNVFQTRAGCLIGAEHVNNSYECDIPIGAGICASYQTQTNSPRRARSVASQSIIAYTMSLGAENSVAYSNNSIAIPTNFTISVTTEILPVSMTKTSVDCTMYICGDSTECSNLLLQYGSFCTQLNRALTGIAVEQDKNTQEVFAQVKQIYKTPPIKDFGGFNFSQILPDPSKPSKRSFIEDLLFNKVTLADAGFIKQYGDCLGDIAARDLICVQKFNGLTVLPPLLTDEMIAQYTSALLAGTITSGWWFGAGAALQIPFAMQMAYRFNGIGVTQNVLYENQKLIANQFNSAIGKIQDSLSSTASALGKLQDVVNQNAQALNTLVKQLSSNFGAISSVLNDILSRLDPPEAEVQIDRLITGRLQSLQTYVTQQLIRAAEIRWSANLAATKMSECVLGQSKRVDFCGKGYHLMSFPQSAPHGVVFLHVTYVPAQEKNFTTAPAICHDGKAHFPREGVFVSNGTHWFVTQRNFYEPQIITTDNTFVSGNCDVVIGIVNNTVYDPLQPELDSFKEELDKYFKNHTSPDVDLGDISGINASVVNIQKEIDRLNEVAKNLNESLIDLQELGKYEQYIKGGGGSDIDPYKEFGSSYQLLNFLPLDFFPDLNALVDTATALYEEELTGREHCSPHHTAIRQALVCWDELTKLIAWMSSNITSEQVRTIIVNHVNDTWGLKVRQSLWFHLSCLTFGQHTVQEFLVSFGVWIRTPAPYRPPNAPILSTLPEHTVIC

SEQ ID NO: 6803 - protein, 1365 aa, Artificial Sequence
  SARS-CoV-2/Finland/FIN03032020A/2020__EPI_ISL_413602 spike protein (1-1211)(K986P_V987P_T887W_A1020W) WhcAg construct
MFVFLVLLPLVSSQCVNLTTRTQLPPAYTNSFTRGVYYPDKVFRSSVLHSTQDLFLPFFSNVTWFHAIHVSGTNGTKRFDNPVLPFNDGVYFASTEKSNIIRGWIFGTTLDSKTQSLLIVNNATNVVIKVCEFQFCNDPFLGVYYHKNNKSWMESEFRVYSSANNCTFEYVSQPFLMDLEGKQGNFKNLREFVFKNIDGYFKIYSKHTPINLVRDLPQGFSALEPLVDLPIGINITRFQTLLALHRSYLTPGDSSSGWTAGAAAYYVGYLQPRTFLLKYNENGTITDAVDCALDPLSETKCTLKSFTVEKGIYQTSNFRVQPTESIVRFPNITNLCPFGEVFNATRFASVYAWNRKRISNCVADYSVLYNSASFSTFKCYGVSPTKLNDLCFTNVYADSFVIRGDEVRQIAPGQTGKIADYNYKLPDDFTGCVISWNSNNLDSKVGGNYNYLYRLFRKSNLKPFERDISTEIYQAGSTPCNGVEGFNCYFPLQSYGFQPTNGVGYQPYRVVVLSFELLHAPATVCGPKKSTNLVKNKCVNFNFNGLTGTGVLTESNKKFLPFQQFGRDIADTTDAVRDPQTLEILDITPCSFGGVSVITPGTNTSNQVAVLYQGVNCTEVPVAIHADQLTPTWRVYSTGSNVFQTRAGCLIGAEHVNNSYECDIPIGAGICASYQTQTNSPRRARSVASQSIIAYTMSLGAENSVAYSNNSIAIPTNFTISVTTEILPVSMTKTSVDCTMYICGDSTECSNLLLQYGSFCTQLNRALTGIAVEQDKNTQEVFAQVKQIYKTPPIKDFGGFNFSQILPDPSKPSKRSFIEDLLFNKVTLADAGFIKQYGDCLGDIAARDLICAQKFNGLTVLPPLLTDEMIAQYTSALLAGTITSGWWFGAGAALQIPFAMQMAYRFNGIGVTQNVLYENQKLIANQFNSAIGKIQDSLSSTASALGKLQDVVNQNAQALNTLVKQLSSNFGAISSVLNDILSRLDPPEAEVQIDRLITGRLQSLQTYVTQQLIRAAEIRWSANLAATKMSECVLGQSKRVDFCGKGYHLMSFPQSAPHGVVFLHVTYVPAQEKNFTTAPAICHDGKAHFPREGVFVSNGTHWFVTQRNFYEPQIITTDNTFVSGNCDVVIGIVNNTVYDPLQPELDSFKEELDKYFKNHTSPDVDLGDISGINASVVNIQKEIDRLNEVAKNLNESLIDLQELGKYEQYIKGGGGSDIDPYKEFGSSYQLLNFLPLDFFPDLNALVDTATALYEEELTGREHCSPHHTAIRQALVCWDELTKLIAWMSSNITSEQVRTIIVNHVNDTWGLKVRQSLWFHLSCLTFGQHTVQEFLVSFGVWIRTPAPYRPPNAPILSTLPEHTVIC

SEQ ID NO: 6804 - protein, 1365 aa, Artificial Sequence
  SARS-CoV-2/France/GE1977/2020__EPI_ISL_414632 spike protein (1-1211)(K986P_V987P_T887W_A1020W) WhcAg construct
MFVFLVLLPLVSSQCVNLTTRTQLPPAYTNSFTRGVYYPDKVFRSSVLHSTQDLFLPFFSNVTWFHAIHVSGTNGTKRFDNPVLPFNDGVYFASTEKSNIIRGWIFGTTLDSKTQSLLIVNNATNVVIKVCEFQFCNDPFLGVYYHKNNKSWMESEFRVYSSANNCTFEYVSQPFLMDLEGKQGNFKNLREFVFKNIDGYFKIYSKHTPINLVRDLPQGFSALEPLVDLPIGINITRFQTLLALHRSYLTPGDSSSGWTAGAAAYYVGYLQPRTFLLKYNENGTITDAVDCALDPLSETKCTLKSFTVEKGIYQTSNFRVQPTESIVRFPNITNLCPFGEVFNATRFASVYAWNRKRISNCVADYSVLYNSASFSTFKCYGVSPTKLNDLCFTNVYADSFVIRGDEVRQIAPGQTGKIADYNYKLPDDFTGCVIAWNSNNLDSKVGGNYNYLYRLFRKSNLKPFERDISTEIYQAGSTPCNGVEGFNCYFPLQSYGFQPTNGVGYQPYRVVVLSFELLHAPATVCGPKKSTNLVKNKCVNFNFNGLTGTGVLTESNKKFLPFQQFGRDIADTTDAVRDPQTLEILDITPCSFGGVSVITPGTNTSNQVAVLYQGVNCTEVPVAIHADQLTPTWRVYSTGSNVFQTRAGCLIGAEHVNNSYECDIPIGAGICASYQTQTNSPRRARSVASQSIIAYTMSLGAENSVAYSNNSIAIPTNFTISVTTEILPVSMTKTSVDCTMYICGDSTECSNLLLQYGSFCTQLNRALTGIAVEQDKNTQEVFAQVKQIYKTPPIKDFGGFNFSQILPDPSKPSKRSFIEDLLFNKVTLADAGFIKQYGDCLGDIAARDLICAQKFNGLTVLPPLLTDEMIAQYTSALLAGTITSGWWFGAGAALQIPFAMQMAYRFNGIGVTQNVLYENQKLIANQFNSAIGKIQDSLFSTASALGKLQDVVNQNAQALNTLVKQLSSNFGAISSVLNDILSRLDPPEAEVQIDRLITGRLQSLQTYVTQQLIRAAEIRWSANLAATKMSECVLGQSKRVDFCGKGYHLMSFPQSAPHGVVFLHVTYVPAQEKNFTTAPAICHDGKAHFPREGVFVSNGTHWFVTQRNFYEPQIITTDNTFVSGNCDVVIGIVNNTVYDPLQPELDSFKEELDKYFKNHTSPDVDLGDISGINASVVNIQKEIDRLNEVAKNLNESLIDLQELGKYEQYIKGGGGSDIDPYKEFGSSYQLLNFLPLDFFPDLNALVDTATALYEEELTGREHCSPHHTAIRQALVCWDELTKLIAWMSSNITSEQVRTIIVNHVNDTWGLKVRQSLWFHLSCLTFGQHTVQEFLVSFGVWIRTPAPYRPPNAPILSTLPEHTVIC

SEQ ID NO: 6805 - protein, 1365 aa, Artificial Sequence
  SARS-CoV-2/Finland/FIN-313/2020__EPI_ISL_414641 spike protein (1-1211)(K986P_V987P_T887W_A1020W) WhcAg construct
MFVFLVLLPLVSSQCVNLTTRTQLPPAYTNSFTRGVYYPDKVFRSSVLHSTQDLFLPFFSNVTWFHAIHVSGTNGTKRFDNPVLPFNDGVYFASTEKSNIIRGWIFGTTLDSKTQSLLIVNNATNVVIKVCEFQFCNDPFLGVYYHKNNKSWMESEFRVYSSANNCTFEYVSQPFLMDLEGKQGNFKNLREFVFKNIDGYFKIYSKHTPINLVRDLPQGFSALEPLVDLPIGINITRFKTLLALHRSYLTPGDSSSGWTAGAAAYYVGYLQPRTFLLKYNENGTITDAVDCALDPLSETKCTLKSFTVEKGIYQTSNFRVQPTESIVRFPNITNLCPFGEVFNATRFASVYAWNRKRISNCVADYSVLYNSASFSTFKCYGVSPTKLNDLCFTNVYADSFVIRGDEVRQIAPGQTGKIADYNYKLPDDFTGCVIAWNSNNLDSKVGGNYNYLYRLFRKSNLKPFERDISTEIYQAGSTPCNGVEGFNCYFPLQSYGFQPTNGVGYQPYRVVVLSFELLHAPATVCGPKKSTNLVKNKCVNFNFNGLTGTGVLTESNKKFLPFQQFGRDIADTTDAVRDPQTLEILDITPCSFGGVSVITPGTNTSNQVAVLYQGVNCTEVPVAIHADQLTPTWRVYSTGSNVFQTRAGCLIGAEHVNNSYECDIPIGAGICASYQTQTNSPRRARSVASQSIIAYTMSLGAENSVAYSNNSIAIPTNFTISVTTEILPVSMTKTSVDCTMYICGDSTECSNLLLQYGSFCTQLNRALTGIAVEQDKNTQEVFAQVKQIYKTPPIKDFGGFNFSQILPDPSKPSKRSFIEDLLFNKVTLADAGFIKQYGDCLGDIAARDLICAQKFNGLTVLPPLLTDEMIAQYTSALLAGTITSGWWFGAGAALQIPFAMQMAYRFNGIGVTQNVLYENQKLIANQFNSAIGKIQDSLSSTASALGKLQDVVNQNAQALNTLVKQLSSNFGAISSVLNDILSRLDPPEAEVQIDRLITGRLQSLQTYVTQQLIRAAEIRWSANLAATKMSECVLGQSKRVDFCGKGYHLMSFPQSAPHGVVFLHVTYVPAQEKNFTTAPAICHDGKAHFPREGVFVSNGTHWFVTQRNFYEPQIITTDNTFVSGNCDVVIGIVNNTVYDPLQPELDSFKEELDKYFKNHTSPDVDLGDISGINASVVNIQKEIDRLNEVAKNLNESLIDLQELGKYEQYIKGGGGSDIDPYKEFGSSYQLLNFLPLDFFPDLNALVDTATALYEEELTGREHCSPHHTAIRQALVCWDELTKLIAWMSSNITSEQVRTIIVNHVNDTWGLKVRQSLWFHLSCLTFGQHTVQEFLVSFGVWIRTPAPYRPPNAPILSTLPEHTVIC

SEQ ID NO: 6806 - protein, 1365 aa, Artificial Sequence
  SARS-CoV-2/Netherlands/ZuidHolland_2/2020__EPI_ISL_414556 spike protein (1-1211)(K986P_V987P_T887W_A1020W) WhcAg construct
MFVFLVLLPLVSSQCVNLTTRTQLPPAYTNSFTRGVYYPDKVFRSSVLHSTQDLFLPFFSNVTWFHAIHVSGTNGTKRFDNPVLPFNDGVYFASTEKSNIIRGWIFGTTLDSKTQSLLIVNNATNVVIKVCEFQFCNDPFLGVYYHKNNKSWMESEFRVYSSANNCTFEYVSQPFLMDLEGKQGNFKNLREFVFKNIDGYFKIYSKHTPINLVRDLPQGFSALEPLVDLPIGINITRFQTLLALHRSYLTPGDSSSGWTAGAAAYYVGYLQPRTFLLKYNENGTITDAVDCALDPLSETKCTLKSFTVEKGIYQTSNFRVQPTESIVRFPNITNLCPFGEVFNATRFASVYAWNRKRISNCVADYSVLYNSASFSTFKCYGVSPTKLNDLCFTNVYADSFVIRGDEVRQIAPGQTGKIADYNYKLPDDFTGCVIAWNSNNLDSKVGGNYNYLYRLFRKSNLKPFERDISTEIYQAGSTPCNGVEGFNCYFPLQSYGFQPTNGVGYQPYRVVVLSFELLHAPATVCGPKKSTNLVKNKCVNFNFNGLTGTGVLTESNKKFLPFQQFGRDIADTTDAVRDPQTLEILDITPCSFGGVSVITPGTNTSNQVAVLYQGVNCTEVPVAIHADQLTPTWRVYSTGSNVFQTRAGCLIGAEHVNNSYECDIPIGAGICASYQTQTNSPRRARSVASQSIIAYTMSLGAENSVAYSNNSIAIPTNFTISVTTEILPVSMTKTSVDCTMYICGDSTECSNLLLQYGSFCTQLNRALTGIALEQDKNTQEVFAQVKQIYKTPPIKDFGGFNFSQILPDPSKPSKRSFIEDLLFNKVTLADAGFIKQYGDCLGDIAARDLICAQKFNGLTVLPPLLTDEMIAQYTSALLAGTITSGWWFGAGAALQIPFAMQMAYRFNGIGVTQNVLYENQKLIANQFNSAIGKIQDSLSSTASALGKLQDVVNQNAQALNTLVKQLSSNFGAISSVLNDILSRLDPPEAEVQIDRLITGRLQSLQTYVTQQLIRAAEIRWSANLAATKMSECVLGQSKRVDFCGKGYHLMSFPQSAPHGVVFLHVTYVPAQEKNFTTAPAICHDGKAHFPREGVFVSNGTHWFVTQRNFYEPQIITTDNTFVSGNCDVVIGIVNNTVYDPLQPELDSFKEELDKYFKNHTSPDVDLGDISGINASVVNIQKEIDRLNEVAKNLNESLIDLQELGKYEQYIKGGGGSDIDPYKEFGSSYQLLNFLPLDFFPDLNALVDTATALYEEELTGREHCSPHHTAIRQALVCWDELTKLIAWMSSNITSEQVRTIIVNHVNDTWGLKVRQSLWFHLSCLTFGQHTVQEFLVSFGVWIRTPAPYRPPNAPILSTLPEHTVIC

SEQ ID NO: 6807 - protein, 1365 aa, Artificial Sequence
  SARS-CoV-2/USA/WA-UW31/2020__EPI_ISL_414618 spike protein (1-1211)(K986P_V987P_T887W_A1020W) WhcAg construct
MFVFLVLLPLVSSQCVNLTTRTQLPPAYTNSFTRGVYYPDKVFRSSVLHSTQDLFLPFFSNVTWFHAIHVSGTNGTKRFDNPVLPFNDGVYFASTEKSNIIRGWIFGTTLDSKTQSLLIVNNATNVVIKVCEFQFCNDPFLGVYYHKNNKSWMESEFRVYSSANNCTFEYVSQPFLMDLEGKQGNFKNLREFVFKNIDGYFKIYSKHTPINLVRDLPQGFSALEPLVDLPIGINITRFQTLLALHRSYLTPGDSSSGWTAGAAAYYVGYLQPRTFLLKYNENGTITDAVDCALDPLSETKCTLKSFTVEKGIYQTSNFRVQPTESIVRFPNITNLCPFGEVFNATRFASVYAWNRKRISNCVADYSVLYNSASFSTFKCYGVSPTKLNDLCFTNVYADSFVIRGDEVRQIAPGQTGKIADYNYKLPDDFTGCVIAWNSNNLDSKVGGNYNYLYRLFRKSNLKPFERDISTEIYQAGSTPCNGAEGFNCYFPLQSYGFQPTNGVGYQPYRVVVLSFELLHAPATVCGPKKSTNLVKNKCVNFNFNGLTGTGVLTESNKKFLPFQQFGRDIADTTDAVRDPQTLEILDITPCSFGGVSVITPGTNTSNQVAVLYQDVNCTEVPVAIHADQLTPTWRVYSTGSNVFQTRAGCLIGAEHVNNSYECDIPIGAGICASYQTQTNSPRRARSVASQSIIAYTMSLGAENSVAYSNNSIAIPTNFTISVTTEILPVSMTKTSVDCTMYICGDSTECSNLLLQYGSFCTQLNRALTGIAVEQDKNTQEVFAQVKQIYKTPPIKDFGGFNFSQILPDPSKPSKRSFIEDLLFNKVTLADAGFIKQYGDCLGDIAARDLICAQKFNGLTVLPPLLTDEMIAQYTSALLAGTITSGWWFGAGAALQIPFAMQMAYRFNGIGVTQNVLYENQKLIANQFNSAIGKIQDSLSSTASALGKLQDVVNQNAQALNTLVKQLSSNFGAISSVLNDILSRLDPPEAEVQIDRLITGRLQSLQTYVTQQLIRAAEIRWSANLAATKMSECVLGQSKRVDFCGKGYHLMSFPQSAPHGVVFLHVTYVPAQEKNFTTAPAICHDGKAHFPREGVFVSNGTHWFVTQRNFYEPQIITTDNTFVSGNCDVVIGIVNNTVYDPLQPELDSFKEELDKYFKNHTSPDVDLGDISGINASVVNIQKEIDRLNEVAKNLNESLIDLQELGKYEQYIKGGGGSDIDPYKEFGSSYQLLNFLPLDFFPDLNALVDTATALYEEELTGREHCSPHHTAIRQALVCWDELTKLIAWMSSNITSEQVRTIIVNHVNDTWGLKVRQSLWFHLSCLTFGQHTVQEFLVSFGVWIRTPAPYRPPNAPILSTLPEHTVIC

SEQ ID NO: 6808 - protein, 1365 aa, Artificial Sequence
  SARS-CoV-2/South Korea/SNU01/2020__EPI_ISL_411929 spike protein (1-1211)(K986P_V987P_T887W_A1020W) WhcAg construct
MFVFLVLLPLVSSQCVNLTTRTQLPPAYTNSFTRGVYYPDKVFRSSVLHSTQDLFLPFFSNVTWFHAIHVSGTNGTKRFDNPVLPFNDGVYFASTEKSNIIRGWIFGTTLDSKTQSLLIVNNATNVVIKVCEFQFCNDPFLGVYYHKNNKSWMESEFRVYSSANNCTFEYVSQPFLMDLEGKQGNFKNLREFVFKNIDGYFKIYSKHTPINLVRDLPQGFWALEPLVDLPIGINITRFQTLLALHRSYLTPGDSSSGWTAGAAAYYVGYLQPRTFLLKYNENGTITDAVDCALDPLSETKCTLKSFTVEKGIYQTSNFRVQPTESIVRFPNITNLCPFGEVFNATRFASVYAWNRKRISNCVADYSVLYNSASFSTFKCYGVSPTKLNDLCFTNVYADSFVIRGDEVRQIAPGQTGKIADYNYKLPDDFTGCVIAWNSNNLDSKVGGNYNYLYRLFRKSNLKPFERDISTEIYQAGSTPCNGVEGFNCYFPLQSYGFQPTNGVGYQPYRVVVLSFELLHAPATVCGPKKSTNLVKNKCVNFNFNGLTGTGVLTESNKKFLPFQQFGRDIADTTDAVRDPQTLEILDITPCSFGGVSVITPGTNTSNQVAVLYQDVNCTEVPVAIHADQLTPTWRVYSTGSNVFQTRAGCLIGAEHVNNSYECDIPIGAGICASYQTQTNSPRRARSVASQSIIAYTMSLGAENSVAYSNNSIAIPTNFTISVTTEILPVSMTKTSVDCTMYICGDSTECSNLLLQYGSFCTQLNRALTGIAVEQDKNTQEVFAQVKQIYKTPPIKDFGGFNFSQILPDPSKPSKRSFIEDLLFNKVTLADAGFIKQYGDCLGDIAARDLICAQKFNGLTVLPPLLTDEMIAQYTSALLAGTITSGWWFGAGAALQIPFAMQMAYRFNGIGVTQNVLYENQKLIANQFNSAIGKIQDSLSSTASALGKLQDVVNQNAQALNTLVKQLSSNFGAISSVLNDILSRLDPPEAEVQIDRLITGRLQSLQTYVTQQLIRAAEIRWSANLAATKMSECVLGQSKRVDFCGKGYHLMSFPQSAPHGVVFLHVTYVPAQEKNFTTAPAICHDGKAHFPREGVFVSNGTHWFVTQRNFYEPQIITTDNTFVSGNCDVVIGIVNNTVYDPLQPELDSFKEELDKYFKNHTSPDVDLGDISGINASVVNIQKEIDRLNEVAKNLNESLIDLQELGKYEQYIKGGGGSDIDPYKEFGSSYQLLNFLPLDFFPDLNALVDTATALYEEELTGREHCSPHHTAIRQALVCWDELTKLIAWMSSNITSEQVRTIIVNHVNDTWGLKVRQSLWFHLSCLTFGQHTVQEFLVSFGVWIRTPAPYRPPNAPILSTLPEHTVIC

SEQ ID NO: 6809 - protein, 1365 aa, Artificial Sequence
  SARS-CoV-2/China/WF0004/2020__EPI_ISL_413694 spike protein (1-1211)(K986P_V987P_T887W_A1020W) WhcAg construct
MFVFLVLLPLVSSQCVNLTTRTQLPPAYTNSFTRGVYYPDKVFRSSVLHSTQDLFLPFFSNVTWFHAIHVSGTNGTKRFDNPVLPFNDGVYFASTEKSNIIRGWIFGTTLDSKTQSLLIVNNATNVVIKVCEFQFCNDPFLGVYYHKNNKSWTESEFRVYSSANNCTFEYVSQPFLMDLEGKQGNFKNLREFVFKNIDGYFKIYSKHTPINLVRDLPQGFSALEPLVDLPIGINITRFQTLLALHRSYLTPGDSSSGWTAGAAAYYVGYLQPRTFLLKYNENGTITDAVDCALDPLSETKCTLKSFTVEKGIYQTSNFRVQPTESIVRFPNITNLCPFGEVFNATRFASVYAWNRKRISNCVADYSVLYNSASFSTFKCYGVSPTKLNDLCFTNVYADSFVIRGDEVRQIAPGQTGKIADYNYKLPDDFTGCVIAWNSNNLDSKVGGNYNYLYRLFRKSNLKPFERDISTEIYQAGSTPCNGVEGFNCYFPLQSYGFQPTNGVGYQPYRVVVLSFELLHAPATVCGPKKSTNLVKNKCVNFNFNGLTGTGVLTESNKKFLPFQQFGRDIADTTDAVRDPQTLEILDITPCSFGGVSVITPGTNTSNQVAVLYQDVNCTEVPVAIHADQLTPTWRVYSTGSNVFQTRAGCLIGAEHVNNSYECDIPIGAGICASYQTQTNSPRRARSVASQSIIAYTMSLGAENSVAYSNNSIAIPTNFTISVTTEILPVSMTKTSVDCTMYICGDSTECSNLLLQYGSFCTQLNRALTGIAVEQDKNTQEVFAQVKQIYKTPPIKDFGGFNFSQILPDPSKPSKRSFIEDLLFNKVTLADAGFIKQYGDCLGDIAARDLICAQKFNGLTVLPPLLTDEMIAQYTSALLAGTITSGWWFGAGAALQIPFAMQMAYRFNGIGVTQNVLYENQKLIANQFNSAIGKIQDSLSSTASALGKLQDVVNQNAQALNTLVKQLSSNFGAISSVLNDILSRLDPPEAEVQIDRLITGRLQSLQTYVTQQLIRAAEIRWSANLAATKMSECVLGQSKRFDFCGKGYHLMSFPQSAPHGVVFLHVTYVPAQEKNFTTAPAICHDGKAHFPREGVFVSNGTHWFVTQRNFYEPQIITTDNTFVSGNCDVVIGIVNNTVYDPLQPELDSFKEELDKYFKNHTSPDVDLGDISGINASVVNIQKEIDRLNEVAKNLNESLIDLQELGKYEQYIKGGGGSDIDPYKEFGSSYQLLNFLPLDFFPDLNALVDTATALYEEELTGREHCSPHHTAIRQALVCWDELTKLIAWMSSNITSEQVRTIIVNHVNDTWGLKVRQSLWFHLSCLTFGQHTVQEFLVSFGVWIRTPAPYRPPNAPILSTLPEHTVIC

SEQ ID NO: 6810 - protein, 1365 aa, Artificial Sequence
  SARS-CoV-2/China/WF0028/2020__EPI_ISL_413791 spike protein (1-1211)(K986P_V987P_T887W_A1020W) WhcAg construct
MFVFLVLLPLVSSQCVNLTTRTQLPPAYTNSFTRGVYYPDKVFRSSVLHSTQDLFLPFFSNVTWFHAIHVSGTNGTKRFDNPVLPFNDGVYFASTEKSNIIRGWIFGTTLDSKTQSLLIVNNATNVVIKVCEFQFCNDPFLGVYYHKNNKSWMESEFRVYSSANNCTFEYVSQPFLMDLEGKQGNFKNLREFVFKNIDGYFKIYSKHTPINLVRDLPQGFSALEPLVDLPIGINITRFQTLLALHRSYLTPGDSSSGWTAGAAAYYVGYLQPRTFLLKYNENGTITDAVDCALDPLSETKCTLKSFTVEKGIYQTSNFRVQPTESIVRFPNITNLCPFGEVFNATRFASVYAWNRKRISNCVADYSVLYNSASFSTFKCYGVSPTKLNDLCFTNVYADSFVIRGDEVRQIAPGQTGKIADYNYKLPDDFTGCVIAWNSNNLDSKVGGNYNYLYRLFRKSNLKPFERDISTEIYQAGSTPCNGVEGFNCYFPLQSYGFQPTNGVGYQPYRVVVLSFELLHAPATVCGPKKSTNLVKNKCVNFNFNGLTGTGVLTESNKKFLPFQQFGRDIADTTDAVRDPQTLEILDITPCSFGGVSVITPGTNTSNQVAVLYQDVNCTEVPVAIHADQLTPTWRVYSTGSNVFQTRAGCLIGAEHVNNSYECDIPIGAGICASYQTQTNSPRRARSVASQSIIAYTMSLGAENSVAYSNNSIAIPTNFTISVTTEILPVSMTKTSVDCTMYICGDSTECSNLLLQYGSFCTQLNRALTGIAVEQDKNTQEVFAQVKQIYKTPPIKDFGGFNFSQILPDPSKPSKRSFIEDLLFNKVTLADAGFIKQYGDCLGDIAARDLICAQKFNGLTVLPPLLTDEMIAQYTSALLAGTITSGWWFGAGAALQIPFAMQMAYRFNGIGVTQNVLYENQKLIANQFNSAIGKIQDSLSSTASALGKLQDVVNQNAQALNTLVKQLSSNFGAISSVLNDILSRLDPPEAEVQIDRLITGRLQSLQTYVTQQLIRAAEIRWSANLAATKMSECVLGQSKRVDFCGKGYHLMSFPQSAPHGVVFLHVTYVPAQEKNFTTAPAICHDGKAHFPREGVFVSNGTHWFVTQRNFYEPQIITTDNTFVSGNCDVVIGIVNNTVYDPLQPELESFKEELDKYFKNHTSPDVDLGDISGINASVVNIQKEIDRLNEVAKNLNESLIDLQELGKYEQYIKGGGGSDIDPYKEFGSSYQLLNFLPLDFFPDLNALVDTATALYEEELTGREHCSPHHTAIRQALVCWDELTKLIAWMSSNITSEQVRTIIVNHVNDTWGLKVRQSLWFHLSCLTFGQHTVQEFLVSFGVWIRTPAPYRPPNAPILSTLPEHTVIC

SEQ ID NO: 6811 - protein, 1365 aa, Artificial Sequence
  SARS-CoV-2/2019-nCoV/USA-CruiseA-18/2020__MT159716.1 spike protein (1-1211)(K986P_V987P_T887W_A1020W) WhcAg construct
MFVFLVLLPLVSSQCVNLTTRTQLPPAYTNSFTRGVYYPDKVFRSSVLHSTQDLFLPFFSNVTWFHAIHVSGTNGTKRFDNPVLPFNDGVYFASTEKSNIIRGWIFGTTLDSKTQSLLIVNNATNVVIKVCEFQFCNDPFLGVYYHKNNKSWMESELRVYSSANNCTFEYVSQPFLMDLEGKQGNFKNLREFVFKNIDGYFKIYSKHTPINLVRDLPQGFSALEPLVDLPIGINITRFQTLLALHRSYLTPGDSSSGWTAGAAAYYVGYLQPRTFLLKYNENGTITDAVDCALDPLSETKCTLKSFTVEKGIYQTSNFRVQPTESIVRFPNITNLCPFGEVFNATRFASVYAWNRKRISNCVADYSVLYNSASFSTFKCYGVSPTKLNDLCFTNVYADSFVIRGDEVRQIAPGQTGKIADYNYKLPDDFTGCVIAWNSNNLDSKVGGNYNYLYRLFRKSNLKPFERDISTEIYQAGSTPCNGVEGFNCYFPLQSYGFQPTNGVGYQPYRVVVLSFELLHAPATVCGPKKSTNLVKNKCVNFNFNGLTGTGVLTESNKKFLPFQQFGRDIADTTDAVRDPQTLEILDITPCSFGGVSVITPGTNTSNQVAVLYQDVNCTEVPVAIHADQLTPTWRVYSTGSNVFQTRAGCLIGAEHVNNSYECDIPIGAGICASYQTQTNSPRRARSVASQSIIAYTMSLGAENSVAYSNNSIAIPTNFTISVTTEILPVSMTKTSVDCTMYICGDSTECSNLLLQYGSFCTQLNRALTGIAVEQDKNTQEVFAQVKQIYKTPPIKDFGGFNFSQILPDPSKPSKRSFIEDLLFNKVTLADAGFIKQYGDCLGDIAARDLICAQKFNGLTVLPPLLTDEMIAQYTSALLAGTITSGWWFGAGAALQIPFAMQMAYRFNGIGVTQNVLYENQKLIANQFNSAIGKIQDSLSSTASALGKLQDVVNQNAQALNTLVKQLSSNFGAISSVLNDILSRLDPPEAEVQIDRLITGRLQSLQTYVTQQLIRAAEIRWSANLAATKMSECVLGQSKRVDFCGKGYHLMSFPQSAPHGVVFLHVTYVPAQEKNFTTAPAICHDGKAHFPREGVFVSNGTHWFVTQRNFYEPQIITTDNTFVSGNCDVVIGIVNNTVYDPLQPELDSFKEELDKYFKNHTSPDVDLGDISGINASVVNIQKEIDRLNEVAKNLNESLIDLQELGKYEQYIKGGGGSDIDPYKEFGSSYQLLNFLPLDFFPDLNALVDTATALYEEELTGREHCSPHHTAIRQALVCWDELTKLIAWMSSNITSEQVRTIIVNHVNDTWGLKVRQSLWFHLSCLTFGQHTVQEFLVSFGVWIRTPAPYRPPNAPILSTLPEHTVIC

SEQ ID NO: 6812 - protein, 1365 aa, Artificial Sequence
  SARS-CoV-2/SARS-CoV-2/Yunnan-01/human/2020/CHN__MT049951.1 spike protein (1-1211)(K986P_V987P_T887W_A1020W) WhcAg construct
MFVFLVLLPLVSSQCVNLTTRTQLPPANTNSFTRGVYYPDKVFRSSVLHSTQDLFLPFFSNVTWFHAIHVSGTNGTKRFDNPVLPFNDGVYFASTEKSNIIRGWIFGTTLDSKTQSLLIVNNATNVVIKVCEFQFCNDPFLGVYYHKNNKSWMESEFRVYSSANNCTFEYVSQPFLMDLEGKQGNFKNLREFVFKNIDGYFKIYSKHTPINLVRDLPQGFSALEPLVDLPIGINITRFQTLLALHRSYLTPGDSSSGWTAGAAAYYVGYLQPRTFLLKYNENGTITDAVDCALDPLSETKCTLKSFTVEKGIYQTSNFRVQPTESIVRFPNITNLCPFGEVFNATRFASVYAWNRKRISNCVADYSVLYNSASFSTFKCYGVSPTKLNDLCFTNVYADSFVIRGDEVRQIAPGQTGKIADYNYKLPDDFTGCVIAWNSNNLDSKVGGNYNYLYRLFRKSNLKPFERDISTEIYQAGSTPCNGVEGFNCYFPLQSYGFQPTNGVGYQPYRVVVLSFELLHAPATVCGPKKSTNLVKNKCVNFNFNGLTGTGVLTESNKKFLPFQQFGRDIADTTDAVRDPQTLEILDITPCSFGGVSVITPGTNTSNQVAVLYQDVNCTEVPVAIHADQLTPTWRVYSTGSNVFQTRAGCLIGAEHVNNSYECDIPIGAGICASYQTQTNSPRRARSVASQSIIAYTMSLGAENSVAYSNNSIAIPTNFTISVTTEILPVSMTKTSVDCTMYICGDSTECSNLLLQYGSFCTQLNRALTGIAVEQDKNTQEVFAQVKQIYKTPPIKDFGGFNFSQILPDPSKPSKRSFIEDLLFNKVTLADAGFIKQYGDCLGDIAARDLICAQKFNGLTVLPPLLTDEMIAQYTSALLAGTITSGWWFGAGAALQIPFAMQMAYRFNGIGVTQNVLYENQKLIANQFNSAIGKIQDSLSSTASALGKLQDVVNQNAQALNTLVKQLSSNFGAISSVLNDILSRLDPPEAEVQIDRLITGRLQSLQTYVTQQLIRAAEIRWSANLAATKMSECVLGQSKRVDFCGKGYHLMSFPQSAPHGVVFLHVTYVPAQEKNFTTAPAICHDGKAHFPREGVFVSNGTHWFVTQRNFYEPQIITTDNTFVSGNCDVVIGIVNNTVYDPLQPELDSFKEELDKYFKNHTSPDVDLGDISGINASVVNIQKEIDRLNEVAKNLNESLIDLQELGKYEQYIKGGGGSDIDPYKEFGSSYQLLNFLPLDFFPDLNALVDTATALYEEELTGREHCSPHHTAIRQALVCWDELTKLIAWMSSNITSEQVRTIIVNHVNDTWGLKVRQSLWFHLSCLTFGQHTVQEFLVSFGVWIRTPAPYRPPNAPILSTLPEHTVIC

SEQ ID NO: 6813 - protein, 1365 aa, Artificial Sequence
  SARS-CoV-2/USA/WA-UW292/2020__EPI_ISL_418077 spike protein (1-1211)(K986P_V987P_T887W_A1020W) WhcAg construct
MFVFLVLLPLVSSQCVNLTTRTQLPPAYTNSFTRGVYYPDKVFRSSVLHSTQDLFLPFFSNVTWFHAIHVSGTNGTKRFDNPVLPFNDGVYFASTEKSNIIRGWIFGTTLDSKTQSLLIVNNATNVVIKVCEFQFCNDPFLGVYYHKNNKSWMESEFRVYSSANNCTFEYVSQPFLMDLEGKQGNFKNLREFVFKNIDGYFKIYSKHTPINLVRDLPQGFSALEPLVDLPIGINITRFQTLLALHRSYLTPGDSSSGWTAGAAAYYVGYLQPRTFLLKYNENGTITDAVDCALDPLSETKCTLKSFTVEKGIYQTSNFRVQPTESIVRFPNITNLCPFGEVFNATRFASVYAWNRKRISNCVADYSVLYNSASFSTFKCYGVSPTKLNDLCFTNVYADSFVIRGDEVRQIAPGQTGKIADYNYKLPDDFTGCVIAWNSNNLDSKVGGNYNYLYRLFRKSNLKPFERDISTEIYQASSTPCNGVEGFNCYFPLQSYGFQPTNGVGYQPYRVVVLSFELLHAPATVCGPKKSTNLVKNKCVNFNFNGLTGTGVLTESNKKFLPFQQFGRDIADTTDAVRDPQTLEILDITPCSFGGVSVITPGTNTSNQVAVLYQDVNCTEVPVAIHADQLTPTWRVYSTGSNVFQTRAGCLIGAEHVNNSYECDIPIGAGICASYQTQTNSPRRARSVASQSIIAYTMSLGAENSVAYSNNSIAIPTNFTISVTTEILPVSMTKTSVDCTMYICGDSTECSNLLLQYGSFCTQLNRALTGIAVEQDKNTQEVFAQVKQIYKTPPIKDFGGFNFSQILPDPSKPSKRSFIEDLLFNKVTLADAGFIKQYGDCLGDIAARDLICAQKFNGLTVLPPLLTDEMIAQYTSALLAGTITSGWWFGAGAALQIPFAMQMAYRFNGIGVTQNVLYENQKLIANQFNSAIGKIQDSLSSTASALGKLQDVVNQNAQALNTLVKQLSSNFGAISSVLNDILSRLDPPEAEVQIDRLITGRLQSLQTYVTQQLIRAAEIRWSANLAATKMSECVLGQSKRVDFCGKGYHLMSFPQSAPHGVVFLHVTYVPAQEKNFTTAPAICHDGKAHFPREGVFVSNGTHWFVTQRNFYEPQIITTDNTFVSGNCDVVIGIVNNTVYDPLQPELDSFKEELDKYFKNHTSPDVDLGDISGINASVVNIQKEIDRLNEVAKNLNESLIDLQELGKYEQYIKGGGGSDIDPYKEFGSSYQLLNFLPLDFFPDLNALVDTATALYEEELTGREHCSPHHTAIRQALVCWDELTKLIAWMSSNITSEQVRTIIVNHVNDTWGLKVRQSLWFHLSCLTFGQHTVQEFLVSFGVWIRTPAPYRPPNAPILSTLPEHTVIC

SEQ ID NO: 6814 - protein, 1365 aa, Artificial Sequence
  SARS-CoV-2/Iceland/192/2020__EPI_ISL_417819 spike protein (1-1211)(K986P_V987P_T887W_A1020W) WhcAg construct
MFVFFVLLPLVSSQCVNLTTRTQLPPAYTNSFTRGVYYPDKVFRSSVLHSTQDLFLPFFSNVTWFHAIHVSGTNGTKRFDNPVLPFNDGVYFASTEKSNIIRGWIFGTTLDSKTQSLLIVNNATNVVIKVCEFQFCNDPFLGVYYHKNNKSWMESEFRVYSSANNCTFEYVSQPFLMDLEGKQGNFKNLREFVFKNIDGYFKIYSKHTPINLVRDLPQGFSALEPLVDLPIGINITRFQTLLALHRSYLTPGDSSSGWTAGAAAYYVGYLQPRTFLLKYNENGTITDAVDCALDPLSETKCTLKSFTVEKGIYQTSNFRVQPTESIVRFPNITNLCPFGEVFNATRFASVYAWNRKRISNCVADYSVLYNSASFSTFKCYGVSPTKLNDLCFTNVYADSFVIRGDEVRQIAPGQTGKIADYNYKLPDDFTGCVIAWNSNNLDSKVGGNYNYLYRLFRKSNLKPFERDISTEIYQAGSTPCNGVEGFNCYFPLQSYGFQPTNGVGYQPYRVVVLSFELLHAPATVCGPKKSTNLVKNKCVNFNFNGLTGTGVLTESNKKFLPFQQFGRDIADTTDAVRDPQTLEILDITPCSFGGVSVITPGTNTSNQVAVLYQGVNCTEVPVAIHADQLTPTWRVYSTGSNVFQTRAGCLIGAEHVNNSYECDIPIGAGICASYQTQTNSPRRARSVASQSIIAYTMSLGAENSVAYSNNSIAIPTNFTISVTTEILPVSMTKTSVDCTMYICGDSTECSNLLLQYGSFCTQLNRALTGIAVEQDKNTQEVFAQVKQIYKTPPIKDFGGFNFSQILPDPSKPSKRSFIEDLLFNKVTLADAGFIKQYGDCLGDIAARDLICAQKFNGLTVLPPLLTDEMIAQYTSALLAGTITSGWWFGAGAALQIPFAMQMAYRFNGIGVTQNVLYENQKLIANQFNSAIGKIQDSLSSTASALGKLQDVVNQNAQALNTLVKQLSSNFGAISSVLNDILSRLDPPEAEVQIDRLITGRLQSLQTYVTQQLIRAAEIRWSANLAATKMSECVLGQSKRVDFCGKGYHLMSFPQSAPHGVVFLHVTYVPAQEKNFTTAPAICHDGKAHFPREGVFVSNGTHWFVTQRNFYEPQIITTDNTFVSGNCDVVIGIVNNTVYDPLQPELDSFKEELDKYFKNHTSPDVDLGDISGINASVVNIQKEIDRLNEVAKNLNESLIDLQELGKYEQYIKGGGGSDIDPYKEFGSSYQLLNFLPLDFFPDLNALVDTATALYEEELTGREHCSPHHTAIRQALVCWDELTKLIAWMSSNITSEQVRTIIVNHVNDTWGLKVRQSLWFHLSCLTFGQHTVQEFLVSFGVWIRTPAPYRPPNAPILSTLPEHTVIC

SEQ ID NO: 6815 - protein, 1365 aa, Artificial Sequence
  SARS-CoV-2/Belgium/ULG-6939/2020__EPI_ISL_417020 spike protein (1-1211)(K986P_V987P_T887W_A1020W) WhcAg construct
MFVFLVLLPLVSSQCVNLTTRTQLPPAYTNSFTRGVYYPDKVFRSSVLHSTQDLFLPFFSNVTWFHAIHVSGTNGTKRFDNPVLPFNDGVYFASTEKSNIIRGWIFGTTLDSKTQSLLIVNNATNVVIKVCEFQFCNDPFLGVYYHKNNKSWMESEFRVYSSANNCTFEYVSQPFLMDLEGKQGNFKNLREFVFKNIDGYFKIYSKHTPINLVRDLPQGFSALEPLVDLPIGINITRFQTLLALHRSYLTPGDSSSGWTAGAAAYYVGYLQPRTFLLKYNENGTITDAVDCALDPLSETKCTLKSFTVEKGIYQTSNFRVQPTESIVRFPNITNLCPFGEVFNATRFASVYAWNRKRISNCVADYSVLYNSASFSTFKCYGVSPTKLNDLCFTNVYADSFVIRGDEVRQIAPGQTGKIADYNYKLPDDFTGCVIAWNSNNLDSKVGGNYNYLYRLFRKSNLKPFERDISTEIYQAGSTPCNGVEGFNCYFPLQSYGFQPTNGVGYQPYRVVVLSFELLHAPATVCGPKKSTNLVKNKCVNFNFNGLTGTGVLTESNKKFLPFQQFGRDIADTTDAVRDPQTLEILDITPCSFGGVSVITPGTNTSNQVAVLYQGVNCTEVPVAIHADQLTPTWRVYSTGSNVFQTRAGCLIGAEHVNNSYECDIPIGAGICASYQTQTNSPRRARSVASQSIIAYTMSLGAENSVVYSNNSIAIPTNFTISVTTEILPVSMTKTSVDCTMYICGDSTECSNLLLQYGSFCTQLNRALTGIAVEQDKNTQEVFAQVKQIYKTPPIKDFGGFNFSQILPDPSKPSKRSFIEDLLFNKVTLADAGFIKQYGDCLGDIAARDLICAQKFNGLTVLPPLLTDEMIAQYTSALLAGTITSGWWFGAGAALQIPFAMQMAYRFNGIGVTQNVLYENQKLIANQFNSAIGKIQDSLSSTASALGKLQDVVNQNAQALNTLVKQLSSNFGAISSVLNDILSRLDPPEAEVQIDRLITGRLQSLQTYVTQQLIRAAEIRWSANLAATKMSECVLGQSKRVDFCGKGYHLMSFPQSAPHGVVFLHVTYVPAQEKNFTTAPAICHDGKAHFPREGVFVSNGTHWFVTQRNFYEPQIITTDNTFVSGNCDVVIGIVNNTVYDPLQPELDSFKEELDKYFKNHTSPDVDLGDISGINASVVNIQKEIDRLNEVAKNLNESLIDLQELGKYEQYIKGGGGSDIDPYKEFGSSYQLLNFLPLDFFPDLNALVDTATALYEEELTGREHCSPHHTAIRQALVCWDELTKLIAWMSSNITSEQVRTIIVNHVNDTWGLKVRQSLWFHLSCLTFGQHTVQEFLVSFGVWIRTPAPYRPPNAPILSTLPEHTVIC

SEQ ID NO: 6816 - protein, 1365 aa, Artificial Sequence
  SARS-CoV-2/France/HF2496/2020__EPI_ISL_418231 spike protein (1-1211)(K986P_V987P_T887W_A1020W) WhcAg construct
MFVFLVLLPLVSSQCVNLTTRTQLPPAYTNSFTRGVYYPDKVFRSSVLHSTQDLFLPFFSNVTWFHAIHVSGTNGTKRFDNPVLPFNDGVYFASTEKSNIIRGWIFGTTLDSKTQSLLIVNNATNVVIKVCEFQFCNDPFLGVYYHKNNKSWMESEFRVYSSANNCTFEYVSQPFLMDLEGKQGNFKNLREFVFKNIDGYFKIYSKHTPINLVRDLPQGFSALEPLVDLPIGINITRFQTLLALHRSYLTPGDSSSGWTAGAAAYYVGYLQPRTFLLKYNENGTITDAVDCALDPLSETKCTLKSFTVEKGIYQTSNFRVQPTESIVRFPNITNLCPFGEVFNATRFASVYAWNRKRISNCVADYSVLYNSASFSTFKCYGVSPTKLNDLCFTNVYADSFVIRGDEVRQIAPGQTGKIADYNYKLPDDFTGCVIAWNSNNLDSKVGGNYNYLYRLFRKSNLKPFERDISTEIYQAGSTPCNGVEGFNCYFPLQSYGFQPTNGVGYQPYRVVVLSFELLHAPATVCGPKKSTNLVKNKCVNFNFNGLTGTGVLTESNKKFLPFQQFGRDIADTTDAVRDPQTLEILDITPCSFGGVSVITPGTNTSNQVAVLYQGVNCTEVPVAIHADQLTPTWRVYSTGSNVFQTRAGCLIGAEHVNNSYECDIPIGAGICASYQTQTNSPRRARSVASQSIIAYTMSLGAENSVAYSNNSIAIPTNFTISVTTEILPVSMTKTSVDCTMYICGDSTECSNLLLQYGSFCTQLNRALTGIAVEQDKNTQEVFAQVKQIYKTPPIKDFGGFNFSQILPDPSKPSKRSFIEDLLFNKVTLADAGFIKQYGDCLGDIVARDLICAQKFNGLTVLPPLLTDEMIAQYTSALLAGTITSGWWFGAGAALQIPFAMQMAYRFNGIGVTQNVLYENQKLIANQFNSAIGKIQDSLSSTASALGKLQDVVNQNAQALNTLVKQLSSNFGAISSVLNDILSRLDPPEAEVQIDRLITGRLQSLQTYVTQQLIRAAEIRWSANLAATKMSECVLGQSKRVDFCGKGYHLMSFPQSAPHGVVFLHVTYVPAQEKNFTTAPAICHDGKAHFPREGVFVSNGTHWFVTQRNFYEPQIITTDNTFVSGNCDVVIGIVNNTVYDPLQPELDSFKEELDKYFKNHTSPDVDLGDISGINASVVNIQKEIDRLNEVAKNLNESLIDLQELGKYEQYIKGGGGSDIDPYKEFGSSYQLLNFLPLDFFPDLNALVDTATALYEEELTGREHCSPHHTAIRQALVCWDELTKLIAWMSSNITSEQVRTIIVNHVNDTWGLKVRQSLWFHLSCLTFGQHTVQEFLVSFGVWIRTPAPYRPPNAPILSTLPEHTVIC

SEQ ID NO: 6817 - protein, 1365 aa, Artificial Sequence
  SARS-CoV-2/USA/WA-UW291/2020__EPI_ISL_418076 spike protein (1-1211)(K986P_V987P_T887W_A1020W) WhcAg construct
MFVFLVLLPLVSSQCVNLTTRTQLPPAYTNSFTRGVYYPDKVFRSSVLHSTQDLFLPFFSNVTWFHAIHVSGTNGTKRFDNPVLPFNDGVYFASTEKSNIIRGWIFGTTLDSKTQSLLIVNNATNVVIKVCEFQFCNDPFLGVYYHKNNKSWMESEFRVYSSANNCTFEYVSQPFLMDLEGKQGNFKNLREFVFKNIDGYFKIYSKHTPINLVRDLPQGFSALEPLVDLPIGINITRFQTLLALHRSYLTPGDSSSGWTAGAAAYYVGYLQPRTFLLKYNENGTITDAVDCALDPLSETKCTLKSFTVEKGIYQTSNFRVQPTESIVRFPNITNLCPFGEVFNATRFASVYAWNRKRISNCVADYSVLYNSASFSTFKCYGVSPTKLNDLCFTNVYADSFVIRGDEVRQIAPGQTGKIADYNYKLPDDFTGCVIAWNSNNLDSKVGGNYNYLYRLFRKSNLKPFERDISTEIYQAGSTPCNGVEGFNCYFPLQSYGFQPTNGVGYQPYRVVVLSFELLHAPATVCGPKKSTNLVKNKCVNFNFNGLTGTGVLTESNKKFLPFQQFGRDIADTTDAVRDPQTLEILDITPCSFGGVSVITPGTNTSNQVAVLYQGVNCTEVPVAIHADQLTPTWRVYSTGSNVFQTRAGCLIGAEHVNNSYECDIPIGAGICASYQTQTNSPRRARSVASQSIIAYTMSLGAENSVAYSNNSIAIPTNFTISVTTEILPVSMTKTSVDCTMYICGDSTECSNLLLQYGSFCTQLNRALTGIAVEQDKNTQEVFAQVKQIYKTPPIKDFGGFNFSQILPDPSKPSKRSFIEDLLFNKVTLADAGFIKQYGDCLGDIAARDLICAQKFNGLTVLPPLLTDEMIAQYTSALLAGTITSGWWFGAGAALQIPFAMQMAYRFNGIGVTQNVLYENQKLIANQFNSAIGKIQYSLSSTASALGKLQDVVNQNAQALNTLVKQLSSNFGAISSVLNDILSRLDPPEAEVQIDRLITGRLQSLQTYVTQQLIRAAEIRWSANLAATKMSECVLGQSKRVDFCGKGYHLMSFPQSAPHGVVFLHVTYVPAQEKNFTTAPAICHDGKAHFPREGVFVSNGTHWFVTQRNFYEPQIITTDNTFVSGNCDVVIGIVNNTVYDPLQPELDSFKEELDKYFKNHTSPDVDLGDISGINASVVNIQKEIDRLNEVAKNLNESLIDLQELGKYEQYIKGGGGSDIDPYKEFGSSYQLLNFLPLDFFPDLNALVDTATALYEEELTGREHCSPHHTAIRQALVCWDELTKLIAWMSSNITSEQVRTIIVNHVNDTWGLKVRQSLWFHLSCLTFGQHTVQEFLVSFGVWIRTPAPYRPPNAPILSTLPEHTVIC

SEQ ID NO: 6818 - protein, 1365 aa, Artificial Sequence; identical to SEQ ID NO: 6781
  SARS-CoV-2/Portugal/PT0034/2020__EPI_ISL_418019 spike protein (1-1211)(K986P_V987P_T887W_A1020W) WhcAg construct

SEQ ID NO: 6819 - protein, 1365 aa, Artificial Sequence
  SARS-CoV-2/Iceland/202/2020__EPI_ISL_417750 spike protein (1-1211)(K986P_V987P_T887W_A1020W) WhcAg construct
MFVFLVLLPLVSSQCVNLTTRTQLPPAYTNSFTRGVYYPDKVFRSSVLHSTQDLFLPFFSNVTWFHAIHVSGTNGTKRFDNPVLPFNDGVYFASTEKSNIIRGWIFGTTLDSKTQSLLIVNNATNVVIKVCEFQFCNDPFLGVYYHKNNKSWMESEFRVYSSANNCTFEYVSQPFLMDLEGKQGNFKNLREFVFKNIDGYFKIYSKHTPINLVRDLPQGFSALEPLVDLPIGINITRFQTLLALHRSYLTPGDSSSGWTAGAAAYYVGYLQPRTFLLKYNENGTITDAVDCALDPLSETKCTLKSFTVEKGIYQTSNFRVQPTESIVRFPNITNLCPFGEVFNATRFASVYAWNRKRISNCVADYSVLYNSASFSTFKCYGVSPTKLNDLCFTNVYADSFVIRGDEVRQIAPGQTGKIADYNYKLPDDFTGCVIAWNSNNLDSKVGGNYNYLYRLFRKSNLKPFERDISTEIYQAGSTPCNGVEGFNCYFPLQSYGFQPTNGVGYQPYRVVVLSFELLHAPATVCGPKKSTNLVKNKCVNFNFNGLTGTGVLTESNKKFLPFQQFGRDIADTTDAVRDPQTLEILDITPCSFGGVSVITPGTNTSNQVAVLYQDVNCTEVPVAIHADQLTPTWRVYSTGSNVFQTRAGCLIGAEHVNNSYECDIPIGAGICASYQTQTNSPRRARSVASQSIIAYTMSLGAENSVAYSNNSIAIPTNFTISVTTEILPVSMTKTSVDCTMYICGDSTECSNLLLQYGSFCTQLNRALTGIAVEQDKNTQEVFAQVKQIYKTPPIKDFGGFNFSQILPDPSKPSKRSFIEDLLFNKVTLADAGFIKQYGDCLGDIAARDLICAQKFNGLTVLPPLLTDEMIAQYTSALLAGTITSGWWFGAGAALQIPFAMQMAYRFNGIGVTQNVLYENQKLIANQFNSAIGKIQDSLSSTASALGKLQDVVNQNAQALNTLVKQLSSNFGAISSVLNDILSRLDPPEAEVQIDRLITGRLQSLQTYVTQQLIRAAEIRWSANLAATKMSECVLGQSKRVDFCGKGYHLMSFPQSAPHGVVFLHVTYVPAQEKNFTTAPAICHDGKAHFPREGVFVSNGTHWFVTQRNFYEPQIITTDNTFVSGNCDVVIGIVNNTVYDPLQPELDSFKEELDKYFKNHTSPDVDLGDIPGINASVVNIQKEIDRLNEVAKNLNESLIDLQELGKYEQYIKGGGGSDIDPYKEFGSSYQLLNFLPLDFFPDLNALVDTATALYEEELTGREHCSPHHTAIRQALVCWDELTKLIAWMSSNITSEQVRTIIVNHVNDTWGLKVRQSLWFHLSCLTFGQHTVQEFLVSFGVWIRTPAPYRPPNAPILSTLPEHTVIC

SEQ ID NO: 6820 - protein, 1365 aa, Artificial Sequence
  SARS-CoV-2/USA/WA-UW261/2020__EPI_ISL_418046 spike protein (1-1211)(K986P_V987P_T887W_A1020W) WhcAg construct
MFVFLVLLPLVSSQCVNLTTRTQLPPAYTNSFTRGVYYPDKVFRSSVLHSTQDLFLPFFSNVTWFHAIHVSGTNGTKRFDNPVLPFNDGVYFASTEKSNIIRGWIFGTTLDSKTQSLLIVNNATNVVIKVCEFQFCNDPFLGVYYHKNNKSWMESEFRVYSSANNCTFEYVSQPFLMDLEGKQGNFKNLREFVFKNIDGYFKIYSKHTPINLVRDLPQGFSALEPLVDLPIGINITRFQTLLALHRSYLTPGDSSSGWTAGAAAYYVGYLQPRTFLLKYNENGTITDAVDCALDPLSETKCTLKSFTVEKGIYQTSNFRVQPTESIVRFPNITNLCPFGEVFNATRFTSVYAWNRKRISNCVADYSVLYNSASFSTFKCYGVSPTKLNDLCFTNVYADSFVIRGDEVRQIAPGQTGKIADYNYKLPDDFTGCVIAWNSNNLDSKVGGNYNYLYRLFRKSNLKPFERDISTEIYQAGSTPCNGVEGFNCYFPLQSYGFQPTNGVGYQPYRVVVLSFELLHAPATVCGPKKSTNLVKNKCVNFNFNGLTGTGVLTESNKKFLPFQQFGRDIADTTDAVRDPQTLEILDITPCSFGGVSVITPGTNTSNQVAVLYQDVNCTEVPVAIHADQLTPTWRVYSTGSNVFQTRAGCLIGAEHVNNSYECDIPIGAGICASYQTQTNSPRRARSVASQSIIAYTMSLGAENSVAYSNNSIAIPTNFTISVTTEILPVSMTKTSVDCTMYICGDSTECSNLLLQYGSFCTQLNRALTGIAVEQDKNTQEVFAQVKQIYKTPPIKDFGGFNFSQILPDPSKPSKRSFIEDLLFNKVTLADAGFIKQYGDCLGDIAARDLICAQKFNGLTVLPPLLTDEMIAQYTSALLAGTITSGWWFGAGAALQIPFAMQMAYRFNGIGVTQNVLYENQKLIANQFNSAIGKIQDSLSSTASALGKLQDVVNQNAQALNTLVKQLSSNFGAISSVLNDILSRLDPPEAEVQIDRLITGRLQSLQTYVTQQLIRAAEIRWSANLAATKMSECVLGQSKRVDFCGKGYHLMSFPQSAPHGVVFLHVTYVPAQEKNFTTAPAICHDGKAHFPREGVFVSNGTHWFVTQRNFYEPQIITTDNTFVSGNCDVVIGIVNNTVYDPLQPELDSFKEELDKYFKNHTSPDVDLGDISGINASVVNIQKEIDRLNEVAKNLNESLIDLQELGKYEQYIKGGGGSDIDPYKEFGSSYQLLNFLPLDFFPDLNALVDTATALYEEELTGREHCSPHHTAIRQALVCWDELTKLIAWMSSNITSEQVRTIIVNHVNDTWGLKVRQSLWFHLSCLTFGQHTVQEFLVSFGVWIRTPAPYRPPNAPILSTLPEHTVIC

SEQ ID NO: 6821 - protein, 1365 aa, Artificial Sequence
  SARS-CoV-2/Portugal/PT0035/2020__EPI_ISL_418020 spike protein (1-1211)(K986P_V987P_T887W_A1020W) WhcAg construct
MFVFLVLLPLVSSQCVNLTTRTQLPPAYTNSFTRGVYYPDKVFRSSVLHSTQDLFLPFFSNVTWFHAIHVSGTNGTKRFDNPVLPFNDGVYFASTEKSNIIRGWIFGTTLDSKTQSLLIVNNATNVVIKVCEFQFCNDPFLGVYYHKNNKSWMESEFRVYSSANNCTFEYVSQPFLMDLEGKQGNFKNLREFVFKNIDGYFKIYSKHTPINLVRDLPQGFSALEPLVDLPIGINITRFQTLLALHRSYLTPGDSSSGWTAGAAAYYVGYLQPRTFLLKYNENGTITDAVDCALDPLSETKCTLKSFTVEKGIYQTSNFRVQPTESIVRFPNITNLCPFGEVFNATRFASVYAWNRKRISNCVADYSVLYNSASFSTFKCYGVSPTKLNDLCFTNVYADSFVIRGDEVRQIAPGQTGKIADYNYKLPDDFTGCVIAWNSNNLDSKVGGNYNYLYRLFRKSNLKPFERDISTEIYQAGSTPCNGVEGFNCYFPLQSYGFQPTNGVGYQPYRVVVLSFELLHAPATVCGPKKSTNLVKNKCVNFNFNGLTGTGVLTESNKKFLPFQQFGRDIADTTDAVRDPQTLEILDITPCSFGGVSVITPGTNTSNQVAVLYQDVNCTEVPVAIHADQLTPTWRVYSTGSNVFQTRAGCLIGAEHVNNSYECDIPIGAGICASYQTQTNSPRRARSVASQSIIAYTMSLGAENSVAYSNNSIAIPTNFTISVTTEILPVSMTKTSVDCTMYICGDSTECSNLLLQYGSFCTQLNRALTGIAVEQDKNTQEVFAQVKQIYKTPPIKDFGGFNFSQILPDPSKPSKRSFIEDLLFNKVTLADAGFIKQYGDCLGDISARDLICAQKFNGLTVLPPLLTDEMIAQYTSALLAGTITSGWWFGAGAALQIPFAMQMAYRFNGIGVTQNVLYENQKLIANQFNSAIGKIQDSLSSTASALGKLQDVVNQNAQALNTLVKQLSSNFGAISSVLNDILSRLDPPEAEVQIDRLITGRLQSLQTYVTQQLIRAAEIRWSANLAATKMSECVLGQSKRVDFCGKGYHLMSFPQSAPHGVVFLHVTYVPAQEKNFTTAPAICHDGKAHFPREGVFVSNGTHWFVTQRNFYEPQIITTDNTFVSGNCDVVIGIVNNTVYDPLQPELDSFKEELDKYFKNHTSPDVDLGDISGINASVVNIQKEIDRLNEVAKNLNESLIDLQELGKYEQYIKGGGGSDIDPYKEFGSSYQLLNFLPLDFFPDLNALVDTATALYEEELTGREHCSPHHTAIRQALVCWDELTKLIAWMSSNITSEQVRTIIVNHVNDTWGLKVRQSLWFHLSCLTFGQHTVQEFLVSFGVWIRTPAPYRPPNAPILSTLPEHTVIC

SEQ ID NO: 6822 - protein, 1365 aa, Artificial Sequence
  SARS-CoV-2/USA/NY-NYUMC7/2020__EPI_ISL_418192 spike protein (1-1211)(K986P_V987P_T887W_A1020W) WhcAg construct
MFVFLVLLPLVSSQCVNLTTRTQLPPAYTNSFTRGVYYPDKVFRSSVLHSTQDLFLPFFSNVTWFHAIHVSGTNGTKRFDNPVLPFNDGVYFASTEKSNIIRGWIFGTTLDSKTQSLLIVNNATNVVIKVCEFQFCNDPFLGVYHHKNNKSWMESEFRVYSSANNCTFEYVSQPFLMDLEGKQGNFKNLREFVFKNIDGYFKIYSKHTPINLVRDLPQGFSALEPLVDLPIGINITRFQTLLALHRSYLTPGDSSSGWTAGAAAYYVGYLQPRTFLLKYNENGTITDAVDCALDPLSETKCTLKSFTVEKGIYQTSNFRVQPTESIVRFPNITNLCPFGEVFNATRFASVYAWNRKRISNCVADYSVLYNSASFSTFKCYGVSPTKLNDLCFTNVYADSFVIRGDEVRQIAPGQTGKIADYNYKLPDDFTGCVIAWNSNNLDSKVGGNYNYLYRLFRKSNLKPFERDISTEIYQAGSTPCNGVEGFNCYFPLQSYGFQPTNGVGYQPYRVVVLSFELLHAPATVCGPKKSTNLVKNKCVNFNFNGLTGTGVLTESNKKFLPFQQFGRDIADTTDAVRDPQTLEILDITPCSFGGVSVITPGTNTSNQVAVLYQGVNCTEVPVAIHADQLTPTWRVYSTGSNVFQTRAGCLIGAEHVNNSYECDIPIGAGICASYQTQTNSPRRARSVASQSIIAYTMSLGAENSVAYSNNSIAIPTNFTISVTTEILPVSMTKTSVDCTMYICGDSTECSNLLLQYGSFCTQLNRALTGIAVEQDKNTQEVFAQVKQIYKTPPIKDFGGFNFSQILPDPSKPSKRSFIEDLLFNKVTLADAGFIKQYGDCLGDIAARDLICAQKFNGLTVLPPLLTDEMIAQYTSALLAGTITSGWWFGAGAALQIPFAMQMAYRFNGIGVTQNVLYENQKLIANQFNSAIGKIQDSLSSTASALGKLQDVVNQNAQALNTLVKQLSSNFGAISSVLNDILSRLDPPEAEVQIDRLITGRLQSLQTYVTQQLIRAAEIRWSANLAATKMSECVLGQSKRVDFCGKGYHLMSFPQSAPHGVVFLHVTYVPAQEKNFTTAPAICHDGKAHFPREGVFVSNGTHWFVTQRNFYEPQIITTDNTFVSGNCDVVIGIVNNTVYDPLQPELDSFKEELDKYFKNHTSPDVDLGDISGINASVVNIQKEIDRLNEVAKNLNESLIDLQELGKYEQYIKGGGGSDIDPYKEFGSSYQLLNFLPLDFFPDLNALVDTATALYEEELTGREHCSPHHTAIRQALVCWDELTKLIAWMSSNITSEQVRTIIVNHVNDTWGLKVRQSLWFHLSCLTFGQHTVQEFLVSFGVWIRTPAPYRPPNAPILSTLPEHTVIC

SEQ ID NO: 6823 - protein, 1365 aa, Artificial Sequence
  SARS-CoV-2/Iceland/189/2020__EPI_ISL_417709 spike protein (1-1211)(K986P_V987P_T887W_A1020W) WhcAg construct
MFVFLVLLPLVSSQCVNLTTRTQLPPAYTNSFTRGVYYPDKVFRSSVLHSTQDLFLPFFSNVTWFHAIHVSGTNGTKRFDNPVLPFNDGVYFASTEKSNIIRGWIFGTTLDSKTQSLLIVNNATNVVIKVCEFQFCNDPFLGVYYHKNNKSWMESEFRVYSSANNCTFEYVSQPFLMDLEGKQGNFKNLREFVFKNIDGYFKIYSKHTPINLVRDLPQGFSALEPLVDLPIGINITRFQTLLALHRSYLTPGDSSSGWTAGAAAYYVGYLQPRTFLLKYNENGTITDAVDCALDPLSETKCTLKSFTVEKGIYQTSNFRVQPTESIVRFPNITNLCPFGEVFNATRFASVYAWNRKRISNCVADYSVLYNSASFSTFKCYGVSPTKLNDLCFTNVYADSFVIRGDEVRQIAPGQTGKIADYNYKLPDDFTGCVIAWNSNNLDSKVGGNYNYLYRLFRKSNLKPFERDISTEIYQAGSTPCNGVEGFNCYFPLQSYGFQPTNGVGYQPYRVVVLSFELLHAPATVCGPKKSTNLVKNKCVNFNFNGLTGTGVLTESNKKFLPFQQFGRDIADTTDAVRDPQTLEILDITPCSFGGVSVITPGTNTSNQVAVLYQGVNCTEVPVAIHADQLTPTWRVYSTGSNVFQTRAGCLIGAEHVNNSYECDIPIGAGICASYQTQTNSPRRARSVASQSIIAYTMSLGAENSVAYSNNSIAIPTNFTISVTTEILPVSMTKTSVDCTMYICGDSTECSNLLLQYGSFCTQLNRALTGIAVEQDKNTQEVFAQVKQIYKTPPIKDFGGFNFSQILPDPSKPSKRSFIEDLLFNKVTLADAGFTKQYGDCLGDIAARDLICAQKFNGLTVLPPLLTDEMIAQYTSALLAGTITSGWWFGAGAALQIPFAMQMAYRFNGIGVTQNVLYENQKLIANQFNSAIGKIQDSLSSTASALGKLQDVVNQNAQALNTLVKQLSSNFGAISSVLNDILSRLDPPEAEVQIDRLITGRLQSLQTYVTQQLIRAAEIRWSANLAATKMSECVLGQSKRVDFCGKGYHLMSFPQSAPHGVVFLHVTYVPAQEKNFTTAPAICHDGKAHFPREGVFVSNGTHWFVTQRNFYEPQIITTDNTFVSGNCDVVIGIVNNTVYDPLQPELDSFKEELDKYFKNHTSPDVDLGDISGINASVVNIQKEIDRLNEVAKNLNESLIDLQELGKYEQYIKGGGGSDIDPYKEFGSSYQLLNFLPLDFFPDLNALVDTATALYEEELTGREHCSPHHTAIRQALVCWDELTKLIAWMSSNITSEQVRTIIVNHVNDTWGLKVRQSLWFHLSCLTFGQHTVQEFLVSFGVWIRTPAPYRPPNAPILSTLPEHTVIC

SEQ ID NO: 6824 - protein, 1365 aa, Artificial Sequence
  SARS-CoV-2/Australia/NSW56/2020__EPI_ISL_417408 spike protein (1-1211)(K986P_V987P_T887W_A1020W) WhcAg construct
MFVFLVLLPLVSSQCVNLTTRTQLPPAYTNSFTRGVYYPDKVFRSSVLHSTQDLFLPFFSNVTWFHAIHVSGTNGTKRFDNPVLPFNDGVYFASTEKSNIIRGWIFGTTLDSKTQSLLIVNNATNVVIKVCEFQFCNDPFLGVYYHKNNKSWMESEFRVYSSANNCTFEYVSQPFLMDLEGKQGNFKNLREFVFKNIDGYFKIYSKHTPINLVRDLPQGFSALEPLVDLPIGINITRFQTLLALHRSYLTPGDSSSGWTAGAAAYYVGYLQPRTFLLKYNENGTITDAVDCALDPLSETKCTLKSFTVEKGIYQTSNFRVQPTESIVRFPNITNLCPFGEVFNATRFASVYAWNRKRISNCVADYSVLYNSASFSTFKCYGVSPTKLNDLCFTNVYADSFVIRGDEVRQIAPGQTGKIADYNYKLPDDFTGCVIAWNSNNLDSKVGGNYNYLYRLFRKSNLKPFERDISTEIYQAGSTPCNGVEGFNCYFPLQSYGFQPTNGVGYQPYRVVVLSFELLHAPATVCGPKKSTNLVKNKCVNFNFNGLTGTGVLTESNKKFLPFQQFGRDIADTTDAVRDPQTLEILDITPCSFGGVSVITPGTNTSNQVAVLYQDVNCTEVPVAIHADQLTPTWRVYSTGSNVFQTRAGCLIGAEHVNNSYECDIPIGAGICASYQTQTNSPRRARSVASQSIIAYTMSLGAENSVAYSNNSIAIPTNFTISVTTEILPVSMTKTSVDCTMYICGDSTECSNLLLQYGSFCTQLNRALTGIAVEQDKNTQEVFAQVKQIYKTPPIKDFGGFNFSQILPDSSKPSKRSFIEDLLFNKVTLADAGFIKQYGDCLGDIAARDLICAQKFNGLTVLPPLLTDEMIAQYTSALLAGTITSGWWFGAGAALQIPFAMQMAYRFNGIGVTQNVLYENQKLIANQFNSAIGKIQDSLSSTASALGKLQDVVNQNAQALNTLVKQLSSNFGAISSVLNDILSRLDPPEAEVQIDRLITGRLQSLQTYVTQQLIRAAEIRWSANLAATKMSECVLGQSKRVDFCGKGYHLMSFPQSAPHGVVFLHVTYVPAQEKNFTTAPAICHDGKAHFPREGVFVSNGTHWFVTQRNFYEPQIITTDNTFVSGNCDVVIGIVNNTVYDPLQPELDSFKEELDKYFKNHTSPDVDLGDISGINASVVNIQKEIDRLNEVAKNLNESLIDLQELGKYEQYIKGGGGSDIDPYKEFGSSYQLLNFLPLDFFPDLNALVDTATALYEEELTGREHCSPHHTAIRQALVCWDELTKLIAWMSSNITSEQVRTIIVNHVNDTWGLKVRQSLWFHLSCLTFGQHTVQEFLVSFGVWIRTPAPYRPPNAPILSTLPEHTVIC

SEQ ID NO: 6825 - protein, 1365 aa, Artificial Sequence
  SARS-CoV-2/Iceland/280/2020__EPI_ISL_417608 spike protein (1-1211)(K986P_V987P_T887W_A1020W) WhcAg construct
MFVFLVLLPLVSSQCVNLTTRTQLPPAYTNSFTRGVYYPDKVFRSSVLHSTQDLFLPFFSNVTWFHAIHVSGTNGTKRFDNPVLPFNDGVYFASTEKSNIIRGWIFGTTLDSKTQSLLIVNNATNVVIKVCEFQFCNDPFLGVYYHKNNKSWMESEFRVYSSANNCTFEYVSQPFLMDLEGKQGNFKNLREFVFKNIDGYFKIYSKHTPINLVRDLPQGFSALEPLVDLPIGINITRFQTLLALHRSYLTPGDSSSGWTAGAAAYYVGYLQPRTFLLKYNENGTITDAVDCALDPLSETKCTLKSFTVEKGIYQTSNFRVQPTESIVRFPNITNLCPFGEVFNATRFASVYAWNRKRISNCVADYSVLYNSASFSTFKCYGVSPTKLNDLCFTNVYADSFVIRGDEVRQIAPGQTGKIADYNYKLPDDFTGCVIAWNSNNLDSKVGGNYNYLYRLFRKSNLKPFERDISTEIYQAGSTPCNGVEGFNCYFPLQSYGFQPTNGVGYQPYRVVVLSFELLHAPATVCGPKKSTNLVKNKCVNFNFNGLTGTGVLTESNKKFLPFQQFGRDIADTTDAVRDPQTLEILDITPCSFGGVSVITPGTNTSNQVAVLYQGVNCTEVPVAIHADQLTPTWRVYSTGSNVFQTRAGCLIGAEHVNNSYECDIPIGAGICASYHTQTNSPRRARSVASQSIIAYTMSLGAENSVAYSNNSIAIPTNFTISVTTEILPVSMTKTSVDCTMYICGDSTECSNLLLQYGSFCTQLNRALTGIAVEQDKNTQEVFAQVKQIYKTPPIKDFGGFNFSQILPDPSKPSKRSFIEDLLFNKVTLADAGFIKQYGDCLGDIAARDLICAQKFNGLTVLPPLLTDEMIAQYTSALLAGTITSGWWFGAGAALQIPFAMQMAYRFNGIGVTQNVLYENQKLIANQFNSAIGKIQDSLSSTASALGKLQDVVNQNAQALNTLVKQLSSNFGAISSVLNDILSRLDPPEAEVQIDRLITGRLQSLQTYVTQQLIRAAEIRWSANLAATKMSECVLGQSKRVDFCGKGYHLMSFPQSAPHGVVFLHVTYVPAQEKNFTTAPAICHDGKAHFPREGVFVSNGTHWFVTQRNFYEPQIITTDNTFVSGNCDVVIGIVNNTVYDPLQPELDSFKEELDKYFKNHTSPDVDLGDISGINASVVNIQKEIDRLNEVAKNLNESLIDLQELGKYEQYIKGGGGSDIDPYKEFGSSYQLLNFLPLDFFPDLNALVDTATALYEEELTGREHCSPHHTAIRQALVCWDELTKLIAWMSSNITSEQVRTIIVNHVNDTWGLKVRQSLWFHLSCLTFGQHTVQEFLVSFGVWIRTPAPYRPPNAPILSTLPEHTVIC

SEQ ID NO: 6826 - protein, 1365 aa, Artificial Sequence; identical to SEQ ID NO: 6781
  SARS-CoV-2/Iceland/247/2020__EPI_ISL_417575 spike protein (1-1211)(K986P_V987P_T887W_A1020W) WhcAg construct

SEQ ID NO: 6827 - protein, 1365 aa, Artificial Sequence
  SARS-CoV-2/Iceland/238/2020__EPI_ISL_417566 spike protein (1-1211)(K986P_V987P_T887W_A1020W) WhcAg construct
MFVFLVLLPLVSSQCVNLTTRTQLPPAYTNSFTRGVYYPDKVFRSSVLHSTQDLFLPFFSNVTWFHAIHVSGTNGTKRFDNPVLPFNDGVYFASTEKSNIIRGWIFGTTLDSKTQSLLIVNNATNVVIKVCEFQFCNDPFLGVYYHKNNKSWMESEFRVYSSANNCTFEYVSQPFLMDLEGKQGNFKNLREFVFKNIDGYFKIYSKHTPINLVRDLPQGFSALEPLVDLPIGINITRFQTLLALHRSYLTPGDSSSGWTAGAAAYYVGYLQPRTFLLKYNENGTITDAVDCALDPLSETKCTLKSFTVEKGIYQTSNFRVQPTESIVRFPNITNLCPFGEVFNATRFASVYAWNRKRISNCVADYSVLYNSASFSTFKCYGVSPTKLNDLCFTNVYADSFVIRGDEVRQIAPGQTGKIADYNYKLPDDFTGCVIAWNSNNLDSKVGGNYNYLYRLFRKSNLKPFERDISTEIYQAGSTPCNGVEGFNCYFPLQSYGFQPTNGVGYQPYRVVVLSFELLHAPATVCGPKKSTNLVKNKCVNFNFNGLTGTGVLTESNKKFLPFQQFGRDIADTTDAVRDPQTLEILDITPCSFGGVSVITPGTNTSNQVAVLYQGVNCTEVPVAIHADQLTPTWRVYSTGSNVFQTRAGCLIGAEHVNNSYECDIPIGAGICASYQTQTNSPRRARSVASQSIIAYTMSLGAENSVAYSNNSIAIPTNFTISVTTEILPVSMTKTSVDCTMYICGDSTECSNLLLQYGSFCTQLNRALTGIAVEQDKNTQEVFAQVKQIYKTPPIKDFGGFNFSQILPDPSKPSKRSFIEDLLFNKVTLADVGFIKQYGDCLGDIAARDLICAQKFNGLTVLPPLLTDEMIAQYTSALLAGTITSGWWFGAGAALQIPFAMQMAYRFNGIGVTQNVLYENQKLIANQFNSAIGKIQDSLSSTASALGKLQDVVNQNAQALNTLVKQLSSNFGAISSVLNDILSRLDPPEAEVQIDRLITGRLQSLQTYVTQQLIRAAEIRWSANLAATKMSECVLGQSKRVDFCGKGYHLMSFPQSAPHGVVFLHVTYVPAQEKNFTTAPAICHDGKAHFPREGVFVSNGTHWFVTQRNFYEPQIITTDNTFVSGNCDVVIGIVNNTVYDPLQPELDSFKEELDKYFKNHTSPDVDLGDISGINASVVNIQKEIDRLNEVAKNLNESLIDLQELGKYEQYIKGGGGSDIDPYKEFGSSYQLLNFLPLDFFPDLNALVDTATALYEEELTGREHCSPHHTAIRQALVCWDELTKLIAWMSSNITSEQVRTIIVNHVNDTWGLKVRQSLWFHLSCLTFGQHTVQEFLVSFGVWIRTPAPYRPPNAPILSTLPEHTVIC

SEQ ID NO: 6828 - protein, 1365 aa, Artificial Sequence
  SARS-CoV-2/Greece/16/2020__EPI_ISL_418265 spike protein (1-1211)(K986P_V987P_T887W_A1020W) WhcAg construct
MFVFLVLLPLVSSQCVNLTTRTQLPPAYTNSFTRGVYYPDKVFRSSVLHSTQDLFLPFFSNVTWFHAIHVSGTNGTKRFDNPVLPFNDGVYFASTEKSNIIRGWIFGTTLDSKTQSLLIVNNATNVVIKVCEFQFCNDPFLGVYYHKNNKSWMESEFRVYSSANNCTFEYVSQPFLMDLEGKQGNFKNLREFVFKNVDGYFKIYSKHTPINLVRDLPQGFSALEPLVDLPIGINITRFQTLLALHRSYLTPGDSSSGWTAGAAAYYVGYLQPRTFLLKYNENGTITDAVDCALDPLSETKCTLKSFTVEKGIYQTSNFRVQPTESIVRFPNITNLCPFGEVFNATRFASVYAWNRKRISNCVADYSVLYNSASFSTFKCYGVSPTKLNDLCFTNVYADSFVIRGDEVRQIAPGQTGKIADYNYKLPDDFTGCVIAWNSNNLDSKVGGNYNYLYRLFRKSNLKPFERDISTEIYQAGSTPCNGVEGFNCYFPLQSYGFQPTNGVGYQPYRVVVLSFELLHAPATVCGPKKSTNLVKNKCVNFNFNGLTGTGVLTESNKKFLPFQQFGRDIADTTDAVRDPQTLEILDITPCSFGGVSVITPGTNTSNQVAVLYQDVNCTEVPVAIHADQLTPTWRVYSTGSNVFQTRAGCLIGAEHVNNSYECDIPIGAGICASYQTQTNSPRRARSVASQSIIAYTMSLGAENSVAYSNNSIAIPTNFTISVTTEILPVSMTKTSVDCTMYICGDSTECSNLLLQYGSFCTQLNRALTGIAVEQDKNTQEVFAQVKQIYKTPPIKDFGGFNFSQILPDPSKPSKRSFIEDLLFNKVTLADAGFIKQYGDCLGDIAARDLICAQKFNGLTVLPPLLTDEMIAQYTSALLAGTITSGWWFGAGAALQIPFAMQMAYRFNGIGVTQNVLYENQKLIANQFNSAIGKIQDSLSSTASALGKLQDVVNQNAQALNTLVKQLSSNFGAISSVLNDILSRLDPPEAEVQIDRLITGRLQSLQTYVTQQLIRAAEIRWSANLAATKMSECVLGQSKRVDFCGKGYHLMSFPQSAPHGVVFLHVTYVPAQEKNFTTAPAICHDGKAHFPREGVFVSNGTHWFVTQRNFYEPQIITTDNTFVSGNCDVVIGIVNNTVYDPLQPELDSFKEELDKYFKNHTSPDVDLGDISGINASVVNIQKEIDRLNEVAKNLNESLIDLQELGKYEQYIKGGGGSDIDPYKEFGSSYQLLNFLPLDFFPDLNALVDTATALYEEELTGREHCSPHHTAIRQALVCWDELTKLIAWMSSNITSEQVRTIIVNHVNDTWGLKVRQSLWFHLSCLTFGQHTVQEFLVSFGVWIRTPAPYRPPNAPILSTLPEHTVIC

SEQ ID NO: 6829 - protein, 1365 aa, Artificial Sequence
  SARS-CoV-2/Iceland/319/2020__EPI_ISL_417648 spike protein (1-1211)(K986P_V987P_T887W_A1020W) WhcAg construct
MFVFLVLLPLVSSQCVNLTTRTQLPPAYTNSFTRGVYYPDKVFRSSVLHSTQDLFLPFFSNVTWFHAIHVSGTNGTKRFDNPVLPFNDGVYFASTEKSNIIRGWIFGTTLDSKTQSLLIVNNATNVVIKVCEFQFCNDPFLGVYYHKNNKSWMESEFRVYSSANNCTFEYVSQPFLIDLEGKQGNFKNLREFVFKNIDGYFKIYSKHTPINLVRDLPQGFSALEPLVDLPIGINITRFQTLLALHRSYLTPGDSSSGWTAGAAAYYVGYLQPRTFLLKYNENGTITDAVDCALDPLSETKCTLKSFTVEKGIYQTSNFRVQPTESIVRFPNITNLCPFGEVFNATRFASVYAWNRKRISNCVADYSVLYNSASFSTFKCYGVSPTKLNDLCFTNVYADSFVIRGDEVRQIAPGQTGKIADYNYKLPDDFTGCVIAWNSNNLDSKVGGNYNYLYRLFRKSNLKPFERDISTEIYQAGSTPCNGVEGFNCYFPLQSYGFQPTNGVGYQPYRVVVLSFELLHAPATVCGPKKSTNLVKNKCVNFNFNGLTGTGVLTESNKKFLPFQQFGRDIADTTDAVRDPQTLEILDITPCSFGGVSVITPGTNTSNQVAVLYQGVNCTEVPVAIHADQLTPTWRVYSTGSNVFQTRAGCLIGAEHVNNSYECDIPIGAGICASYQTQTNSPRRARSVASQSIIAYTMSLGAENSVAYSNNSIAIPTNFTISVTTEILPVSMTKTSVDCTMYICGDSTECSNLLLQYGSFCTQLNRALTGIAVEQDKNTQEVFAQVKQIYKTPPIKDFGGFNFSQILPDPSKPSKRSFIEDLLFNKVTLADAGFIKQYGDCLGDIAARDLICAQKFNGLTVLPPLLTDEMIAQYTSALLAGTITSGWWFGAGAALQIPFAMQMAYRFNGIGVTQNVLYENQKLIANQFNSAIGKIQDSLSSTASALGKLQDVVNQNAQALNTLVKQLSSNFGAISSVLNDILSRLDPPEAEVQIDRLITGRLQSLQTYVTQQLIRAAEIRWSANLAATKMSECVLGQSKRVDFCGKGYHLMSFPQSAPHGVVFLHVTYVPAQEKNFTTAPAICHDGKAHFPREGVFVSNGTHWFVTQRNFYEPQIITTDNTFVSGNCDVVIGIVNNTVYDPLQPELDSFKEELDKYFKNHTSPDVDLGDISGINASVVNIQKEIDRLNEVAKNLNESLIDLQELGKYEQYIKGGGGSDIDPYKEFGSSYQLLNFLPLDFFPDLNALVDTATALYEEELTGREHCSPHHTAIRQALVCWDELTKLIAWMSSNITSEQVRTIIVNHVNDTWGLKVRQSLWFHLSCLTFGQHTVQEFLVSFGVWIRTPAPYRPPNAPILSTLPEHTVIC

SEQ ID NO: 6830 - protein, 1365 aa, Artificial Sequence
  SARS-CoV-2/Congo/94/2020__EPI_ISL_417947 spike protein (1-1211)(K986P_V987P_T887W_A1020W) WhcAg construct
MFVFLVLLPLVSSQCVNLTTRTQLPPAYTNSFTRGVYYPDKVFRSSVLHSTQDLFLPFFSNVTWFHAIHVSGTNGTKRFDNPVLPFNDGVYFASTEKSNIIRGWIFGTTLDSKTQSLLIVNNATNVVIKVCEFQFCNDPFLGVYYHKNNKSWMESEFRVYSSANNCTFEYVSQPFLMDLEGKQGNFKNLREFVFKNIDGYFKIYSKHTPINLVRDLPQGFSALEPLVDLPIGINITRFQTLLALHRSYLTPGDSSSGWTAGAAAYYVGYLQPRTFLLKYNENGTITDAVDCALDPLSETKCTLKSFTVEKGIYQTSNFRVQPTESIVRFPNITNLCPFGEVFNATRFASVYAWNRKRISNCVADYSVLYNSASFSTFKCYGVSPTKLNDLCFTNVYADSFVIRGDEVRQIAPGQTGKIADYNYKLPDDFTGCVIAWNSNNLDSKVGGNYNYLYRLFRKSNLKPFERDISTEIYQAGSTPCNGVEGFNCYFPLQSYGFQPTNGVGYQPYRVVVLSFELLHAPATVCGPKKSTNLVKNKCVNFNFNGLTGTGVLTESNKKFLPFQQFGRDIADTTDAVRDPQTLEILDITPCSFGGVSVITPGTNTSNQVAVLYQGVNCTEVPVAIHADQLTPTWRVYSTGSNVFQTRAGCLIGAEHVNNSYECDIPIGAGICASYQTQTNSPRRARSVASQSIIAYTMSLGAENSVAYSNNSIAIPTNFTISVTTEILPVSMTKTSVDCTMYICGDSTECSNLLLQYGSFCTQLNRALTGIAVEQDKNTQEVFAQVKQIYKTPPIKDFGGFNFSQILPDPSKPSKRSFIEDILFNKVTLADAGFIKQYGDCLGDIAARDLICAQKFNGLTVLPPLLTDEMIAQYTSALLAGTITSGWWFGAGAALQIPFAMQMAYRFNGIGVTQNVLYENQKLIANQFNSAIGKIQDSLSSTASALGKLQDVVNQNAQALNTLVKQLSSNFGAISSVLNDILSRLDPPEAEVQIDRLITGRLQSLQTYVTQQLIRAAEIRWSANLAATKMSECVLGQSKRVDFCGKGYHLMSFPQSAPHGVVFLHVTYVPAQEKNFTTAPAICHDGKAHFPREGVFVSNGTHWFVTQRNFYEPQIITTDNTFVSGNCDVVIGIVNNTVYDPLQPELDSFKEELDKYFKNHTSPDVDLGDISGINASVVNIQKEIDRLNEVAKNLNESLIDLQELGKYEQYIKGGGGSDIDPYKEFGSSYQLLNFLPLDFFPDLNALVDTATALYEEELTGREHCSPHHTAIRQALVCWDELTKLIAWMSSNITSEQVRTIIVNHVNDTWGLKVRQSLWFHLSCLTFGQHTVQEFLVSFGVWIRTPAPYRPPNAPILSTLPEHTVIC

SEQ ID NO: 6831 - protein, 1365 aa, Artificial Sequence
  SARS-CoV-2/Congo/158/2020__EPI_ISL_417950 spike protein (1-1211)(K986P_V987P_T887W_A1020W) WhcAg construct
MFVFLVLLPLVSSQCVNLTTRTQLPPAYTNSFTRGVYYPDKVFRSSVLHSTQDLFLPFFSNVTWFHAIHVSGTNGTKRFDNPVLPFNDGVYFASTEKSNIIRGWIFGTTLDSKTQSLLIVNNATNVVIKVCEFQFCNDPFLGVYYHKNNKSWMESEFRVYSSANNCTFEYVSQPFLMDLEGKQGNFKNLREFVFKNIDGYFKIYSKHTPINLVRDLPQGFSALEPLVDLPIGINITRFQTLLALHRSYLTPGDSSSGWTAGAAAYYVGYLQPRTFLLKYNENGTITDAVDCALDPLSETKCTLKSFTVEKGIYQTSNFRVQPTESIVRFPNITNLCPFGEVFNATRFASVYAWNRKRISNCVADYSVLYNSASFSTFKCYGVSPTKLNDLCFTNVYADSFVIRGDEVRQIAPGQTGKIADYNYKLPDDFTGCVIAWNSNNLDSKVGGNYNYLYRLFRKSNLKPFERDISTEIYQAGSTPCNGVEGFNCYFPLQSYGFQPTNGVGYQPYRVVVLSFELLHAPATVCGPKKSTNLVKNKCVNFNFNGLTGTGVLTESNKKFLPFQQFGRDIADTTDAVRDPQTLEILDITPCSFGGVSVITPGTNTSNQVAVLYQDVNCTEVPVAIHADQLTPTWRVYSTGSNVFQTRAGCLIGAEHVNNSYECDIPIGAGICASYQTQTNSPRRARSVASQSIIAYTMSLGAENSVAYSNNSIAIPTNFTISVTTEILPVSMTKTSVDCTMYICGDSTECSNLLLQYGSFCTQLNRALTGIAVEQDKNTQEVFAQVKQIYKTPPIKDFGGFNFSQILPDPSKPSKRSFIEDLLFNKVTLADAGFIKQYGDCLGDIAARDLICAQKFNGLTVLPPLLTDEMIAQYTSALLAGTITSGWWFGAGAALQIPFAMQMAYRFNGIGVTQNVLYENQKLIANQFNSAIGKIQDSLSSTASALGKLQDVVNQNAQALNTLVKQLSSNFGAISSVLNDILSRLDPPEAEVQIDRLITGRLQSLQTYVTQQLIRAAEIRWSANLAATKMSECVLGQSKRVDFCGKGYHLMSFPQSAPHGVVFLHVTYVPAQEKNFTTAPAICHDGKAHFPREGVFVSNGTHWFVTQRNFYEPQIITTDNTFLSGNCDVVIGIVNNTVYDPLQPELDSFKEELDKYFKNHTSPDVDLGDISGINASVVNIQKEIDRLNEVAKNLNESLIDLQELGKYEQYIKGGGGSDIDPYKEFGSSYQLLNFLPLDFFPDLNALVDTATALYEEELTGREHCSPHHTAIRQALVCWDELTKLIAWMSSNITSEQVRTIIVNHVNDTWGLKVRQSLWFHLSCLTFGQHTVQEFLVSFGVWIRTPAPYRPPNAPILSTLPEHTVIC

SEQ ID NO: 6832 - protein, 1365 aa, Artificial Sequence
  SARS-CoV-2/USA/UT-00034/2020__EPI_ISL_417977 spike protein (1-1211)(K986P_V987P_T887W_A1020W) WhcAg construct
MFVFLVLLPLVSSQCVNLTTRTQLPPAYTNSFTRGVYYPDKVFRSSVLHSTQDLFLPFFSNVTWFHAIHVSGTNGTKRFDNPVLPFNDGVYFASTEKSNIIRGWIFGTTLDSKTQSLLIVNNATNVVIKVCEFQFCNDPFLGVYYYKNNKSWMESEFRVYSSANNCTFEYVSQPFLMDLEGKQGNFKNLREFVFKNIDGYFKIYSKHTPINLVRDLPQGFSALEPLVDLPIGINITRFQTLLALHRSYLTPGDSSSGWTAGAAAYYVGYLQPRTFLLKYNENGTITDAVDCALDPLSETKCTLKSFTVEKGIYQTSNFRVQPTESIVRFPNITNLCPFGEVFNATRFASVYAWNRKRISNCVADYSVLYNSASFSTFKCYGVSPTKLNDLCFTNVYADSFVIRGDEVRQIAPGQTGKIADYNYKLPDDFTGCVIAWNSNNLDSKVGGNYNYLYRLFRKSNLKPFERDISTEIYQAGSTPCNGVEGFNCYFPLQSYGFQPTNGVGYQPYRVVVLSFELLHAPATVCGPKKSTNLVKNKCVNFNFNGLTGTGVLTESNKKFLPFQQFGRDIADTTDAVRDPQTLEILDITPCSFGGVSVITPGTNTSNQVAVLYQGVNCTEVPVAIHADQLTPTWRVYSTGSNVFQTRAGCLIGAEHVNNSYECDIPIGAGICASYQTQTNSPRRARSVASQSIIAYTMSLGAENSVAYSNNSIAIPTNFTISVTTEILPVSMTKTSVDCTMYICGDSTECSNLLLQYGSFCTQLNRALTGIAVEQDKNTQEVFAQVKQIYKTPPIKDFGGFNFSQILPDPSKPSKRSFIEDLLFNKVTLADAGFIKQYGDCLGDIAARDLICAQKFNGLTVLPPLLTDEMIAQYTSALLAGTITSGWWFGAGAALQIPFAMQMAYRFNGIGVTQNVLYENQKLIANQFNSAIGKIQDSLSSTASALGKLQDVVNQNAQALNTLVKQLSSNFGAISSVLNDILSRLDPPEAEVQIDRLITGRLQSLQTYVTQQLIRAAEIRWSANLAATKMSECVLGQSKRVDFCGKGYHLMSFPQSAPHGVVFLHVTYVPAQEKNFTTAPAICHDGKAHFPREGVFVSNGTHWFVTQRNFYEPQIITTDNTFVSGNCDVVIGIVNNTVYDPLQPELDSFKEELDKYFKNHTSPDVDLGDISGINASVVNIQKEIDRLNEVAKNLNESLIDLQELGKYEQYIKGGGGSDIDPYKEFGSSYQLLNFLPLDFFPDLNALVDTATALYEEELTGREHCSPHHTAIRQALVCWDELTKLIAWMSSNITSEQVRTIIVNHVNDTWGLKVRQSLWFHLSCLTFGQHTVQEFLVSFGVWIRTPAPYRPPNAPILSTLPEHTVIC

SEQ ID NO: 6833 - protein, 1365 aa, Artificial Sequence
  SARS-CoV-2/USA/UT-00033/2020__EPI_ISL_417976 spike protein (1-1211)(K986P_V987P_T887W_A1020W) WhcAg construct
MFVFLVLLPLVSSQCVNLTTRTQLPPAYTNSFTRGVYYPDKVFRSSVLHSTQDLFLPFFSNVTWFHAIHVSGTNGTKRFDNPVLPFNDGVYFASTEKSNIIRGWIFGTTLDSKTQSLLIVNNATNVVIKVCEFQFCNDPFLGVYYHKNNKSWMESEFRVYSSANNCTFEYVSQPFLMDLEGKQGNFKNLREFVFKNIDGYFKIYSKHTPINLVRDLPQGFSALEPLVDLPIGINITRFQTLLALHRSYLTPGDSSSGLTAGAAAYYVGYLQPRTFLLKYNENGTITDAVDCALDPLSETKCTLKSFTVEKGIYQTSNFRVQPTESIVRFPNITNLCPFGEVFNATRFASVYAWNRKRISNCVADYSVLYNSASFSTFKCYGVSPTKLNDLCFTNVYADSFVIRGDEVRQIAPGQTGKIADYNYKLPDDFTGCVIAWNSNNLDSKVGGNYNYLYRLFRKSNLKPFERDISTEIYQAGSTPCNGVEGFNCYFPLQSYGFQPTNGVGYQPYRVVVLSFELLHAPATVCGPKKSTNLVKNKCVNFNFNGLTGTGVLTESNKKFLPFQQFGRDIADTTDAVRDPQTLEILDITPCSFGGVSVITPGTNTSNQVAVLYQGVNCTEVPVAIHADQLTPTWRVYSTGSNVFQTRAGCLIGAEHVNNSYECDIPIGAGICASYQTQTNSPRRARSVASQSIIAYTMSLGAENSVAYSNNSIAIPTNFTISVTTEILPVSMTKTSVDCTMYICGDSTECSNLLLQYGSFCTQLNRALTGIAVEQDKNTQEVFAQVKQIYKTPPIKDFGGFNFSQILPDPSKPSKRSFIEDLLFNKVTLADAGFIKQYGDCLGDIAARDLICAQKFNGLTVLPPLLTDEMIAQYTSALLAGTITSGWWFGAGAALQIPFAMQMAYRFNGIGVTQNVLYENQKLIANQFNSAIGKIQDSLSSTASALGKLQDVVNQNAQALNTLVKQLSSNFGAISSVLNDILSRLDPPEAEVQIDRLITGRLQSLQTYVTQQLIRAAEIRWSANLAATKMSECVLGQSKRVDFCGKGYHLMSFPQSAPHGVVFLHVTYVPAQEKNFTTAPAICHDGKAHFPREGVFVSNGTHWFVTQRNFYEPQIITTDNTFVSGNCDVVIGIVNNTVYDPLQPELDSFKEELDKYFKNHTSPDVDLGDISGINASVVNIQKEIDRLNEVAKNLNESLIDLQELGKYEQYIKGGGGSDIDPYKEFGSSYQLLNFLPLDFFPDLNALVDTATALYEEELTGREHCSPHHTAIRQALVCWDELTKLIAWMSSNITSEQVRTIIVNHVNDTWGLKVRQSLWFHLSCLTFGQHTVQEFLVSFGVWIRTPAPYRPPNAPILSTLPEHTVIC

SEQ ID NO: 6834 - protein, 1365 aa, Artificial Sequence
  SARS-CoV-2/USA/WI-13/2020__EPI_ISL_417516 spike protein (1-1211)(K986P_V987P_T887W_A1020W) WhcAg construct
MFVFLVLLPLVSSQCVNLTTRTQLPPAYTNSFTRGVYYPDKVFRSSVLHSTQDLFLPFFSNVTWFHAIHVSGTNGTKRFDNPVLPFNDGVYFASTEKSNIIRGWIFGTTLDSKTQSLLIVNNATNVVIKVCEFQFCNDPFLGVYYHKNNKSWMESEFRVYSSANNCTFEYVSQPFLMDLEGKQGNFKNLREFVFKNIDGYFKIYSKHTPINLVRDLPQGFSALEPLVDLPIGINITRFQTLLALHRSYLTPGDSSSGWTAGAAAYYVGYLQPRTFLLKYNENGTITDAVDCALDPLSETKCTLKSFTVEKGIYQTSNFRVLPTESIVRFPNITNLCPFGEVFNATRFASVYAWNRKRISNCVADYSVLYNSASFSTFKCYGVSPTKLNDLCFTNVYADSFVIRGDEVRQIAPGQTGKIADYNYKLPDDFTGCVIAWNSNNLDSKVGGNYNYLYRLFRKSNLKPFERDISTEIYQAGSTPCNGVEGFNCYFPLQSYGFQPTNGVGYQPYRVVVLSFELLHAPATVCGPKKSTNLVKNKCVNFNFNGLTGTGVLTESNKKFLPFQQFGRDIADTTDAVRDPQTLEILDITPCSFGGVSVITPGTNTSNQVAVLYQGVNCTEVPVAIHADQLTPTWRVYSTGSNVFQTRAGCLIGAEHVNNSYECDIPIGAGICASYQTQTNSPRRARSVASQSIIAYTMSLGAENSVAYSNNSIAIPTNFTISVTTEILPVSMTKTSVDCTMYICGDSTECSNLLLQYGSFCTQLNRALTGIAVEQDKNTQEVFAQVKQIYKTPPIKDFGGFNFSQILPDPSKPSKRSFIEDLLFNKVTLADAGFIKQYGDCLGDIAARDLICAQKFNGLTVLPPLLTDEMIAQYTSALLAGTITSGWWFGAGAALQIPFAMQMAYRFNGIGVTQNVLYENQKLIANQFNSAIGKIQDSLSSTASALGKLQDVVNQNAQALNTLVKQLSSNFGAISSVLNDILSRLDPPEAEVQIDRLITGRLQSLQTYVTQQLIRAAEIRWSANLAATKMSECVLGQSKRVDFCGKGYHLMSFPQSAPHGVVFLHVTYVPAQEKNFTTAPAICHDGKAHFPREGVFVSNGTHWFVTQRNFYEPQIITTDNTFVSGNCDVVIGIVNNTVYDPLQPELDSFKEELDKYFKNHTSPDVDLGDISGINASVVNIQKEIDRLNEVAKNLNESLIDLQELGKYEQYIKGGGGSDIDPYKEFGSSYQLLNFLPLDFFPDLNALVDTATALYEEELTGREHCSPHHTAIRQALVCWDELTKLIAWMSSNITSEQVRTIIVNHVNDTWGLKVRQSLWFHLSCLTFGQHTVQEFLVSFGVWIRTPAPYRPPNAPILSTLPEHTVIC

SEQ ID NO: 6835 - protein, 1364 aa, Artificial Sequence
  SARS-CoV-2/India/1-27/2020__EPI_ISL_413522 spike protein (1-1210)(K985P_V986P_T886W_A1019W) WhcAg construct
MFVFLVLLPLVSSQCVNLTTRTQLPPAYTNSFTRGVYYPDKVFRSSVLHSTQDLFLPFFSNVTWFHAIHVSGTNGTKRFDNPVLPFNDGVYFASTEKSNIIRGWIFGTTLDSKTQSLLIVNNATNVVIKVCEFQFCNDPFLGVYHKNNKSWMESEFRVYSSANNCTFEYVSQPFLMDLEGKQGNFKNLREFVFKNIDGYFKIYSKHTPINLVRDLPQGFSALEPLVDLPIGINITRFQTLLALHRSYLTPGDSSSGWTAGAAAYYVGYLQPRTFLLKYNENGTITDAVDCALDPLSETKCTLKSFTVEKGIYQTSNFRVQPTESIVRFPNITNLCPFGEVFNATRFASVYAWNRKRISNCVADYSVLYNSASFSTFKCYGVSPTKLNDLCFTNVYADSFVIRGDEVIQIAPGQTGKIADYNYKLPDDFTGCVIAWNSNNLDSKVGGNYNYLYRLFRKSNLKPFERDISTEIYQAGSTPCNGVEGFNCYFPLQSYGFQPTNGVGYQPYRVVVLSFELLHAPATVCGPKKSTNLVKNKCVNFNFNGLTGTGVLTESNKKFLPFQQFGRDIADTTDAVRDPQTLEILDITPCSFGGVSVITPGTNTSNQVAVLYQDVNCTEVPVAIHADQLTPTWRVYSTGSNVFQTRAGCLIGAEHVNNSYECDIPIGAGICASYQTQTNSPRRARSVASQSIIAYTMSLGAENSVAYSNNSIAIPTNFTISVTTEILPVSMTKTSVDCTMYICGDSTECSNLLLQYGSFCTQLNRALTGIAVEQDKNTQEVFAQVKQIYKTPPIKDFGGFNFSQILPDPSKPSKRSFIEDLLFNKVTLADAGFIKQYGDCLGDIAARDLICAQKFNGLTVLPPLLTDEMIAQYTSALLAGTITSGWWFGAGAALQIPFAMQMAYRFNGIGVTQNVLYENQKLIANQFNSAIGKIQDSLSSTASALGKLQDVVNQNAQALNTLVKQLSSNFGAISSVLNDILSRLDPPEAEVQIDRLITGRLQSLQTYVTQQLIRAAEIRWSANLAATKMSECVLGQSKRVDFCGKGYHLMSFPQSAPHGVVFLHVTYVPAQEKNFTTAPAICHDGKAHFPREGVFVSNGTHWFVTQRNFYEPQIITTDNTFVSGNCDVVIGIVNNTVYDPLQPELDSFKEELDKYFKNHTSPDVDLGDISGINASVVNIQKEIDRLNEVAKNLNESLIDLQELGKYEQYIKGGGGSDIDPYKEFGSSYQLLNFLPLDFFPDLNALVDTATALYEEELTGREHCSPHHTAIRQALVCWDELTKLIAWMSSNITSEQVRTIIVNHVNDTWGLKVRQSLWFHLSCLTFGQHTVQEFLVSFGVWIRTPAPYRPPNAPILSTLPEHTVIC

SEQ ID NO: 6836 - protein, 1359 aa, Artificial Sequence
  SARS-CoV-2/pangolin/Guangxi/P4L/2017__EPI_ISL_410538 spike protein (1-1205)(K980P_V981P_T881W_A1014W) WhcAg construct
MFVFLFVLPLVSSQCVNLTTRTGIPPGYTNSSTRGVYYPDKVFRSSILHLTQDLFLPFFSNVTWFNTINYQGGFKKFDNPVLPFNDGVYFASTEKSNIIRGWIFGTTLDARTQSLLIVNNATNVVIKVCEFQFCTDPFLGVYYHNNNKTWVENEFRVYSSANNCTFEYISQPFLMDLEGKQGNFKNLREFVFKNVDGYFKIYSKHTPIDLVRDLPRGFAALEPLVDLPIGINITRFQTLLALHRSYLTPGNLESGWTTGAAAYYVGYLQQRTFLLSYNQNGTITDAVDCSLDPLSETKCTLKSLTVEKGIYQTSNFRVQPTISIVRFPNITNLCPFGEVFNASKFASVYAWNRKRISNCVADYSVLYNSTSFSTFKCYGVSPTKLNDLCFTNVYADSFVVKGDEVRQIAPGQTGVIADYNYKLPDDFTGCVIAWNSVKQDALTGGNYGYLYRLFRKSKLKPFERDISTEIYQAGSTPCNGQVGLNCYYPLERYGFHPTTGVNYQPFRVVVLSFELLNGPATVCGPKLSTTLVKDKCVNFNFNGLTGTGVLTTSKKQFLPFQQFGRDISDTTDAVRDPQTLEILDITPCSFGGVSVITPGTNTSNQVAVLYQDVNCTEVPMAIHAEQLTPAWRVYSAGANVFQTRAGCLVGAEHVNNSYECDIPVGAGICASYHSMSSLRSVNQRSIIAYTMSLGAENSVAYSNNSIAIPTNFTISVTTEILPVSMTKTSVDCTMYICGDSIECSNLLLQYGSFCTQLNRALTGIAVEQDKNTQEVFAQVKQIYKTPPIKDFGGFNFSQILPDPSKPSKRSFIEDLLFNKVTLADAGFIKQYGDCLGDIAARDLICAQKFNGLTVLPPLLTDEMIAQYTSALLAGTITSGWWFGAGAALQIPFAMQMAYRFNGIGVTQNVLYENQKLIANQFNSAIGKIQDSLSSTASALGKLQDVVNQNAQALNTLVKQLSSNFGAISSVLNDILSRLDPPEAEVQIDRLITGRLQSLQTYVTQQLIRAAEIRWSANLAATKMSECVLGQSKRVDFCGKGYHLMSFPQSAPHGVVFLHVTYVPAQEKNFTTAPAICHEGKAHFPREGVFVSNGTHWFITQRNFYEPQIITTDNTFVSGSCDVVIGIVNNTVYDPLQPELDSFKEELDKYFKNHTSPDVDLGDISGINASVVNIQKEIDRLNEVAKNLNESPIDLQELGKYEQYIKGGGGSDIDPYKEFGSSYQLLNFLPLDFFPDLNALVDTATALYEEELTGREHCSPHHTAIRQALVCWDELTKLIAWMSSNITSEQVRTIIVNHVNDTWGLKVRQSLWFHLSCLTFGQHTVQEFLVSFGVWIRTPAPYRPPNAPILSTLPEHTVIC

SEQ ID NO: 6837 - protein, 1359 aa, Artificial Sequence
  SARS-CoV-2/pangolin/Guangxi/P5L/2017__EPI_ISL_410540 spike protein (1-1205)(K980P_V981P_T881W_A1014W) WhcAg construct
MFVFLFVLPLVSSQCVNLTTRTGIPPGYTNSSTRGVYYPDKVFRSSILHLTQDLFLPFFSNVTWFNTINYQGGFKKFDNPVLPFNDGVYFASTEKSNIIRGWIFGTTLDARTQSLLIVNNATNVVIKVCEFQFCTDPFLGVYYHNNNKTWVENEFRVYSSANNCTFEYISQPFLMDLEGKQGNFKNLREFVFKNVDGYFKIYSKHTPIDLVRDLPRGFAALEPLVDLPIGINITRFQTLLALHRSYLTPGKLESGWTTGAAAYYVGYLQQRTFLLSYNQNGTITDAVDCSLDPLSETKCTLKSLTVEKGIYQTSNFRVQPTISIVRFPNITNLCPFGEVFNASKFASVYAWNRKRISNCVADYSVLYNSTSFSTFKCYGVSPTKLNDLCFTNVYADSFVVKGDEVRQIAPGQTGVIADYNYKLPDDFTGCVIAWNSVKQDALTGGNYGYLYRLFRKSKLKPFERDISTEIYQAGSTPCNGQVGLNCYYPLERYGFHPTTGVNYQPFRVVVLSFELLNGPATVCGPKLSTTLVKDKCVNFNFNGLTGTGVLTTSKKQFLPFQQFGRDISDTTDAVRDPQTLEILDITPCSFGGVSVITPGTNTSNQVAVLYQDVNCTEVPMAIHAEQLTPAWRVYSAGANVFQTRAGCLVGAEHVNNSYECDIPVGAGICASYHSMSSFRSVNQRSIIAYTMSLGAENSVAYSNNSIAIPTNFTISVTTEILPVSMTKTSVDCTMYICGDSIECSNLLLQYGSFCTQLNRALTGIAVEQDKNTQEVFAQVKQIYKTPPIKDFGGFNFSQILPDPSKPSKRSFIEDLLFNKVTLADAGFIKQYGDCLGDIAARDLICAQKFNGLTVLPPLLTDEMIAQYTSALLAGTITSGWWFGAGAALQIPFAMQMAYRFNGIGVTQNVLYENQKLIANQFNSAIGKIQDSLSSTASALGKLQDVVNQNAQALNTLVKQLSSNFGAISSVLNDILSRLDPPEAEVQIDRLITGRLQSLQTYVTQQLIRAAEIRWSANLAATKMSECVLGQSKRVDFCGKGYHLMSFPQSAPHGVVFLHVTYVPAQEKNFTTAPAICHEGKAHFPREGVFVSNGTHWFITQRNFYEPQIITTDNTFVSGSCDVVIGIVNNTVYDPLQPELDSFKEELDKYFKNHTSPDVDLGDISGINASVVNIQKEIDRLNEVAKNLNESLIDLQELGKYEQYIKGGGGSDIDPYKEFGSSYQLLNFLPLDFFPDLNALVDTATALYEEELTGREHCSPHHTAIRQALVCWDELTKLIAWMSSNITSEQVRTIIVNHVNDTWGLKVRQSLWFHLSCLTFGQHTVQEFLVSFGVWIRTPAPYRPPNAPILSTLPEHTVIC

SEQ ID NO: 6838 - protein, 1359 aa, Artificial Sequence
  SARS-CoV-2/pangolin/Guangxi/P5E/2017__EPI_ISL_410541 spike protein (1-1205)(K980P_V981P_T881W_A1014W) WhcAg construct
MFVFLFVLPLVSSQCVNLTTRTGIPPGYTNSSTRGVYYPDKVFRSSILHLTQDLFLPFFSNVTWFNTITYQGGSKKFDNPVLPFNDGVYFASTEKSNIIRGWIFGTTLDARTQSLLIVNNATNVVIKVCEFQFCTDPFLGVYYHNNNKTWVENEFRVYSSANNCTFEYISQPFLMDLEGKQGNFKNLREFVFKNVDGYFKIYSKHTPIDLVRDLPRGFAALEPLVDLPIGINITRFQTLLALHRSYLTPGKLESGWTTGAAAYYVGYLQQRTFLLSYNQNGTITDAVDCSLDPLSETKCTLKSLTVEKGIYQTSNFRVQPTISIVRFPNITNLCPFGEVFNASKFASVYAWNRKRISNCVADYSVLYNSTSFSTFKCYGVSPTKLNDLCFTNVYADSFVVKGDEVRQIAPGQTGVIADYNYKLPDDFTGCVIAWNSVKQDALTGDNYGYLYRLFRKSKLKPFERDISTEIYQAGSTPCNGQVGLNCYYPLERYGFHPTTGVNYQPFRVVVLSFELLNGPATVCGPKLSTTLVKDKCVNFNFNGLTGTGVLTTSKKQFLPFQQFGRDISDTTDAVRDPQTLEILDITPCSFGGVSVITPGTNTSNQVAVLYQDVNCTEVPMAIHAEQLTPAWRVYSAGANVFQTRAGCLVGAEHVNNSYECDIPVGAGICASYHSMSSFRSVNQRSIIAYTMSLGAENSVAYSNNSIAIPTNFTISVTTEILPVSMTKTSVDCTMYICGDSIECSNLLLQYGSFCTQLNRALTGIAVEQDKNTQEVFAQVKQIYKTPPIKDFGGFNFSQILPDPSKPSKRSFIEDLLFNKVTLADAGFIKQYGDCLGDIAARDLICAQKFNGLTVLPPLLTDEMIAQYTSALLAGTITSGWWFGAGAALQIPFAMQMAYRFNGIGVTQNVLYENQKLIANQFNSAIGKIQDSLSSTASALGKLQDVVNQNAQALNTLVKQLSSNFGAISSVLNDILSRLDPPEAEVQIDRLITGRLQSLQTYVTQQLIRAAEIRWSANLAATKMSECVLGQSKRVDFCGKGYHLMSFPQSAPHGVVFLHVTYVPAQEKNFTTAPAICHEGKAHFPREGVFVSNGTHWFITQRNFYEPQIITTDNTFVSGSCDVVIGIVNNTVYDPLQPELDSFKEELDKYFKNHTSPDVDLGDISGINASVVNIQKEIDRLNEVAKNLNESLIDLQELGKYEQYIKGGGGSDIDPYKEFGSSYQLLNFLPLDFFPDLNALVDTATALYEEELTGREHCSPHHTAIRQALVCWDELTKLIAWMSSNITSEQVRTIIVNHVNDTWGLKVRQSLWFHLSCLTFGQHTVQEFLVSFGVWIRTPAPYRPPNAPILSTLPEHTVIC

SEQ ID NO: 6839 - protein, 1357 aa, Artificial Sequence
  SARS-CoV-2/pangolin/Guangxi/P1E/2017__EPI_ISL_410539 spike protein (1-1203)(K978P_V979P_T879W_A1012W) WhcAg construct
MFVFLFVLPLVSSQCVNLTTRTGIQPGYTNSSTRGVYYPDKVFRSSILHLTQDLFLPFFSNVTWFNTINYQGGFKKFDNPVLPFNDGVYFASTEKSNIIRGWIFGTTLDARTQSLLIVNNATNVVIKVCEFQFCTDPFLGVYYHNNNKTWVENEFRVYSSANNCTFEYISQPFLMDLEGKQGNFKNLREFVFKNVDGYFKIYSKHTPIDLVRDLPRGFAALEPLVDLPIGINITRFQTLLALHRSYLTPGKLESGWTTGAAAYYVGYLQQRTFLLSYNQNGTITDAVDCSLDPLSETKCTLKSLTVEKGIYQTSNFRVQPTISIVRFPNITNLCPFGEVFNASKFASVYAWNRKRISNCVADYSVLYNSTSFSTFKCYGVSPTKLNDLCFTNVYADSFVVKGDEVRQIAPGQTGVIADYNYKLPDDFTGCVIAWNSVKQDALTGGNYLYRLFRKSKLKPFERDISTEIYQAGSTPCNGQVGLNCYYPLERYGFHPTTGVNYQPFRVVVLSFELLNGPATVCGPKLSTTLVKDKCVNFNFNGLTGTGVLTTSKKQFLPFQQFGRDISDTTDAVRDPQTLEILDITPCSFGGVSVITPGTNTSNQVAVLYQDVNCTEVPMAIHAEQLTPAWRVYSAGANVFQTRAGCLVGAEHVNNSYECDIPVGAGICASYHSMSSLRSVNQRSIIAYTMSLGAENSVAYSNNSIAIPTNFTISVTTEILPVSMTKTSVDCTMYICGDSIECSNLLLQYGSFCTQLNRALTGIAVEQDKNTQEVFAQVKQIYKTPPIKDFGGFNFSQILPDPSKPSKRSFIEDLLFNKVTLADAGFIKQYGDCLGDIAARDLICAQKFNGLTVLPPLLTDEMIAQYTSALLAGTITSGWWFGAGAALQIPFAMQMAYRFNGIGVTQNVLYENQKLIANQFNSAIGKIQDSLSSTASALGKLQDVVNQNAQALNTLVKQLSSNFGAISSVLNDILSRLDPPEAEVQIDRLITGRLQSLQTYVTQQLIRAAEIRWSANLAATKMSECVLGQSKRVDFCGKGYHLMSFPQSAPHGVVFLHVTYVPAQEKNFTTAPAICHEGKAHFPREGVFVSNGTHWFITQRNFYEPQIITTDNTFVSGSCDVVIGIVNNTVYDPLQPELDSFKEELDKYFKNHTSPDVDLGDISGINASVVNIQKEIDRLNEVAKNLNESLIDLQELGKYEQYIKGGGGSDIDPYKEFGSSYQLLNFLPLDFFPDLNALVDTATALYEEELTGREHCSPHHTAIRQALVCWDELTKLIAWMSSNITSEQVRTIIVNHVNDTWGLKVRQSLWFHLSCLTFGQHTVQEFLVSFGVWIRTPAPYRPPNAPILSTLPEHTVIC

SEQ ID NO: 6840 - protein, 1365 aa, Artificial Sequence
  SARS-CoV-2/Wuhan/WIV05/2019__EPI_ISL_402128 spike protein (1-1211)(K986P_V987P_P1069F) WhcAg construct
MFVFLVLLPLVSSQCVNLTTRTQLPPAYTNSFTRGVYYPDKVFRSSVLHSTQDLFLPFFSNVTWFHAIHVSGTNGTKRFDNPVLPFNDGVYFASTEKSNIIRGWIFGTTLDSKTQSLLIVNNATNVVIKVCEFQFCNDPFLGVYYHKNNKSWMESEFRVYSSANNCTFEYVSQPFLMDLEGKQGNFKNLREFVFKNIDGYFKIYSKHTPINLVRDLPQGFSALEPLVDLPIGINITRFQTLLALHRSYLTPGDSSSGWTAGAAAYYVGYLQPRTFLLKYNENGTITDAVDCALDPLSETKCTLKSFTVEKGIYQTSNFRVQPTESIVRFPNITNLCPFGEVFNATRFASVYAWNRKRISNCVADYSVLYNSASFSTFKCYGVSPTKLNDLCFTNVYADSFVIRGDEVRQIAPGQTGKIADYNYKLPDDFTGCVIAWNSNNLDSKVGGNYNYLYRLFRKSNLKPFERDISTEIYQAGSTPCNGVEGFNCYFPLQSYGFQPTNGVGYQPYRVVVLSFELLHAPATVCGPKKSTNLVKNKCVNFNFNGLTGTGVLTESNKKFLPFQQFGRDIADTTDAVRDPQTLEILDITPCSFGGVSVITPGTNTSNQVAVLYQDVNCTEVPVAIHADQLTPTWRVYSTGSNVFQTRAGCLIGAEHVNNSYECDIPIGAGICASYQTQTNSPRRARSVASQSIIAYTMSLGAENSVAYSNNSIAIPTNFTISVTTEILPVSMTKTSVDCTMYICGDSTECSNLLLQYGSFCTQLNRALTGIAVEQDKNTQEVFAQVKQIYKTPPIKDFGGFNFSQILPDPSKPSKRSFIEDLLFNKVTLADAGFIKQYGDCLGDIAARDLICAQKFNGLTVLPPLLTDEMIAQYTSALLAGTITSGWTFGAGAALQIPFAMQMAYRFNGIGVTQNVLYENQKLIANQFNSAIGKIQDSLSSTASALGKLQDVVNQNAQALNTLVKQLSSNFGAISSVLNDILSRLDPPEAEVQIDRLITGRLQSLQTYVTQQLIRAAEIRASANLAATKMSECVLGQSKRVDFCGKGYHLMSFPQSAPHGVVFLHVTYVFAQEKNFTTAPAICHDGKAHFPREGVFVSNGTHWFVTQRNFYEPQIITTDNTFVSGNCDVVIGIVNNTVYDPLQPELDSFKEELDKYFKNHTSPDVDLGDISGINASVVNIQKEIDRLNEVAKNLNESLIDLQELGKYEQYIKGGGGSDIDPYKEFGSSYQLLNFLPLDFFPDLNALVDTATALYEEELTGREHCSPHHTAIRQALVCWDELTKLIAWMSSNITSEQVRTIIVNHVNDTWGLKVRQSLWFHLSCLTFGQHTVQEFLVSFGVWIRTPAPYRPPNAPILSTLPEHTVIC

SEQ ID NO: 6841 - protein, 1361 aa, Artificial Sequence
  SARS-CoV-2/bat/Yunnan/RaTG13/2013__EPI_ISL_402131 spike protein (1-1207)(K982P_V983P_P1065F) WhcAg construct
MFVFLVLLPLVSSQCVNLTTRTQLPPAYTNSSTRGVYYPDKVFRSSVLHLTQDLFLPFFSNVTWFHAIHVSGTNGIKRFDNPVLPFNDGVYFASTEKSNIIRGWIFGTTLDSKTQSLLIVNNATNVVIKVCEFQFCNDPFLGVYYHKNNKSWMESEFRVYSSANNCTFEYVSQPFLMDLEGKQGNFKNLREFVFKNIDGYFKIYSKHTPINLVRDLPPGFSALEPLVDLPIGINITRFQTLLALHRSYLTPGDSSSGWTAGAAAYYVGYLQPRTFLLKYNENGTITDAVDCALDPLSETKCTLKSFTVEKGIYQTSNFRVQPTDSIVRFPNITNLCPFGEVFNATTFASVYAWNRKRISNCVADYSVLYNSTSFSTFKCYGVSPTKLNDLCFTNVYADSFVITGDEVRQIAPGQTGKIADYNYKLPDDFTGCVIAWNSKHIDAKEGGNFNYLYRLFRKANLKPFERDISTEIYQAGSKPCNGQTGLNCYYPLYRYGFYPTDGVGHQPYRVVVLSFELLNAPATVCGPKKSTNLVKNKCVNFNFNGLTGTGVLTESNKKFLPFQQFGRDIADTTDAVRDPQTLEILDITPCSFGGVSVITPGTNASNQVAVLYQDVNCTEVPVAIHADQLTPTWRVYSTGSNVFQTRAGCLIGAEHVNNSYECDIPIGAGICASYQTQTNSRSVASQSIIAYTMSLGAENSVAYSNNSIAIPTNFTISVTTEILPVSMTKTSVDCTMYICGDSTECSNLLLQYGSFCTQLNRALTGIAVEQDKNTQEVFAQVKQIYKTPPIKDFGGFNFSQILPDPSKPSKRSFIEDLLFNKVTLADAGFIKQYGDCLGDIAARDLICAQKFNGLTVLPPLLTDEMIAQYTSALLAGTITSGWTFGAGAALQIPFAMQMAYRFNGIGVTQNVLYENQKLIANQFNSAIGKIQDSLSSTASALGKLQDVVNQNAQALNTLVKQLSSNFGAISSVLNDILSRLDPPEAEVQIDRLITGRLQSLQTYVTQQLIRAAEIRASANLAATKMSECVLGQSKRVDFCGKGYHLMSFPQSAPHGVVFLHVTYVFAQEKNFTTAPAICHDGKAHFPREGVFVSNGTHWFVTQRNFYEPQIITTDNTFVSGSCDVVIGIVNNTVYDPLQPELDSFKEELDKYFKNHTSPDVDLGDISGINASVVNIQKEIDRLNEVAKNLNESLIDLQELGKYEQYIKGGGGSDIDPYKEFGSSYQLLNFLPLDFFPDLNALVDTATALYEEELTGREHCSPHHTAIRQALVCWDELTKLIAWMSSNITSEQVRTIIVNHVNDTWGLKVRQSLWFHLSCLTFGQHTVQEFLVSFGVWIRTPAPYRPPNAPILSTLPEHTVIC

SEQ ID NO: 6842 - protein, 1365 aa, Artificial Sequence
  SARS-CoV-2/Wuhan/HBCDC-HB-01/2019__EPI_ISL_402132 spike protein (1-1211)(K986P_V987P_P1069F) WhcAg construct
MFVFLVLLPLVSSQCVNLTTRTQLPPAYTNSITRGVYYPDKVFRSSVLHSTQDLFLPFFSNVTWFHAIHVSGTNGTKRFDNPVLPFNDGVYFASTEKSNIIRGWIFGTTLDSKTQSLLIVNNATNVVIKVCEFQFCNDPFLGVYYHKNNKSWMESEFRVYSSANNCTFEYVSQPFLMDLEGKQGNFKNLREFVFKNIDGYFKIYSKHTPINLVRDLPQGFSALEPLVDLPIGINITRFQTLLALHRSYLTPGDSSSGWTAGAAAYYVGYLQPRTFLLKYNENGTITDAVDCALDPLSETKCTLKSFTVEKGIYQTSNFRVQPTESIVRFPNITNLCPFGEVFNATRFASVYAWNRKRISNCVADYSVLYNSASFSTFKCYGVSPTKLNDLCFTNVYADSFVIRGDEVRQIAPGQTGKIADYNYKLPDDFTGCVIAWNSNNLDSKVGGNYNYLYRLFRKSNLKPFERDISTEIYQAGSTPCNGVEGFNCYFPLQSYGFQPTNGVGYQPYRVVVLSFELLHAPATVCGPKKSTNLVKNKCVNFNFNGLTGTGVLTESNKKFLPFQQFGRDIADTTDAVRDPQTLEILDITPCSFGGVSVITPGTNTSNQVAVLYQDVNCTEVPVAIHADQLTPTWRVYSTGSNVFQTRAGCLIGAEHVNNSYECDIPIGAGICASYQTQTNSPRRARSVASQSIIAYTMSLGAENSVAYSNNSIAIPTNFTISVTTEILPVSMTKTSVDCTMYICGDSTECSNLLLQYGSFCTQLNRALTGIAVEQDKNTQEVFAQVKQIYKTPPIKDFGGFNFSQILPDPSKPSKRSFIEDLLFNKVTLADAGFIKQYGDCLGDIAARDLICAQKFNGLTVLPPLLTDEMIAQYTSALLAGTITSGWTFGAGAALQIPFAMQMAYRFNGIGVTQNVLYENQKLIANQFNSAIGKIQDSLSSTASALGKLQDVVNQNAQALNTLVKQLSSNFGAISSVLNDILSRLDPPEAEVQIDRLITGRLQSLQTYVTQQLIRAAEIRASANLAATKMSECVLGQSKRVDFCGKGYHLMSFPQSAPHGVVFLHVTYVFAQEKNFTTAPAICHDGKAHFPREGVFVSNGTHWFVTQRNFYEPQIITTDNTFVSGNCDVVIGIVNNTVYDPLQPELDSFKEELDKYFKNHTSPDVDLGDISGINASVVNIQKEIDRLNEVAKNLNESLIDLQELGKYEQYIKGGGGSDIDPYKEFGSSYQLLNFLPLDFFPDLNALVDTATALYEEELTGREHCSPHHTAIRQALVCWDELTKLIAWMSSNITSEQVRTIIVNHVNDTWGLKVRQSLWFHLSCLTFGQHTVQEFLVSFGVWIRTPAPYRPPNAPILSTLPEHTVIC

SEQ ID NO: 6843 - protein, 1365 aa, Artificial Sequence
  SARS-CoV-2/Guangdong/20SF028/2020__EPI_ISL_403936 spike protein (1-1211)(K986P_V987P_P1069F) WhcAg construct
MFVFLVLLPLVSSQCVNLTTRTQLPPAYTNSFTRGVYYPDKVFRSSVLYSTQDLFLPFFSNVTWFHAIHVSGTNGTKRFDNPVLPFNDGVYFASTEKSNIIRGWIFGTTLDSKTQSLLIVNNATNVVIKVCEFQFCNDPFLGVYYHKNNKSWMESEFRVYSSANNCTFEYVSQPFLMDLEGKQGNFKNLREFVFKNIDGYFKIYSKHTPINLVRDLPQGFSALEPLVDLPIGINITRFQTLLALHRSYLTPGDSSSGWTAGAAAYYVGYLQPRTFLLKYNENGTITDAVDCALDPLSETKCTLKSFTVEKGIYQTSNFRVQPTESIVRFPNITNLCPFGEVFNATRFASVYAWNRKRISNCVADYSVLYNSASFSTFKCYGVSPTKLNDLCFTNVYADSFVIRGDEVRQIAPGQTGKIADYNYKLPDDFTGCVIAWNSNNLDSKVGGNYNYLYRLFRKSNLKPFERDISTEIYQAGSTPCNGVEGFNCYFPLQSYGFQPTNGVGYQPYRVVVLSFELLHAPATVCGPKKSTNLVKNKCVNFNFNGLTGTGVLTESNKKFLPFQQFGRDIADTTDAVRDPQTLEILDITPCSFGGVSVITPGTNTSNQVAVLYQDVNCTEVPVAIHADQLTPTWRVYSTGSNVFQTRAGCLIGAEHVNNSYECDIPIGAGICASYQTQTNSPRRARSVASQSIIAYTMSLGAENSVAYSNNSIAIPTNFTISVTTEILPVSMTKTSVDCTMYICGDSTECSNLLLQYGSFCTQLNRALTGIAVEQDKNTQEVFAQVKQIYKTPPIKDFGGFNFSQILPDPSKPSKRSFIEDLLFNKVTLADAGFIKQYGDCLGDIAARDLICAQKFNGLTVLPPLLTDEMIAQYTSALLAGTITSGWTFGAGAALQIPFAMQMAYRFNGIGVTQNVLYENQKLIANQFNSAIGKIQDSLSSTASALGKLQDVVNQNAQALNTLVKQLSSNFGAISSVLNDILSRLDPPEAEVQIDRLITGRLQSLQTYVTQQLIRAAEIRASANLAATKMSECVLGQSKRVDFCGKGYHLMSFPQSAPHGVVFLHVTYVFAQEKNFTTAPAICHDGKAHFPREGVFVSNGTHWFVTQRNFYEPQIITTDNTFVSGNCDVVIGIVNNTVYDPLQPELDSFKEELDKYFKNHTSPDVDLGDISGINASVVNIQKEIDRLNEVAKNLNESLIDLQELGKYEQYIKGGGGSDIDPYKEFGSSYQLLNFLPLDFFPDLNALVDTATALYEEELTGREHCSPHHTAIRQALVCWDELTKLIAWMSSNITSEQVRTIIVNHVNDTWGLKVRQSLWFHLSCLTFGQHTVQEFLVSFGVWIRTPAPYRPPNAPILSTLPEHTVIC

SEQ ID NO: 6844 - protein, 1365 aa, Artificial Sequence
  SARS-CoV-2/Shenzhen/SZTH-001/2020__EPI_ISL_406592 spike protein (1-1211)(K986P_V987P_P1069F) WhcAg construct
MFVFLVLLPLVSSQCVNLTTRTQLPPAYTNSFTRGVYYPDKVFRSSVLHSTQDLFLPFFSNVTWFHAIHVSGTNGTKRFDNPVLPFNDGVYFASTEKSNIIRGWIFGTTLDSKTQSLLIVNNATNVVIKVCEFQFCNDPFLGVYYHKNNKSWMESEFRVYSSANNCTFEYVSQPFLMDLEGKQGNFKNLREFVFKNIDGYFKIYSKHTPINLVRDLPQGFSALEPLVDLPIGINITRFQTLLALHRSYLTPGDSSSGWTAGAAAYYVGYLQPRTFLLKYNENGTITDAVDCALDPLSETKCTLKSFTVEKGIYQTSNFRVQPTESIVRFPNITNLCPFGEVFNATRFASVYAWNRKRISNCVADYSVLYNSASFSTFKCYGVSPTKLNDLCFTNVYADSFVIRGDEVRQIAPGQTGKIADYNYKLPDDFTGCVIAWNSNNLDSKVGGNYNYLYRLFRKSNLKPFERDISTEIYQAGSTPCNGVEGFNCYFPLQSYGFQPTNGVGYQPYRVVVLSFELLHAPATVCGPKKSTNLVKNKCVNFNFNGLTGTGVLTESNKKFLPFQQFGRDIADTTDAVRDPQTLEILDITPCSFGGVSVITPGTNTSNQVAVLYQDVNCTEVPVAIHADQLTPTWRVYSTGSNVFQTRAGCLIGAEHVNNSYECDIPIGAGICASYQTQTNSPRRARSVASQSIIAYTMSLGAENSVAYSNNSIAIPTNFTISVTTEILPVSMTKTSVDCTMYICGDSTECSNLLLQYGSFCTQLNRALTGIAVEQDKNTQEVFAQVKQIYKTPPIKDFGGFNFSQILPDPSKPSKRSFIEDLLFNKVTLADAGFIKQYGDCLGDIAARDLICAQKFNGLTVLPPLLTDEMIAQYTSALLAGTITSGWTFGAGAALQIPFAMQMAYRFNGIGVTQNVLYENQKLIANQFNSAIGKIQDSLSSTASALGKLQDVVNQNAQALNTLVKQLSSNFGAISSVLNDILSRLDPPEAEVQIDRLITGRLQSLQTYVTQQLIRAAEIRASANLAATKMSECVLGQSKRVDFCGKGYHLMSFPQSAPHGVVFLHVTYVFAQEKNFTTAPAICHDGKAHFPREGVFVSNGTHWFVTQRNFYEPQIITTDNTFVSGNCDVLIGIVNNTVYDPLQPELDSFKEELDKYFKNHTSPDVDLGDISGINASVVNIQKEIDRLNEVAKNLNESLIDLQELGKYEQYIKGGGGSDIDPYKEFGSSYQLLNFLPLDFFPDLNALVDTATALYEEELTGREHCSPHHTAIRQALVCWDELTKLIAWMSSNITSEQVRTIIVNHVNDTWGLKVRQSLWFHLSCLTFGQHTVQEFLVSFGVWIRTPAPYRPPNAPILSTLPEHTVIC

SEQ ID NO: 6845 - protein, 1365 aa, Artificial Sequence
  SARS-CoV-2/Shenzhen/SZTH-004/2020__EPI_ISL_406595 spike protein (1-1211)(K986P_V987P_P1069F) WhcAg construct
MFVFLVLLPLVSSQCVNLTTRTQLPPAYTNSFTRGVYYPDKVFRSSVLHSTQDLFLPFFSNVTWFHAIHVSGTNGTKRFDNPVLPFNDGVYFASTEKSNIIRGWIFGTTLDSKTQSLLIVNNATNVVIKVCEFQFCNDPFLGVYYHKNNKSWMESEFRVYSSANNCTFEYVSQPFLMDLEGKQGNFKNLREFVFKNIDGYFKIYSKHTPINLVRDLPQGFSALEPLVDLPIGINITRFQTLLALHRSYLTPGDSSSGWTAGAAAYYVGYLQPRTFLLKYNENGTITDAVDCALDPLSETKCTLKSFTVEKGIYQTSNFRVQPTESIVRFPNITNLCPFGEVFNATRFASVYAWDRKRISNCVAYYSVLYNSASFSTFKCYGVSPTKLNDLCFTNVYADSFVIRGDEVRQIAPGQTGKIADYNYKLPDDFTGCVIAWNSNNLDSKVGGNYNYLYRLFRKSNLKPFERDISTEIYQAGSTPCNGVEGFNCYFPLQSYGFQPTNGVGYQPYRVVVLSFELLHAPATVCGPKKSTNLVKNKCVNFNFNGLTGTGVLTESNKKFLPFQQFGRDIADTTDAVRDPQTLEILDITPCSFGGVSVITPGTNTSNQVAVLYQDVNCTEVPVAIHADQLTPTWRVYSTGSNVFQTRAGCLIGAEHVNNSYECDIPIGAGICASYQTQTNSPRRARSVASQSIIAYTMSLGAENSVAYSNNSIAIPTNFTISVTTEILPVSMTKTSVDCTMYICGDSTECSNLLLQYGSFCTQLNRALTGIAVEQDKNTQEVFAQVKQIYKTPPIKDFGGFNFSQILPDPSKPSKRSFIEDLLFNKVTLADAGFIKQYGDCLGDIAARDLICAQKFNGLTVLPPLLTDEMIAQYTSALLAGTITSGWTFGAGAALQIPFAMQMAYRFNGIGVTQNVLYENQKLIANQFNSAIGKIQDSLSSTASALGKLQDVVNQNAQALNTLVKQLSSNFGAISSVLNDILSRLDPPEAEVQIDRLITGRLQSLQTYVTQQLIRAAEIRASANLAATKMSECVLGQSKRVDFCGKGYHLMSFPQSAPHGVVFLHVTYVFAQEKNFTTAPAICHDGKAHFPREGVFVSNGTHWFVTQRNFYEPQIITTDNTFVSGNCDVVIGIVNNTVYDPLQPELDSFKEELDKYFKNHTSPDVDLGDISGINASVVNIQKEIDRLNEVAKNLNESLIDLQELGKYEQYIKGGGGSDIDPYKEFGSSYQLLNFLPLDFFPDLNALVDTATALYEEELTGREHCSPHHTAIRQALVCWDELTKLIAWMSSNITSEQVRTIIVNHVNDTWGLKVRQSLWFHLSCLTFGQHTVQEFLVSFGVWIRTPAPYRPPNAPILSTLPEHTVIC

SEQ ID NO: 6846 - protein, 1365 aa, Artificial Sequence
  SARS-CoV-2/France/IDF0372/2020__EPI_ISL_406596 spike protein (1-1211)(K986P_V987P_P1069F) WhcAg construct
MFVFLVLLPLVSSQCVNLTTRTQLPPAYTNSFTRGVYYPDKVFRSSVLHSTQDLFLPFFSNVTWFHAIHVSGTNGTKRFDNPVLPFNDGVYFASTEKSNIIRGWIFGTTLDSKTQSLLIVNNATNVVIKVCEFQFCNDPFLGVYYHKNNKSWMESEFRVYSSANNCTFEYVSQPFLMDLEGKQGNFKNLREFVFKNIDGYFKIYSKHTPINLVRDLPQGFSALEPLVDLPIGINITRFQTLLALHRSYLTPGDSSSGWTAGAAAYYVGYLQPRTFLLKYNENGTITDAVDCALDPLSETKCTLKSFTVEKGIYQTSNFRVQPTESIVRFPNITNLCPFGEVFNATRFASVYAWNRKRISNCVADYSFLYNSASFSTFKCYGVSPTKLNDLCFTNVYADSFVIRGDEVRQIAPGQTGKIADYNYKLPDDFTGCVIAWNSNNLDSKVGGNYNYLYRLFRKSNLKPFERDISTEIYQAGSTPCNGVEGFNCYFPLQSYGFQPTNGVGYQPYRVVVLSFELLHAPATVCGPKKSTNLVKNKCVNFNFNGLTGTGVLTESNKKFLPFQQFGRDIADTTDAVRDPQTLEILDITPCSFGGVSVITPGTNTSNQVAVLYQDVNCTEVPVAIHADQLTPTWRVYSTGSNVFQTRAGCLIGAEHVNNSYECDIPIGAGICASYQTQTNSPRRARSVASQSIIAYTMSLGAENSVAYSNNSIAIPTNFTISVTTEILPVSMTKTSVDCTMYICGDSTECSNLLLQYGSFCTQLNRALTGIAVEQDKNTQEVFAQVKQIYKTPPIKDFGGFNFSQILPDPSKPSKRSFIEDLLFNKVTLADAGFIKQYGDCLGDIAARDLICAQKFNGLTVLPPLLTDEMIAQYTSALLAGTITSGWTFGAGAALQIPFAMQMAYRFNGIGVTQNVLYENQKLIANQFNSAIGKIQDSLSSTASALGKLQDVVNQNAQALNTLVKQLSSNFGAISSVLNDILSRLDPPEAEVQIDRLITGRLQSLQTYVTQQLIRAAEIRASANLAATKMSECVLGQSKRVDFCGKGYHLMSFPQSAPHGVVFLHVTYVFAQEKNFTTAPAICHDGKAHFPREGVFVSNGTHWFVTQRNFYEPQIITTDNTFVSGNCDVVIGIVNNTVYDPLQPELDSFKEELDKYFKNHTSPDVDLGDISGINASVVNIQKEIDRLNEVAKNLNESLIDLQELGKYEQYIKGGGGSDIDPYKEFGSSYQLLNFLPLDFFPDLNALVDTATALYEEELTGREHCSPHHTAIRQALVCWDELTKLIAWMSSNITSEQVRTIIVNHVNDTWGLKVRQSLWFHLSCLTFGQHTVQEFLVSFGVWIRTPAPYRPPNAPILSTLPEHTVIC

SEQ ID NO: 6847 - protein, 1365 aa, Artificial Sequence
  SARS-CoV-2/Australia/VIC01/2020__EPI_ISL_406844 spike protein (1-1211)(K986P_V987P_P1069F) WhcAg construct
MFVFLVLLPLVSSQCVNLTTRTQLPPAYTNSFTRGVYYPDKVFRSSVLHSTQDLFLPFFSNVTWFHAIHVSGTNGTKRFDNPVLPFNDGVYFASTEKSNIIRGWIFGTTLDSKTQSLLIVNNATNVVIKVCEFQFCNDPFLGVYYHKNNKSWMESEFRVYSSANNCTFEYVSQPFLMDLEGKQGNFKNLREFVFKNIDGYFKIYSKHTPINLVRDLPQGFSALEPLVDLPIGINITRFQTLLALHRRYLTPGDSSSGWTAGAAAYYVGYLQPRTFLLKYNENGTITDAVDCALDPLSETKCTLKSFTVEKGIYQTSNFRVQPTESIVRFPNITNLCPFGEVFNATRFASVYAWNRKRISNCVADYSVLYNSASFSTFKCYGVSPTKLNDLCFTNVYADSFVIRGDEVRQIAPGQTGKIADYNYKLPDDFTGCVIAWNSNNLDSKVGGNYNYLYRLFRKSNLKPFERDISTEIYQAGSTPCNGVEGFNCYFPLQSYGFQPTNGVGYQPYRVVVLSFELLHAPATVCGPKKSTNLVKNKCVNFNFNGLTGTGVLTESNKKFLPFQQFGRDIADTTDAVRDPQTLEILDITPCSFGGVSVITPGTNTSNQVAVLYQDVNCTEVPVAIHADQLTPTWRVYSTGSNVFQTRAGCLIGAEHVNNSYECDIPIGAGICASYQTQTNSPRRARSVASQSIIAYTMSLGAENSVAYSNNSIAIPTNFTISVTTEILPVSMTKTSVDCTMYICGDSTECSNLLLQYGSFCTQLNRALTGIAVEQDKNTQEVFAQVKQIYKTPPIKDFGGFNFSQILPDPSKPSKRSFIEDLLFNKVTLADAGFIKQYGDCLGDIAARDLICAQKFNGLTVLPPLLTDEMIAQYTSALLAGTITSGWTFGAGAALQIPFAMQMAYRFNGIGVTQNVLYENQKLIANQFNSAIGKIQDSLSSTASALGKLQDVVNQNAQALNTLVKQLSSNFGAISSVLNDILSRLDPPEAEVQIDRLITGRLQSLQTYVTQQLIRAAEIRASANLAATKMSECVLGQSKRVDFCGKGYHLMSFPQSAPHGVVFLHVTYVFAQEKNFTTAPAICHDGKAHFPREGVFVSNGTHWFVTQRNFYEPQIITTDNTFVSGNCDVVIGIVNNTVYDPLQPELDSFKEELDKYFKNHTSPDVDLGDISGINASVVNIQKEIDRLNEVAKNLNESLIDLQELGKYEQYIKGGGGSDIDPYKEFGSSYQLLNFLPLDFFPDLNALVDTATALYEEELTGREHCSPHHTAIRQALVCWDELTKLIAWMSSNITSEQVRTIIVNHVNDTWGLKVRQSLWFHLSCLTFGQHTVQEFLVSFGVWIRTPAPYRPPNAPILSTLPEHTVIC

SEQ ID NO: 6848 - protein, 1365 aa, Artificial Sequence
  SARS-CoV-2/Germany/BavPat1/2020__EPI_ISL_406862 spike protein (1-1211)(K986P_V987P_P1069F) WhcAg construct
MFVFLVLLPLVSSQCVNLTTRTQLPPAYTNSFTRGVYYPDKVFRSSVLHSTQDLFLPFFSNVTWFHAIHVSGTNGTKRFDNPVLPFNDGVYFASTEKSNIIRGWIFGTTLDSKTQSLLIVNNATNVVIKVCEFQFCNDPFLGVYYHKNNKSWMESEFRVYSSANNCTFEYVSQPFLMDLEGKQGNFKNLREFVFKNIDGYFKIYSKHTPINLVRDLPQGFSALEPLVDLPIGINITRFQTLLALHRSYLTPGDSSSGWTAGAAAYYVGYLQPRTFLLKYNENGTITDAVDCALDPLSETKCTLKSFTVEKGIYQTSNFRVQPTESIVRFPNITNLCPFGEVFNATRFASVYAWNRKRISNCVADYSVLYNSASFSTFKCYGVSPTKLNDLCFTNVYADSFVIRGDEVRQIAPGQTGKIADYNYKLPDDFTGCVIAWNSNNLDSKVGGNYNYLYRLFRKSNLKPFERDISTEIYQAGSTPCNGVEGFNCYFPLQSYGFQPTNGVGYQPYRVVVLSFELLHAPATVCGPKKSTNLVKNKCVNFNFNGLTGTGVLTESNKKFLPFQQFGRDIADTTDAVRDPQTLEILDITPCSFGGVSVITPGTNTSNQVAVLYQGVNCTEVPVAIHADQLTPTWRVYSTGSNVFQTRAGCLIGAEHVNNSYECDIPIGAGICASYQTQTNSPRRARSVASQSIIAYTMSLGAENSVAYSNNSIAIPTNFTISVTTEILPVSMTKTSVDCTMYICGDSTECSNLLLQYGSFCTQLNRALTGIAVEQDKNTQEVFAQVKQIYKTPPIKDFGGFNFSQILPDPSKPSKRSFIEDLLFNKVTLADAGFIKQYGDCLGDIAARDLICAQKFNGLTVLPPLLTDEMIAQYTSALLAGTITSGWTFGAGAALQIPFAMQMAYRFNGIGVTQNVLYENQKLIANQFNSAIGKIQDSLSSTASALGKLQDVVNQNAQALNTLVKQLSSNFGAISSVLNDILSRLDPPEAEVQIDRLITGRLQSLQTYVTQQLIRAAEIRASANLAATKMSECVLGQSKRVDFCGKGYHLMSFPQSAPHGVVFLHVTYVFAQEKNFTTAPAICHDGKAHFPREGVFVSNGTHWFVTQRNFYEPQIITTDNTFVSGNCDVVIGIVNNTVYDPLQPELDSFKEELDKYFKNHTSPDVDLGDISGINASVVNIQKEIDRLNEVAKNLNESLIDLQELGKYEQYIKGGGGSDIDPYKEFGSSYQLLNFLPLDFFPDLNALVDTATALYEEELTGREHCSPHHTAIRQALVCWDELTKLIAWMSSNITSEQVRTIIVNHVNDTWGLKVRQSLWFHLSCLTFGQHTVQEFLVSFGVWIRTPAPYRPPNAPILSTLPEHTVIC

SEQ ID NO: 6849 - protein, 1365 aa, Artificial Sequence
  SARS-CoV-2/Wuhan/HBCDC-HB-02/2020__EPI_ISL_412978 spike protein (1-1211)(K986P_V987P_P1069F) WhcAg construct
MFVFLVLLPLVSSQCVNLTTRTQLPPAYTNSFTRGVYYPDKVFRSSVLHSTQDLFLPFFSNVTWFHAIHVSGTNGTKRFDNPVLPFNDGVYFASTEKSNIIRGWIFGTTLDSKTQSLLIVNNATNVVIKVCEFQFCNDPFLGVYYHKNNKSWMESEFRVYSSANNCTFEYVSQPFLMDLEGKQGNFKNLREFVFKNIDGYFKIYSKHTPINLVRDLPQGFSALEPLVDLPIGINITRFQTLLALHRSYLTPGDSSSGWTAGAAAYYVGYLQPRTFLLKYNENGTITDAVDCALDPLSETKCTLKSFTVEKGIYQTSNFRVQPTESIVRFPNITNLCPFGEVFNATRFASVYAWNRKRISNCVADYSVLYNSASFSTFKCYGVSPTKLNDLCFTNVYADSFVIRGDEVRQIAPGQTGKIADYNYKLPDDFTGCVIAWNSNNLDSKVGGNYNYLYRLFRKSNLKPFERDISTEIYQAGSTPCNGVEGFNCYFPLQSYGFQPTNGVGYQPYRVVVLSFELLHAPATVCGPKKSTNLVKNKCVNFNFNGLTGTGVLTESNKKFLPFQQFGRDIADTTDAVRDPQTLEILDITPCSFGGVSVITPGTNTSNQVAVLYQDVNCTEVPVAIHADQLTPTWRVYSTGSNVFQTRAGCLIGAEHVNNSYECDIPIGAGICASYQTQTNSPRRARSVASQSIIAYTMSLGAENSVAYSNNSIAIPTNFTISVTTEILPVSMTKTSVDCTMYICGDSTECSNFLLQYGSFCTQLNRALTGIAVEQDKNTQEVFAQVKQIYKTPPIKDFGGFNFSQILPDPSKPSKRSFIEDLLFNKVTLADAGFIKQYGDCLGDIAARDLICAQKFNGLTVLPPLLTDEMIAQYTSALLAGTITSGWTFGAGAALQIPFAMQMAYRFNGIGVTQNVLYENQKLIANQFNSAIGKIQDSLSSTASALGKLQDVVNQNAQALNTLVKQLSSNFGAISSVLNDILSRLDPPEAEVQIDRLITGRLQSLQTYVTQQLIRAAEIRASANLAATKMSECVLGQSKRVDFCGKGYHLMSFPQSAPHGVVFLHVTYVFAQEKNFTTAPAICHDGKAHFPREGVFVSNGTHWFVTQRNFYEPQIITTDNTFVSGNCDVVIGIVNNTVYDPLQPELDSFKEELDKYFKNHTSPDVDLGDISGINASVVNIQKEIDRLNEVAKNLNESLIDLQELGKYEQYIKGGGGSDIDPYKEFGSSYQLLNFLPLDFFPDLNALVDTATALYEEELTGREHCSPHHTAIRQALVCWDELTKLIAWMSSNITSEQVRTIIVNHVNDTWGLKVRQSLWFHLSCLTFGQHTVQEFLVSFGVWIRTPAPYRPPNAPILSTLPEHTVIC

SEQ ID NO: 6850 - protein, 1365 aa, Artificial Sequence
  SARS-CoV-2/Australia/QLD02/2020__EPI_ISL_407896 spike protein (1-1211)(K986P_V987P_P1069F) WhcAg construct
MFVFLVLLPLVSSQCVNLTTRTQLPPAYTNSFTRGVYYPDKVFRSSVLHSTQDLFLPFFSNVTWFHAIHVSGTNGTKRFDNPVLPFNDGVYFASTEKSNIIRGWIFGTTLDSKTQSLLIVNNATNVVIKVCEFQFCNDPFLGVYYHKNNKSWMESEFRVYSSANNCTFEYVSQPFLMDLEGKQGNFKNLREFVFKNIDGYFKIYSKHTPINLVRDLPQGFSALEPLVDLPIGINITRFQTLLALHRSYLTPGDSSSGWTAGAAAYYVGYLQPRTFLLKYNENGTITDAVDCALDPLSETKCTLKSFTVEKGIYQTSNFRVQPTESIVRFPNITNLCPFGEVFNATRFASVYAWNRKRISNCVADYSVLYNSASFSTFKCYGVSPTKLNDLCFTNVYADSFVIRGDEVRQIAPGQTGKIADYNYKLPDDFTGCVIAWNSNNLDSKVGGNYNYLYRLFRKSNLKPFERDISTEIYQAGSTPCNGVEGFNCYFPLQSYGFQPTNGVGYQPYRVVVLSFELLHAPATVCGPKKSTNLVKNKCVNFNFNGLTGTGVLTESNKKFLPFQQFGRDIADTTDAVRDPQTLEILDITPCSFGGVSVITPGTNTSNQVAVLYQDVNCTEVPVAIHADQLTPTWRVYSTGSNVFQTRAGCLIGAEHVNNSYECDIPIGAGICASYQTQTNSPRRARSVASQSIIAYTMSLGAENSVAYSNNSIAIPTNFTISVTTEILPVSMTKTSVDCTMYICGDSTECSNLLLQYGSFCTQLNRALTGIAVEQDKNTQEVFAQVKQIYKTPPIKDFGGFNFSQILPDPSKPSKRSFIEDLLFNKVTLADAGFIKQYGDCLGDIAARDLICAQKFNGLTVLPPLLTDEMIAQYTSALLAGTITSGWTFGAGAALQIPFAMQMAYRFNGIGVTQNVLYENQKLIANQFNSAIGKIQDSLSSTASALGKLQDVVNQNAQALNTLVKQLSSNFGAISSVLNDILSRLDPPEAEVQIDRLITGRLQSLQTYVTQQLIRAAEIRASANLAATKMSECVLGQSKRVDFCGKGYHLMSFPQSAPHGVVFLHVTYVFAQEKNFTTAPAICHDGKAHFPREGVFVSNGTHWFVTQRNFYEPQIITTDNTFVSGNCDVVIGIVNNTVYDPLQLELDSFKEELDKYFKNHTSPDVDLGDISGINASVVNIQKEIDRLNEVAKNLNESLIDLQELGKYEQYIKGGGGSDIDPYKEFGSSYQLLNFLPLDFFPDLNALVDTATALYEEELTGREHCSPHHTAIRQALVCWDELTKLIAWMSSNITSEQVRTIIVNHVNDTWGLKVRQSLWFHLSCLTFGQHTVQEFLVSFGVWIRTPAPYRPPNAPILSTLPEHTVIC

SEQ ID NO: 6851 - protein, 1365 aa, Artificial Sequence
  SARS-CoV-2/India/1-31/2020__EPI_ISL_413523 spike protein (1-1211)(K986P_V987P_P1069F) WhcAg construct
MFVFLVLLPLVSSQCVNLTTRTQLPPAYTNSFTRGVYYPDKVFRSSVLHSTQDLFLPFFSNVTWFHAIHVSGTNGTKRFDNPVLPFNDGVYFASTEKSNIIRGWIFGTTLDSKTQSLLIVNNATNVVIKVCEFQFCNDPFLGVYYHKNNKSWMESEFRVYSSANNCTFEYVSQPFLMDLEGKQGNFKNLREFVFKNIDGYFKIYSKHTPINLVRDLPQGFSALEPLVDLPIGINITRFQTLLALHRSYLTPGDSSSGWTAGAAAYYVGYLQPRTFLLKYNENGTITDAVDCALDPLSETKCTLKSFTVEKGIYQTSNFRVQPTESIVRFPNITNLCPFGEVFNATRFASVYAWNRKRISNCVADYSVLYNSASFSTFKCYGVSPTKLNDLCFTNVYADSFVIRGDEVRQIAPGQTGKIADYNYKLPDDFTGCVIAWNSNNLDSKVGGNYNYLYRLFRKSNLKPFERDISTEIYQAGSTPCNGVEGFNCYFPLQSYGFQPTNGVGYQPYRVVVLSFELLHAPATVCGPKKSTNLVKNKCVNFNFNGLTGTGVLTESNKKFLPFQQFGRDIADTTDAVRDPQTLEILDITPCSFGGVSVITPGTNTSNQVAVLYQDVNCTEVPVAIHADQLTPTWRVYSTGSNVFQTRAGCLIGAEHVNNSYECDIPIGAGICASYQTQTNSPRRARSVASQSIIAYTMSLGAENSVAYSNNSIAIPTNFTISVTTEILPVSMTKTSVDCTMYICGDSTECSNLLLQYGSFCTQLNRALTGIAVEQDKNTQEVFAQVKQIYKTPPIKDFGGFNFSQILPDPSKPSKRSFIEDLLFNKVTLADAGFIKQYGDCLGDIAARDLICAQKFNGLTVLPPLLTDEMIAQYTSALLAGTITSGWTFGAGAALQIPFAMQMAYRFNGIGVTQNVLYENQKLIANQFNSVIGKIQDSLSSTASALGKLQDVVNQNAQALNTLVKQLSSNFGAISSVLNDILSRLDPPEAEVQIDRLITGRLQSLQTYVTQQLIRAAEIRASANLAATKMSECVLGQSKRVDFCGKGYHLMSFPQSAPHGVVFLHVTYVFAQEKNFTTAPAICHDGKAHFPREGVFVSNGTHWFVTQRNFYEPQIITTDNTFVSGNCDVVIGIVNNTVYDPLQPELDSFKEELDKYFKNHTSPDVDLGDISGINASVVNIQKEIDRLNEVAKNLNESLIDLQELGKYEQYIKGGGGSDIDPYKEFGSSYQLLNFLPLDFFPDLNALVDTATALYEEELTGREHCSPHHTAIRQALVCWDELTKLIAWMSSNITSEQVRTIIVNHVNDTWGLKVRQSLWFHLSCLTFGQHTVQEFLVSFGVWIRTPAPYRPPNAPILSTLPEHTVIC

SEQ ID NO: 6852 - protein, 1365 aa, Artificial Sequence
  SARS-CoV-2/Guangdong/GD2020087-P0008/2020__EPI_ISL_413863 spike protein (1-1211)(K986P_V987P_P1069F) WhcAg construct
MFVFLVLLPLVSSQCVNLTTRTQLPPAYTNSFTRGVYYPDKVFRSSVLHSTQDLFLPFFSNVTWFHAIHVSGTNGTKRFDNPVLPFNDGVYFASTEKSNIIRGWIFGTTLDSKTQSLLIVNNATNVVIKVCEFQFCNDPFLGVYYHKNNKSWMESEFRVYSSANNCTFEYVSQPFLMDLEGKQGNFKNLREFVFKNIDGYFKIYSKHTPINLVRDLPQGFSALEPLVDLPIGINITRFQTLLALHRSYLTPGDSSSGWTAGAAAYYVGYLQPRTFLLKYNENGTITDAVDCALDPLSETKCTLKSFTVEKGIYQTSNFRVQPTESIVRFPNITNLCPFGEVFNATRFASVYAWNRKRISNCVADYSVLYNSASFSTFKCYGVSPTKLNDLCFTNVYADSFVIRGDEVREIAPGQTGKIADYNYKLPDDFTGCVIAWNSNNLDSKVGGNYNYLYRLFRKSNLKPFERDISTEIYQAGSTPCNGVEGFNCYFPLQSYGFQPTNGVGYQPYRVVVLSFELLHAPATVCGPKKSTNLVKNKCVNFNFNGLTGTGVLTESNKKFLPFQQFGRDIADTTDAVRDPQTLEILDITPCSFGGVSVITPGTNTSNQVAVLYQDVNCTEVPVAIHADQLTPTWRVYSTGSNVFQTRAGCLIGAEHVNNSYECDIPIGAGICASYQTQTNSPRRARSVASQSIIAYTMSLGAENSVAYSNNSIAIPTNFTISVTTEILPVSMTKTSVDCTMYICGDSTECSNLLLQYGSFCTQLNRALTGIAVEQDKNTQEVFAQVKQIYKTPPIKDFGGFNFSQILPDPSKPSKRSFIEDLLFNKVTLADAGFIKQYGDCLGDIAARDLICAQKFNGLTVLPPLLTDEMIAQYTSALLAGTITSGWTFGAGAALQIPFAMQMAYRFNGIGVTQNVLYENQKLIANQFNSAIGKIQDSLSSTASALGKLQDVVNQNAQALNTLVKQLSSNFGAISSVLNDILSRLDPPEAEVQIDRLITGRLQSLQTYVTQQLIRAAEIRASANLAATKMSECVLGQSKRVDFCGKGYHLMSFPQSAPHGVVFLHVTYVFAQEKNFTTAPAICHDGKAHFPREGVFVSNGTHWFVTQRNFYEPQIITTDNTFVSGNCDVVIGIVNNTVYDPLQPELDSFKEELDKYFKNHTSPDVDLGDISGINASVVNIQKEIDRLNEVAKNLNESLIDLQELGKYEQYIKGGGGSDIDPYKEFGSSYQLLNFLPLDFFPDLNALVDTATALYEEELTGREHCSPHHTAIRQALVCWDELTKLIAWMSSNITSEQVRTIIVNHVNDTWGLKVRQSLWFHLSCLTFGQHTVQEFLVSFGVWIRTPAPYRPPNAPILSTLPEHTVIC

SEQ ID NO: 6853 - protein, 1365 aa, Artificial Sequence
  SARS-CoV-2/Sweden/01/2020__EPI_ISL_411951 spike protein (1-1211)(K986P_V987P_P1069F) WhcAg construct
MFVFLVLLPLVSSQCVNLTTRTQLPPAYTNSFTRGVYYPDKVFRSSVLHSTQDLFLPFFSNVTWFHAIHVSGTNGTKRFDNPVLPFNDGVYFASTEKSNIIRGWIFGTTLDSKTQSLLIVNNATNVVIKVCEFQFCNDPFLGVYYHKNNKSWMESEFRVYSSANNCTFEYVSQPFLMDLEGKQGNFKNLREFVFKNIDGYFKIYSKHTPINLVRDLPQGFSALEPLVDLPIGINITRFQTLLALHRSYLTPGDSSSGWTAGAAAYYVGYLQPRTFLLKYNENGTITDAVDCALDPLSETKCTLKSFTVEKGIYQTSNFRVQPTESIVRFPNITNLCPFGEVFNATRFASVYAWNRKRISNCVADYSVLYNSASFSTFKCYGVSPTKLNDLCFTNVYADSFVIRGDEVRQIAPGQTGKIADYNYKLPDDFTGCVIAWNSNNLDSKVGGNYNYLYRLFRKSNLKPFERDISTEIYQAGSTPCNGVEGFNCYFPLQSYGFQPTNGVGYQPYRVVVLSFELLHAPATVCGPKKSTNLVKNKCVNFNFNGLTGTGVLTESNKKFLPFQQFGRDIADTTDAVRDPQTLEILDITPCSFGGVSVITPGTNTSNQVAVLYQDVNCTEVPVAIHADQLTPTWRVYSTGSNVFQTRAGCLIGAEHVNNSYECDIPIGAGICASYQTQTNSPRRARSVASQSIIAYTMSLGAENSVAYSNNSIAIPTNFTISVTTEILPVSMTKTSVDCTMYICGDSTECSNLLLQYGSFCTQLNRALTGIAVEQDKNTQEVFAQVKQIYKTPPIKDCGGFNFSQILPDPSKPSKRSFIEDLLFNKVTLADAGFIKQYGDCLGDIAARDLICAQKFNGLTVLPPLLTDEMIAQYTSALLAGTITSGWTFGAGAALQIPFAMQMAYRFNGIGVTQNVLYENQKLIANQFNSAIGKIQDSLSSTASALGKLQDVVNQNAQALNTLVKQLSSNFGAISSVLNDILSRLDPPEAEVQIDRLITGRLQSLQTYVTQQLIRAAEIRASANLAATKMSECVLGQSKRVDFCGKGYHLMSFPQSAPHGVVFLHVTYVFAQEKNFTTAPAICHDGKAHFPREGVFVSNGTHWFVTQRNFYEPQIITTDNTFVSGNCDVVIGIVNNTVYDPLQPELDSFKEELDKYFKNHTSPDVDLGDISGINASVVNIQKEIDRLNEVAKNLNESLIDLQELGKYEQYIKGGGGSDIDPYKEFGSSYQLLNFLPLDFFPDLNALVDTATALYEEELTGREHCSPHHTAIRQALVCWDELTKLIAWMSSNITSEQVRTIIVNHVNDTWGLKVRQSLWFHLSCLTFGQHTVQEFLVSFGVWIRTPAPYRPPNAPILSTLPEHTVIC

SEQ ID NO: 6854 - protein, 1365 aa, Artificial Sequence
  SARS-CoV-2/Tianmen/HBCDC-HB-07/2020__EPI_ISL_412983 spike protein (1-1211)(K986P_V987P_P1069F) WhcAg construct
MFVFLVLLPLVSSQCVNLTTRTQLPPAYTNSFTRGVYYPDKVFRSSVLHSTQDLFLPFFSNVTWFHAIHVSGTNGTKRFDNPVLPFNDGVYFASTEKSNIIRGWIFGTTLDSKTQSLLIVNNATNVVIKVCEFQFCNDPFLGVYYHKNNKSWMESEFRVYSSANNCTFEYVSQPFLMDLEGKQGNFKNLREFVFKNIDGYFKIYSKHTPINLVRDLPQGFSALEPLVDLPIGINITRFQTLLALHRSYLTPGDSSSGWTAGAAAYYVGYLQPRTFLLKYNENGTITDAVDCALDPLSETKCTLKSFTVEKGIYQTSNFRVQPTESIVRFPNITNLCPFGEVFNATRFASVYAWNRKRISNCVADYSVLYNSASFSTFKCYGVSPTKLNDLCFTNVYADSFVIRGDEVRQIAPGQTGKIADYNYKLPDDFTGCVIAWNSNNLDSKVGGNYNYLYRLFRKSNLKPFERDISTEIYQAGSTPCNGVEGFNCYFPLQSYGFQPTNGVGYQPYRVVVLSFELLHAPATVCGPKKSTNLVKNKCVNFNFNGLTGTGVLTESNKKFLPFQQFGRDIADTTDAVRDPQTLEILDITPCSFGGVSVITPGTNTSNQVAVLYQDLNCTEVPVAIHADQLTPTWRVYSTGSNVFQTRAGCLIGAEHVNNSYECDIPIGAGICASYQTQTNSPRRARSVASQSIIAYTMSLGAENSVAYSNNSIAIPTNFTISVTTEILPVSMTKTSVDCTMYICGDSTECSNLLLQYGSFCTQLNRALTGIAVEQDKNTQEVFAQVKQIYKTPPIKDFGGFNFSQILPDPSKPSKRSFIEDLLFNKVTLADAGFIKQYGDCLGDIAARDLICAQKFNGLTVLPPLLTDEMIAQYTSALLAGTITSGWTFGAGAALQIPFAMQMAYRFNGIGVTQNVLYENQKLIANQFNSAIGKIQDSLSSTASALGKLQDVVNQNAQALNTLVKQLSSNFGAISSVLNDILSRLDPPEAEVQIDRLITGRLQSLQTYVTQQLIRAAEIRASANLAATKMSECVLGQSKRVDFCGKGYHLMSFPQSAPHGVVFLHVTYVFAQEKNFTTAPAICHDGKAHFPREGVFVSNGTHWFVTQRNFYEPQIITTDNTFVSGNCDVVIGIVNNTVYDPLQPELDSFKEELDKYFKNHTSPDVDLGDISGINASVVNIQKEIDRLNEVAKNLNESLIDLQELGKYEQYIKGGGGSDIDPYKEFGSSYQLLNFLPLDFFPDLNALVDTATALYEEELTGREHCSPHHTAIRQALVCWDELTKLIAWMSSNITSEQVRTIIVNHVNDTWGLKVRQSLWFHLSCLTFGQHTVQEFLVSFGVWIRTPAPYRPPNAPILSTLPEHTVIC

SEQ ID NO: 6855 - protein, 1365 aa, Artificial Sequence
  SARS-CoV-2/Hong Kong/case42_VM20002493/2020__EPI_ISL_414527 spike protein (1-1211)(K986P_V987P_P1069F) WhcAg construct
MFVFLVLLPLVSSQCVNLTTRTQLPPAYTNSFTRGVYYPDKVFRSSVLHSTQDLFLPFFSNVTWFHAIHVSGTNGTKRFDNPVLPFNDGVYFASTEKSNIIRGWIFGTTLDSKTQSLLIVNNATNVVIKVCEFQFCNDPFLGVYYHKNNKSWMESEFRVYSSANNCTFEYVSQPFLMDLEGKQGNFKNLREFVFKNIDGYFKIYSKHTPINLVRDLPQGFSALEPLVDLPIGINITRFQTLLALHRSYLTPGDSSSGWTAGAAAYYVGYLQPRTFLLKYNENGTITDAVDCALDPLSETKCTLKSFTVEKGIYQTSNFRVQPTESIVRFPNITNLCPFGEVFNATRFASVYAWNRKRISNCVADYSVLYNSASFSTFKCYGVSPTKLNDLCFTNVYADSFVIRGDEVRQIAPGQTGKIADYNYKLPDDFTGCVIAWNSNNLDSKVGGNYNYLYRLFRKSNLKPFERDISTEIYQAGSTPCNGVEGFNCYFPLQSYGFQPTNGVGYQPYRVVVLSFELLHAPATVCGPKKSTNLVKNKCVNFNFNGLTGTGVLTESNKKFLPFQQFGRDIADTTDAVRDPQTLEILDITPCSFGGVSVITPGTNTSNQVAVLYQDVNCTEVPVAIHADQLTPTWRVYSTGSNVFQTRAGCLIGAEHVNNSYECDIPIGAGICASYQTQTNSPRRARSVASQSIIAYTMSLGAENSVAYSNNSIAIPTNFAISVTTEILPVSMTKTSVDCTMYICGDSTECSNLLLQYGSFCTQLNRALTGIAVEQDKNTQEVFAQVKQIYKTPPIKDFGGFNFSQILPDPSKPSKRSFIEDLLFNKVTLADAGFIKQYGDCLGDIAARDLICAQKFNGLTVLPPLLTDEMIAQYTSALLAGTITSGWTFGAGAALQIPFAMQMAYRFNGIGVTQNVLYENQKLIANQFNSAIGKIQDSLSSTASALGKLQDVVNQNAQALNTLVKQLSSNFGAISSVLNDILSRLDPPEAEVQIDRLITGRLQSLQTYVTQQLIRAAEIRASANLAATKMSECVLGQSKRVDFCGKGYHLMSFPQSAPHGVVFLHVTYVFAQEKNFTTAPAICHDGKAHFPREGVFVSNGTHWFVTQRNFYEPQIITTDNTFVSGNCDVVIGIVNNTVYDPLQPELDSFKEELDKYFKNHTSPDVDLGDISGINASVVNIQKEIDRLNEVAKNLNESLIDLQELGKYEQYIKGGGGSDIDPYKEFGSSYQLLNFLPLDFFPDLNALVDTATALYEEELTGREHCSPHHTAIRQALVCWDELTKLIAWMSSNITSEQVRTIIVNHVNDTWGLKVRQSLWFHLSCLTFGQHTVQEFLVSFGVWIRTPAPYRPPNAPILSTLPEHTVIC

SEQ ID NO: 6856 - protein, 1365 aa, Artificial Sequence
  SARS-CoV-2/USA/CruiseA-23/2020__EPI_ISL_414482 spike protein (1-1211)(K986P_V987P_P1069F) WhcAg construct
MFVFLVLLPLVSSQCVNLTTRTQLPPAYTNSFTRGVYYPDKVFRSSVLHSTQDLFLPFFSNVTWFHAIHVSGTNGTKRFDNPVLPFNDGVYFASTEKSNIIRGWIFGTTLDSKTQSLLIVNNATNVVIKVCEFQFCNDPFLGVYYHKNNKSWMESEFRVYSSANNCTFEYVSQPFLMDLEVKQGNFKNLREFVFKNIDGYFKIYSKHTPINLVRDLPQGFSALEPLVDLPIGINITRFQTLLALHRSYLTPGDSSSGWTAGAAAYYVGYLQPRTFLLKYNENGTITDAVDCALDPLSETKCTLKSFTVEKGIYQTSNFRVQPTESIVRFPNITNLCPFGEVFNATRFASVYAWNRKRISNCVADYSVLYNSASFSTFKCYGVSPTKLNDLCFTNVYADSFVIRGDEVRQIAPGQTGKIADYNYKLPDDFTGCVIAWNSNNLDSKVGGNYNYLYRLFRKSNLKPFERDISTEIYQAGSTPCNGVEGFNCYFPLQSYGFQPTNGVGYQPYRVVVLSFELLHAPATVCGPKKSTNLVKNKCVNFNFNGLTGTGVLTESNKKFLPFQQFGRDIADTTDAVRDPQTLEILDITPCSFGGVSVITPGTNTSNQVAVLYQDVNCTEVPVAIHADQLTPTWRVYSTGSNVFQTRAGCLIGAEHVNNSYECDIPIGAGICASYQTQTNSPRRARSVASQSIIAYTMSLGAENSVAYSNNSIAIPTNFTISVTTEILPVSMTKTSVDCTMYICGDSTECSNLLLQYGSFCTQLNRALTGIAVEQDKNTQEVFAQVKQIYKTPPIKDFGGFNFSQILPDPSKPSKRSFIEDLLFNKVTLADAGFIKQYGDCLGDIAARDLICAQKFNGLTVLPPLLTDEMIAQYTSALLAGTITSGWTFGAGAALQIPFAMQMAYRFNGIGVTQNVLYENQKLIANQFNSAIGKIQDSLSSTASALGKLQDVVNQNAQALNTLVKQLSSNFGAISSVLNDILSRLDPPEAEVQIDRLITGRLQSLQTYVTQQLIRAAEIRASANLAATKMSECVLGQSKRVDFCGKGYHLMSFPQSAPHGVVFLHVTYVFAQEKNFTTAPAICHDGKAHFPREGVFVSNGTHWFVTQRNFYEPQIITTDNTFVSGNCDVVIGIVNNTVYDPLQPELDSFKEELDKYFKNHTSPDVDLGDISGINASVVNIQKEIDRLNEVAKNLNESLIDLQELGKYEQYIKGGGGSDIDPYKEFGSSYQLLNFLPLDFFPDLNALVDTATALYEEELTGREHCSPHHTAIRQALVCWDELTKLIAWMSSNITSEQVRTIIVNHVNDTWGLKVRQSLWFHLSCLTFGQHTVQEFLVSFGVWIRTPAPYRPPNAPILSTLPEHTVIC

SEQ ID NO: 6857 - protein, 1365 aa, Artificial Sequence
  SARS-CoV-2/Hong Kong/case85_VM20002868/2020__EPI_ISL_414519 spike protein (1-1211)(K986P_V987P_P1069F) WhcAg construct
MFVFLVLVPLVSSQCVNLTTRTQLPPAYTNSFTRGVYYPDKVFRSSVLHSTQDLFLPFFSNVTWFHAIHVSGTNGTKRFDNPVLPFNDGVYFASTEKSNIIRGWIFGTTLDSKTQSLLIVNNATNVVIKVCEFQFCNDPFLGVYYHKNNKSWMESEFRVYSSANNCTFEYVSQPFLMDLEGKQGNFKNLREFVFKNIDGYFKIYSKHTPINLVRDLPQGFSALEPLVDLPIGINITRFQTLLALHRSYLTPGDSSSGWTAGAAAYYVGYLQPRTFLLKYNENGTITDAVDCALDPLSETKCTLKSFTVEKGIYQTSNFRVQPTESIVRFPNITNLCPFGEVFNATRFASVYAWNRKRISNCVADYSVLYNSASFSTFKCYGVSPTKLNDLCFTNVYADSFVIRGDEVRQIAPGQTGKIADYNYKLPDDFTGCVIAWNSNNLDSKVGGNYNYLYRLFRKSNLKPFERDISTEIYQAGSTPCNGVEGFNCYFPLQSYGFQPTNGVGYQPYRVVVLSFELLHAPATVCGPKKSTNLVKNKCVNFNFNGLTGTGVLTESNKKFLPFQQFGRDIADTTDAVRDPQTLEILDITPCSFGGVSVITPGTNTSNQVAVLYQDVNCTEVPVAIHADQLTPTWRVYSTGSNVFQTRAGCLIGAEHVNNSYECDIPIGAGICASYQTQTNSPRRARSVASQSIIAYTMSLGAENSVAYSNNSIAIPTNFTISVTTEILPVSMTKTSVDCTMYICGDSTECSNLLLQYGSFCTQLNRALTGIAVEQDKNTQEVFAQVKQIYKTPPIKDFGGFNFSQILPDPSKPSKRSFIEDLLFNKVTLADAGFIKQYGDCLGDIAARDLICAQKFNGLTVLPPLLTDEMIAQYTSALLAGTITSGWTFGAGAALQIPFAMQMAYRFNGIGVTQNVLYENQKLIANQFNSAIGKIQDSLSSTASALGKLQDVVNQNAQALNTLVKQLSSNFGAISSVLNDILSRLDPPEAEVQIDRLITGRLQSLQTYVTQQLIRAAEIRASANLAATKMSECVLGQSKRVDFCGKGYHLMSFPQSAPHGVVFLHVTYVFAQEKNFTTAPAICHDGKAHFPREGVFVSNGTHWFVTQRNFYEPQIITTDNTFVSGNCDVVIGIVNNTVYDPLQPELDSFKEELDKYFKNHTSPDVDLGDISGINASVVNIQKEIDRLNEVAKNLNESLIDLQELGKYEQYIKGGGGSDIDPYKEFGSSYQLLNFLPLDFFPDLNALVDTATALYEEELTGREHCSPHHTAIRQALVCWDELTKLIAWMSSNITSEQVRTIIVNHVNDTWGLKVRQSLWFHLSCLTFGQHTVQEFLVSFGVWIRTPAPYRPPNAPILSTLPEHTVIC

SEQ ID NO: 6858 - protein, 1365 aa, Artificial Sequence; identical to SEQ ID NO: 6848
  SARS-CoV-2/England/200990660/2020__EPI_ISL_414523 spike protein (1-1211)(K986P_V987P_P1069F) WhcAg construct

SEQ ID NO: 6859 - protein, 1365 aa, Artificial Sequence
  SARS-CoV-2/Australia/NSW09/2020__EPI_ISL_413595 spike protein (1-1211)(K986P_V987P_P1069F) WhcAg construct
MFVFLVLLPLVSSQCVNLTTRTQLPPAYTNSFTRGVYYPDKVFRSSVLHSTQDLFLPFFSNVTWFHAIHVSGTNGTKRFDNPVLPFNDGVYFASTEKSNIIRGWIFGTTLDSKTQSLLIVNNATNVVIKVCEFQFCNDPFLGVYYHKNNKSWMESEFRVYSSANNCTFEYVSQPFLMDLEGKQGNFKNLREFVFKNIDGYFKIYSKHTPINLVRDLPQGFSALEPLVDLPIGINITRFQTLLALHRSYLTPGDSSSGWTAGAAAYYVGYLQPRTFLLKYNENGTITDAVDCALDPLSETKCTLKSFTVEKGIYQTSNFRVQPTESIVRFPNITNLCPFGEVFNATRFASVYAWNRKRISNCVADYSVLYNSASFSTFKCYGVSPTKLNDLCFTNVYADSFVIRGDEVRQIAPGQTGKIADYNYKLPDDFTGCVIAWNSNNLDSKVGGNYNYLYRLFRKSNLKPFERDISTEIYQAGSTPCNGVEGFNCYFPLQSYGFQPTNGVGYQPYRVVVLSFELLHAPATVCGPKKSTNLVKNKCVNFNFNGLTGTGVLTESNKKFLPFQQFGRDIADTTDAVRDPQTLEILDITPCSFGGVSVITPGTNTSNQVAVLYQDVNCTEVPVAIHADQLTPTWRVYSTGSNVFQTRAGCLIGAEHVNNSYECDIPIGAGICASYQTQTNSPRRARSVASQSIIAYTMSLGAENSVAYSNNSIAIPTNFTISVTTEILPVSMTKTSVDCTMYICGDSTECSNLLLQYGSFCTQLNRALTGIAVEQDKNTQEVFAQVKQIYKTPPIKDFGGFNFSQILPDPSKPSKRSFIEDLLFNKVTLADAGFIKQYGDCLGDIAARDLICAQKFNGLTVLPPLLTDEMIAQYTSALLAGTITSGWTFGAGAALQIPFAMQMAYRFNGIGVTQNVLYENQKLIANQFNSAIGKIQDSLSFTASALGKLQDVVNQNAQALNTLVKQLSSNFGAISSVLNDILSRLDPPEAEVQIDRLITGRLQSLQTYVTQQLIRAAEIRASANLAATKMSECVLGQSKRVDFCGKGYHLMSFPQSAPHGVVFLHVTYVFAQEKNFTTAPAICHDGKAHFPREGVFVSNGTHWFVTQRNFYEPQIITTDNTFVSGNCDVVIGIVNNTVYDPLQPELDSFKEELDKYFKNHTSPDVDLGDISGINASVVNIQKEIDRLNEVAKNLNESLIDLQELGKYEQYIKGGGGSDIDPYKEFGSSYQLLNFLPLDFFPDLNALVDTATALYEEELTGREHCSPHHTAIRQALVCWDELTKLIAWMSSNITSEQVRTIIVNHVNDTWGLKVRQSLWFHLSCLTFGQHTVQEFLVSFGVWIRTPAPYRPPNAPILSTLPEHTVIC

SEQ ID NO: 6860 - protein, 1365 aa, Artificial Sequence; identical to SEQ ID NO: 6840
  SARS-CoV-2/Australia/NSW10/2020__EPI_ISL_413596 spike protein (1-1211)(K986P_V987P_P1069F) WhcAg construct

SEQ ID NO: 6861 - protein, 1365 aa, Artificial Sequence
  SARS-CoV-2/Switzerland/1000477797/2020__EPI_ISL_413023 spike protein (1-1211)(K986P_V987P_P1069F) WhcAg construct
MFVFLVLLPLVSSQCVNLTTRTQLPPAYTNSFTRGVYYPDKVFRSSVLHSTQDLFLPFFSNVTWFHAIHVSGTNGTKRFDNPVLPFNDGVYFASTEKSNIIRGWIFGTTLDSKTQSLLIVNNATNVVIKVCEFQFCNDPFLGVYYHKNNKSWMESEFRVYSSANNCTFEYVSQPFLMDLEGKQGNFKNLREFVFKNIDGYFNIYSKHTPINLVRDLPQGFSALEPLVDLPIGINITRFQTLLALHRSYLTPGDSSSGWTAGAAAYYVGYLQPRTFLLKYNENGTITDAVDCALDPLSETKCTLKSFTVEKGIYQTSNFRVQPTESIVRFPNITNLCPFGEVFNATRFASVYAWNRKRISNCVADYSVLYNSASFSTFKCYGVSPTKLNDLCFTNVYADSFVIRGDEVRQIAPGQTGKIADYNYKLPDDFTGCVIAWNSNNLDSKVGGNYNYLYRLFRKSNLKPFERDISTEIYQAGSTPCNGVEGFNCYFPLQSYGFQPTNGVGYQPYRVVVLSFELLHAPATVCGPKKSTNLVKNKCVNFNFNGLTGTGVLTESNKKFLPFQQFGRDIADTTDAVRDPQTLEILDITPCSFGGVSVITPGTNTSNQVAVLYQGVNCTEVPVAIHADQLTPTWRVYSTGSNVFQTRAGCLIGAEHVNNSYECDIPIGAGICASYQTQTNSPRRARSVASQSIIAYTMSLGAENSVAYSNNSIAIPTNFTISVTTEILPVSMTKTSVDCTMYICGDSTECSNLLLQYGSFCTQLNRALTGIAVEQDKNTQEVFAQVKQIYKTPPIKDFGGFNFSQILPDPSKPSKRSFIEDLLFNKVTLADAGFIKQYGDCLGDIAARDLICAQKFNGLTVLPPLLTDEMIAQYTSALLAGTITSGWTFGAGAALQIPFAMQMAYRFNGIGVTQNVLYENQKLIANQFNSAIGKIQDSLSSTASALGKLQDVVNQNAQALNTLVKQLSSNFGAISSVLNDILSRLDPPEAEVQIDRLITGRLQSLQTYVTQQLIRAAEIRASANLAATKMSECVLGQSKRVDFCGKGYHLMSFPQSAPHGVVFLHVTYVFAQEKNFTTAPAICHDGKAHFPREGVFVSNGTHWFVTQRNFYEPQIITTDNTFVSGNCDVVIGIVNNTVYDPLQPELDSFKEELDKYFKNHTSPDVDLGDISGINASVVNIQKEIDRLNEVAKNLNESLIDLQELGKYEQYIKGGGGSDIDPYKEFGSSYQLLNFLPLDFFPDLNALVDTATALYEEELTGREHCSPHHTAIRQALVCWDELTKLIAWMSSNITSEQVRTIIVNHVNDTWGLKVRQSLWFHLSCLTFGQHTVQEFLVSFGVWIRTPAPYRPPNAPILSTLPEHTVIC

SEQ ID NO: 6862 - protein, 1365 aa, Artificial Sequence
  SARS-CoV-2/Belgium/BA-02291/2020__EPI_ISL_415159 spike protein (1-1211)(K986P_V987P_P1069F) WhcAg construct
MFVFLVLLPLVSSQCVNLTTRTQLPPAYTNSFTRGVYYPDKVFRSSVLHSTQDLFLPFFSNVTWFHAIHVSGTNGTKRFDNPVLPFNDGVYFASTEKSNIIRGWIFGTTLDSKTQSLLIVNNATNVVIKVCEFQFCNDPFLGVYYHKNNKSWMESEFRVYSSANNCTFEYVSQPFLMDLEGKQGNFKNLREFVFKNIDGYFKIYSKHTPINLVRDLPQGFSALEPLVDLPIGINITRFQTLLALHRSYLTPGDSSSGWTAGAAAYYVGYLQPRTFLLKYNENGTITDAVDCALDPLSETKCTLKSFTVEKGIYQTSNFRVQPTESIVRFPNITNLCPFGEVFNATRFASVYAWNRKRISNCVADYSVLYNSASFSTFKCYGVSPTKLNDLCFTNVYADSFVIRGDEVRQIAPGQTGKIADYNYKLPDDFTGCVIAWNSNNLDSKVGGNYNYLYRLFRRSNLKPFERDISTEIYQAGSTPCNGVEGFNCYFPLQSYGFQPTNGVGYQPYRVVVLSFELLPAPATVCGPKKSTNLVKNKCVNFNFNGLTGTGVLTESNKKFLPFQQFGRDIADTTDAVRDPQTLEILDITPCSFGGVSVITPGTNTSNQVAVLYQGVNCTEVPVAIHADQLTPTWRVYSTGSNVFQTRAGCLIGAEHVNNSYECDIPIGAGICASYQTQTNSPRRARSVASQSIIAYTMSLGAENSVAYSNNSIAIPTNFTISVTTEILPVSMTKTSVDCTMYICGDSTECSNLLLQYGSFCTQLNRALTGIAVEQDKNTQEVFAQVKQIYKTPPIKDFGGFNFSQILPDPSKPSKRSFIEDLLFNKVTLADAGFIKQYGDCLGDIAARDLICAQKFNGLTVLPPLLTDEMIAQYTSALLAGTITSGWTFGAGAALQIPFAMQMAYRFNGIGVTQNVLYENQKLIANQFNSAIGKIQDSLSSAAPALGKLQDVVNQNAQALNTLVKQLSSNFGAISSVLNDILSRLDPPEAEVQIDRLITGRLQSLQTYVTQQLIRAAEIRASANLAATKMSECVLGQSKRVDFCGKGYHLMSFPQSAPHGVVFLHVTYVFAQEKNFTTAPAICHDGKAHFPREGVFVSNGTHWFVTQRNFYEPQIITTDNTFVSGNCDVVIGIVNNTVYDPLQPELDSFKEELDKYFKNHTSPDVDLGDISGINASVVNIQKEIDRLNEVAKNLNESLIDLQELGKYEQYIKGGGGSDIDPYKEFGSSYQLLNFLPLDFFPDLNALVDTATALYEEELTGREHCSPHHTAIRQALVCWDELTKLIAWMSSNITSEQVRTIIVNHVNDTWGLKVRQSLWFHLSCLTFGQHTVQEFLVSFGVWIRTPAPYRPPNAPILSTLPEHTVIC

SEQ ID NO: 6863 - protein, 1365 aa, Artificial Sequence
  SARS-CoV-2/USA/WA8-UW5/2020__EPI_ISL_413486 spike protein (1-1211)(K986P_V987P_P1069F) WhcAg construct
MFVFLVLLPLVSSQCVNLTTRTQLPPAYTNSFTRGVYYPDKVFRSSVLHSTQDLFLPFFSNVTWFHAIHVSGTNGTKRFDNPVLPFNDGVYFASTEKSNIIRGWIFGTTLDSKTQSLLIVNNATNVVIKVCEFQFCNDPFLGVYYHKNNKSWMESEFRVYSSANNCTFEYVSQPFLMDLEGKQGNFKNLREFVFKNIDGYFKIYSKHTPINLVRDLPQGFSALEPLVDLPIGINITRFQTLLALHRSYLTPGDSSSGWTAGAAAYYVGYLQPRTFLLKYNENGTITDAVDCALDPLSETKCTLKSFTVEKGIYQTSNFRVQPTESIVRFPNITNLCPFGEVFNATRFASVYAWNRKRISNCVADYSVLYNSASFSTFKCYGVSPTKLNDLCFTNVYADSFVIRGDEVRQIAPGQTGKIADYNYKLPDDFTGCVIAWNSNNLDSKVGGNYNYLYRLFRKSNLKPFERDISTEIYQAGSTPCNGVEGFNCYFPLQSYGFQPTNGVGYQPYRVVVLSFELLHAPATVCGPKKSTNLVKNKCVNFNFNGLTGTGVLTESNKKFLPFQQFGRDIADTTDAVRDPQTLEILDITPCSFGGVSVITPGTNTSNQVAVLYQDVNCTEVPVAIHADQLTPTWRVYSTGSNVFQTRAGCLIGAEYVNNSYECDIPIGAGICASYQTQTNSPRRARSVASQSIIAYTMSLGAENSVAYSNNSIAIPTNFTISVTTEILPVSMTKTSVDCTMYICGDSTECSNLLLQYGSFCTQLNRALTGIAVEQDKNTQEVFAQVKQIYKTPPIKDFGGFNFSQILPDPSKPSKRSFIEDLLFNKVTLADAGFIKQYGDCLGDIAARDLICAQKFNGLTVLPPLLTDEMIAQYTSALLAGTITSGWTFGAGAALQIPFAMQMAYRFNGIGVTQNVLYENQKLIANQFNSAIGKIQDSLSSTASALGKLQDVVNQNAQALNTLVKQLSSNFGAISSVLNDILSRLDPPEAEVQIDRLITGRLQSLQTYVTQQLIRAAEIRASANLAATKMSECVLGQSKRVDFCGKGYHLMSFPQSAPHGVVFLHVTYVFAQEKNFTTAPAICHDGKAHFPREGVFVSNGTHWFVTQRNFYEPQIITTDNTFVSGNCDVVIGIVNNTVYDPLQPELDSFKEELDKYFKNHTSPDVDLGDISGINASVVNIQKEIDRLNEVAKNLNESLIDLQELGKYEQYIKGGGGSDIDPYKEFGSSYQLLNFLPLDFFPDLNALVDTATALYEEELTGREHCSPHHTAIRQALVCWDELTKLIAWMSSNITSEQVRTIIVNHVNDTWGLKVRQSLWFHLSCLTFGQHTVQEFLVSFGVWIRTPAPYRPPNAPILSTLPEHTVIC

SEQ ID NO: 6864 - protein, 1365 aa, Artificial Sequence
  SARS-CoV-2/England/20102000506/2020__EPI_ISL_415147 spike protein (1-1211)(K986P_V987P_P1069F) WhcAg construct
MFVFLVLLPLVSSQCVNLTTRTQLPPAYTNSFTRGVYYPDKVFRSSVLHSTQDLFLPFFSNVTWFHAIHVSGTNGTKRFDNPVLPFNDGVYFASTEKSNIIRGWIFGTTLDSKTQSLLIVNNATNVVIKVCEFQFCNDPFLGVYYHKNNKSWMESEFRVYSSANNCTFEYVSQPFLMDLEGKQGNFKNLREFVFKNIDGYFKIYSKHTPINLVRDLPQGFSALEPLVDLPIGINITRFQTLLALHRSYLTPGDSSSGWTAGAAAYYVGYLQPRTFLLKYNENGTITDAVDCALDPLSETKCTLKSFTVEKGIYQTSNFRVQPTESIVRFPNITNLCPFGEVFNATRFASVYAWNRKRISNCVADYSVLYNSASFSTFKCYGVSPTKLNDLCFTNVYADSFVIRGDEVRQIAPGQTGKIADYNYKLPDDFTGCVIAWNSNNLDSKVGGNYNYLYRLFRKSNLKPFERDISTEIYQAGSTPCNGVEGFNCYFPLQSYGFQPTNGVGYQPYRVVVLSFELLHAPATVCGPKKSTNLVKNKCVNFNFNGLTGTGVLTESNKKFLPFQQFGRDIADTTDAVRDPQTLEILDITPCSFGGVSVITPGTNTSNQVAVLYQGVNCTEVPVAIHADQLTPTWRVYSTGSNVFQTRAGCLIGAEHVNNSYECDIPIGAGICASYQTQTNSPRRARSVASQSIIAYTMSLGAENSVAYSNNSIAIPTNFTISVTTEILPVSMTKTSVDCTMYICGDSTECSNLLLQYGSFCTQLNRALTGIAVEQDKNTQEVFAQVKQIYKTPPIKDFGGFNFSQILPDPSKPSKRSFIEDLLFNKVTLADAGFIKQYGYCLGDIAARDLICAQKFNGLTVLPPLLTDEMIAQYTSALLAGTITSGWTFGAGAALQIPFAMQMAYRFNGIGVTQNVLYENQKLIANQFNSAIGKIQDSLSSTASALGKLQDVVNQNAQALNTLVKQLSSNFGAISSVLNDILSRLDPPEAEVQIDRLITGRLQSLQTYVTQQLIRAAEIRASANLAATKMSECVLGQSKRVDFCGKGYHLMSFPQSAPHGVVFLHVTYVFAQEKNFTTAPAICHDGKAHFPREGVFVSNGTHWFVTQRNFYEPQIITTDNTFVSGNCDVVIGIVNNTVYDPLQPELDSFKEELDKYFKNHTSPDVDLGDISGINASVVNIQKEIDRLNEVAKNLNESLIDLQELGKYEQYIKGGGGSDIDPYKEFGSSYQLLNFLPLDFFPDLNALVDTATALYEEELTGREHCSPHHTAIRQALVCWDELTKLIAWMSSNITSEQVRTIIVNHVNDTWGLKVRQSLWFHLSCLTFGQHTVQEFLVSFGVWIRTPAPYRPPNAPILSTLPEHTVIC

SEQ ID NO: 6865 - protein, 1365 aa, Artificial Sequence
  SARS-CoV-2/Belgium/VAG-03013/2020__EPI_ISL_415155 spike protein (1-1211)(K986P_V987P_P1069F) WhcAg construct
MFVFLVLLPLVSSQCVNLTTRTQLPPAYTNSFTRGVYYPDKVFRSSVLHSTQDLFLPFFSNVTWFHAIHVSGTNGTKRFDNPVLPFNDGVYFASTEKSNIIRGWIFGTTLDSKTQSLLIVNNATNVVIKVCEFQFCNDPFLGVYYHKNNKSWMESEFRVYSSANNCTFEYVSQPFLMDLEGKQGNFKNLREFVFKNIDGYFKIYSKHTPINLVRDLPQGFSALEPLVDLPIGINITRFQTLLALHRSYLTPGDSSSGWTAGAAAYYVGYLQPRTFLLKYNENGTITDAVDCALDPLSETKCTLKSFTVEKGIYQTSNFRVQPTESIVRFPNITNLCPFGEVFNATRFASVYAWNRKRISNCVADYSVLYNSASFSTFKCYGVSPTKLNDLCFTNVYADSFVIRGDEVRQIAPGQTGKIADYNYKLPDDFTGCVIAWNSNNLDSKVGGNYNYLYRLFRKSNLKPFERDISTEIYQAGSTPCNGVEGFNCYFPLQSYGFQPTNGVGYQPYRVVVLSFELLHAPATVCGPKKSTNLVKNKCVNFNFNGLTGTGVLTESNKKFLPFQQFGRDIADTTDAVRDPQTLEILDITPCSFGGVSVITPGTNTSNQVAVLYQGVNCTEVPVAIHADQLTPTWRVYSTGSNVFQTRAGCLIGAEHVNNSYECDIPIGAGICASYQTQTNSPRRARSVASQSIIAYTMSLGAENSVAYSNNSIAIPTNFTISVTTEILPVSMTKTSVDCTMYICGDSTECSNLLLQYGSFCTQLNRALTGIAVEQDKNTQEVFAQVKQIYKTPPIKDFGGFNFSQILPDPSKPSKRSFIEDLLFNKVTLADAGFIKQYGDCLGDIAARDLICAQKFNGLTVLPPLLTDEMIAQYTSALLAGTITSGWTFGAGAALQIPFAMQMAYRFNGIGVTQNVLYENQKLIANQFNSAIGKIQDSLSSTATALGKLQDVVNQNAQALNTLVKQLSSNFGAISSVLNDILSRLDPPEAEVQIDRLITGRLQSLQTYVTQQLIRAAEIRASANLAATKMSECVLGQSKRVDFCGKGYHLMSFPQSAPHGVVFLHVTYVFAQEKNFTTAPAICHDGKAHFPREGVFVSNGTHWFVTQRNFYEPQIITTDNTFVSGNCDVVIGIVNNTVYDPLQPELDSFKEELDKYFKNHTSPDVDLGDISGINASVVNIQKEIDRLNEVAKNLNESLIDLQELGKYEQYIKGGGGSDIDPYKEFGSSYQLLNFLPLDFFPDLNALVDTATALYEEELTGREHCSPHHTAIRQALVCWDELTKLIAWMSSNITSEQVRTIIVNHVNDTWGLKVRQSLWFHLSCLTFGQHTVQEFLVSFGVWIRTPAPYRPPNAPILSTLPEHTVIC

SEQ ID NO: 6866 - protein, 1365 aa, Artificial Sequence
  SARS-CoV-2/Belgium/BC-03016/2020__EPI_ISL_415157 spike protein (1-1211)(K986P_V987P_P1069F) WhcAg construct
MFVFLVLLPLVSSQCVNLTTRTQLPPAYTNSFTRGVYYPDKVFRSSVLHSTQDLFLPFFSNVTWFHAIHVSGTNGTKRFDNPVLPFNDGVYFASTEKSNIIRGWIFGTTLDSKTQSLLIVNNATNVVIKVCEFQFCNDPFLGVYYHKNNKSWMESEFRVYSSANNCTFEYVSQPFLMDLEGKQGNFKNLREFVFKNIDGYFKIYSKHTPINLVRDLPQGFSALEPLVDLPIGINITRFQTLLALHRSYLTPGDSSSGWTAGAAAYYVGYLQPRTFLLKYNENGTITDAVDCALDPLSETKCTLKSFTVEKGIYQTSNFRVQPTESIVRFPNITNLCPFGEVFNATRFASVYAWNRKRISNCVADYSVLYNSASFSTFKCYGVSPTKLNDLCFTNVYADSFVIRGDEVRQIAPGQTGKIADYNYKLPDDFTGCVIAWNSNNLDSKVGGNYNYLYRLFRKSNLKPFERDISTEIYQAGSTPCNGVEGFNCYFPLQSYGFQPTNGVGYQPYRVVVLSFELLHAPATVCGPKKSTNLVKNKCVNFNFNGLTGTGVLTESNKKFLPFQQFGRDIADTTDAVRDPQTLEILDITPCSFGGVSVITPGTNTSNQVAVLYQGVNCTEVPVAIHADQLTPTWRVYSTGSNVFQTRAGCLIGAEHVNNSYECDIPIGAGICASYQTQTNSPRRARSVASQSIIAYTMSLGAENSVAYSNNSIAIPTNFTISVTTEILPVSMTKTSVDCTMYICGDSTECSNLLLQYGSFCTQLNRALTGIAVEQDKNTQEVFAQVKQIYKTPPIKDFGGFNFSQILPDPSKPSKRSFIEDLLFNKVTLADAGFIKQYGDCLGDIAARDLICAQKFNGLTVLPPLLTDEMIAQYTSALLAGTITSGWTFGAGAALQIPFAMQMAYRFNGIGVTQNVLYENQKLIANQFNSAIGKIQDSLSSTAPALGKLQDVVNQNAQALNTLVKQLSSNFGAISSVLNDILSRLDPPEAEVQIDRLITGRLQSLQTYVTQQLIRAAEIRASANLAATKMSECVLGQSKRVDFCGKGYHLMSFPQSAPHGVVFLHVTYVFAQEKNFTTAPAICHDGKAHFPREGVFVSNGTHWFVTQRNFYEPQIITTDNTFVSGNCDVVIGIVNNTVYDPLQPELDSFKEELDKYFKNHTSPDVDLGDISGINASVVNIQKEIDRLNEVAKNLNESLIDLQELGKYEQYIKGGGGSDIDPYKEFGSSYQLLNFLPLDFFPDLNALVDTATALYEEELTGREHCSPHHTAIRQALVCWDELTKLIAWMSSNITSEQVRTIIVNHVNDTWGLKVRQSLWFHLSCLTFGQHTVQEFLVSFGVWIRTPAPYRPPNAPILSTLPEHTVIC

SEQ ID NO: 6867 - protein, 1365 aa, Artificial Sequence
  SARS-CoV-2/Germany/BavPat3/2020__EPI_ISL_414521 spike protein (1-1211)(K986P_V987P_P1069F) WhcAg construct
MFVFLVLLPLVSSQCVNLTTRTQLPPAYTNSFTRGVYYPDKVFRSSVLHSTQDLFLPFFSNVTWFHAIHVSGTNGTKRFDNPVLPFNDGVYFASTEKSNIIRGWIFGTTLDSKTQSLLIVNNATNVVIKVCEFQFCNDPFLGVYYHKNNKSWMESEFRVYSSANNCTFEYVSQPFLMDLEGKQGNFKNLREFVFKNIDGYFKIYSKHTPINLVRDLPQGFSALEPLVDLPIGINITRFQTLLALHRSYLTPGDSSSGWTAGAAAYYVGYLQPRTFLLKYNENGTITDAVDCALDPLSETKCTLKSFTVEKGIYQTSNFRVQPTESIVRFPNITNLCPFGEVFNATRFASVYAWNRKRISNCVADYSVLYNSASFSTFKCYGVSPTKLNDLCFTNVYADSFVIRGDEVRQIAPGQTGKIADYNYKLPDDFTGCVIAWNSNNLDSKVGGNYNYLYRLFRKSNLKPFERDISTEIYQAGSTPCNGVEGFNCYFPLQSYGFQPTNGVGYQPYRVVVLSFELLHAPATVCGPKKSTNLVKNKCVNFNFNGLTGTGVLTESNKKFLPFQQFGRDIADTTDAVRDPQTLEILDITPCSFGGVSVITPGTNTSNQVAVLYQDVNCTEVPVAIHADQLTPTWRVYSTGSNVFQTRAGCLIGAEHVNNSYECDIPIGAGICASYQTQTNSPRRARSVASQSIIAYTMSLGAENSVAYSNNSIAIPTNFTISVTTEILPVSMTKTSVDCTMYICGDSTECSNLLLQYGSFCTQLNRALTGIAVEQDKNTQQVFAQVKQIYKTPPIKDFGGFNFSQILPDPSKPSKRSFIEDLLFNKVTLADAGFIKQYGDCLGDIAARDLICAQKFNGLTVLPPLLTDEMIAQYTSALLAGTITSGWTFGAGAALQIPFAMQMAYRFNGIGVTQNVLYENQKLIANQFNSAIGKIQDSLSSTASALGKLQDVVNQNAQALNTLVKQLSSNFGAISSVLNDILSRLDPPEAEVQIDRLITGRLQSLQTYVTQQLIRAAEIRASANLAATKMSECVLGQSKRVDFCGKGYHLMSFPQSAPHGVVFLHVTYVFAQEKNFTTAPAICHDGKAHFPREGVFVSNGTHWFVTQRNFYEPQIITTDNTFVSGNCDVVIGIVNNTVYDPLQPELDSFKEELDKYFKNHTSPDVDLGDISGINASVVNIQKEIDRLNEVAKNLNESLIDLQELGKYEQYIKGGGGSDIDPYKEFGSSYQLLNFLPLDFFPDLNALVDTATALYEEELTGREHCSPHHTAIRQALVCWDELTKLIAWMSSNITSEQVRTIIVNHVNDTWGLKVRQSLWFHLSCLTFGQHTVQEFLVSFGVWIRTPAPYRPPNAPILSTLPEHTVIC

SEQ ID NO: 6868 - protein, 1365 aa, Artificial Sequence
  SARS-CoV-2/France/HF1805/2020__EPI_ISL_414628 spike protein (1-1211)(K986P_V987P_P1069F) WhcAg construct
MFVFLVLLPLVSSQCVNLTTRTQLPPAYTNSFTRGVYYPDKVFRSSVLHSTQDLFLPFFSNVTWFHAIHVSGTNGTKRFDNPVLPFNDGVYFASTEKSNIIRGWIFGTTLDSKTQSLLIVNNATNVVIKVCEFQFCNDPFLGVYYHKNNKSWMESEFRVYSSANNCTFEYVSQPFLMDLEGKQGNFKNLREFVFKNIDGYFKIYSKHTPINLVRDLPQGFSALEPLVDLPIGINITRFQTLLALHRSYLTPGDSSSGWTAGAAAYYVGYLQPRTFLLKYNENGTITDAVDCALDPLSETKCTLKSFTVEKGIYQTSNFRVQPTESIVRFPNITNLCPFGEVFNATRFASVYAWNRKRISNCVADYSVLYNSASFSTFKCYGVSPTKLNDLCFTNVYADSFVIRGDEVRQIAPGQTGKIADYNYKLPDDFTGCVIAWNSNNLDSKVGGNYNYLYRLFRKSNLKPFERDISTEIYQAGSTPCNGVEGFNCYFPLQSYGFQPTNGVGYQPYRVVVLSFELLHAPATVCGPKKSTNLVKNKCVNFNFNGLTGTGVLTESNKKFLPFQQFGRDIADTTDAVRDPQTLEILDITPCSFGGVSVITPGTNTSNQVAVLYQGVNCTEVPVAIHADQLTPTWRVYSTGSNVFQTRAGCLIGAEHVNNSYECDIPIGAGICASYQTQTNSPRRARSVASQSIIAYTMSLGAENSVAYSNNSIAIPTNFTISVTTEILPVSMTKTSVDCTMYICGDSTECSNLLLQYGSFCTQLNRALTGIAVEQDKNTQEVFAQVKQIYKTPPIKDFGGFNFSQILPDPSKPSKRSFIEDLLFNKVTLADAGFIKQYGDCLGDIAARDLICAQKFNGLTVLPPLLTDEMIAQYTSALLAGTITSGWTFGAGAALQIPFAMQMAYRFNGIGVTQNVLYENQKLIANQFNSAIGKIQDSLSSTASALGKLQDVVNQNAQALNTLVKQLSSNFGAISSVLNDILSRLDPPEAEVQIDRLITGRLQSLQTYVTQQLIRAAEIRASANLAATKMSECVLGQSKRVDFCGKGYHLMSFPQSAPHGVVFLHVTYVFAQEKNFTTAPAICHDGKAHFPREGVFVSNGTHWFVTQRNFYEPQIITTDNTFVSGNCDVVIGVVNNTVYDPLQPELDSFKEELDKYFKNHTSPDVDLGDISGINASVVNIQKEIDRLNEVAKNLNESLIDLQELGKYEQYIKGGGGSDIDPYKEFGSSYQLLNFLPLDFFPDLNALVDTATALYEEELTGREHCSPHHTAIRQALVCWDELTKLIAWMSSNITSEQVRTIIVNHVNDTWGLKVRQSLWFHLSCLTFGQHTVQEFLVSFGVWIRTPAPYRPPNAPILSTLPEHTVIC

SEQ ID NO: 6869 - protein, 1365 aa, Artificial Sequence
  SARS-CoV-2/Netherlands/ZuidHolland_9/2020__EPI_ISL_414445 spike protein (1-1211)(K986P_V987P_P1069F) WhcAg construct
MFVFLVLLPLVSSQCVNLTTRTQLPPAYTNSFTRGVYYPDKVFRSSVLHSTQDLFLPFFSNVTWFHAIHVSGTNGTKRFDNPVLPFNDGVYFASTEKSNIIRGWIFGTTLDSKTQSLLIVNNATNVVIKVCEFQFCNDPFLGVYYHKNNKSWMESEFRVYSSANNCTFEYVSQPFLMDLEGKQGNFKNLREFVFKNIDGYFKIYSKHTPINLVRDLPQGFSALEPLVDLPIGINITRFQTLLALHRSYLTPGDSSSGWTAGAAAYYVGYLQPRTFLLKYNENGTITDAVDCALDPLSETKCTLKSFTVEKGIYQTSNFRVQPTESIVRFPNITNLCPFGEVFNATRFASVYAWNRKRISNCVADYSVLYNSASFSTFKCYGVSPTKLNDLCFTNVYADSFVIRGDEVRQIAPGQTGKIADYNYKLPDDFTGCVIAWNSNNLDSKVGGNYNYLYRLFRKSNLKPFERDISTEIYQAGSTPCNGVEGFNCYFPLQSYGFQPTNGVGYQPYRVVVLSFELLHAPATVCGPKKSTNLVKNKCVNFNFNGLTGTGVLTESNKKFLPFQQFGRDIADTTDAVRDPQTLEILDITPCSFGGVSVITPGTNTSNQVAVLYQGVNCTEVPVAIHADQLTPTWRVYSTGSNVFQTRAGCLIGAEHVNNSYECDIPIGAGICASYQTQTNSPRRARSVASQSIIAYTMSLGAENSVAYSNNSIAIPTNFTISVTTEILPVSMTKTSVDCTMYICGDSTECSNLLLQYGSFCTQLNRALTGIAVEQDKNTQEVFAQVKQIYKTPPIKDFGGFNFSQILPDPSKPSKRSFIEDLLFNKVTLADAGFIKQYGDCLGDIAARDLICVQKFNGLTVLPPLLTDEMIAQYTSALLAGTITSGWTFGAGAALQIPFAMQMAYRFNGIGVTQNVLYENQKLIANQFNSAIGKIQDSLSSTASALGKLQDVVNQNAQALNTLVKQLSSNFGAISSVLNDILSRLDPPEAEVQIDRLITGRLQSLQTYVTQQLIRAAEIRASANLAATKMSECVLGQSKRVDFCGKGYHLMSFPQSAPHGVVFLHVTYVFAQEKNFTTAPAICHDGKAHFPREGVFVSNGTHWFVTQRNFYEPQIITTDNTFVSGNCDVVIGIVNNTVYDPLQPELDSFKEELDKYFKNHTSPDVDLGDISGINASVVNIQKEIDRLNEVAKNLNESLIDLQELGKYEQYIKGGGGSDIDPYKEFGSSYQLLNFLPLDFFPDLNALVDTATALYEEELTGREHCSPHHTAIRQALVCWDELTKLIAWMSSNITSEQVRTIIVNHVNDTWGLKVRQSLWFHLSCLTFGQHTVQEFLVSFGVWIRTPAPYRPPNAPILSTLPEHTVIC

SEQ ID NO: 6870 - protein, 1365 aa, Artificial Sequence
  SARS-CoV-2/Finland/FIN03032020A/2020__EPI_ISL_413602 spike protein (1-1211)(K986P_V987P_P1069F) WhcAg construct
MFVFLVLLPLVSSQCVNLTTRTQLPPAYTNSFTRGVYYPDKVFRSSVLHSTQDLFLPFFSNVTWFHAIHVSGTNGTKRFDNPVLPFNDGVYFASTEKSNIIRGWIFGTTLDSKTQSLLIVNNATNVVIKVCEFQFCNDPFLGVYYHKNNKSWMESEFRVYSSANNCTFEYVSQPFLMDLEGKQGNFKNLREFVFKNIDGYFKIYSKHTPINLVRDLPQGFSALEPLVDLPIGINITRFQTLLALHRSYLTPGDSSSGWTAGAAAYYVGYLQPRTFLLKYNENGTITDAVDCALDPLSETKCTLKSFTVEKGIYQTSNFRVQPTESIVRFPNITNLCPFGEVFNATRFASVYAWNRKRISNCVADYSVLYNSASFSTFKCYGVSPTKLNDLCFTNVYADSFVIRGDEVRQIAPGQTGKIADYNYKLPDDFTGCVISWNSNNLDSKVGGNYNYLYRLFRKSNLKPFERDISTEIYQAGSTPCNGVEGFNCYFPLQSYGFQPTNGVGYQPYRVVVLSFELLHAPATVCGPKKSTNLVKNKCVNFNFNGLTGTGVLTESNKKFLPFQQFGRDIADTTDAVRDPQTLEILDITPCSFGGVSVITPGTNTSNQVAVLYQGVNCTEVPVAIHADQLTPTWRVYSTGSNVFQTRAGCLIGAEHVNNSYECDIPIGAGICASYQTQTNSPRRARSVASQSIIAYTMSLGAENSVAYSNNSIAIPTNFTISVTTEILPVSMTKTSVDCTMYICGDSTECSNLLLQYGSFCTQLNRALTGIAVEQDKNTQEVFAQVKQIYKTPPIKDFGGFNFSQILPDPSKPSKRSFIEDLLFNKVTLADAGFIKQYGDCLGDIAARDLICAQKFNGLTVLPPLLTDEMIAQYTSALLAGTITSGWTFGAGAALQIPFAMQMAYRFNGIGVTQNVLYENQKLIANQFNSAIGKIQDSLSSTASALGKLQDVVNQNAQALNTLVKQLSSNFGAISSVLNDILSRLDPPEAEVQIDRLITGRLQSLQTYVTQQLIRAAEIRASANLAATKMSECVLGQSKRVDFCGKGYHLMSFPQSAPHGVVFLHVTYVFAQEKNFTTAPAICHDGKAHFPREGVFVSNGTHWFVTQRNFYEPQIITTDNTFVSGNCDVVIGIVNNTVYDPLQPELDSFKEELDKYFKNHTSPDVDLGDISGINASVVNIQKEIDRLNEVAKNLNESLIDLQELGKYEQYIKGGGGSDIDPYKEFGSSYQLLNFLPLDFFPDLNALVDTATALYEEELTGREHCSPHHTAIRQALVCWDELTKLIAWMSSNITSEQVRTIIVNHVNDTWGLKVRQSLWFHLSCLTFGQHTVQEFLVSFGVWIRTPAPYRPPNAPILSTLPEHTVIC

SEQ ID NO: 6871 - protein, 1365 aa, Artificial Sequence
  SARS-CoV-2/France/GE1977/2020__EPI_ISL_414632 spike protein (1-1211)(K986P_V987P_P1069F) WhcAg construct
MFVFLVLLPLVSSQCVNLTTRTQLPPAYTNSFTRGVYYPDKVFRSSVLHSTQDLFLPFFSNVTWFHAIHVSGTNGTKRFDNPVLPFNDGVYFASTEKSNIIRGWIFGTTLDSKTQSLLIVNNATNVVIKVCEFQFCNDPFLGVYYHKNNKSWMESEFRVYSSANNCTFEYVSQPFLMDLEGKQGNFKNLREFVFKNIDGYFKIYSKHTPINLVRDLPQGFSALEPLVDLPIGINITRFQTLLALHRSYLTPGDSSSGWTAGAAAYYVGYLQPRTFLLKYNENGTITDAVDCALDPLSETKCTLKSFTVEKGIYQTSNFRVQPTESIVRFPNITNLCPFGEVFNATRFASVYAWNRKRISNCVADYSVLYNSASFSTFKCYGVSPTKLNDLCFTNVYADSFVIRGDEVRQIAPGQTGKIADYNYKLPDDFTGCVIAWNSNNLDSKVGGNYNYLYRLFRKSNLKPFERDISTEIYQAGSTPCNGVEGFNCYFPLQSYGFQPTNGVGYQPYRVVVLSFELLHAPATVCGPKKSTNLVKNKCVNFNFNGLTGTGVLTESNKKFLPFQQFGRDIADTTDAVRDPQTLEILDITPCSFGGVSVITPGTNTSNQVAVLYQGVNCTEVPVAIHADQLTPTWRVYSTGSNVFQTRAGCLIGAEHVNNSYECDIPIGAGICASYQTQTNSPRRARSVASQSIIAYTMSLGAENSVAYSNNSIAIPTNFTISVTTEILPVSMTKTSVDCTMYICGDSTECSNLLLQYGSFCTQLNRALTGIAVEQDKNTQEVFAQVKQIYKTPPIKDFGGFNFSQILPDPSKPSKRSFIEDLLFNKVTLADAGFIKQYGDCLGDIAARDLICAQKFNGLTVLPPLLTDEMIAQYTSALLAGTITSGWTFGAGAALQIPFAMQMAYRFNGIGVTQNVLYENQKLIANQFNSAIGKIQDSLFSTASALGKLQDVVNQNAQALNTLVKQLSSNFGAISSVLNDILSRLDPPEAEVQIDRLITGRLQSLQTYVTQQLIRAAEIRASANLAATKMSECVLGQSKRVDFCGKGYHLMSFPQSAPHGVVFLHVTYVFAQEKNFTTAPAICHDGKAHFPREGVFVSNGTHWFVTQRNFYEPQIITTDNTFVSGNCDVVIGIVNNTVYDPLQPELDSFKEELDKYFKNHTSPDVDLGDISGINASVVNIQKEIDRLNEVAKNLNESLIDLQELGKYEQYIKGGGGSDIDPYKEFGSSYQLLNFLPLDFFPDLNALVDTATALYEEELTGREHCSPHHTAIRQALVCWDELTKLIAWMSSNITSEQVRTIIVNHVNDTWGLKVRQSLWFHLSCLTFGQHTVQEFLVSFGVWIRTPAPYRPPNAPILSTLPEHTVIC

SEQ ID NO: 6872 - protein, 1365 aa, Artificial Sequence
  SARS-CoV-2/Finland/FIN-313/2020__EPI_ISL_414641 spike protein (1-1211)(K986P_V987P_P1069F) WhcAg construct
MFVFLVLLPLVSSQCVNLTTRTQLPPAYTNSFTRGVYYPDKVFRSSVLHSTQDLFLPFFSNVTWFHAIHVSGTNGTKRFDNPVLPFNDGVYFASTEKSNIIRGWIFGTTLDSKTQSLLIVNNATNVVIKVCEFQFCNDPFLGVYYHKNNKSWMESEFRVYSSANNCTFEYVSQPFLMDLEGKQGNFKNLREFVFKNIDGYFKIYSKHTPINLVRDLPQGFSALEPLVDLPIGINITRFKTLLALHRSYLTPGDSSSGWTAGAAAYYVGYLQPRTFLLKYNENGTITDAVDCALDPLSETKCTLKSFTVEKGIYQTSNFRVQPTESIVRFPNITNLCPFGEVFNATRFASVYAWNRKRISNCVADYSVLYNSASFSTFKCYGVSPTKLNDLCFTNVYADSFVIRGDEVRQIAPGQTGKIADYNYKLPDDFTGCVIAWNSNNLDSKVGGNYNYLYRLFRKSNLKPFERDISTEIYQAGSTPCNGVEGFNCYFPLQSYGFQPTNGVGYQPYRVVVLSFELLHAPATVCGPKKSTNLVKNKCVNFNFNGLTGTGVLTESNKKFLPFQQFGRDIADTTDAVRDPQTLEILDITPCSFGGVSVITPGTNTSNQVAVLYQGVNCTEVPVAIHADQLTPTWRVYSTGSNVFQTRAGCLIGAEHVNNSYECDIPIGAGICASYQTQTNSPRRARSVASQSIIAYTMSLGAENSVAYSNNSIAIPTNFTISVTTEILPVSMTKTSVDCTMYICGDSTECSNLLLQYGSFCTQLNRALTGIAVEQDKNTQEVFAQVKQIYKTPPIKDFGGFNFSQILPDPSKPSKRSFIEDLLFNKVTLADAGFIKQYGDCLGDIAARDLICAQKFNGLTVLPPLLTDEMIAQYTSALLAGTITSGWTFGAGAALQIPFAMQMAYRFNGIGVTQNVLYENQKLIANQFNSAIGKIQDSLSSTASALGKLQDVVNQNAQALNTLVKQLSSNFGAISSVLNDILSRLDPPEAEVQIDRLITGRLQSLQTYVTQQLIRAAEIRASANLAATKMSECVLGQSKRVDFCGKGYHLMSFPQSAPHGVVFLHVTYVFAQEKNFTTAPAICHDGKAHFPREGVFVSNGTHWFVTQRNFYEPQIITTDNTFVSGNCDVVIGIVNNTVYDPLQPELDSFKEELDKYFKNHTSPDVDLGDISGINASVVNIQKEIDRLNEVAKNLNESLIDLQELGKYEQYIKGGGGSDIDPYKEFGSSYQLLNFLPLDFFPDLNALVDTATALYEEELTGREHCSPHHTAIRQALVCWDELTKLIAWMSSNITSEQVRTIIVNHVNDTWGLKVRQSLWFHLSCLTFGQHTVQEFLVSFGVWIRTPAPYRPPNAPILSTLPEHTVIC

SEQ ID NO: 6873 - protein, 1365 aa, Artificial Sequence
  SARS-CoV-2/Netherlands/ZuidHolland_2/2020__EPI_ISL_414556 spike protein (1-1211)(K986P_V987P_P1069F) WhcAg construct
MFVFLVLLPLVSSQCVNLTTRTQLPPAYTNSFTRGVYYPDKVFRSSVLHSTQDLFLPFFSNVTWFHAIHVSGTNGTKRFDNPVLPFNDGVYFASTEKSNIIRGWIFGTTLDSKTQSLLIVNNATNVVIKVCEFQFCNDPFLGVYYHKNNKSWMESEFRVYSSANNCTFEYVSQPFLMDLEGKQGNFKNLREFVFKNIDGYFKIYSKHTPINLVRDLPQGFSALEPLVDLPIGINITRFQTLLALHRSYLTPGDSSSGWTAGAAAYYVGYLQPRTFLLKYNENGTITDAVDCALDPLSETKCTLKSFTVEKGIYQTSNFRVQPTESIVRFPNITNLCPFGEVFNATRFASVYAWNRKRISNCVADYSVLYNSASFSTFKCYGVSPTKLNDLCFTNVYADSFVIRGDEVRQIAPGQTGKIADYNYKLPDDFTGCVIAWNSNNLDSKVGGNYNYLYRLFRKSNLKPFERDISTEIYQAGSTPCNGVEGFNCYFPLQSYGFQPTNGVGYQPYRVVVLSFELLHAPATVCGPKKSTNLVKNKCVNFNFNGLTGTGVLTESNKKFLPFQQFGRDIADTTDAVRDPQTLEILDITPCSFGGVSVITPGTNTSNQVAVLYQGVNCTEVPVAIHADQLTPTWRVYSTGSNVFQTRAGCLIGAEHVNNSYECDIPIGAGICASYQTQTNSPRRARSVASQSIIAYTMSLGAENSVAYSNNSIAIPTNFTISVTTEILPVSMTKTSVDCTMYICGDSTECSNLLLQYGSFCTQLNRALTGIALEQDKNTQEVFAQVKQIYKTPPIKDFGGFNFSQILPDPSKPSKRSFIEDLLFNKVTLADAGFIKQYGDCLGDIAARDLICAQKFNGLTVLPPLLTDEMIAQYTSALLAGTITSGWTFGAGAALQIPFAMQMAYRFNGIGVTQNVLYENQKLIANQFNSAIGKIQDSLSSTASALGKLQDVVNQNAQALNTLVKQLSSNFGAISSVLNDILSRLDPPEAEVQIDRLITGRLQSLQTYVTQQLIRAAEIRASANLAATKMSECVLGQSKRVDFCGKGYHLMSFPQSAPHGVVFLHVTYVFAQEKNFTTAPAICHDGKAHFPREGVFVSNGTHWFVTQRNFYEPQIITTDNTFVSGNCDVVIGIVNNTVYDPLQPELDSFKEELDKYFKNHTSPDVDLGDISGINASVVNIQKEIDRLNEVAKNLNESLIDLQELGKYEQYIKGGGGSDIDPYKEFGSSYQLLNFLPLDFFPDLNALVDTATALYEEELTGREHCSPHHTAIRQALVCWDELTKLIAWMSSNITSEQVRTIIVNHVNDTWGLKVRQSLWFHLSCLTFGQHTVQEFLVSFGVWIRTPAPYRPPNAPILSTLPEHTVIC

SEQ ID NO: 6874 - protein, 1365 aa, Artificial Sequence
  SARS-CoV-2/USA/WA-UW31/2020__EPI_ISL_414618 spike protein (1-1211)(K986P_V987P_P1069F) WhcAg construct
MFVFLVLLPLVSSQCVNLTTRTQLPPAYTNSFTRGVYYPDKVFRSSVLHSTQDLFLPFFSNVTWFHAIHVSGTNGTKRFDNPVLPFNDGVYFASTEKSNIIRGWIFGTTLDSKTQSLLIVNNATNVVIKVCEFQFCNDPFLGVYYHKNNKSWMESEFRVYSSANNCTFEYVSQPFLMDLEGKQGNFKNLREFVFKNIDGYFKIYSKHTPINLVRDLPQGFSALEPLVDLPIGINITRFQTLLALHRSYLTPGDSSSGWTAGAAAYYVGYLQPRTFLLKYNENGTITDAVDCALDPLSETKCTLKSFTVEKGIYQTSNFRVQPTESIVRFPNITNLCPFGEVFNATRFASVYAWNRKRISNCVADYSVLYNSASFSTFKCYGVSPTKLNDLCFTNVYADSFVIRGDEVRQIAPGQTGKIADYNYKLPDDFTGCVIAWNSNNLDSKVGGNYNYLYRLFRKSNLKPFERDISTEIYQAGSTPCNGAEGFNCYFPLQSYGFQPTNGVGYQPYRVVVLSFELLHAPATVCGPKKSTNLVKNKCVNFNFNGLTGTGVLTESNKKFLPFQQFGRDIADTTDAVRDPQTLEILDITPCSFGGVSVITPGTNTSNQVAVLYQDVNCTEVPVAIHADQLTPTWRVYSTGSNVFQTRAGCLIGAEHVNNSYECDIPIGAGICASYQTQTNSPRRARSVASQSIIAYTMSLGAENSVAYSNNSIAIPTNFTISVTTEILPVSMTKTSVDCTMYICGDSTECSNLLLQYGSFCTQLNRALTGIAVEQDKNTQEVFAQVKQIYKTPPIKDFGGFNFSQILPDPSKPSKRSFIEDLLFNKVTLADAGFIKQYGDCLGDIAARDLICAQKFNGLTVLPPLLTDEMIAQYTSALLAGTITSGWTFGAGAALQIPFAMQMAYRFNGIGVTQNVLYENQKLIANQFNSAIGKIQDSLSSTASALGKLQDVVNQNAQALNTLVKQLSSNFGAISSVLNDILSRLDPPEAEVQIDRLITGRLQSLQTYVTQQLIRAAEIRASANLAATKMSECVLGQSKRVDFCGKGYHLMSFPQSAPHGVVFLHVTYVFAQEKNFTTAPAICHDGKAHFPREGVFVSNGTHWFVTQRNFYEPQIITTDNTFVSGNCDVVIGIVNNTVYDPLQPELDSFKEELDKYFKNHTSPDVDLGDISGINASVVNIQKEIDRLNEVAKNLNESLIDLQELGKYEQYIKGGGGSDIDPYKEFGSSYQLLNFLPLDFFPDLNALVDTATALYEEELTGREHCSPHHTAIRQALVCWDELTKLIAWMSSNITSEQVRTIIVNHVNDTWGLKVRQSLWFHLSCLTFGQHTVQEFLVSFGVWIRTPAPYRPPNAPILSTLPEHTVIC

SEQ ID NO: 6875 - protein, 1365 aa, Artificial Sequence
  SARS-CoV-2/South Korea/SNU01/2020__EPI_ISL_411929 spike protein (1-1211)(K986P_V987P_P1069F) WhcAg construct
MFVFLVLLPLVSSQCVNLTTRTQLPPAYTNSFTRGVYYPDKVFRSSVLHSTQDLFLPFFSNVTWFHAIHVSGTNGTKRFDNPVLPFNDGVYFASTEKSNIIRGWIFGTTLDSKTQSLLIVNNATNVVIKVCEFQFCNDPFLGVYYHKNNKSWMESEFRVYSSANNCTFEYVSQPFLMDLEGKQGNFKNLREFVFKNIDGYFKIYSKHTPINLVRDLPQGFWALEPLVDLPIGINITRFQTLLALHRSYLTPGDSSSGWTAGAAAYYVGYLQPRTFLLKYNENGTITDAVDCALDPLSETKCTLKSFTVEKGIYQTSNFRVQPTESIVRFPNITNLCPFGEVFNATRFASVYAWNRKRISNCVADYSVLYNSASFSTFKCYGVSPTKLNDLCFTNVYADSFVIRGDEVRQIAPGQTGKIADYNYKLPDDFTGCVIAWNSNNLDSKVGGNYNYLYRLFRKSNLKPFERDISTEIYQAGSTPCNGVEGFNCYFPLQSYGFQPTNGVGYQPYRVVVLSFELLHAPATVCGPKKSTNLVKNKCVNFNFNGLTGTGVLTESNKKFLPFQQFGRDIADTTDAVRDPQTLEILDITPCSFGGVSVITPGTNTSNQVAVLYQDVNCTEVPVAIHADQLTPTWRVYSTGSNVFQTRAGCLIGAEHVNNSYECDIPIGAGICASYQTQTNSPRRARSVASQSIIAYTMSLGAENSVAYSNNSIAIPTNFTISVTTEILPVSMTKTSVDCTMYICGDSTECSNLLLQYGSFCTQLNRALTGIAVEQDKNTQEVFAQVKQIYKTPPIKDFGGFNFSQILPDPSKPSKRSFIEDLLFNKVTLADAGFIKQYGDCLGDIAARDLICAQKFNGLTVLPPLLTDEMIAQYTSALLAGTITSGWTFGAGAALQIPFAMQMAYRFNGIGVTQNVLYENQKLIANQFNSAIGKIQDSLSSTASALGKLQDVVNQNAQALNTLVKQLSSNFGAISSVLNDILSRLDPPEAEVQIDRLITGRLQSLQTYVTQQLIRAAEIRASANLAATKMSECVLGQSKRVDFCGKGYHLMSFPQSAPHGVVFLHVTYVFAQEKNFTTAPAICHDGKAHFPREGVFVSNGTHWFVTQRNFYEPQIITTDNTFVSGNCDVVIGIVNNTVYDPLQPELDSFKEELDKYFKNHTSPDVDLGDISGINASVVNIQKEIDRLNEVAKNLNESLIDLQELGKYEQYIKGGGGSDIDPYKEFGSSYQLLNFLPLDFFPDLNALVDTATALYEEELTGREHCSPHHTAIRQALVCWDELTKLIAWMSSNITSEQVRTIIVNHVNDTWGLKVRQSLWFHLSCLTFGQHTVQEFLVSFGVWIRTPAPYRPPNAPILSTLPEHTVIC

SEQ ID NO: 6876 - protein, 1365 aa, Artificial Sequence
  SARS-CoV-2/China/WF0004/2020__EPI_ISL_413694 spike protein (1-1211)(K986P_V987P_P1069F) WhcAg construct
MFVFLVLLPLVSSQCVNLTTRTQLPPAYTNSFTRGVYYPDKVFRSSVLHSTQDLFLPFFSNVTWFHAIHVSGTNGTKRFDNPVLPFNDGVYFASTEKSNIIRGWIFGTTLDSKTQSLLIVNNATNVVIKVCEFQFCNDPFLGVYYHKNNKSWTESEFRVYSSANNCTFEYVSQPFLMDLEGKQGNFKNLREFVFKNIDGYFKIYSKHTPINLVRDLPQGFSALEPLVDLPIGINITRFQTLLALHRSYLTPGDSSSGWTAGAAAYYVGYLQPRTFLLKYNENGTITDAVDCALDPLSETKCTLKSFTVEKGIYQTSNFRVQPTESIVRFPNITNLCPFGEVFNATRFASVYAWNRKRISNCVADYSVLYNSASFSTFKCYGVSPTKLNDLCFTNVYADSFVIRGDEVRQIAPGQTGKIADYNYKLPDDFTGCVIAWNSNNLDSKVGGNYNYLYRLFRKSNLKPFERDISTEIYQAGSTPCNGVEGFNCYFPLQSYGFQPTNGVGYQPYRVVVLSFELLHAPATVCGPKKSTNLVKNKCVNFNFNGLTGTGVLTESNKKFLPFQQFGRDIADTTDAVRDPQTLEILDITPCSFGGVSVITPGTNTSNQVAVLYQDVNCTEVPVAIHADQLTPTWRVYSTGSNVFQTRAGCLIGAEHVNNSYECDIPIGAGICASYQTQTNSPRRARSVASQSIIAYTMSLGAENSVAYSNNSIAIPTNFTISVTTEILPVSMTKTSVDCTMYICGDSTECSNLLLQYGSFCTQLNRALTGIAVEQDKNTQEVFAQVKQIYKTPPIKDFGGFNFSQILPDPSKPSKRSFIEDLLFNKVTLADAGFIKQYGDCLGDIAARDLICAQKFNGLTVLPPLLTDEMIAQYTSALLAGTITSGWTFGAGAALQIPFAMQMAYRFNGIGVTQNVLYENQKLIANQFNSAIGKIQDSLSSTASALGKLQDVVNQNAQALNTLVKQLSSNFGAISSVLNDILSRLDPPEAEVQIDRLITGRLQSLQTYVTQQLIRAAEIRASANLAATKMSECVLGQSKRFDFCGKGYHLMSFPQSAPHGVVFLHVTYVFAQEKNFTTAPAICHDGKAHFPREGVFVSNGTHWFVTQRNFYEPQIITTDNTFVSGNCDVVIGIVNNTVYDPLQPELDSFKEELDKYFKNHTSPDVDLGDISGINASVVNIQKEIDRLNEVAKNLNESLIDLQELGKYEQYIKGGGGSDIDPYKEFGSSYQLLNFLPLDFFPDLNALVDTATALYEEELTGREHCSPHHTAIRQALVCWDELTKLIAWMSSNITSEQVRTIIVNHVNDTWGLKVRQSLWFHLSCLTFGQHTVQEFLVSFGVWIRTPAPYRPPNAPILSTLPEHTVIC

SEQ ID NO: 6877 - protein, 1365 aa, Artificial Sequence
  SARS-CoV-2/China/WF0028/2020__EPI_ISL_413791 spike protein (1-1211)(K986P_V987P_P1069F) WhcAg construct
MFVFLVLLPLVSSQCVNLTTRTQLPPAYTNSFTRGVYYPDKVFRSSVLHSTQDLFLPFFSNVTWFHAIHVSGTNGTKRFDNPVLPFNDGVYFASTEKSNIIRGWIFGTTLDSKTQSLLIVNNATNVVIKVCEFQFCNDPFLGVYYHKNNKSWMESEFRVYSSANNCTFEYVSQPFLMDLEGKQGNFKNLREFVFKNIDGYFKIYSKHTPINLVRDLPQGFSALEPLVDLPIGINITRFQTLLALHRSYLTPGDSSSGWTAGAAAYYVGYLQPRTFLLKYNENGTITDAVDCALDPLSETKCTLKSFTVEKGIYQTSNFRVQPTESIVRFPNITNLCPFGEVFNATRFASVYAWNRKRISNCVADYSVLYNSASFSTFKCYGVSPTKLNDLCFTNVYADSFVIRGDEVRQIAPGQTGKIADYNYKLPDDFTGCVIAWNSNNLDSKVGGNYNYLYRLFRKSNLKPFERDISTEIYQAGSTPCNGVEGFNCYFPLQSYGFQPTNGVGYQPYRVVVLSFELLHAPATVCGPKKSTNLVKNKCVNFNFNGLTGTGVLTESNKKFLPFQQFGRDIADTTDAVRDPQTLEILDITPCSFGGVSVITPGTNTSNQVAVLYQDVNCTEVPVAIHADQLTPTWRVYSTGSNVFQTRAGCLIGAEHVNNSYECDIPIGAGICASYQTQTNSPRRARSVASQSIIAYTMSLGAENSVAYSNNSIAIPTNFTISVTTEILPVSMTKTSVDCTMYICGDSTECSNLLLQYGSFCTQLNRALTGIAVEQDKNTQEVFAQVKQIYKTPPIKDFGGFNFSQILPDPSKPSKRSFIEDLLFNKVTLADAGFIKQYGDCLGDIAARDLICAQKFNGLTVLPPLLTDEMIAQYTSALLAGTITSGWTFGAGAALQIPFAMQMAYRFNGIGVTQNVLYENQKLIANQFNSAIGKIQDSLSSTASALGKLQDVVNQNAQALNTLVKQLSSNFGAISSVLNDILSRLDPPEAEVQIDRLITGRLQSLQTYVTQQLIRAAEIRASANLAATKMSECVLGQSKRVDFCGKGYHLMSFPQSAPHGVVFLHVTYVFAQEKNFTTAPAICHDGKAHFPREGVFVSNGTHWFVTQRNFYEPQIITTDNTFVSGNCDVVIGIVNNTVYDPLQPELESFKEELDKYFKNHTSPDVDLGDISGINASVVNIQKEIDRLNEVAKNLNESLIDLQELGKYEQYIKGGGGSDIDPYKEFGSSYQLLNFLPLDFFPDLNALVDTATALYEEELTGREHCSPHHTAIRQALVCWDELTKLIAWMSSNITSEQVRTIIVNHVNDTWGLKVRQSLWFHLSCLTFGQHTVQEFLVSFGVWIRTPAPYRPPNAPILSTLPEHTVIC

SEQ ID NO: 6878 - protein, 1365 aa, Artificial Sequence
  SARS-CoV-2/2019-nCoV/USA-CruiseA-18/2020__MT159716.1 spike protein (1-1211)(K986P_V987P_P1069F) WhcAg construct
MFVFLVLLPLVSSQCVNLTTRTQLPPAYTNSFTRGVYYPDKVFRSSVLHSTQDLFLPFFSNVTWFHAIHVSGTNGTKRFDNPVLPFNDGVYFASTEKSNIIRGWIFGTTLDSKTQSLLIVNNATNVVIKVCEFQFCNDPFLGVYYHKNNKSWMESELRVYSSANNCTFEYVSQPFLMDLEGKQGNFKNLREFVFKNIDGYFKIYSKHTPINLVRDLPQGFSALEPLVDLPIGINITRFQTLLALHRSYLTPGDSSSGWTAGAAAYYVGYLQPRTFLLKYNENGTITDAVDCALDPLSETKCTLKSFTVEKGIYQTSNFRVQPTESIVRFPNITNLCPFGEVFNATRFASVYAWNRKRISNCVADYSVLYNSASFSTFKCYGVSPTKLNDLCFTNVYADSFVIRGDEVRQIAPGQTGKIADYNYKLPDDFTGCVIAWNSNNLDSKVGGNYNYLYRLFRKSNLKPFERDISTEIYQAGSTPCNGVEGFNCYFPLQSYGFQPTNGVGYQPYRVVVLSFELLHAPATVCGPKKSTNLVKNKCVNFNFNGLTGTGVLTESNKKFLPFQQFGRDIADTTDAVRDPQTLEILDITPCSFGGVSVITPGTNTSNQVAVLYQDVNCTEVPVAIHADQLTPTWRVYSTGSNVFQTRAGCLIGAEHVNNSYECDIPIGAGICASYQTQTNSPRRARSVASQSIIAYTMSLGAENSVAYSNNSIAIPTNFTISVTTEILPVSMTKTSVDCTMYICGDSTECSNLLLQYGSFCTQLNRALTGIAVEQDKNTQEVFAQVKQIYKTPPIKDFGGFNFSQILPDPSKPSKRSFIEDLLFNKVTLADAGFIKQYGDCLGDIAARDLICAQKFNGLTVLPPLLTDEMIAQYTSALLAGTITSGWTFGAGAALQIPFAMQMAYRFNGIGVTQNVLYENQKLIANQFNSAIGKIQDSLSSTASALGKLQDVVNQNAQALNTLVKQLSSNFGAISSVLNDILSRLDPPEAEVQIDRLITGRLQSLQTYVTQQLIRAAEIRASANLAATKMSECVLGQSKRVDFCGKGYHLMSFPQSAPHGVVFLHVTYVFAQEKNFTTAPAICHDGKAHFPREGVFVSNGTHWFVTQRNFYEPQIITTDNTFVSGNCDVVIGIVNNTVYDPLQPELDSFKEELDKYFKNHTSPDVDLGDISGINASVVNIQKEIDRLNEVAKNLNESLIDLQELGKYEQYIKGGGGSDIDPYKEFGSSYQLLNFLPLDFFPDLNALVDTATALYEEELTGREHCSPHHTAIRQALVCWDELTKLIAWMSSNITSEQVRTIIVNHVNDTWGLKVRQSLWFHLSCLTFGQHTVQEFLVSFGVWIRTPAPYRPPNAPILSTLPEHTVIC

SEQ ID NO: 6879 - protein, 1365 aa, Artificial Sequence
  SARS-CoV-2/SARS-CoV-2/Yunnan-01/human/2020/CHN__MT049951.1 spike protein (1-1211)(K986P_V987P_P1069F) WhcAg construct
MFVFLVLLPLVSSQCVNLTTRTQLPPANTNSFTRGVYYPDKVFRSSVLHSTQDLFLPFFSNVTWFHAIHVSGTNGTKRFDNPVLPFNDGVYFASTEKSNIIRGWIFGTTLDSKTQSLLIVNNATNVVIKVCEFQFCNDPFLGVYYHKNNKSWMESEFRVYSSANNCTFEYVSQPFLMDLEGKQGNFKNLREFVFKNIDGYFKIYSKHTPINLVRDLPQGFSALEPLVDLPIGINITRFQTLLALHRSYLTPGDSSSGWTAGAAAYYVGYLQPRTFLLKYNENGTITDAVDCALDPLSETKCTLKSFTVEKGIYQTSNFRVQPTESIVRFPNITNLCPFGEVFNATRFASVYAWNRKRISNCVADYSVLYNSASFSTFKCYGVSPTKLNDLCFTNVYADSFVIRGDEVRQIAPGQTGKIADYNYKLPDDFTGCVIAWNSNNLDSKVGGNYNYLYRLFRKSNLKPFERDISTEIYQAGSTPCNGVEGFNCYFPLQSYGFQPTNGVGYQPYRVVVLSFELLHAPATVCGPKKSTNLVKNKCVNFNFNGLTGTGVLTESNKKFLPFQQFGRDIADTTDAVRDPQTLEILDITPCSFGGVSVITPGTNTSNQVAVLYQDVNCTEVPVAIHADQLTPTWRVYSTGSNVFQTRAGCLIGAEHVNNSYECDIPIGAGICASYQTQTNSPRRARSVASQSIIAYTMSLGAENSVAYSNNSIAIPTNFTISVTTEILPVSMTKTSVDCTMYICGDSTECSNLLLQYGSFCTQLNRALTGIAVEQDKNTQEVFAQVKQIYKTPPIKDFGGFNFSQILPDPSKPSKRSFIEDLLFNKVTLADAGFIKQYGDCLGDIAARDLICAQKFNGLTVLPPLLTDEMIAQYTSALLAGTITSGWTFGAGAALQIPFAMQMAYRFNGIGVTQNVLYENQKLIANQFNSAIGKIQDSLSSTASALGKLQDVVNQNAQALNTLVKQLSSNFGAISSVLNDILSRLDPPEAEVQIDRLITGRLQSLQTYVTQQLIRAAEIRASANLAATKMSECVLGQSKRVDFCGKGYHLMSFPQSAPHGVVFLHVTYVFAQEKNFTTAPAICHDGKAHFPREGVFVSNGTHWFVTQRNFYEPQIITTDNTFVSGNCDVVIGIVNNTVYDPLQPELDSFKEELDKYFKNHTSPDVDLGDISGINASVVNIQKEIDRLNEVAKNLNESLIDLQELGKYEQYIKGGGGSDIDPYKEFGSSYQLLNFLPLDFFPDLNALVDTATALYEEELTGREHCSPHHTAIRQALVCWDELTKLIAWMSSNITSEQVRTIIVNHVNDTWGLKVRQSLWFHLSCLTFGQHTVQEFLVSFGVWIRTPAPYRPPNAPILSTLPEHTVIC

SEQ ID NO: 6880 - protein, 1365 aa, Artificial Sequence
  SARS-CoV-2/USA/WA-UW292/2020__EPI_ISL_418077 spike protein (1-1211)(K986P_V987P_P1069F) WhcAg construct
MFVFLVLLPLVSSQCVNLTTRTQLPPAYTNSFTRGVYYPDKVFRSSVLHSTQDLFLPFFSNVTWFHAIHVSGTNGTKRFDNPVLPFNDGVYFASTEKSNIIRGWIFGTTLDSKTQSLLIVNNATNVVIKVCEFQFCNDPFLGVYYHKNNKSWMESEFRVYSSANNCTFEYVSQPFLMDLEGKQGNFKNLREFVFKNIDGYFKIYSKHTPINLVRDLPQGFSALEPLVDLPIGINITRFQTLLALHRSYLTPGDSSSGWTAGAAAYYVGYLQPRTFLLKYNENGTITDAVDCALDPLSETKCTLKSFTVEKGIYQTSNFRVQPTESIVRFPNITNLCPFGEVFNATRFASVYAWNRKRISNCVADYSVLYNSASFSTFKCYGVSPTKLNDLCFTNVYADSFVIRGDEVRQIAPGQTGKIADYNYKLPDDFTGCVIAWNSNNLDSKVGGNYNYLYRLFRKSNLKPFERDISTEIYQASSTPCNGVEGFNCYFPLQSYGFQPTNGVGYQPYRVVVLSFELLHAPATVCGPKKSTNLVKNKCVNFNFNGLTGTGVLTESNKKFLPFQQFGRDIADTTDAVRDPQTLEILDITPCSFGGVSVITPGTNTSNQVAVLYQDVNCTEVPVAIHADQLTPTWRVYSTGSNVFQTRAGCLIGAEHVNNSYECDIPIGAGICASYQTQTNSPRRARSVASQSIIAYTMSLGAENSVAYSNNSIAIPTNFTISVTTEILPVSMTKTSVDCTMYICGDSTECSNLLLQYGSFCTQLNRALTGIAVEQDKNTQEVFAQVKQIYKTPPIKDFGGFNFSQILPDPSKPSKRSFIEDLLFNKVTLADAGFIKQYGDCLGDIAARDLICAQKFNGLTVLPPLLTDEMIAQYTSALLAGTITSGWTFGAGAALQIPFAMQMAYRFNGIGVTQNVLYENQKLIANQFNSAIGKIQDSLSSTASALGKLQDVVNQNAQALNTLVKQLSSNFGAISSVLNDILSRLDPPEAEVQIDRLITGRLQSLQTYVTQQLIRAAEIRASANLAATKMSECVLGQSKRVDFCGKGYHLMSFPQSAPHGVVFLHVTYVFAQEKNFTTAPAICHDGKAHFPREGVFVSNGTHWFVTQRNFYEPQIITTDNTFVSGNCDVVIGIVNNTVYDPLQPELDSFKEELDKYFKNHTSPDVDLGDISGINASVVNIQKEIDRLNEVAKNLNESLIDLQELGKYEQYIKGGGGSDIDPYKEFGSSYQLLNFLPLDFFPDLNALVDTATALYEEELTGREHCSPHHTAIRQALVCWDELTKLIAWMSSNITSEQVRTIIVNHVNDTWGLKVRQSLWFHLSCLTFGQHTVQEFLVSFGVWIRTPAPYRPPNAPILSTLPEHTVIC

SEQ ID NO: 6881 - protein, 1365 aa, Artificial Sequence
  SARS-CoV-2/Iceland/192/2020__EPI_ISL_417819 spike protein (1-1211)(K986P_V987P_P1069F) WhcAg construct
MFVFFVLLPLVSSQCVNLTTRTQLPPAYTNSFTRGVYYPDKVFRSSVLHSTQDLFLPFFSNVTWFHAIHVSGTNGTKRFDNPVLPFNDGVYFASTEKSNIIRGWIFGTTLDSKTQSLLIVNNATNVVIKVCEFQFCNDPFLGVYYHKNNKSWMESEFRVYSSANNCTFEYVSQPFLMDLEGKQGNFKNLREFVFKNIDGYFKIYSKHTPINLVRDLPQGFSALEPLVDLPIGINITRFQTLLALHRSYLTPGDSSSGWTAGAAAYYVGYLQPRTFLLKYNENGTITDAVDCALDPLSETKCTLKSFTVEKGIYQTSNFRVQPTESIVRFPNITNLCPFGEVFNATRFASVYAWNRKRISNCVADYSVLYNSASFSTFKCYGVSPTKLNDLCFTNVYADSFVIRGDEVRQIAPGQTGKIADYNYKLPDDFTGCVIAWNSNNLDSKVGGNYNYLYRLFRKSNLKPFERDISTEIYQAGSTPCNGVEGFNCYFPLQSYGFQPTNGVGYQPYRVVVLSFELLHAPATVCGPKKSTNLVKNKCVNFNFNGLTGTGVLTESNKKFLPFQQFGRDIADTTDAVRDPQTLEILDITPCSFGGVSVITPGTNTSNQVAVLYQGVNCTEVPVAIHADQLTPTWRVYSTGSNVFQTRAGCLIGAEHVNNSYECDIPIGAGICASYQTQTNSPRRARSVASQSIIAYTMSLGAENSVAYSNNSIAIPTNFTISVTTEILPVSMTKTSVDCTMYICGDSTECSNLLLQYGSFCTQLNRALTGIAVEQDKNTQEVFAQVKQIYKTPPIKDFGGFNFSQILPDPSKPSKRSFIEDLLFNKVTLADAGFIKQYGDCLGDIAARDLICAQKFNGLTVLPPLLTDEMIAQYTSALLAGTITSGWTFGAGAALQIPFAMQMAYRFNGIGVTQNVLYENQKLIANQFNSAIGKIQDSLSSTASALGKLQDVVNQNAQALNTLVKQLSSNFGAISSVLNDILSRLDPPEAEVQIDRLITGRLQSLQTYVTQQLIRAAEIRASANLAATKMSECVLGQSKRVDFCGKGYHLMSFPQSAPHGVVFLHVTYVFAQEKNFTTAPAICHDGKAHFPREGVFVSNGTHWFVTQRNFYEPQIITTDNTFVSGNCDVVIGIVNNTVYDPLQPELDSFKEELDKYFKNHTSPDVDLGDISGINASVVNIQKEIDRLNEVAKNLNESLIDLQELGKYEQYIKGGGGSDIDPYKEFGSSYQLLNFLPLDFFPDLNALVDTATALYEEELTGREHCSPHHTAIRQALVCWDELTKLIAWMSSNITSEQVRTIIVNHVNDTWGLKVRQSLWFHLSCLTFGQHTVQEFLVSFGVWIRTPAPYRPPNAPILSTLPEHTVIC

SEQ ID NO: 6882 - protein, 1365 aa, Artificial Sequence
  SARS-CoV-2/Belgium/ULG-6939/2020__EPI_ISL_417020 spike protein (1-1211)(K986P_V987P_P1069F) WhcAg construct
MFVFLVLLPLVSSQCVNLTTRTQLPPAYTNSFTRGVYYPDKVFRSSVLHSTQDLFLPFFSNVTWFHAIHVSGTNGTKRFDNPVLPFNDGVYFASTEKSNIIRGWIFGTTLDSKTQSLLIVNNATNVVIKVCEFQFCNDPFLGVYYHKNNKSWMESEFRVYSSANNCTFEYVSQPFLMDLEGKQGNFKNLREFVFKNIDGYFKIYSKHTPINLVRDLPQGFSALEPLVDLPIGINITRFQTLLALHRSYLTPGDSSSGWTAGAAAYYVGYLQPRTFLLKYNENGTITDAVDCALDPLSETKCTLKSFTVEKGIYQTSNFRVQPTESIVRFPNITNLCPFGEVFNATRFASVYAWNRKRISNCVADYSVLYNSASFSTFKCYGVSPTKLNDLCFTNVYADSFVIRGDEVRQIAPGQTGKIADYNYKLPDDFTGCVIAWNSNNLDSKVGGNYNYLYRLFRKSNLKPFERDISTEIYQAGSTPCNGVEGFNCYFPLQSYGFQPTNGVGYQPYRVVVLSFELLHAPATVCGPKKSTNLVKNKCVNFNFNGLTGTGVLTESNKKFLPFQQFGRDIADTTDAVRDPQTLEILDITPCSFGGVSVITPGTNTSNQVAVLYQGVNCTEVPVAIHADQLTPTWRVYSTGSNVFQTRAGCLIGAEHVNNSYECDIPIGAGICASYQTQTNSPRRARSVASQSIIAYTMSLGAENSVVYSNNSIAIPTNFTISVTTEILPVSMTKTSVDCTMYICGDSTECSNLLLQYGSFCTQLNRALTGIAVEQDKNTQEVFAQVKQIYKTPPIKDFGGFNFSQILPDPSKPSKRSFIEDLLFNKVTLADAGFIKQYGDCLGDIAARDLICAQKFNGLTVLPPLLTDEMIAQYTSALLAGTITSGWTFGAGAALQIPFAMQMAYRFNGIGVTQNVLYENQKLIANQFNSAIGKIQDSLSSTASALGKLQDVVNQNAQALNTLVKQLSSNFGAISSVLNDILSRLDPPEAEVQIDRLITGRLQSLQTYVTQQLIRAAEIRASANLAATKMSECVLGQSKRVDFCGKGYHLMSFPQSAPHGVVFLHVTYVFAQEKNFTTAPAICHDGKAHFPREGVFVSNGTHWFVTQRNFYEPQIITTDNTFVSGNCDVVIGIVNNTVYDPLQPELDSFKEELDKYFKNHTSPDVDLGDISGINASVVNIQKEIDRLNEVAKNLNESLIDLQELGKYEQYIKGGGGSDIDPYKEFGSSYQLLNFLPLDFFPDLNALVDTATALYEEELTGREHCSPHHTAIRQALVCWDELTKLIAWMSSNITSEQVRTIIVNHVNDTWGLKVRQSLWFHLSCLTFGQHTVQEFLVSFGVWIRTPAPYRPPNAPILSTLPEHTVIC

SEQ ID NO: 6883 - protein, 1365 aa, Artificial Sequence
  SARS-CoV-2/France/HF2496/2020__EPI_ISL_418231 spike protein (1-1211)(K986P_V987P_P1069F) WhcAg construct
MFVFLVLLPLVSSQCVNLTTRTQLPPAYTNSFTRGVYYPDKVFRSSVLHSTQDLFLPFFSNVTWFHAIHVSGTNGTKRFDNPVLPFNDGVYFASTEKSNIIRGWIFGTTLDSKTQSLLIVNNATNVVIKVCEFQFCNDPFLGVYYHKNNKSWMESEFRVYSSANNCTFEYVSQPFLMDLEGKQGNFKNLREFVFKNIDGYFKIYSKHTPINLVRDLPQGFSALEPLVDLPIGINITRFQTLLALHRSYLTPGDSSSGWTAGAAAYYVGYLQPRTFLLKYNENGTITDAVDCALDPLSETKCTLKSFTVEKGIYQTSNFRVQPTESIVRFPNITNLCPFGEVFNATRFASVYAWNRKRISNCVADYSVLYNSASFSTFKCYGVSPTKLNDLCFTNVYADSFVIRGDEVRQIAPGQTGKIADYNYKLPDDFTGCVIAWNSNNLDSKVGGNYNYLYRLFRKSNLKPFERDISTEIYQAGSTPCNGVEGFNCYFPLQSYGFQPTNGVGYQPYRVVVLSFELLHAPATVCGPKKSTNLVKNKCVNFNFNGLTGTGVLTESNKKFLPFQQFGRDIADTTDAVRDPQTLEILDITPCSFGGVSVITPGTNTSNQVAVLYQGVNCTEVPVAIHADQLTPTWRVYSTGSNVFQTRAGCLIGAEHVNNSYECDIPIGAGICASYQTQTNSPRRARSVASQSIIAYTMSLGAENSVAYSNNSIAIPTNFTISVTTEILPVSMTKTSVDCTMYICGDSTECSNLLLQYGSFCTQLNRALTGIAVEQDKNTQEVFAQVKQIYKTPPIKDFGGFNFSQILPDPSKPSKRSFIEDLLFNKVTLADAGFIKQYGDCLGDIVARDLICAQKFNGLTVLPPLLTDEMIAQYTSALLAGTITSGWTFGAGAALQIPFAMQMAYRFNGIGVTQNVLYENQKLIANQFNSAIGKIQDSLSSTASALGKLQDVVNQNAQALNTLVKQLSSNFGAISSVLNDILSRLDPPEAEVQIDRLITGRLQSLQTYVTQQLIRAAEIRASANLAATKMSECVLGQSKRVDFCGKGYHLMSFPQSAPHGVVFLHVTYVFAQEKNFTTAPAICHDGKAHFPREGVFVSNGTHWFVTQRNFYEPQIITTDNTFVSGNCDVVIGIVNNTVYDPLQPELDSFKEELDKYFKNHTSPDVDLGDISGINASVVNIQKEIDRLNEVAKNLNESLIDLQELGKYEQYIKGGGGSDIDPYKEFGSSYQLLNFLPLDFFPDLNALVDTATALYEEELTGREHCSPHHTAIRQALVCWDELTKLIAWMSSNITSEQVRTIIVNHVNDTWGLKVRQSLWFHLSCLTFGQHTVQEFLVSFGVWIRTPAPYRPPNAPILSTLPEHTVIC

SEQ ID NO: 6884 - protein, 1365 aa, Artificial Sequence
  SARS-CoV-2/USA/WA-UW291/2020__EPI_ISL_418076 spike protein (1-1211)(K986P_V987P_P1069F) WhcAg construct
MFVFLVLLPLVSSQCVNLTTRTQLPPAYTNSFTRGVYYPDKVFRSSVLHSTQDLFLPFFSNVTWFHAIHVSGTNGTKRFDNPVLPFNDGVYFASTEKSNIIRGWIFGTTLDSKTQSLLIVNNATNVVIKVCEFQFCNDPFLGVYYHKNNKSWMESEFRVYSSANNCTFEYVSQPFLMDLEGKQGNFKNLREFVFKNIDGYFKIYSKHTPINLVRDLPQGFSALEPLVDLPIGINITRFQTLLALHRSYLTPGDSSSGWTAGAAAYYVGYLQPRTFLLKYNENGTITDAVDCALDPLSETKCTLKSFTVEKGIYQTSNFRVQPTESIVRFPNITNLCPFGEVFNATRFASVYAWNRKRISNCVADYSVLYNSASFSTFKCYGVSPTKLNDLCFTNVYADSFVIRGDEVRQIAPGQTGKIADYNYKLPDDFTGCVIAWNSNNLDSKVGGNYNYLYRLFRKSNLKPFERDISTEIYQAGSTPCNGVEGFNCYFPLQSYGFQPTNGVGYQPYRVVVLSFELLHAPATVCGPKKSTNLVKNKCVNFNFNGLTGTGVLTESNKKFLPFQQFGRDIADTTDAVRDPQTLEILDITPCSFGGVSVITPGTNTSNQVAVLYQGVNCTEVPVAIHADQLTPTWRVYSTGSNVFQTRAGCLIGAEHVNNSYECDIPIGAGICASYQTQTNSPRRARSVASQSIIAYTMSLGAENSVAYSNNSIAIPTNFTISVTTEILPVSMTKTSVDCTMYICGDSTECSNLLLQYGSFCTQLNRALTGIAVEQDKNTQEVFAQVKQIYKTPPIKDFGGFNFSQILPDPSKPSKRSFIEDLLFNKVTLADAGFIKQYGDCLGDIAARDLICAQKFNGLTVLPPLLTDEMIAQYTSALLAGTITSGWTFGAGAALQIPFAMQMAYRFNGIGVTQNVLYENQKLIANQFNSAIGKIQYSLSSTASALGKLQDVVNQNAQALNTLVKQLSSNFGAISSVLNDILSRLDPPEAEVQIDRLITGRLQSLQTYVTQQLIRAAEIRASANLAATKMSECVLGQSKRVDFCGKGYHLMSFPQSAPHGVVFLHVTYVFAQEKNFTTAPAICHDGKAHFPREGVFVSNGTHWFVTQRNFYEPQIITTDNTFVSGNCDVVIGIVNNTVYDPLQPELDSFKEELDKYFKNHTSPDVDLGDISGINASVVNIQKEIDRLNEVAKNLNESLIDLQELGKYEQYIKGGGGSDIDPYKEFGSSYQLLNFLPLDFFPDLNALVDTATALYEEELTGREHCSPHHTAIRQALVCWDELTKLIAWMSSNITSEQVRTIIVNHVNDTWGLKVRQSLWFHLSCLTFGQHTVQEFLVSFGVWIRTPAPYRPPNAPILSTLPEHTVIC

SEQ ID NO: 6885 - protein, 1365 aa, Artificial Sequence; identical to SEQ ID NO: 6848
  SARS-CoV-2/Portugal/PT0034/2020__EPI_ISL_418019 spike protein (1-1211)(K986P_V987P_P1069F) WhcAg construct

SEQ ID NO: 6886 - protein, 1365 aa, Artificial Sequence
  SARS-CoV-2/Iceland/202/2020__EPI_ISL_417750 spike protein (1-1211)(K986P_V987P_P1069F) WhcAg construct
MFVFLVLLPLVSSQCVNLTTRTQLPPAYTNSFTRGVYYPDKVFRSSVLHSTQDLFLPFFSNVTWFHAIHVSGTNGTKRFDNPVLPFNDGVYFASTEKSNIIRGWIFGTTLDSKTQSLLIVNNATNVVIKVCEFQFCNDPFLGVYYHKNNKSWMESEFRVYSSANNCTFEYVSQPFLMDLEGKQGNFKNLREFVFKNIDGYFKIYSKHTPINLVRDLPQGFSALEPLVDLPIGINITRFQTLLALHRSYLTPGDSSSGWTAGAAAYYVGYLQPRTFLLKYNENGTITDAVDCALDPLSETKCTLKSFTVEKGIYQTSNFRVQPTESIVRFPNITNLCPFGEVFNATRFASVYAWNRKRISNCVADYSVLYNSASFSTFKCYGVSPTKLNDLCFTNVYADSFVIRGDEVRQIAPGQTGKIADYNYKLPDDFTGCVIAWNSNNLDSKVGGNYNYLYRLFRKSNLKPFERDISTEIYQAGSTPCNGVEGFNCYFPLQSYGFQPTNGVGYQPYRVVVLSFELLHAPATVCGPKKSTNLVKNKCVNFNFNGLTGTGVLTESNKKFLPFQQFGRDIADTTDAVRDPQTLEILDITPCSFGGVSVITPGTNTSNQVAVLYQDVNCTEVPVAIHADQLTPTWRVYSTGSNVFQTRAGCLIGAEHVNNSYECDIPIGAGICASYQTQTNSPRRARSVASQSIIAYTMSLGAENSVAYSNNSIAIPTNFTISVTTEILPVSMTKTSVDCTMYICGDSTECSNLLLQYGSFCTQLNRALTGIAVEQDKNTQEVFAQVKQIYKTPPIKDFGGFNFSQILPDPSKPSKRSFIEDLLFNKVTLADAGFIKQYGDCLGDIAARDLICAQKFNGLTVLPPLLTDEMIAQYTSALLAGTITSGWTFGAGAALQIPFAMQMAYRFNGIGVTQNVLYENQKLIANQFNSAIGKIQDSLSSTASALGKLQDVVNQNAQALNTLVKQLSSNFGAISSVLNDILSRLDPPEAEVQIDRLITGRLQSLQTYVTQQLIRAAEIRASANLAATKMSECVLGQSKRVDFCGKGYHLMSFPQSAPHGVVFLHVTYVFAQEKNFTTAPAICHDGKAHFPREGVFVSNGTHWFVTQRNFYEPQIITTDNTFVSGNCDVVIGIVNNTVYDPLQPELDSFKEELDKYFKNHTSPDVDLGDIPGINASVVNIQKEIDRLNEVAKNLNESLIDLQELGKYEQYIKGGGGSDIDPYKEFGSSYQLLNFLPLDFFPDLNALVDTATALYEEELTGREHCSPHHTAIRQALVCWDELTKLIAWMSSNITSEQVRTIIVNHVNDTWGLKVRQSLWFHLSCLTFGQHTVQEFLVSFGVWIRTPAPYRPPNAPILSTLPEHTVIC

SEQ ID NO: 6887 - protein, 1365 aa, Artificial Sequence
  SARS-CoV-2/USA/WA-UW261/2020__EPI_ISL_418046 spike protein (1-1211)(K986P_V987P_P1069F) WhcAg construct
MFVFLVLLPLVSSQCVNLTTRTQLPPAYTNSFTRGVYYPDKVFRSSVLHSTQDLFLPFFSNVTWFHAIHVSGTNGTKRFDNPVLPFNDGVYFASTEKSNIIRGWIFGTTLDSKTQSLLIVNNATNVVIKVCEFQFCNDPFLGVYYHKNNKSWMESEFRVYSSANNCTFEYVSQPFLMDLEGKQGNFKNLREFVFKNIDGYFKIYSKHTPINLVRDLPQGFSALEPLVDLPIGINITRFQTLLALHRSYLTPGDSSSGWTAGAAAYYVGYLQPRTFLLKYNENGTITDAVDCALDPLSETKCTLKSFTVEKGIYQTSNFRVQPTESIVRFPNITNLCPFGEVFNATRFTSVYAWNRKRISNCVADYSVLYNSASFSTFKCYGVSPTKLNDLCFTNVYADSFVIRGDEVRQIAPGQTGKIADYNYKLPDDFTGCVIAWNSNNLDSKVGGNYNYLYRLFRKSNLKPFERDISTEIYQAGSTPCNGVEGFNCYFPLQSYGFQPTNGVGYQPYRVVVLSFELLHAPATVCGPKKSTNLVKNKCVNFNFNGLTGTGVLTESNKKFLPFQQFGRDIADTTDAVRDPQTLEILDITPCSFGGVSVITPGTNTSNQVAVLYQDVNCTEVPVAIHADQLTPTWRVYSTGSNVFQTRAGCLIGAEHVNNSYECDIPIGAGICASYQTQTNSPRRARSVASQSIIAYTMSLGAENSVAYSNNSIAIPTNFTISVTTEILPVSMTKTSVDCTMYICGDSTECSNLLLQYGSFCTQLNRALTGIAVEQDKNTQEVFAQVKQIYKTPPIKDFGGFNFSQILPDPSKPSKRSFIEDLLFNKVTLADAGFIKQYGDCLGDIAARDLICAQKFNGLTVLPPLLTDEMIAQYTSALLAGTITSGWTFGAGAALQIPFAMQMAYRFNGIGVTQNVLYENQKLIANQFNSAIGKIQDSLSSTASALGKLQDVVNQNAQALNTLVKQLSSNFGAISSVLNDILSRLDPPEAEVQIDRLITGRLQSLQTYVTQQLIRAAEIRASANLAATKMSECVLGQSKRVDFCGKGYHLMSFPQSAPHGVVFLHVTYVFAQEKNFTTAPAICHDGKAHFPREGVFVSNGTHWFVTQRNFYEPQIITTDNTFVSGNCDVVIGIVNNTVYDPLQPELDSFKEELDKYFKNHTSPDVDLGDISGINASVVNIQKEIDRLNEVAKNLNESLIDLQELGKYEQYIKGGGGSDIDPYKEFGSSYQLLNFLPLDFFPDLNALVDTATALYEEELTGREHCSPHHTAIRQALVCWDELTKLIAWMSSNITSEQVRTIIVNHVNDTWGLKVRQSLWFHLSCLTFGQHTVQEFLVSFGVWIRTPAPYRPPNAPILSTLPEHTVIC

SEQ ID NO: 6888 - protein, 1365 aa, Artificial Sequence
  SARS-CoV-2/Portugal/PT0035/2020__EPI_ISL_418020 spike protein (1-1211)(K986P_V987P_P1069F) WhcAg construct
MFVFLVLLPLVSSQCVNLTTRTQLPPAYTNSFTRGVYYPDKVFRSSVLHSTQDLFLPFFSNVTWFHAIHVSGTNGTKRFDNPVLPFNDGVYFASTEKSNIIRGWIFGTTLDSKTQSLLIVNNATNVVIKVCEFQFCNDPFLGVYYHKNNKSWMESEFRVYSSANNCTFEYVSQPFLMDLEGKQGNFKNLREFVFKNIDGYFKIYSKHTPINLVRDLPQGFSALEPLVDLPIGINITRFQTLLALHRSYLTPGDSSSGWTAGAAAYYVGYLQPRTFLLKYNENGTITDAVDCALDPLSETKCTLKSFTVEKGIYQTSNFRVQPTESIVRFPNITNLCPFGEVFNATRFASVYAWNRKRISNCVADYSVLYNSASFSTFKCYGVSPTKLNDLCFTNVYADSFVIRGDEVRQIAPGQTGKIADYNYKLPDDFTGCVIAWNSNNLDSKVGGNYNYLYRLFRKSNLKPFERDISTEIYQAGSTPCNGVEGFNCYFPLQSYGFQPTNGVGYQPYRVVVLSFELLHAPATVCGPKKSTNLVKNKCVNFNFNGLTGTGVLTESNKKFLPFQQFGRDIADTTDAVRDPQTLEILDITPCSFGGVSVITPGTNTSNQVAVLYQDVNCTEVPVAIHADQLTPTWRVYSTGSNVFQTRAGCLIGAEHVNNSYECDIPIGAGICASYQTQTNSPRRARSVASQSIIAYTMSLGAENSVAYSNNSIAIPTNFTISVTTEILPVSMTKTSVDCTMYICGDSTECSNLLLQYGSFCTQLNRALTGIAVEQDKNTQEVFAQVKQIYKTPPIKDFGGFNFSQILPDPSKPSKRSFIEDLLFNKVTLADAGFIKQYGDCLGDISARDLICAQKFNGLTVLPPLLTDEMIAQYTSALLAGTITSGWTFGAGAALQIPFAMQMAYRFNGIGVTQNVLYENQKLIANQFNSAIGKIQDSLSSTASALGKLQDVVNQNAQALNTLVKQLSSNFGAISSVLNDILSRLDPPEAEVQIDRLITGRLQSLQTYVTQQLIRAAEIRASANLAATKMSECVLGQSKRVDFCGKGYHLMSFPQSAPHGVVFLHVTYVFAQEKNFTTAPAICHDGKAHFPREGVFVSNGTHWFVTQRNFYEPQIITTDNTFVSGNCDVVIGIVNNTVYDPLQPELDSFKEELDKYFKNHTSPDVDLGDISGINASVVNIQKEIDRLNEVAKNLNESLIDLQELGKYEQYIKGGGGSDIDPYKEFGSSYQLLNFLPLDFFPDLNALVDTATALYEEELTGREHCSPHHTAIRQALVCWDELTKLIAWMSSNITSEQVRTIIVNHVNDTWGLKVRQSLWFHLSCLTFGQHTVQEFLVSFGVWIRTPAPYRPPNAPILSTLPEHTVIC

SEQ ID NO: 6889 - protein, 1365 aa, Artificial Sequence
  SARS-CoV-2/USA/NY-NYUMC7/2020__EPI_ISL_418192 spike protein (1-1211)(K986P_V987P_P1069F) WhcAg construct
MFVFLVLLPLVSSQCVNLTTRTQLPPAYTNSFTRGVYYPDKVFRSSVLHSTQDLFLPFFSNVTWFHAIHVSGTNGTKRFDNPVLPFNDGVYFASTEKSNIIRGWIFGTTLDSKTQSLLIVNNATNVVIKVCEFQFCNDPFLGVYHHKNNKSWMESEFRVYSSANNCTFEYVSQPFLMDLEGKQGNFKNLREFVFKNIDGYFKIYSKHTPINLVRDLPQGFSALEPLVDLPIGINITRFQTLLALHRSYLTPGDSSSGWTAGAAAYYVGYLQPRTFLLKYNENGTITDAVDCALDPLSETKCTLKSFTVEKGIYQTSNFRVQPTESIVRFPNITNLCPFGEVFNATRFASVYAWNRKRISNCVADYSVLYNSASFSTFKCYGVSPTKLNDLCFTNVYADSFVIRGDEVRQIAPGQTGKIADYNYKLPDDFTGCVIAWNSNNLDSKVGGNYNYLYRLFRKSNLKPFERDISTEIYQAGSTPCNGVEGFNCYFPLQSYGFQPTNGVGYQPYRVVVLSFELLHAPATVCGPKKSTNLVKNKCVNFNFNGLTGTGVLTESNKKFLPFQQFGRDIADTTDAVRDPQTLEILDITPCSFGGVSVITPGTNTSNQVAVLYQGVNCTEVPVAIHADQLTPTWRVYSTGSNVFQTRAGCLIGAEHVNNSYECDIPIGAGICASYQTQTNSPRRARSVASQSIIAYTMSLGAENSVAYSNNSIAIPTNFTISVTTEILPVSMTKTSVDCTMYICGDSTECSNLLLQYGSFCTQLNRALTGIAVEQDKNTQEVFAQVKQIYKTPPIKDFGGFNFSQILPDPSKPSKRSFIEDLLFNKVTLADAGFIKQYGDCLGDIAARDLICAQKFNGLTVLPPLLTDEMIAQYTSALLAGTITSGWTFGAGAALQIPFAMQMAYRFNGIGVTQNVLYENQKLIANQFNSAIGKIQDSLSSTASALGKLQDVVNQNAQALNTLVKQLSSNFGAISSVLNDILSRLDPPEAEVQIDRLITGRLQSLQTYVTQQLIRAAEIRASANLAATKMSECVLGQSKRVDFCGKGYHLMSFPQSAPHGVVFLHVTYVFAQEKNFTTAPAICHDGKAHFPREGVFVSNGTHWFVTQRNFYEPQIITTDNTFVSGNCDVVIGIVNNTVYDPLQPELDSFKEELDKYFKNHTSPDVDLGDISGINASVVNIQKEIDRLNEVAKNLNESLIDLQELGKYEQYIKGGGGSDIDPYKEFGSSYQLLNFLPLDFFPDLNALVDTATALYEEELTGREHCSPHHTAIRQALVCWDELTKLIAWMSSNITSEQVRTIIVNHVNDTWGLKVRQSLWFHLSCLTFGQHTVQEFLVSFGVWIRTPAPYRPPNAPILSTLPEHTVIC

SEQ ID NO: 6890 - protein, 1365 aa, Artificial Sequence
  SARS-CoV-2/Iceland/189/2020__EPI_ISL_417709 spike protein (1-1211)(K986P_V987P_P1069F) WhcAg construct
MFVFLVLLPLVSSQCVNLTTRTQLPPAYTNSFTRGVYYPDKVFRSSVLHSTQDLFLPFFSNVTWFHAIHVSGTNGTKRFDNPVLPFNDGVYFASTEKSNIIRGWIFGTTLDSKTQSLLIVNNATNVVIKVCEFQFCNDPFLGVYYHKNNKSWMESEFRVYSSANNCTFEYVSQPFLMDLEGKQGNFKNLREFVFKNIDGYFKIYSKHTPINLVRDLPQGFSALEPLVDLPIGINITRFQTLLALHRSYLTPGDSSSGWTAGAAAYYVGYLQPRTFLLKYNENGTITDAVDCALDPLSETKCTLKSFTVEKGIYQTSNFRVQPTESIVRFPNITNLCPFGEVFNATRFASVYAWNRKRISNCVADYSVLYNSASFSTFKCYGVSPTKLNDLCFTNVYADSFVIRGDEVRQIAPGQTGKIADYNYKLPDDFTGCVIAWNSNNLDSKVGGNYNYLYRLFRKSNLKPFERDISTEIYQAGSTPCNGVEGFNCYFPLQSYGFQPTNGVGYQPYRVVVLSFELLHAPATVCGPKKSTNLVKNKCVNFNFNGLTGTGVLTESNKKFLPFQQFGRDIADTTDAVRDPQTLEILDITPCSFGGVSVITPGTNTSNQVAVLYQGVNCTEVPVAIHADQLTPTWRVYSTGSNVFQTRAGCLIGAEHVNNSYECDIPIGAGICASYQTQTNSPRRARSVASQSIIAYTMSLGAENSVAYSNNSIAIPTNFTISVTTEILPVSMTKTSVDCTMYICGDSTECSNLLLQYGSFCTQLNRALTGIAVEQDKNTQEVFAQVKQIYKTPPIKDFGGFNFSQILPDPSKPSKRSFIEDLLFNKVTLADAGFTKQYGDCLGDIAARDLICAQKFNGLTVLPPLLTDEMIAQYTSALLAGTITSGWTFGAGAALQIPFAMQMAYRFNGIGVTQNVLYENQKLIANQFNSAIGKIQDSLSSTASALGKLQDVVNQNAQALNTLVKQLSSNFGAISSVLNDILSRLDPPEAEVQIDRLITGRLQSLQTYVTQQLIRAAEIRASANLAATKMSECVLGQSKRVDFCGKGYHLMSFPQSAPHGVVFLHVTYVFAQEKNFTTAPAICHDGKAHFPREGVFVSNGTHWFVTQRNFYEPQIITTDNTFVSGNCDVVIGIVNNTVYDPLQPELDSFKEELDKYFKNHTSPDVDLGDISGINASVVNIQKEIDRLNEVAKNLNESLIDLQELGKYEQYIKGGGGSDIDPYKEFGSSYQLLNFLPLDFFPDLNALVDTATALYEEELTGREHCSPHHTAIRQALVCWDELTKLIAWMSSNITSEQVRTIIVNHVNDTWGLKVRQSLWFHLSCLTFGQHTVQEFLVSFGVWIRTPAPYRPPNAPILSTLPEHTVIC

SEQ ID NO: 6891 - protein, 1365 aa, Artificial Sequence
  SARS-CoV-2/Australia/NSW56/2020__EPI_ISL_417408 spike protein (1-1211)(K986P_V987P_P1069F) WhcAg construct
MFVFLVLLPLVSSQCVNLTTRTQLPPAYTNSFTRGVYYPDKVFRSSVLHSTQDLFLPFFSNVTWFHAIHVSGTNGTKRFDNPVLPFNDGVYFASTEKSNIIRGWIFGTTLDSKTQSLLIVNNATNVVIKVCEFQFCNDPFLGVYYHKNNKSWMESEFRVYSSANNCTFEYVSQPFLMDLEGKQGNFKNLREFVFKNIDGYFKIYSKHTPINLVRDLPQGFSALEPLVDLPIGINITRFQTLLALHRSYLTPGDSSSGWTAGAAAYYVGYLQPRTFLLKYNENGTITDAVDCALDPLSETKCTLKSFTVEKGIYQTSNFRVQPTESIVRFPNITNLCPFGEVFNATRFASVYAWNRKRISNCVADYSVLYNSASFSTFKCYGVSPTKLNDLCFTNVYADSFVIRGDEVRQIAPGQTGKIADYNYKLPDDFTGCVIAWNSNNLDSKVGGNYNYLYRLFRKSNLKPFERDISTEIYQAGSTPCNGVEGFNCYFPLQSYGFQPTNGVGYQPYRVVVLSFELLHAPATVCGPKKSTNLVKNKCVNFNFNGLTGTGVLTESNKKFLPFQQFGRDIADTTDAVRDPQTLEILDITPCSFGGVSVITPGTNTSNQVAVLYQDVNCTEVPVAIHADQLTPTWRVYSTGSNVFQTRAGCLIGAEHVNNSYECDIPIGAGICASYQTQTNSPRRARSVASQSIIAYTMSLGAENSVAYSNNSIAIPTNFTISVTTEILPVSMTKTSVDCTMYICGDSTECSNLLLQYGSFCTQLNRALTGIAVEQDKNTQEVFAQVKQIYKTPPIKDFGGFNFSQILPDSSKPSKRSFIEDLLFNKVTLADAGFIKQYGDCLGDIAARDLICAQKFNGLTVLPPLLTDEMIAQYTSALLAGTITSGWTFGAGAALQIPFAMQMAYRFNGIGVTQNVLYENQKLIANQFNSAIGKIQDSLSSTASALGKLQDVVNQNAQALNTLVKQLSSNFGAISSVLNDILSRLDPPEAEVQIDRLITGRLQSLQTYVTQQLIRAAEIRASANLAATKMSECVLGQSKRVDFCGKGYHLMSFPQSAPHGVVFLHVTYVFAQEKNFTTAPAICHDGKAHFPREGVFVSNGTHWFVTQRNFYEPQIITTDNTFVSGNCDVVIGIVNNTVYDPLQPELDSFKEELDKYFKNHTSPDVDLGDISGINASVVNIQKEIDRLNEVAKNLNESLIDLQELGKYEQYIKGGGGSDIDPYKEFGSSYQLLNFLPLDFFPDLNALVDTATALYEEELTGREHCSPHHTAIRQALVCWDELTKLIAWMSSNITSEQVRTIIVNHVNDTWGLKVRQSLWFHLSCLTFGQHTVQEFLVSFGVWIRTPAPYRPPNAPILSTLPEHTVIC

SEQ ID NO: 6892 - protein, 1365 aa, Artificial Sequence
  SARS-CoV-2/Iceland/280/2020__EPI_ISL_417608 spike protein (1-1211)(K986P_V987P_P1069F) WhcAg construct
MFVFLVLLPLVSSQCVNLTTRTQLPPAYTNSFTRGVYYPDKVFRSSVLHSTQDLFLPFFSNVTWFHAIHVSGTNGTKRFDNPVLPFNDGVYFASTEKSNIIRGWIFGTTLDSKTQSLLIVNNATNVVIKVCEFQFCNDPFLGVYYHKNNKSWMESEFRVYSSANNCTFEYVSQPFLMDLEGKQGNFKNLREFVFKNIDGYFKIYSKHTPINLVRDLPQGFSALEPLVDLPIGINITRFQTLLALHRSYLTPGDSSSGWTAGAAAYYVGYLQPRTFLLKYNENGTITDAVDCALDPLSETKCTLKSFTVEKGIYQTSNFRVQPTESIVRFPNITNLCPFGEVFNATRFASVYAWNRKRISNCVADYSVLYNSASFSTFKCYGVSPTKLNDLCFTNVYADSFVIRGDEVRQIAPGQTGKIADYNYKLPDDFTGCVIAWNSNNLDSKVGGNYNYLYRLFRKSNLKPFERDISTEIYQAGSTPCNGVEGFNCYFPLQSYGFQPTNGVGYQPYRVVVLSFELLHAPATVCGPKKSTNLVKNKCVNFNFNGLTGTGVLTESNKKFLPFQQFGRDIADTTDAVRDPQTLEILDITPCSFGGVSVITPGTNTSNQVAVLYQGVNCTEVPVAIHADQLTPTWRVYSTGSNVFQTRAGCLIGAEHVNNSYECDIPIGAGICASYHTQTNSPRRARSVASQSIIAYTMSLGAENSVAYSNNSIAIPTNFTISVTTEILPVSMTKTSVDCTMYICGDSTECSNLLLQYGSFCTQLNRALTGIAVEQDKNTQEVFAQVKQIYKTPPIKDFGGFNFSQILPDPSKPSKRSFIEDLLFNKVTLADAGFIKQYGDCLGDIAARDLICAQKFNGLTVLPPLLTDEMIAQYTSALLAGTITSGWTFGAGAALQIPFAMQMAYRFNGIGVTQNVLYENQKLIANQFNSAIGKIQDSLSSTASALGKLQDVVNQNAQALNTLVKQLSSNFGAISSVLNDILSRLDPPEAEVQIDRLITGRLQSLQTYVTQQLIRAAEIRASANLAATKMSECVLGQSKRVDFCGKGYHLMSFPQSAPHGVVFLHVTYVFAQEKNFTTAPAICHDGKAHFPREGVFVSNGTHWFVTQRNFYEPQIITTDNTFVSGNCDVVIGIVNNTVYDPLQPELDSFKEELDKYFKNHTSPDVDLGDISGINASVVNIQKEIDRLNEVAKNLNESLIDLQELGKYEQYIKGGGGSDIDPYKEFGSSYQLLNFLPLDFFPDLNALVDTATALYEEELTGREHCSPHHTAIRQALVCWDELTKLIAWMSSNITSEQVRTIIVNHVNDTWGLKVRQSLWFHLSCLTFGQHTVQEFLVSFGVWIRTPAPYRPPNAPILSTLPEHTVIC

SEQ ID NO: 6893 - protein, 1365 aa, Artificial Sequence; identical to SEQ ID NO: 6848
  SARS-CoV-2/Iceland/247/2020__EPI_ISL_417575 spike protein (1-1211)(K986P_V987P_P1069F) WhcAg construct

SEQ ID NO: 6894 - protein, 1365 aa, Artificial Sequence
  SARS-CoV-2/Iceland/238/2020__EPI_ISL_417566 spike protein (1-1211)(K986P_V987P_P1069F) WhcAg construct
MFVFLVLLPLVSSQCVNLTTRTQLPPAYTNSFTRGVYYPDKVFRSSVLHSTQDLFLPFFSNVTWFHAIHVSGTNGTKRFDNPVLPFNDGVYFASTEKSNIIRGWIFGTTLDSKTQSLLIVNNATNVVIKVCEFQFCNDPFLGVYYHKNNKSWMESEFRVYSSANNCTFEYVSQPFLMDLEGKQGNFKNLREFVFKNIDGYFKIYSKHTPINLVRDLPQGFSALEPLVDLPIGINITRFQTLLALHRSYLTPGDSSSGWTAGAAAYYVGYLQPRTFLLKYNENGTITDAVDCALDPLSETKCTLKSFTVEKGIYQTSNFRVQPTESIVRFPNITNLCPFGEVFNATRFASVYAWNRKRISNCVADYSVLYNSASFSTFKCYGVSPTKLNDLCFTNVYADSFVIRGDEVRQIAPGQTGKIADYNYKLPDDFTGCVIAWNSNNLDSKVGGNYNYLYRLFRKSNLKPFERDISTEIYQAGSTPCNGVEGFNCYFPLQSYGFQPTNGVGYQPYRVVVLSFELLHAPATVCGPKKSTNLVKNKCVNFNFNGLTGTGVLTESNKKFLPFQQFGRDIADTTDAVRDPQTLEILDITPCSFGGVSVITPGTNTSNQVAVLYQGVNCTEVPVAIHADQLTPTWRVYSTGSNVFQTRAGCLIGAEHVNNSYECDIPIGAGICASYQTQTNSPRRARSVASQSIIAYTMSLGAENSVAYSNNSIAIPTNFTISVTTEILPVSMTKTSVDCTMYICGDSTECSNLLLQYGSFCTQLNRALTGIAVEQDKNTQEVFAQVKQIYKTPPIKDFGGFNFSQILPDPSKPSKRSFIEDLLFNKVTLADVGFIKQYGDCLGDIAARDLICAQKFNGLTVLPPLLTDEMIAQYTSALLAGTITSGWTFGAGAALQIPFAMQMAYRFNGIGVTQNVLYENQKLIANQFNSAIGKIQDSLSSTASALGKLQDVVNQNAQALNTLVKQLSSNFGAISSVLNDILSRLDPPEAEVQIDRLITGRLQSLQTYVTQQLIRAAEIRASANLAATKMSECVLGQSKRVDFCGKGYHLMSFPQSAPHGVVFLHVTYVFAQEKNFTTAPAICHDGKAHFPREGVFVSNGTHWFVTQRNFYEPQIITTDNTFVSGNCDVVIGIVNNTVYDPLQPELDSFKEELDKYFKNHTSPDVDLGDISGINASVVNIQKEIDRLNEVAKNLNESLIDLQELGKYEQYIKGGGGSDIDPYKEFGSSYQLLNFLPLDFFPDLNALVDTATALYEEELTGREHCSPHHTAIRQALVCWDELTKLIAWMSSNITSEQVRTIIVNHVNDTWGLKVRQSLWFHLSCLTFGQHTVQEFLVSFGVWIRTPAPYRPPNAPILSTLPEHTVIC

SEQ ID NO: 6895 - protein, 1365 aa, Artificial Sequence
  SARS-CoV-2/Greece/16/2020__EPI_ISL_418265 spike protein (1-1211)(K986P_V987P_P1069F) WhcAg construct
MFVFLVLLPLVSSQCVNLTTRTQLPPAYTNSFTRGVYYPDKVFRSSVLHSTQDLFLPFFSNVTWFHAIHVSGTNGTKRFDNPVLPFNDGVYFASTEKSNIIRGWIFGTTLDSKTQSLLIVNNATNVVIKVCEFQFCNDPFLGVYYHKNNKSWMESEFRVYSSANNCTFEYVSQPFLMDLEGKQGNFKNLREFVFKNVDGYFKIYSKHTPINLVRDLPQGFSALEPLVDLPIGINITRFQTLLALHRSYLTPGDSSSGWTAGAAAYYVGYLQPRTFLLKYNENGTITDAVDCALDPLSETKCTLKSFTVEKGIYQTSNFRVQPTESIVRFPNITNLCPFGEVFNATRFASVYAWNRKRISNCVADYSVLYNSASFSTFKCYGVSPTKLNDLCFTNVYADSFVIRGDEVRQIAPGQTGKIADYNYKLPDDFTGCVIAWNSNNLDSKVGGNYNYLYRLFRKSNLKPFERDISTEIYQAGSTPCNGVEGFNCYFPLQSYGFQPTNGVGYQPYRVVVLSFELLHAPATVCGPKKSTNLVKNKCVNFNFNGLTGTGVLTESNKKFLPFQQFGRDIADTTDAVRDPQTLEILDITPCSFGGVSVITPGTNTSNQVAVLYQDVNCTEVPVAIHADQLTPTWRVYSTGSNVFQTRAGCLIGAEHVNNSYECDIPIGAGICASYQTQTNSPRRARSVASQSIIAYTMSLGAENSVAYSNNSIAIPTNFTISVTTEILPVSMTKTSVDCTMYICGDSTECSNLLLQYGSFCTQLNRALTGIAVEQDKNTQEVFAQVKQIYKTPPIKDFGGFNFSQILPDPSKPSKRSFIEDLLFNKVTLADAGFIKQYGDCLGDIAARDLICAQKFNGLTVLPPLLTDEMIAQYTSALLAGTITSGWTFGAGAALQIPFAMQMAYRFNGIGVTQNVLYENQKLIANQFNSAIGKIQDSLSSTASALGKLQDVVNQNAQALNTLVKQLSSNFGAISSVLNDILSRLDPPEAEVQIDRLITGRLQSLQTYVTQQLIRAAEIRASANLAATKMSECVLGQSKRVDFCGKGYHLMSFPQSAPHGVVFLHVTYVFAQEKNFTTAPAICHDGKAHFPREGVFVSNGTHWFVTQRNFYEPQIITTDNTFVSGNCDVVIGIVNNTVYDPLQPELDSFKEELDKYFKNHTSPDVDLGDISGINASVVNIQKEIDRLNEVAKNLNESLIDLQELGKYEQYIKGGGGSDIDPYKEFGSSYQLLNFLPLDFFPDLNALVDTATALYEEELTGREHCSPHHTAIRQALVCWDELTKLIAWMSSNITSEQVRTIIVNHVNDTWGLKVRQSLWFHLSCLTFGQHTVQEFLVSFGVWIRTPAPYRPPNAPILSTLPEHTVIC

SEQ ID NO: 6896 - protein, 1365 aa, Artificial Sequence
  SARS-CoV-2/Iceland/319/2020__EPI_ISL_417648 spike protein (1-1211)(K986P_V987P_P1069F) WhcAg construct
MFVFLVLLPLVSSQCVNLTTRTQLPPAYTNSFTRGVYYPDKVFRSSVLHSTQDLFLPFFSNVTWFHAIHVSGTNGTKRFDNPVLPFNDGVYFASTEKSNIIRGWIFGTTLDSKTQSLLIVNNATNVVIKVCEFQFCNDPFLGVYYHKNNKSWMESEFRVYSSANNCTFEYVSQPFLIDLEGKQGNFKNLREFVFKNIDGYFKIYSKHTPINLVRDLPQGFSALEPLVDLPIGINITRFQTLLALHRSYLTPGDSSSGWTAGAAAYYVGYLQPRTFLLKYNENGTITDAVDCALDPLSETKCTLKSFTVEKGIYQTSNFRVQPTESIVRFPNITNLCPFGEVFNATRFASVYAWNRKRISNCVADYSVLYNSASFSTFKCYGVSPTKLNDLCFTNVYADSFVIRGDEVRQIAPGQTGKIADYNYKLPDDFTGCVIAWNSNNLDSKVGGNYNYLYRLFRKSNLKPFERDISTEIYQAGSTPCNGVEGFNCYFPLQSYGFQPTNGVGYQPYRVVVLSFELLHAPATVCGPKKSTNLVKNKCVNFNFNGLTGTGVLTESNKKFLPFQQFGRDIADTTDAVRDPQTLEILDITPCSFGGVSVITPGTNTSNQVAVLYQGVNCTEVPVAIHADQLTPTWRVYSTGSNVFQTRAGCLIGAEHVNNSYECDIPIGAGICASYQTQTNSPRRARSVASQSIIAYTMSLGAENSVAYSNNSIAIPTNFTISVTTEILPVSMTKTSVDCTMYICGDSTECSNLLLQYGSFCTQLNRALTGIAVEQDKNTQEVFAQVKQIYKTPPIKDFGGFNFSQILPDPSKPSKRSFIEDLLFNKVTLADAGFIKQYGDCLGDIAARDLICAQKFNGLTVLPPLLTDEMIAQYTSALLAGTITSGWTFGAGAALQIPFAMQMAYRFNGIGVTQNVLYENQKLIANQFNSAIGKIQDSLSSTASALGKLQDVVNQNAQALNTLVKQLSSNFGAISSVLNDILSRLDPPEAEVQIDRLITGRLQSLQTYVTQQLIRAAEIRASANLAATKMSECVLGQSKRVDFCGKGYHLMSFPQSAPHGVVFLHVTYVFAQEKNFTTAPAICHDGKAHFPREGVFVSNGTHWFVTQRNFYEPQIITTDNTFVSGNCDVVIGIVNNTVYDPLQPELDSFKEELDKYFKNHTSPDVDLGDISGINASVVNIQKEIDRLNEVAKNLNESLIDLQELGKYEQYIKGGGGSDIDPYKEFGSSYQLLNFLPLDFFPDLNALVDTATALYEEELTGREHCSPHHTAIRQALVCWDELTKLIAWMSSNITSEQVRTIIVNHVNDTWGLKVRQSLWFHLSCLTFGQHTVQEFLVSFGVWIRTPAPYRPPNAPILSTLPEHTVIC

SEQ ID NO: 6897 - protein, 1365 aa, Artificial Sequence
  SARS-CoV-2/Congo/94/2020__EPI_ISL_417947 spike protein (1-1211)(K986P_V987P_P1069F) WhcAg construct
MFVFLVLLPLVSSQCVNLTTRTQLPPAYTNSFTRGVYYPDKVFRSSVLHSTQDLFLPFFSNVTWFHAIHVSGTNGTKRFDNPVLPFNDGVYFASTEKSNIIRGWIFGTTLDSKTQSLLIVNNATNVVIKVCEFQFCNDPFLGVYYHKNNKSWMESEFRVYSSANNCTFEYVSQPFLMDLEGKQGNFKNLREFVFKNIDGYFKIYSKHTPINLVRDLPQGFSALEPLVDLPIGINITRFQTLLALHRSYLTPGDSSSGWTAGAAAYYVGYLQPRTFLLKYNENGTITDAVDCALDPLSETKCTLKSFTVEKGIYQTSNFRVQPTESIVRFPNITNLCPFGEVFNATRFASVYAWNRKRISNCVADYSVLYNSASFSTFKCYGVSPTKLNDLCFTNVYADSFVIRGDEVRQIAPGQTGKIADYNYKLPDDFTGCVIAWNSNNLDSKVGGNYNYLYRLFRKSNLKPFERDISTEIYQAGSTPCNGVEGFNCYFPLQSYGFQPTNGVGYQPYRVVVLSFELLHAPATVCGPKKSTNLVKNKCVNFNFNGLTGTGVLTESNKKFLPFQQFGRDIADTTDAVRDPQTLEILDITPCSFGGVSVITPGTNTSNQVAVLYQGVNCTEVPVAIHADQLTPTWRVYSTGSNVFQTRAGCLIGAEHVNNSYECDIPIGAGICASYQTQTNSPRRARSVASQSIIAYTMSLGAENSVAYSNNSIAIPTNFTISVTTEILPVSMTKTSVDCTMYICGDSTECSNLLLQYGSFCTQLNRALTGIAVEQDKNTQEVFAQVKQIYKTPPIKDFGGFNFSQILPDPSKPSKRSFIEDILFNKVTLADAGFIKQYGDCLGDIAARDLICAQKFNGLTVLPPLLTDEMIAQYTSALLAGTITSGWTFGAGAALQIPFAMQMAYRFNGIGVTQNVLYENQKLIANQFNSAIGKIQDSLSSTASALGKLQDVVNQNAQALNTLVKQLSSNFGAISSVLNDILSRLDPPEAEVQIDRLITGRLQSLQTYVTQQLIRAAEIRASANLAATKMSECVLGQSKRVDFCGKGYHLMSFPQSAPHGVVFLHVTYVFAQEKNFTTAPAICHDGKAHFPREGVFVSNGTHWFVTQRNFYEPQIITTDNTFVSGNCDVVIGIVNNTVYDPLQPELDSFKEELDKYFKNHTSPDVDLGDISGINASVVNIQKEIDRLNEVAKNLNESLIDLQELGKYEQYIKGGGGSDIDPYKEFGSSYQLLNFLPLDFFPDLNALVDTATALYEEELTGREHCSPHHTAIRQALVCWDELTKLIAWMSSNITSEQVRTIIVNHVNDTWGLKVRQSLWFHLSCLTFGQHTVQEFLVSFGVWIRTPAPYRPPNAPILSTLPEHTVIC

SEQ ID NO: 6898 - protein, 1365 aa, Artificial Sequence
  SARS-CoV-2/Congo/158/2020__EPI_ISL_417950 spike protein (1-1211)(K986P_V987P_P1069F) WhcAg construct
MFVFLVLLPLVSSQCVNLTTRTQLPPAYTNSFTRGVYYPDKVFRSSVLHSTQDLFLPFFSNVTWFHAIHVSGTNGTKRFDNPVLPFNDGVYFASTEKSNIIRGWIFGTTLDSKTQSLLIVNNATNVVIKVCEFQFCNDPFLGVYYHKNNKSWMESEFRVYSSANNCTFEYVSQPFLMDLEGKQGNFKNLREFVFKNIDGYFKIYSKHTPINLVRDLPQGFSALEPLVDLPIGINITRFQTLLALHRSYLTPGDSSSGWTAGAAAYYVGYLQPRTFLLKYNENGTITDAVDCALDPLSETKCTLKSFTVEKGIYQTSNFRVQPTESIVRFPNITNLCPFGEVFNATRFASVYAWNRKRISNCVADYSVLYNSASFSTFKCYGVSPTKLNDLCFTNVYADSFVIRGDEVRQIAPGQTGKIADYNYKLPDDFTGCVIAWNSNNLDSKVGGNYNYLYRLFRKSNLKPFERDISTEIYQAGSTPCNGVEGFNCYFPLQSYGFQPTNGVGYQPYRVVVLSFELLHAPATVCGPKKSTNLVKNKCVNFNFNGLTGTGVLTESNKKFLPFQQFGRDIADTTDAVRDPQTLEILDITPCSFGGVSVITPGTNTSNQVAVLYQDVNCTEVPVAIHADQLTPTWRVYSTGSNVFQTRAGCLIGAEHVNNSYECDIPIGAGICASYQTQTNSPRRARSVASQSIIAYTMSLGAENSVAYSNNSIAIPTNFTISVTTEILPVSMTKTSVDCTMYICGDSTECSNLLLQYGSFCTQLNRALTGIAVEQDKNTQEVFAQVKQIYKTPPIKDFGGFNFSQILPDPSKPSKRSFIEDLLFNKVTLADAGFIKQYGDCLGDIAARDLICAQKFNGLTVLPPLLTDEMIAQYTSALLAGTITSGWTFGAGAALQIPFAMQMAYRFNGIGVTQNVLYENQKLIANQFNSAIGKIQDSLSSTASALGKLQDVVNQNAQALNTLVKQLSSNFGAISSVLNDILSRLDPPEAEVQIDRLITGRLQSLQTYVTQQLIRAAEIRASANLAATKMSECVLGQSKRVDFCGKGYHLMSFPQSAPHGVVFLHVTYVFAQEKNFTTAPAICHDGKAHFPREGVFVSNGTHWFVTQRNFYEPQIITTDNTFLSGNCDVVIGIVNNTVYDPLQPELDSFKEELDKYFKNHTSPDVDLGDISGINASVVNIQKEIDRLNEVAKNLNESLIDLQELGKYEQYIKGGGGSDIDPYKEFGSSYQLLNFLPLDFFPDLNALVDTATALYEEELTGREHCSPHHTAIRQALVCWDELTKLIAWMSSNITSEQVRTIIVNHVNDTWGLKVRQSLWFHLSCLTFGQHTVQEFLVSFGVWIRTPAPYRPPNAPILSTLPEHTVIC

SEQ ID NO: 6899 - protein, 1365 aa, Artificial Sequence
  SARS-CoV-2/USA/UT-00034/2020__EPI_ISL_417977 spike protein (1-1211)(K986P_V987P_P1069F) WhcAg construct
MFVFLVLLPLVSSQCVNLTTRTQLPPAYTNSFTRGVYYPDKVFRSSVLHSTQDLFLPFFSNVTWFHAIHVSGTNGTKRFDNPVLPFNDGVYFASTEKSNIIRGWIFGTTLDSKTQSLLIVNNATNVVIKVCEFQFCNDPFLGVYYYKNNKSWMESEFRVYSSANNCTFEYVSQPFLMDLEGKQGNFKNLREFVFKNIDGYFKIYSKHTPINLVRDLPQGFSALEPLVDLPIGINITRFQTLLALHRSYLTPGDSSSGWTAGAAAYYVGYLQPRTFLLKYNENGTITDAVDCALDPLSETKCTLKSFTVEKGIYQTSNFRVQPTESIVRFPNITNLCPFGEVFNATRFASVYAWNRKRISNCVADYSVLYNSASFSTFKCYGVSPTKLNDLCFTNVYADSFVIRGDEVRQIAPGQTGKIADYNYKLPDDFTGCVIAWNSNNLDSKVGGNYNYLYRLFRKSNLKPFERDISTEIYQAGSTPCNGVEGFNCYFPLQSYGFQPTNGVGYQPYRVVVLSFELLHAPATVCGPKKSTNLVKNKCVNFNFNGLTGTGVLTESNKKFLPFQQFGRDIADTTDAVRDPQTLEILDITPCSFGGVSVITPGTNTSNQVAVLYQGVNCTEVPVAIHADQLTPTWRVYSTGSNVFQTRAGCLIGAEHVNNSYECDIPIGAGICASYQTQTNSPRRARSVASQSIIAYTMSLGAENSVAYSNNSIAIPTNFTISVTTEILPVSMTKTSVDCTMYICGDSTECSNLLLQYGSFCTQLNRALTGIAVEQDKNTQEVFAQVKQIYKTPPIKDFGGFNFSQILPDPSKPSKRSFIEDLLFNKVTLADAGFIKQYGDCLGDIAARDLICAQKFNGLTVLPPLLTDEMIAQYTSALLAGTITSGWTFGAGAALQIPFAMQMAYRFNGIGVTQNVLYENQKLIANQFNSAIGKIQDSLSSTASALGKLQDVVNQNAQALNTLVKQLSSNFGAISSVLNDILSRLDPPEAEVQIDRLITGRLQSLQTYVTQQLIRAAEIRASANLAATKMSECVLGQSKRVDFCGKGYHLMSFPQSAPHGVVFLHVTYVFAQEKNFTTAPAICHDGKAHFPREGVFVSNGTHWFVTQRNFYEPQIITTDNTFVSGNCDVVIGIVNNTVYDPLQPELDSFKEELDKYFKNHTSPDVDLGDISGINASVVNIQKEIDRLNEVAKNLNESLIDLQELGKYEQYIKGGGGSDIDPYKEFGSSYQLLNFLPLDFFPDLNALVDTATALYEEELTGREHCSPHHTAIRQALVCWDELTKLIAWMSSNITSEQVRTIIVNHVNDTWGLKVRQSLWFHLSCLTFGQHTVQEFLVSFGVWIRTPAPYRPPNAPILSTLPEHTVIC

SEQ ID NO: 6900 - protein, 1365 aa, Artificial Sequence
  SARS-CoV-2/USA/UT-00033/2020__EPI_ISL_417976 spike protein (1-1211)(K986P_V987P_P1069F) WhcAg construct
MFVFLVLLPLVSSQCVNLTTRTQLPPAYTNSFTRGVYYPDKVFRSSVLHSTQDLFLPFFSNVTWFHAIHVSGTNGTKRFDNPVLPFNDGVYFASTEKSNIIRGWIFGTTLDSKTQSLLIVNNATNVVIKVCEFQFCNDPFLGVYYHKNNKSWMESEFRVYSSANNCTFEYVSQPFLMDLEGKQGNFKNLREFVFKNIDGYFKIYSKHTPINLVRDLPQGFSALEPLVDLPIGINITRFQTLLALHRSYLTPGDSSSGLTAGAAAYYVGYLQPRTFLLKYNENGTITDAVDCALDPLSETKCTLKSFTVEKGIYQTSNFRVQPTESIVRFPNITNLCPFGEVFNATRFASVYAWNRKRISNCVADYSVLYNSASFSTFKCYGVSPTKLNDLCFTNVYADSFVIRGDEVRQIAPGQTGKIADYNYKLPDDFTGCVIAWNSNNLDSKVGGNYNYLYRLFRKSNLKPFERDISTEIYQAGSTPCNGVEGFNCYFPLQSYGFQPTNGVGYQPYRVVVLSFELLHAPATVCGPKKSTNLVKNKCVNFNFNGLTGTGVLTESNKKFLPFQQFGRDIADTTDAVRDPQTLEILDITPCSFGGVSVITPGTNTSNQVAVLYQGVNCTEVPVAIHADQLTPTWRVYSTGSNVFQTRAGCLIGAEHVNNSYECDIPIGAGICASYQTQTNSPRRARSVASQSIIAYTMSLGAENSVAYSNNSIAIPTNFTISVTTEILPVSMTKTSVDCTMYICGDSTECSNLLLQYGSFCTQLNRALTGIAVEQDKNTQEVFAQVKQIYKTPPIKDFGGFNFSQILPDPSKPSKRSFIEDLLFNKVTLADAGFIKQYGDCLGDIAARDLICAQKFNGLTVLPPLLTDEMIAQYTSALLAGTITSGWTFGAGAALQIPFAMQMAYRFNGIGVTQNVLYENQKLIANQFNSAIGKIQDSLSSTASALGKLQDVVNQNAQALNTLVKQLSSNFGAISSVLNDILSRLDPPEAEVQIDRLITGRLQSLQTYVTQQLIRAAEIRASANLAATKMSECVLGQSKRVDFCGKGYHLMSFPQSAPHGVVFLHVTYVFAQEKNFTTAPAICHDGKAHFPREGVFVSNGTHWFVTQRNFYEPQIITTDNTFVSGNCDVVIGIVNNTVYDPLQPELDSFKEELDKYFKNHTSPDVDLGDISGINASVVNIQKEIDRLNEVAKNLNESLIDLQELGKYEQYIKGGGGSDIDPYKEFGSSYQLLNFLPLDFFPDLNALVDTATALYEEELTGREHCSPHHTAIRQALVCWDELTKLIAWMSSNITSEQVRTIIVNHVNDTWGLKVRQSLWFHLSCLTFGQHTVQEFLVSFGVWIRTPAPYRPPNAPILSTLPEHTVIC

SEQ ID NO: 6901 - protein, 1365 aa, Artificial Sequence
  SARS-CoV-2/USA/WI-13/2020__EPI_ISL_417516 spike protein (1-1211)(K986P_V987P_P1069F) WhcAg construct
MFVFLVLLPLVSSQCVNLTTRTQLPPAYTNSFTRGVYYPDKVFRSSVLHSTQDLFLPFFSNVTWFHAIHVSGTNGTKRFDNPVLPFNDGVYFASTEKSNIIRGWIFGTTLDSKTQSLLIVNNATNVVIKVCEFQFCNDPFLGVYYHKNNKSWMESEFRVYSSANNCTFEYVSQPFLMDLEGKQGNFKNLREFVFKNIDGYFKIYSKHTPINLVRDLPQGFSALEPLVDLPIGINITRFQTLLALHRSYLTPGDSSSGWTAGAAAYYVGYLQPRTFLLKYNENGTITDAVDCALDPLSETKCTLKSFTVEKGIYQTSNFRVLPTESIVRFPNITNLCPFGEVFNATRFASVYAWNRKRISNCVADYSVLYNSASFSTFKCYGVSPTKLNDLCFTNVYADSFVIRGDEVRQIAPGQTGKIADYNYKLPDDFTGCVIAWNSNNLDSKVGGNYNYLYRLFRKSNLKPFERDISTEIYQAGSTPCNGVEGFNCYFPLQSYGFQPTNGVGYQPYRVVVLSFELLHAPATVCGPKKSTNLVKNKCVNFNFNGLTGTGVLTESNKKFLPFQQFGRDIADTTDAVRDPQTLEILDITPCSFGGVSVITPGTNTSNQVAVLYQGVNCTEVPVAIHADQLTPTWRVYSTGSNVFQTRAGCLIGAEHVNNSYECDIPIGAGICASYQTQTNSPRRARSVASQSIIAYTMSLGAENSVAYSNNSIAIPTNFTISVTTEILPVSMTKTSVDCTMYICGDSTECSNLLLQYGSFCTQLNRALTGIAVEQDKNTQEVFAQVKQIYKTPPIKDFGGFNFSQILPDPSKPSKRSFIEDLLFNKVTLADAGFIKQYGDCLGDIAARDLICAQKFNGLTVLPPLLTDEMIAQYTSALLAGTITSGWTFGAGAALQIPFAMQMAYRFNGIGVTQNVLYENQKLIANQFNSAIGKIQDSLSSTASALGKLQDVVNQNAQALNTLVKQLSSNFGAISSVLNDILSRLDPPEAEVQIDRLITGRLQSLQTYVTQQLIRAAEIRASANLAATKMSECVLGQSKRVDFCGKGYHLMSFPQSAPHGVVFLHVTYVFAQEKNFTTAPAICHDGKAHFPREGVFVSNGTHWFVTQRNFYEPQIITTDNTFVSGNCDVVIGIVNNTVYDPLQPELDSFKEELDKYFKNHTSPDVDLGDISGINASVVNIQKEIDRLNEVAKNLNESLIDLQELGKYEQYIKGGGGSDIDPYKEFGSSYQLLNFLPLDFFPDLNALVDTATALYEEELTGREHCSPHHTAIRQALVCWDELTKLIAWMSSNITSEQVRTIIVNHVNDTWGLKVRQSLWFHLSCLTFGQHTVQEFLVSFGVWIRTPAPYRPPNAPILSTLPEHTVIC

SEQ ID NO: 6902 - protein, 1364 aa, Artificial Sequence
  SARS-CoV-2/India/1-27/2020__EPI_ISL_413522 spike protein (1-1210)(K985P_V986P_P1068F) WhcAg construct
MFVFLVLLPLVSSQCVNLTTRTQLPPAYTNSFTRGVYYPDKVFRSSVLHSTQDLFLPFFSNVTWFHAIHVSGTNGTKRFDNPVLPFNDGVYFASTEKSNIIRGWIFGTTLDSKTQSLLIVNNATNVVIKVCEFQFCNDPFLGVYHKNNKSWMESEFRVYSSANNCTFEYVSQPFLMDLEGKQGNFKNLREFVFKNIDGYFKIYSKHTPINLVRDLPQGFSALEPLVDLPIGINITRFQTLLALHRSYLTPGDSSSGWTAGAAAYYVGYLQPRTFLLKYNENGTITDAVDCALDPLSETKCTLKSFTVEKGIYQTSNFRVQPTESIVRFPNITNLCPFGEVFNATRFASVYAWNRKRISNCVADYSVLYNSASFSTFKCYGVSPTKLNDLCFTNVYADSFVIRGDEVIQIAPGQTGKIADYNYKLPDDFTGCVIAWNSNNLDSKVGGNYNYLYRLFRKSNLKPFERDISTEIYQAGSTPCNGVEGFNCYFPLQSYGFQPTNGVGYQPYRVVVLSFELLHAPATVCGPKKSTNLVKNKCVNFNFNGLTGTGVLTESNKKFLPFQQFGRDIADTTDAVRDPQTLEILDITPCSFGGVSVITPGTNTSNQVAVLYQDVNCTEVPVAIHADQLTPTWRVYSTGSNVFQTRAGCLIGAEHVNNSYECDIPIGAGICASYQTQTNSPRRARSVASQSIIAYTMSLGAENSVAYSNNSIAIPTNFTISVTTEILPVSMTKTSVDCTMYICGDSTECSNLLLQYGSFCTQLNRALTGIAVEQDKNTQEVFAQVKQIYKTPPIKDFGGFNFSQILPDPSKPSKRSFIEDLLFNKVTLADAGFIKQYGDCLGDIAARDLICAQKFNGLTVLPPLLTDEMIAQYTSALLAGTITSGWTFGAGAALQIPFAMQMAYRFNGIGVTQNVLYENQKLIANQFNSAIGKIQDSLSSTASALGKLQDVVNQNAQALNTLVKQLSSNFGAISSVLNDILSRLDPPEAEVQIDRLITGRLQSLQTYVTQQLIRAAEIRASANLAATKMSECVLGQSKRVDFCGKGYHLMSFPQSAPHGVVFLHVTYVFAQEKNFTTAPAICHDGKAHFPREGVFVSNGTHWFVTQRNFYEPQIITTDNTFVSGNCDVVIGIVNNTVYDPLQPELDSFKEELDKYFKNHTSPDVDLGDISGINASVVNIQKEIDRLNEVAKNLNESLIDLQELGKYEQYIKGGGGSDIDPYKEFGSSYQLLNFLPLDFFPDLNALVDTATALYEEELTGREHCSPHHTAIRQALVCWDELTKLIAWMSSNITSEQVRTIIVNHVNDTWGLKVRQSLWFHLSCLTFGQHTVQEFLVSFGVWIRTPAPYRPPNAPILSTLPEHTVIC

SEQ ID NO: 6903 - protein, 1359 aa, Artificial Sequence
  SARS-CoV-2/pangolin/Guangxi/P4L/2017__EPI_ISL_410538 spike protein (1-1205)(K980P_V981P_P1063F) WhcAg construct
MFVFLFVLPLVSSQCVNLTTRTGIPPGYTNSSTRGVYYPDKVFRSSILHLTQDLFLPFFSNVTWFNTINYQGGFKKFDNPVLPFNDGVYFASTEKSNIIRGWIFGTTLDARTQSLLIVNNATNVVIKVCEFQFCTDPFLGVYYHNNNKTWVENEFRVYSSANNCTFEYISQPFLMDLEGKQGNFKNLREFVFKNVDGYFKIYSKHTPIDLVRDLPRGFAALEPLVDLPIGINITRFQTLLALHRSYLTPGNLESGWTTGAAAYYVGYLQQRTFLLSYNQNGTITDAVDCSLDPLSETKCTLKSLTVEKGIYQTSNFRVQPTISIVRFPNITNLCPFGEVFNASKFASVYAWNRKRISNCVADYSVLYNSTSFSTFKCYGVSPTKLNDLCFTNVYADSFVVKGDEVRQIAPGQTGVIADYNYKLPDDFTGCVIAWNSVKQDALTGGNYGYLYRLFRKSKLKPFERDISTEIYQAGSTPCNGQVGLNCYYPLERYGFHPTTGVNYQPFRVVVLSFELLNGPATVCGPKLSTTLVKDKCVNFNFNGLTGTGVLTTSKKQFLPFQQFGRDISDTTDAVRDPQTLEILDITPCSFGGVSVITPGTNTSNQVAVLYQDVNCTEVPMAIHAEQLTPAWRVYSAGANVFQTRAGCLVGAEHVNNSYECDIPVGAGICASYHSMSSLRSVNQRSIIAYTMSLGAENSVAYSNNSIAIPTNFTISVTTEILPVSMTKTSVDCTMYICGDSIECSNLLLQYGSFCTQLNRALTGIAVEQDKNTQEVFAQVKQIYKTPPIKDFGGFNFSQILPDPSKPSKRSFIEDLLFNKVTLADAGFIKQYGDCLGDIAARDLICAQKFNGLTVLPPLLTDEMIAQYTSALLAGTITSGWTFGAGAALQIPFAMQMAYRFNGIGVTQNVLYENQKLIANQFNSAIGKIQDSLSSTASALGKLQDVVNQNAQALNTLVKQLSSNFGAISSVLNDILSRLDPPEAEVQIDRLITGRLQSLQTYVTQQLIRAAEIRASANLAATKMSECVLGQSKRVDFCGKGYHLMSFPQSAPHGVVFLHVTYVFAQEKNFTTAPAICHEGKAHFPREGVFVSNGTHWFITQRNFYEPQIITTDNTFVSGSCDVVIGIVNNTVYDPLQPELDSFKEELDKYFKNHTSPDVDLGDISGINASVVNIQKEIDRLNEVAKNLNESPIDLQELGKYEQYIKGGGGSDIDPYKEFGSSYQLLNFLPLDFFPDLNALVDTATALYEEELTGREHCSPHHTAIRQALVCWDELTKLIAWMSSNITSEQVRTIIVNHVNDTWGLKVRQSLWFHLSCLTFGQHTVQEFLVSFGVWIRTPAPYRPPNAPILSTLPEHTVIC

SEQ ID NO: 6904 - protein, 1359 aa, Artificial Sequence
  SARS-CoV-2/pangolin/Guangxi/P5L/2017__EPI_ISL_410540 spike protein (1-1205)(K980P_V981P_P1063F) WhcAg construct
MFVFLFVLPLVSSQCVNLTTRTGIPPGYTNSSTRGVYYPDKVFRSSILHLTQDLFLPFFSNVTWFNTINYQGGFKKFDNPVLPFNDGVYFASTEKSNIIRGWIFGTTLDARTQSLLIVNNATNVVIKVCEFQFCTDPFLGVYYHNNNKTWVENEFRVYSSANNCTFEYISQPFLMDLEGKQGNFKNLREFVFKNVDGYFKIYSKHTPIDLVRDLPRGFAALEPLVDLPIGINITRFQTLLALHRSYLTPGKLESGWTTGAAAYYVGYLQQRTFLLSYNQNGTITDAVDCSLDPLSETKCTLKSLTVEKGIYQTSNFRVQPTISIVRFPNITNLCPFGEVFNASKFASVYAWNRKRISNCVADYSVLYNSTSFSTFKCYGVSPTKLNDLCFTNVYADSFVVKGDEVRQIAPGQTGVIADYNYKLPDDFTGCVIAWNSVKQDALTGGNYGYLYRLFRKSKLKPFERDISTEIYQAGSTPCNGQVGLNCYYPLERYGFHPTTGVNYQPFRVVVLSFELLNGPATVCGPKLSTTLVKDKCVNFNFNGLTGTGVLTTSKKQFLPFQQFGRDISDTTDAVRDPQTLEILDITPCSFGGVSVITPGTNTSNQVAVLYQDVNCTEVPMAIHAEQLTPAWRVYSAGANVFQTRAGCLVGAEHVNNSYECDIPVGAGICASYHSMSSFRSVNQRSIIAYTMSLGAENSVAYSNNSIAIPTNFTISVTTEILPVSMTKTSVDCTMYICGDSIECSNLLLQYGSFCTQLNRALTGIAVEQDKNTQEVFAQVKQIYKTPPIKDFGGFNFSQILPDPSKPSKRSFIEDLLFNKVTLADAGFIKQYGDCLGDIAARDLICAQKFNGLTVLPPLLTDEMIAQYTSALLAGTITSGWTFGAGAALQIPFAMQMAYRFNGIGVTQNVLYENQKLIANQFNSAIGKIQDSLSSTASALGKLQDVVNQNAQALNTLVKQLSSNFGAISSVLNDILSRLDPPEAEVQIDRLITGRLQSLQTYVTQQLIRAAEIRASANLAATKMSECVLGQSKRVDFCGKGYHLMSFPQSAPHGVVFLHVTYVFAQEKNFTTAPAICHEGKAHFPREGVFVSNGTHWFITQRNFYEPQIITTDNTFVSGSCDVVIGIVNNTVYDPLQPELDSFKEELDKYFKNHTSPDVDLGDISGINASVVNIQKEIDRLNEVAKNLNESLIDLQELGKYEQYIKGGGGSDIDPYKEFGSSYQLLNFLPLDFFPDLNALVDTATALYEEELTGREHCSPHHTAIRQALVCWDELTKLIAWMSSNITSEQVRTIIVNHVNDTWGLKVRQSLWFHLSCLTFGQHTVQEFLVSFGVWIRTPAPYRPPNAPILSTLPEHTVIC

SEQ ID NO: 6905 - protein, 1359 aa, Artificial Sequence
  SARS-CoV-2/pangolin/Guangxi/P5E/2017__EPI_ISL_410541 spike protein (1-1205)(K980P_V981P_P1063F) WhcAg construct
MFVFLFVLPLVSSQCVNLTTRTGIPPGYTNSSTRGVYYPDKVFRSSILHLTQDLFLPFFSNVTWFNTITYQGGSKKFDNPVLPFNDGVYFASTEKSNIIRGWIFGTTLDARTQSLLIVNNATNVVIKVCEFQFCTDPFLGVYYHNNNKTWVENEFRVYSSANNCTFEYISQPFLMDLEGKQGNFKNLREFVFKNVDGYFKIYSKHTPIDLVRDLPRGFAALEPLVDLPIGINITRFQTLLALHRSYLTPGKLESGWTTGAAAYYVGYLQQRTFLLSYNQNGTITDAVDCSLDPLSETKCTLKSLTVEKGIYQTSNFRVQPTISIVRFPNITNLCPFGEVFNASKFASVYAWNRKRISNCVADYSVLYNSTSFSTFKCYGVSPTKLNDLCFTNVYADSFVVKGDEVRQIAPGQTGVIADYNYKLPDDFTGCVIAWNSVKQDALTGDNYGYLYRLFRKSKLKPFERDISTEIYQAGSTPCNGQVGLNCYYPLERYGFHPTTGVNYQPFRVVVLSFELLNGPATVCGPKLSTTLVKDKCVNFNFNGLTGTGVLTTSKKQFLPFQQFGRDISDTTDAVRDPQTLEILDITPCSFGGVSVITPGTNTSNQVAVLYQDVNCTEVPMAIHAEQLTPAWRVYSAGANVFQTRAGCLVGAEHVNNSYECDIPVGAGICASYHSMSSFRSVNQRSIIAYTMSLGAENSVAYSNNSIAIPTNFTISVTTEILPVSMTKTSVDCTMYICGDSIECSNLLLQYGSFCTQLNRALTGIAVEQDKNTQEVFAQVKQIYKTPPIKDFGGFNFSQILPDPSKPSKRSFIEDLLFNKVTLADAGFIKQYGDCLGDIAARDLICAQKFNGLTVLPPLLTDEMIAQYTSALLAGTITSGWTFGAGAALQIPFAMQMAYRFNGIGVTQNVLYENQKLIANQFNSAIGKIQDSLSSTASALGKLQDVVNQNAQALNTLVKQLSSNFGAISSVLNDILSRLDPPEAEVQIDRLITGRLQSLQTYVTQQLIRAAEIRASANLAATKMSECVLGQSKRVDFCGKGYHLMSFPQSAPHGVVFLHVTYVFAQEKNFTTAPAICHEGKAHFPREGVFVSNGTHWFITQRNFYEPQIITTDNTFVSGSCDVVIGIVNNTVYDPLQPELDSFKEELDKYFKNHTSPDVDLGDISGINASVVNIQKEIDRLNEVAKNLNESLIDLQELGKYEQYIKGGGGSDIDPYKEFGSSYQLLNFLPLDFFPDLNALVDTATALYEEELTGREHCSPHHTAIRQALVCWDELTKLIAWMSSNITSEQVRTIIVNHVNDTWGLKVRQSLWFHLSCLTFGQHTVQEFLVSFGVWIRTPAPYRPPNAPILSTLPEHTVIC

SEQ ID NO: 6906 - protein, 1357 aa, Artificial Sequence
  SARS-CoV-2/pangolin/Guangxi/P1E/2017__EPI_ISL_410539 spike protein (1-1203)(K978P_V979P_P1061F) WhcAg construct
MFVFLFVLPLVSSQCVNLTTRTGIQPGYTNSSTRGVYYPDKVFRSSILHLTQDLFLPFFSNVTWFNTINYQGGFKKFDNPVLPFNDGVYFASTEKSNIIRGWIFGTTLDARTQSLLIVNNATNVVIKVCEFQFCTDPFLGVYYHNNNKTWVENEFRVYSSANNCTFEYISQPFLMDLEGKQGNFKNLREFVFKNVDGYFKIYSKHTPIDLVRDLPRGFAALEPLVDLPIGINITRFQTLLALHRSYLTPGKLESGWTTGAAAYYVGYLQQRTFLLSYNQNGTITDAVDCSLDPLSETKCTLKSLTVEKGIYQTSNFRVQPTISIVRFPNITNLCPFGEVFNASKFASVYAWNRKRISNCVADYSVLYNSTSFSTFKCYGVSPTKLNDLCFTNVYADSFVVKGDEVRQIAPGQTGVIADYNYKLPDDFTGCVIAWNSVKQDALTGGNYLYRLFRKSKLKPFERDISTEIYQAGSTPCNGQVGLNCYYPLERYGFHPTTGVNYQPFRVVVLSFELLNGPATVCGPKLSTTLVKDKCVNFNFNGLTGTGVLTTSKKQFLPFQQFGRDISDTTDAVRDPQTLEILDITPCSFGGVSVITPGTNTSNQVAVLYQDVNCTEVPMAIHAEQLTPAWRVYSAGANVFQTRAGCLVGAEHVNNSYECDIPVGAGICASYHSMSSLRSVNQRSIIAYTMSLGAENSVAYSNNSIAIPTNFTISVTTEILPVSMTKTSVDCTMYICGDSIECSNLLLQYGSFCTQLNRALTGIAVEQDKNTQEVFAQVKQIYKTPPIKDFGGFNFSQILPDPSKPSKRSFIEDLLFNKVTLADAGFIKQYGDCLGDIAARDLICAQKFNGLTVLPPLLTDEMIAQYTSALLAGTITSGWTFGAGAALQIPFAMQMAYRFNGIGVTQNVLYENQKLIANQFNSAIGKIQDSLSSTASALGKLQDVVNQNAQALNTLVKQLSSNFGAISSVLNDILSRLDPPEAEVQIDRLITGRLQSLQTYVTQQLIRAAEIRASANLAATKMSECVLGQSKRVDFCGKGYHLMSFPQSAPHGVVFLHVTYVFAQEKNFTTAPAICHEGKAHFPREGVFVSNGTHWFITQRNFYEPQIITTDNTFVSGSCDVVIGIVNNTVYDPLQPELDSFKEELDKYFKNHTSPDVDLGDISGINASVVNIQKEIDRLNEVAKNLNESLIDLQELGKYEQYIKGGGGSDIDPYKEFGSSYQLLNFLPLDFFPDLNALVDTATALYEEELTGREHCSPHHTAIRQALVCWDELTKLIAWMSSNITSEQVRTIIVNHVNDTWGLKVRQSLWFHLSCLTFGQHTVQEFLVSFGVWIRTPAPYRPPNAPILSTLPEHTVIC

SEQ ID NO: 6907 - protein, 1365 aa, Artificial Sequence
  SARS-CoV-2/Wuhan/WIV05/2019__EPI_ISL_402128 spike protein (1-1211)(K986P_V987P_ H1048Q_H1064N_ H1083N_H1101N) WhcAg construct
MFVFLVLLPLVSSQCVNLTTRTQLPPAYTNSFTRGVYYPDKVFRSSVLHSTQDLFLPFFSNVTWFHAIHVSGTNGTKRFDNPVLPFNDGVYFASTEKSNIIRGWIFGTTLDSKTQSLLIVNNATNVVIKVCEFQFCNDPFLGVYYHKNNKSWMESEFRVYSSANNCTFEYVSQPFLMDLEGKQGNFKNLREFVFKNIDGYFKIYSKHTPINLVRDLPQGFSALEPLVDLPIGINITRFQTLLALHRSYLTPGDSSSGWTAGAAAYYVGYLQPRTFLLKYNENGTITDAVDCALDPLSETKCTLKSFTVEKGIYQTSNFRVQPTESIVRFPNITNLCPFGEVFNATRFASVYAWNRKRISNCVADYSVLYNSASFSTFKCYGVSPTKLNDLCFTNVYADSFVIRGDEVRQIAPGQTGKIADYNYKLPDDFTGCVIAWNSNNLDSKVGGNYNYLYRLFRKSNLKPFERDISTEIYQAGSTPCNGVEGFNCYFPLQSYGFQPTNGVGYQPYRVVVLSFELLHAPATVCGPKKSTNLVKNKCVNFNFNGLTGTGVLTESNKKFLPFQQFGRDIADTTDAVRDPQTLEILDITPCSFGGVSVITPGTNTSNQVAVLYQDVNCTEVPVAIHADQLTPTWRVYSTGSNVFQTRAGCLIGAEHVNNSYECDIPIGAGICASYQTQTNSPRRARSVASQSIIAYTMSLGAENSVAYSNNSIAIPTNFTISVTTEILPVSMTKTSVDCTMYICGDSTECSNLLLQYGSFCTQLNRALTGIAVEQDKNTQEVFAQVKQIYKTPPIKDFGGFNFSQILPDPSKPSKRSFIEDLLFNKVTLADAGFIKQYGDCLGDIAARDLICAQKFNGLTVLPPLLTDEMIAQYTSALLAGTITSGWTFGAGAALQIPFAMQMAYRFNGIGVTQNVLYENQKLIANQFNSAIGKIQDSLSSTASALGKLQDVVNQNAQALNTLVKQLSSNFGAISSVLNDILSRLDPPEAEVQIDRLITGRLQSLQTYVTQQLIRAAEIRASANLAATKMSECVLGQSKRVDFCGKGYQLMSFPQSAPHGVVFLNVTYVPAQEKNFTTAPAICNDGKAHFPREGVFVSNGTNWFVTQRNFYEPQIITTDNTFVSGNCDVVIGIVNNTVYDPLQPELDSFKEELDKYFKNHTSPDVDLGDISGINASVVNIQKEIDRLNEVAKNLNESLIDLQELGKYEQYIKGGGGSDIDPYKEFGSSYQLLNFLPLDFFPDLNALVDTATALYEEELTGREHCSPHHTAIRQALVCWDELTKLIAWMSSNITSEQVRTIIVNHVNDTWGLKVRQSLWFHLSCLTFGQHTVQEFLVSFGVWIRTPAPYRPPNAPILSTLPEHTVIC

SEQ ID NO: 6908 - protein, 1361 aa, Artificial Sequence
  SARS-CoV-2/bat/Yunnan/RaTG13/2013__EPI_ISL_402131 spike protein (1-1207)(K982P_V983P_ H1044Q_H1060N_ H1079N_H1097N) WhcAg construct
MFVFLVLLPLVSSQCVNLTTRTQLPPAYTNSSTRGVYYPDKVFRSSVLHLTQDLFLPFFSNVTWFHAIHVSGTNGIKRFDNPVLPFNDGVYFASTEKSNIIRGWIFGTTLDSKTQSLLIVNNATNVVIKVCEFQFCNDPFLGVYYHKNNKSWMESEFRVYSSANNCTFEYVSQPFLMDLEGKQGNFKNLREFVFKNIDGYFKIYSKHTPINLVRDLPPGFSALEPLVDLPIGINITRFQTLLALHRSYLTPGDSSSGWTAGAAAYYVGYLQPRTFLLKYNENGTITDAVDCALDPLSETKCTLKSFTVEKGIYQTSNFRVQPTDSIVRFPNITNLCPFGEVFNATTFASVYAWNRKRISNCVADYSVLYNSTSFSTFKCYGVSPTKLNDLCFTNVYADSFVITGDEVRQIAPGQTGKIADYNYKLPDDFTGCVIAWNSKHIDAKEGGNFNYLYRLFRKANLKPFERDISTEIYQAGSKPCNGQTGLNCYYPLYRYGFYPTDGVGHQPYRVVVLSFELLNAPATVCGPKKSTNLVKNKCVNFNFNGLTGTGVLTESNKKFLPFQQFGRDIADTTDAVRDPQTLEILDITPCSFGGVSVITPGTNASNQVAVLYQDVNCTEVPVAIHADQLTPTWRVYSTGSNVFQTRAGCLIGAEHVNNSYECDIPIGAGICASYQTQTNSRSVASQSIIAYTMSLGAENSVAYSNNSIAIPTNFTISVTTEILPVSMTKTSVDCTMYICGDSTECSNLLLQYGSFCTQLNRALTGIAVEQDKNTQEVFAQVKQIYKTPPIKDFGGFNFSQILPDPSKPSKRSFIEDLLFNKVTLADAGFIKQYGDCLGDIAARDLICAQKFNGLTVLPPLLTDEMIAQYTSALLAGTITSGWTFGAGAALQIPFAMQMAYRFNGIGVTQNVLYENQKLIANQFNSAIGKIQDSLSSTASALGKLQDVVNQNAQALNTLVKQLSSNFGAISSVLNDILSRLDPPEAEVQIDRLITGRLQSLQTYVTQQLIRAAEIRASANLAATKMSECVLGQSKRVDFCGKGYQLMSFPQSAPHGVVFLNVTYVPAQEKNFTTAPAICNDGKAHFPREGVFVSNGTNWFVTQRNFYEPQIITTDNTFVSGSCDVVIGIVNNTVYDPLQPELDSFKEELDKYFKNHTSPDVDLGDISGINASVVNIQKEIDRLNEVAKNLNESLIDLQELGKYEQYIKGGGGSDIDPYKEFGSSYQLLNFLPLDFFPDLNALVDTATALYEEELTGREHCSPHHTAIRQALVCWDELTKLIAWMSSNITSEQVRTIIVNHVNDTWGLKVRQSLWFHLSCLTFGQHTVQEFLVSFGVWIRTPAPYRPPNAPILSTLPEHTVIC

SEQ ID NO: 6909 - protein, 1365 aa, Artificial Sequence
  SARS-CoV-2/Wuhan/HBCDC-HB-01/2019__EPI_ISL_402132 spike protein (1-1211)(K986P_V987P_ H1048Q_H1064N_ H1083N_H1101N) WhcAg construct
MFVFLVLLPLVSSQCVNLTTRTQLPPAYTNSITRGVYYPDKVFRSSVLHSTQDLFLPFFSNVTWFHAIHVSGTNGTKRFDNPVLPFNDGVYFASTEKSNIIRGWIFGTTLDSKTQSLLIVNNATNVVIKVCEFQFCNDPFLGVYYHKNNKSWMESEFRVYSSANNCTFEYVSQPFLMDLEGKQGNFKNLREFVFKNIDGYFKIYSKHTPINLVRDLPQGFSALEPLVDLPIGINITRFQTLLALHRSYLTPGDSSSGWTAGAAAYYVGYLQPRTFLLKYNENGTITDAVDCALDPLSETKCTLKSFTVEKGIYQTSNFRVQPTESIVRFPNITNLCPFGEVFNATRFASVYAWNRKRISNCVADYSVLYNSASFSTFKCYGVSPTKLNDLCFTNVYADSFVIRGDEVRQIAPGQTGKIADYNYKLPDDFTGCVIAWNSNNLDSKVGGNYNYLYRLFRKSNLKPFERDISTEIYQAGSTPCNGVEGFNCYFPLQSYGFQPTNGVGYQPYRVVVLSFELLHAPATVCGPKKSTNLVKNKCVNFNFNGLTGTGVLTESNKKFLPFQQFGRDIADTTDAVRDPQTLEILDITPCSFGGVSVITPGTNTSNQVAVLYQDVNCTEVPVAIHADQLTPTWRVYSTGSNVFQTRAGCLIGAEHVNNSYECDIPIGAGICASYQTQTNSPRRARSVASQSIIAYTMSLGAENSVAYSNNSIAIPTNFTISVTTEILPVSMTKTSVDCTMYICGDSTECSNLLLQYGSFCTQLNRALTGIAVEQDKNTQEVFAQVKQIYKTPPIKDFGGFNFSQILPDPSKPSKRSFIEDLLFNKVTLADAGFIKQYGDCLGDIAARDLICAQKFNGLTVLPPLLTDEMIAQYTSALLAGTITSGWTFGAGAALQIPFAMQMAYRFNGIGVTQNVLYENQKLIANQFNSAIGKIQDSLSSTASALGKLQDVVNQNAQALNTLVKQLSSNFGAISSVLNDILSRLDPPEAEVQIDRLITGRLQSLQTYVTQQLIRAAEIRASANLAATKMSECVLGQSKRVDFCGKGYQLMSFPQSAPHGVVFLNVTYVPAQEKNFTTAPAICNDGKAHFPREGVFVSNGTNWFVTQRNFYEPQIITTDNTFVSGNCDVVIGIVNNTVYDPLQPELDSFKEELDKYFKNHTSPDVDLGDISGINASVVNIQKEIDRLNEVAKNLNESLIDLQELGKYEQYIKGGGGSDIDPYKEFGSSYQLLNFLPLDFFPDLNALVDTATALYEEELTGREHCSPHHTAIRQALVCWDELTKLIAWMSSNITSEQVRTIIVNHVNDTWGLKVRQSLWFHLSCLTFGQHTVQEFLVSFGVWIRTPAPYRPPNAPILSTLPEHTVIC

SEQ ID NO: 6910 - protein, 1365 aa, Artificial Sequence
  SARS-CoV-2/Guangdong/20SF028/2020__EPI_ISL_403936 spike protein (1-1211)(K986P_V987P_ H1048Q_H1064N_ H1083N_H1101N) WhcAg construct
MFVFLVLLPLVSSQCVNLTTRTQLPPAYTNSFTRGVYYPDKVFRSSVLYSTQDLFLPFFSNVTWFHAIHVSGTNGTKRFDNPVLPFNDGVYFASTEKSNIIRGWIFGTTLDSKTQSLLIVNNATNVVIKVCEFQFCNDPFLGVYYHKNNKSWMESEFRVYSSANNCTFEYVSQPFLMDLEGKQGNFKNLREFVFKNIDGYFKIYSKHTPINLVRDLPQGFSALEPLVDLPIGINITRFQTLLALHRSYLTPGDSSSGWTAGAAAYYVGYLQPRTFLLKYNENGTITDAVDCALDPLSETKCTLKSFTVEKGIYQTSNFRVQPTESIVRFPNITNLCPFGEVFNATRFASVYAWNRKRISNCVADYSVLYNSASFSTFKCYGVSPTKLNDLCFTNVYADSFVIRGDEVRQIAPGQTGKIADYNYKLPDDFTGCVIAWNSNNLDSKVGGNYNYLYRLFRKSNLKPFERDISTEIYQAGSTPCNGVEGFNCYFPLQSYGFQPTNGVGYQPYRVVVLSFELLHAPATVCGPKKSTNLVKNKCVNFNFNGLTGTGVLTESNKKFLPFQQFGRDIADTTDAVRDPQTLEILDITPCSFGGVSVITPGTNTSNQVAVLYQDVNCTEVPVAIHADQLTPTWRVYSTGSNVFQTRAGCLIGAEHVNNSYECDIPIGAGICASYQTQTNSPRRARSVASQSIIAYTMSLGAENSVAYSNNSIAIPTNFTISVTTEILPVSMTKTSVDCTMYICGDSTECSNLLLQYGSFCTQLNRALTGIAVEQDKNTQEVFAQVKQIYKTPPIKDFGGFNFSQILPDPSKPSKRSFIEDLLFNKVTLADAGFIKQYGDCLGDIAARDLICAQKFNGLTVLPPLLTDEMIAQYTSALLAGTITSGWTFGAGAALQIPFAMQMAYRFNGIGVTQNVLYENQKLIANQFNSAIGKIQDSLSSTASALGKLQDVVNQNAQALNTLVKQLSSNFGAISSVLNDILSRLDPPEAEVQIDRLITGRLQSLQTYVTQQLIRAAEIRASANLAATKMSECVLGQSKRVDFCGKGYQLMSFPQSAPHGVVFLNVTYVPAQEKNFTTAPAICNDGKAHFPREGVFVSNGTNWFVTQRNFYEPQIITTDNTFVSGNCDVVIGIVNNTVYDPLQPELDSFKEELDKYFKNHTSPDVDLGDISGINASVVNIQKEIDRLNEVAKNLNESLIDLQELGKYEQYIKGGGGSDIDPYKEFGSSYQLLNFLPLDFFPDLNALVDTATALYEEELTGREHCSPHHTAIRQALVCWDELTKLIAWMSSNITSEQVRTIIVNHVNDTWGLKVRQSLWFHLSCLTFGQHTVQEFLVSFGVWIRTPAPYRPPNAPILSTLPEHTVIC

SEQ ID NO: 6911 - protein, 1365 aa, Artificial Sequence
  SARS-CoV-2/Shenzhen/SZTH-001/2020__EPI_ISL_406592 spike protein (1-1211)(K986P_V987P_ H1048Q_H1064N_ H1083N_H1101N) WhcAg construct
MFVFLVLLPLVSSQCVNLTTRTQLPPAYTNSFTRGVYYPDKVFRSSVLHSTQDLFLPFFSNVTWFHAIHVSGTNGTKRFDNPVLPFNDGVYFASTEKSNIIRGWIFGTTLDSKTQSLLIVNNATNVVIKVCEFQFCNDPFLGVYYHKNNKSWMESEFRVYSSANNCTFEYVSQPFLMDLEGKQGNFKNLREFVFKNIDGYFKIYSKHTPINLVRDLPQGFSALEPLVDLPIGINITRFQTLLALHRSYLTPGDSSSGWTAGAAAYYVGYLQPRTFLLKYNENGTITDAVDCALDPLSETKCTLKSFTVEKGIYQTSNFRVQPTESIVRFPNITNLCPFGEVFNATRFASVYAWNRKRISNCVADYSVLYNSASFSTFKCYGVSPTKLNDLCFTNVYADSFVIRGDEVRQIAPGQTGKIADYNYKLPDDFTGCVIAWNSNNLDSKVGGNYNYLYRLFRKSNLKPFERDISTEIYQAGSTPCNGVEGFNCYFPLQSYGFQPTNGVGYQPYRVVVLSFELLHAPATVCGPKKSTNLVKNKCVNFNFNGLTGTGVLTESNKKFLPFQQFGRDIADTTDAVRDPQTLEILDITPCSFGGVSVITPGTNTSNQVAVLYQDVNCTEVPVAIHADQLTPTWRVYSTGSNVFQTRAGCLIGAEHVNNSYECDIPIGAGICASYQTQTNSPRRARSVASQSIIAYTMSLGAENSVAYSNNSIAIPTNFTISVTTEILPVSMTKTSVDCTMYICGDSTECSNLLLQYGSFCTQLNRALTGIAVEQDKNTQEVFAQVKQIYKTPPIKDFGGFNFSQILPDPSKPSKRSFIEDLLFNKVTLADAGFIKQYGDCLGDIAARDLICAQKFNGLTVLPPLLTDEMIAQYTSALLAGTITSGWTFGAGAALQIPFAMQMAYRFNGIGVTQNVLYENQKLIANQFNSAIGKIQDSLSSTASALGKLQDVVNQNAQALNTLVKQLSSNFGAISSVLNDILSRLDPPEAEVQIDRLITGRLQSLQTYVTQQLIRAAEIRASANLAATKMSECVLGQSKRVDFCGKGYQLMSFPQSAPHGVVFLNVTYVPAQEKNFTTAPAICNDGKAHFPREGVFVSNGTNWFVTQRNFYEPQIITTDNTFVSGNCDVLIGIVNNTVYDPLQPELDSFKEELDKYFKNHTSPDVDLGDISGINASVVNIQKEIDRLNEVAKNLNESLIDLQELGKYEQYIKGGGGSDIDPYKEFGSSYQLLNFLPLDFFPDLNALVDTATALYEEELTGREHCSPHHTAIRQALVCWDELTKLIAWMSSNITSEQVRTIIVNHVNDTWGLKVRQSLWFHLSCLTFGQHTVQEFLVSFGVWIRTPAPYRPPNAPILSTLPEHTVIC

SEQ ID NO: 6912 - protein, 1365 aa, Artificial Sequence
  SARS-CoV-2/Shenzhen/SZTH-004/2020__EPI_ISL_406595 spike protein (1-1211)(K986P_V987P_ H1048Q_H1064N_ H1083N_H1101N) WhcAg construct
MFVFLVLLPLVSSQCVNLTTRTQLPPAYTNSFTRGVYYPDKVFRSSVLHSTQDLFLPFFSNVTWFHAIHVSGTNGTKRFDNPVLPFNDGVYFASTEKSNIIRGWIFGTTLDSKTQSLLIVNNATNVVIKVCEFQFCNDPFLGVYYHKNNKSWMESEFRVYSSANNCTFEYVSQPFLMDLEGKQGNFKNLREFVFKNIDGYFKIYSKHTPINLVRDLPQGFSALEPLVDLPIGINITRFQTLLALHRSYLTPGDSSSGWTAGAAAYYVGYLQPRTFLLKYNENGTITDAVDCALDPLSETKCTLKSFTVEKGIYQTSNFRVQPTESIVRFPNITNLCPFGEVFNATRFASVYAWDRKRISNCVAYYSVLYNSASFSTFKCYGVSPTKLNDLCFTNVYADSFVIRGDEVRQIAPGQTGKIADYNYKLPDDFTGCVIAWNSNNLDSKVGGNYNYLYRLFRKSNLKPFERDISTEIYQAGSTPCNGVEGFNCYFPLQSYGFQPTNGVGYQPYRVVVLSFELLHAPATVCGPKKSTNLVKNKCVNFNFNGLTGTGVLTESNKKFLPFQQFGRDIADTTDAVRDPQTLEILDITPCSFGGVSVITPGTNTSNQVAVLYQDVNCTEVPVAIHADQLTPTWRVYSTGSNVFQTRAGCLIGAEHVNNSYECDIPIGAGICASYQTQTNSPRRARSVASQSIIAYTMSLGAENSVAYSNNSIAIPTNFTISVTTEILPVSMTKTSVDCTMYICGDSTECSNLLLQYGSFCTQLNRALTGIAVEQDKNTQEVFAQVKQIYKTPPIKDFGGFNFSQILPDPSKPSKRSFIEDLLFNKVTLADAGFIKQYGDCLGDIAARDLICAQKFNGLTVLPPLLTDEMIAQYTSALLAGTITSGWTFGAGAALQIPFAMQMAYRFNGIGVTQNVLYENQKLIANQFNSAIGKIQDSLSSTASALGKLQDVVNQNAQALNTLVKQLSSNFGAISSVLNDILSRLDPPEAEVQIDRLITGRLQSLQTYVTQQLIRAAEIRASANLAATKMSECVLGQSKRVDFCGKGYQLMSFPQSAPHGVVFLNVTYVPAQEKNFTTAPAICNDGKAHFPREGVFVSNGTNWFVTQRNFYEPQIITTDNTFVSGNCDVVIGIVNNTVYDPLQPELDSFKEELDKYFKNHTSPDVDLGDISGINASVVNIQKEIDRLNEVAKNLNESLIDLQELGKYEQYIKGGGGSDIDPYKEFGSSYQLLNFLPLDFFPDLNALVDTATALYEEELTGREHCSPHHTAIRQALVCWDELTKLIAWMSSNITSEQVRTIIVNHVNDTWGLKVRQSLWFHLSCLTFGQHTVQEFLVSFGVWIRTPAPYRPPNAPILSTLPEHTVIC

SEQ ID NO: 6913 - protein, 1365 aa, Artificial Sequence
  SARS-CoV-2/France/IDF0372/2020__EPI_ISL_406596 spike protein (1-1211)(K986P_V987P_ H1048Q_H1064N_ H1083N_H1101N) WhcAg construct
MFVFLVLLPLVSSQCVNLTTRTQLPPAYTNSFTRGVYYPDKVFRSSVLHSTQDLFLPFFSNVTWFHAIHVSGTNGTKRFDNPVLPFNDGVYFASTEKSNIIRGWIFGTTLDSKTQSLLIVNNATNVVIKVCEFQFCNDPFLGVYYHKNNKSWMESEFRVYSSANNCTFEYVSQPFLMDLEGKQGNFKNLREFVFKNIDGYFKIYSKHTPINLVRDLPQGFSALEPLVDLPIGINITRFQTLLALHRSYLTPGDSSSGWTAGAAAYYVGYLQPRTFLLKYNENGTITDAVDCALDPLSETKCTLKSFTVEKGIYQTSNFRVQPTESIVRFPNITNLCPFGEVFNATRFASVYAWNRKRISNCVADYSFLYNSASFSTFKCYGVSPTKLNDLCFTNVYADSFVIRGDEVRQIAPGQTGKIADYNYKLPDDFTGCVIAWNSNNLDSKVGGNYNYLYRLFRKSNLKPFERDISTEIYQAGSTPCNGVEGFNCYFPLQSYGFQPTNGVGYQPYRVVVLSFELLHAPATVCGPKKSTNLVKNKCVNFNFNGLTGTGVLTESNKKFLPFQQFGRDIADTTDAVRDPQTLEILDITPCSFGGVSVITPGTNTSNQVAVLYQDVNCTEVPVAIHADQLTPTWRVYSTGSNVFQTRAGCLIGAEHVNNSYECDIPIGAGICASYQTQTNSPRRARSVASQSIIAYTMSLGAENSVAYSNNSIAIPTNFTISVTTEILPVSMTKTSVDCTMYICGDSTECSNLLLQYGSFCTQLNRALTGIAVEQDKNTQEVFAQVKQIYKTPPIKDFGGFNFSQILPDPSKPSKRSFIEDLLFNKVTLADAGFIKQYGDCLGDIAARDLICAQKFNGLTVLPPLLTDEMIAQYTSALLAGTITSGWTFGAGAALQIPFAMQMAYRFNGIGVTQNVLYENQKLIANQFNSAIGKIQDSLSSTASALGKLQDVVNQNAQALNTLVKQLSSNFGAISSVLNDILSRLDPPEAEVQIDRLITGRLQSLQTYVTQQLIRAAEIRASANLAATKMSECVLGQSKRVDFCGKGYQLMSFPQSAPHGVVFLNVTYVPAQEKNFTTAPAICNDGKAHFPREGVFVSNGTNWFVTQRNFYEPQIITTDNTFVSGNCDVVIGIVNNTVYDPLQPELDSFKEELDKYFKNHTSPDVDLGDISGINASVVNIQKEIDRLNEVAKNLNESLIDLQELGKYEQYIKGGGGSDIDPYKEFGSSYQLLNFLPLDFFPDLNALVDTATALYEEELTGREHCSPHHTAIRQALVCWDELTKLIAWMSSNITSEQVRTIIVNHVNDTWGLKVRQSLWFHLSCLTFGQHTVQEFLVSFGVWIRTPAPYRPPNAPILSTLPEHTVIC

SEQ ID NO: 6914 - protein, 1365 aa, Artificial Sequence
  SARS-CoV-2/Australia/VIC01/2020__EPI_ISL_406844 spike protein (1-1211)(K986P_V987P_ H1048Q_H1064N_ H1083N_H1101N) WhcAg construct
MFVFLVLLPLVSSQCVNLTTRTQLPPAYTNSFTRGVYYPDKVFRSSVLHSTQDLFLPFFSNVTWFHAIHVSGTNGTKRFDNPVLPFNDGVYFASTEKSNIIRGWIFGTTLDSKTQSLLIVNNATNVVIKVCEFQFCNDPFLGVYYHKNNKSWMESEFRVYSSANNCTFEYVSQPFLMDLEGKQGNFKNLREFVFKNIDGYFKIYSKHTPINLVRDLPQGFSALEPLVDLPIGINITRFQTLLALHRRYLTPGDSSSGWTAGAAAYYVGYLQPRTFLLKYNENGTITDAVDCALDPLSETKCTLKSFTVEKGIYQTSNFRVQPTESIVRFPNITNLCPFGEVFNATRFASVYAWNRKRISNCVADYSVLYNSASFSTFKCYGVSPTKLNDLCFTNVYADSFVIRGDEVRQIAPGQTGKIADYNYKLPDDFTGCVIAWNSNNLDSKVGGNYNYLYRLFRKSNLKPFERDISTEIYQAGSTPCNGVEGFNCYFPLQSYGFQPTNGVGYQPYRVVVLSFELLHAPATVCGPKKSTNLVKNKCVNFNFNGLTGTGVLTESNKKFLPFQQFGRDIADTTDAVRDPQTLEILDITPCSFGGVSVITPGTNTSNQVAVLYQDVNCTEVPVAIHADQLTPTWRVYSTGSNVFQTRAGCLIGAEHVNNSYECDIPIGAGICASYQTQTNSPRRARSVASQSIIAYTMSLGAENSVAYSNNSIAIPTNFTISVTTEILPVSMTKTSVDCTMYICGDSTECSNLLLQYGSFCTQLNRALTGIAVEQDKNTQEVFAQVKQIYKTPPIKDFGGFNFSQILPDPSKPSKRSFIEDLLFNKVTLADAGFIKQYGDCLGDIAARDLICAQKFNGLTVLPPLLTDEMIAQYTSALLAGTITSGWTFGAGAALQIPFAMQMAYRFNGIGVTQNVLYENQKLIANQFNSAIGKIQDSLSSTASALGKLQDVVNQNAQALNTLVKQLSSNFGAISSVLNDILSRLDPPEAEVQIDRLITGRLQSLQTYVTQQLIRAAEIRASANLAATKMSECVLGQSKRVDFCGKGYQLMSFPQSAPHGVVFLNVTYVPAQEKNFTTAPAICNDGKAHFPREGVFVSNGTNWFVTQRNFYEPQIITTDNTFVSGNCDVVIGIVNNTVYDPLQPELDSFKEELDKYFKNHTSPDVDLGDISGINASVVNIQKEIDRLNEVAKNLNESLIDLQELGKYEQYIKGGGGSDIDPYKEFGSSYQLLNFLPLDFFPDLNALVDTATALYEEELTGREHCSPHHTAIRQALVCWDELTKLIAWMSSNITSEQVRTIIVNHVNDTWGLKVRQSLWFHLSCLTFGQHTVQEFLVSFGVWIRTPAPYRPPNAPILSTLPEHTVIC

SEQ ID NO: 6915 - protein, 1365 aa, Artificial Sequence
  SARS-CoV-2/Germany/BavPat1/2020__EPI_ISL_406862 spike protein (1-1211)(K986P_V987P_ H1048Q_H1064N_ H1083N_H1101N) WhcAg construct
MFVFLVLLPLVSSQCVNLTTRTQLPPAYTNSFTRGVYYPDKVFRSSVLHSTQDLFLPFFSNVTWFHAIHVSGTNGTKRFDNPVLPFNDGVYFASTEKSNIIRGWIFGTTLDSKTQSLLIVNNATNVVIKVCEFQFCNDPFLGVYYHKNNKSWMESEFRVYSSANNCTFEYVSQPFLMDLEGKQGNFKNLREFVFKNIDGYFKIYSKHTPINLVRDLPQGFSALEPLVDLPIGINITRFQTLLALHRSYLTPGDSSSGWTAGAAAYYVGYLQPRTFLLKYNENGTITDAVDCALDPLSETKCTLKSFTVEKGIYQTSNFRVQPTESIVRFPNITNLCPFGEVFNATRFASVYAWNRKRISNCVADYSVLYNSASFSTFKCYGVSPTKLNDLCFTNVYADSFVIRGDEVRQIAPGQTGKIADYNYKLPDDFTGCVIAWNSNNLDSKVGGNYNYLYRLFRKSNLKPFERDISTEIYQAGSTPCNGVEGFNCYFPLQSYGFQPTNGVGYQPYRVVVLSFELLHAPATVCGPKKSTNLVKNKCVNFNFNGLTGTGVLTESNKKFLPFQQFGRDIADTTDAVRDPQTLEILDITPCSFGGVSVITPGTNTSNQVAVLYQGVNCTEVPVAIHADQLTPTWRVYSTGSNVFQTRAGCLIGAEHVNNSYECDIPIGAGICASYQTQTNSPRRARSVASQSIIAYTMSLGAENSVAYSNNSIAIPTNFTISVTTEILPVSMTKTSVDCTMYICGDSTECSNLLLQYGSFCTQLNRALTGIAVEQDKNTQEVFAQVKQIYKTPPIKDFGGFNFSQILPDPSKPSKRSFIEDLLFNKVTLADAGFIKQYGDCLGDIAARDLICAQKFNGLTVLPPLLTDEMIAQYTSALLAGTITSGWTFGAGAALQIPFAMQMAYRFNGIGVTQNVLYENQKLIANQFNSAIGKIQDSLSSTASALGKLQDVVNQNAQALNTLVKQLSSNFGAISSVLNDILSRLDPPEAEVQIDRLITGRLQSLQTYVTQQLIRAAEIRASANLAATKMSECVLGQSKRVDFCGKGYQLMSFPQSAPHGVVFLNVTYVPAQEKNFTTAPAICNDGKAHFPREGVFVSNGTNWFVTQRNFYEPQIITTDNTFVSGNCDVVIGIVNNTVYDPLQPELDSFKEELDKYFKNHTSPDVDLGDISGINASVVNIQKEIDRLNEVAKNLNESLIDLQELGKYEQYIKGGGGSDIDPYKEFGSSYQLLNFLPLDFFPDLNALVDTATALYEEELTGREHCSPHHTAIRQALVCWDELTKLIAWMSSNITSEQVRTIIVNHVNDTWGLKVRQSLWFHLSCLTFGQHTVQEFLVSFGVWIRTPAPYRPPNAPILSTLPEHTVIC

SEQ ID NO: 6916 - protein, 1365 aa, Artificial Sequence
  SARS-CoV-2/Wuhan/HBCDC-HB-02/2020__EPI_ISL_412978 spike protein (1-1211)(K986P_V987P_ H1048Q_H1064N_ H1083N_H1101N) WhcAg construct
MFVFLVLLPLVSSQCVNLTTRTQLPPAYTNSFTRGVYYPDKVFRSSVLHSTQDLFLPFFSNVTWFHAIHVSGTNGTKRFDNPVLPFNDGVYFASTEKSNIIRGWIFGTTLDSKTQSLLIVNNATNVVIKVCEFQFCNDPFLGVYYHKNNKSWMESEFRVYSSANNCTFEYVSQPFLMDLEGKQGNFKNLREFVFKNIDGYFKIYSKHTPINLVRDLPQGFSALEPLVDLPIGINITRFQTLLALHRSYLTPGDSSSGWTAGAAAYYVGYLQPRTFLLKYNENGTITDAVDCALDPLSETKCTLKSFTVEKGIYQTSNFRVQPTESIVRFPNITNLCPFGEVFNATRFASVYAWNRKRISNCVADYSVLYNSASFSTFKCYGVSPTKLNDLCFTNVYADSFVIRGDEVRQIAPGQTGKIADYNYKLPDDFTGCVIAWNSNNLDSKVGGNYNYLYRLFRKSNLKPFERDISTEIYQAGSTPCNGVEGFNCYFPLQSYGFQPTNGVGYQPYRVVVLSFELLHAPATVCGPKKSTNLVKNKCVNFNFNGLTGTGVLTESNKKFLPFQQFGRDIADTTDAVRDPQTLEILDITPCSFGGVSVITPGTNTSNQVAVLYQDVNCTEVPVAIHADQLTPTWRVYSTGSNVFQTRAGCLIGAEHVNNSYECDIPIGAGICASYQTQTNSPRRARSVASQSIIAYTMSLGAENSVAYSNNSIAIPTNFTISVTTEILPVSMTKTSVDCTMYICGDSTECSNFLLQYGSFCTQLNRALTGIAVEQDKNTQEVFAQVKQIYKTPPIKDFGGFNFSQILPDPSKPSKRSFIEDLLFNKVTLADAGFIKQYGDCLGDIAARDLICAQKFNGLTVLPPLLTDEMIAQYTSALLAGTITSGWTFGAGAALQIPFAMQMAYRFNGIGVTQNVLYENQKLIANQFNSAIGKIQDSLSSTASALGKLQDVVNQNAQALNTLVKQLSSNFGAISSVLNDILSRLDPPEAEVQIDRLITGRLQSLQTYVTQQLIRAAEIRASANLAATKMSECVLGQSKRVDFCGKGYQLMSFPQSAPHGVVFLNVTYVPAQEKNFTTAPAICNDGKAHFPREGVFVSNGTNWFVTQRNFYEPQIITTDNTFVSGNCDVVIGIVNNTVYDPLQPELDSFKEELDKYFKNHTSPDVDLGDISGINASVVNIQKEIDRLNEVAKNLNESLIDLQELGKYEQYIKGGGGSDIDPYKEFGSSYQLLNFLPLDFFPDLNALVDTATALYEEELTGREHCSPHHTAIRQALVCWDELTKLIAWMSSNITSEQVRTIIVNHVNDTWGLKVRQSLWFHLSCLTFGQHTVQEFLVSFGVWIRTPAPYRPPNAPILSTLPEHTVIC

SEQ ID NO: 6917 - protein, 1365 aa, Artificial Sequence
  SARS-CoV-2/Australia/QLD02/2020__EPI_ISL_407896 spike protein (1-1211)(K986P_V987P_ H1048Q_H1064N_ H1083N_H1101N) WhcAg construct
MFVFLVLLPLVSSQCVNLTTRTQLPPAYTNSFTRGVYYPDKVFRSSVLHSTQDLFLPFFSNVTWFHAIHVSGTNGTKRFDNPVLPFNDGVYFASTEKSNIIRGWIFGTTLDSKTQSLLIVNNATNVVIKVCEFQFCNDPFLGVYYHKNNKSWMESEFRVYSSANNCTFEYVSQPFLMDLEGKQGNFKNLREFVFKNIDGYFKIYSKHTPINLVRDLPQGFSALEPLVDLPIGINITRFQTLLALHRSYLTPGDSSSGWTAGAAAYYVGYLQPRTFLLKYNENGTITDAVDCALDPLSETKCTLKSFTVEKGIYQTSNFRVQPTESIVRFPNITNLCPFGEVFNATRFASVYAWNRKRISNCVADYSVLYNSASFSTFKCYGVSPTKLNDLCFTNVYADSFVIRGDEVRQIAPGQTGKIADYNYKLPDDFTGCVIAWNSNNLDSKVGGNYNYLYRLFRKSNLKPFERDISTEIYQAGSTPCNGVEGFNCYFPLQSYGFQPTNGVGYQPYRVVVLSFELLHAPATVCGPKKSTNLVKNKCVNFNFNGLTGTGVLTESNKKFLPFQQFGRDIADTTDAVRDPQTLEILDITPCSFGGVSVITPGTNTSNQVAVLYQDVNCTEVPVAIHADQLTPTWRVYSTGSNVFQTRAGCLIGAEHVNNSYECDIPIGAGICASYQTQTNSPRRARSVASQSIIAYTMSLGAENSVAYSNNSIAIPTNFTISVTTEILPVSMTKTSVDCTMYICGDSTECSNLLLQYGSFCTQLNRALTGIAVEQDKNTQEVFAQVKQIYKTPPIKDFGGFNFSQILPDPSKPSKRSFIEDLLFNKVTLADAGFIKQYGDCLGDIAARDLICAQKFNGLTVLPPLLTDEMIAQYTSALLAGTITSGWTFGAGAALQIPFAMQMAYRFNGIGVTQNVLYENQKLIANQFNSAIGKIQDSLSSTASALGKLQDVVNQNAQALNTLVKQLSSNFGAISSVLNDILSRLDPPEAEVQIDRLITGRLQSLQTYVTQQLIRAAEIRASANLAATKMSECVLGQSKRVDFCGKGYQLMSFPQSAPHGVVFLNVTYVPAQEKNFTTAPAICNDGKAHFPREGVFVSNGTNWFVTQRNFYEPQIITTDNTFVSGNCDVVIGIVNNTVYDPLQLELDSFKEELDKYFKNHTSPDVDLGDISGINASVVNIQKEIDRLNEVAKNLNESLIDLQELGKYEQYIKGGGGSDIDPYKEFGSSYQLLNFLPLDFFPDLNALVDTATALYEEELTGREHCSPHHTAIRQALVCWDELTKLIAWMSSNITSEQVRTIIVNHVNDTWGLKVRQSLWFHLSCLTFGQHTVQEFLVSFGVWIRTPAPYRPPNAPILSTLPEHTVIC

SEQ ID NO: 6918 - protein, 1365 aa, Artificial Sequence
  SARS-CoV-2/India/1-31/2020__EPI_ISL_413523 spike protein (1-1211)(K986P_V987P_ H1048Q_H1064N_ H1083N_H1101N) WhcAg construct
MFVFLVLLPLVSSQCVNLTTRTQLPPAYTNSFTRGVYYPDKVFRSSVLHSTQDLFLPFFSNVTWFHAIHVSGTNGTKRFDNPVLPFNDGVYFASTEKSNIIRGWIFGTTLDSKTQSLLIVNNATNVVIKVCEFQFCNDPFLGVYYHKNNKSWMESEFRVYSSANNCTFEYVSQPFLMDLEGKQGNFKNLREFVFKNIDGYFKIYSKHTPINLVRDLPQGFSALEPLVDLPIGINITRFQTLLALHRSYLTPGDSSSGWTAGAAAYYVGYLQPRTFLLKYNENGTITDAVDCALDPLSETKCTLKSFTVEKGIYQTSNFRVQPTESIVRFPNITNLCPFGEVFNATRFASVYAWNRKRISNCVADYSVLYNSASFSTFKCYGVSPTKLNDLCFTNVYADSFVIRGDEVRQIAPGQTGKIADYNYKLPDDFTGCVIAWNSNNLDSKVGGNYNYLYRLFRKSNLKPFERDISTEIYQAGSTPCNGVEGFNCYFPLQSYGFQPTNGVGYQPYRVVVLSFELLHAPATVCGPKKSTNLVKNKCVNFNFNGLTGTGVLTESNKKFLPFQQFGRDIADTTDAVRDPQTLEILDITPCSFGGVSVITPGTNTSNQVAVLYQDVNCTEVPVAIHADQLTPTWRVYSTGSNVFQTRAGCLIGAEHVNNSYECDIPIGAGICASYQTQTNSPRRARSVASQSIIAYTMSLGAENSVAYSNNSIAIPTNFTISVTTEILPVSMTKTSVDCTMYICGDSTECSNLLLQYGSFCTQLNRALTGIAVEQDKNTQEVFAQVKQIYKTPPIKDFGGFNFSQILPDPSKPSKRSFIEDLLFNKVTLADAGFIKQYGDCLGDIAARDLICAQKFNGLTVLPPLLTDEMIAQYTSALLAGTITSGWTFGAGAALQIPFAMQMAYRFNGIGVTQNVLYENQKLIANQFNSVIGKIQDSLSSTASALGKLQDVVNQNAQALNTLVKQLSSNFGAISSVLNDILSRLDPPEAEVQIDRLITGRLQSLQTYVTQQLIRAAEIRASANLAATKMSECVLGQSKRVDFCGKGYQLMSFPQSAPHGVVFLNVTYVPAQEKNFTTAPAICNDGKAHFPREGVFVSNGTNWFVTQRNFYEPQIITTDNTFVSGNCDVVIGIVNNTVYDPLQPELDSFKEELDKYFKNHTSPDVDLGDISGINASVVNIQKEIDRLNEVAKNLNESLIDLQELGKYEQYIKGGGGSDIDPYKEFGSSYQLLNFLPLDFFPDLNALVDTATALYEEELTGREHCSPHHTAIRQALVCWDELTKLIAWMSSNITSEQVRTIIVNHVNDTWGLKVRQSLWFHLSCLTFGQHTVQEFLVSFGVWIRTPAPYRPPNAPILSTLPEHTVIC

SEQ ID NO: 6919 - protein, 1365 aa, Artificial Sequence
  SARS-CoV-2/Guangdong/GD2020087-P0008/2020__EPI_ISL_413863 spike protein (1-1211)(K986P_V987P_ H1048Q_H1064N_ H1083N_H1101N) WhcAg construct
MFVFLVLLPLVSSQCVNLTTRTQLPPAYTNSFTRGVYYPDKVFRSSVLHSTQDLFLPFFSNVTWFHAIHVSGTNGTKRFDNPVLPFNDGVYFASTEKSNIIRGWIFGTTLDSKTQSLLIVNNATNVVIKVCEFQFCNDPFLGVYYHKNNKSWMESEFRVYSSANNCTFEYVSQPFLMDLEGKQGNFKNLREFVFKNIDGYFKIYSKHTPINLVRDLPQGFSALEPLVDLPIGINITRFQTLLALHRSYLTPGDSSSGWTAGAAAYYVGYLQPRTFLLKYNENGTITDAVDCALDPLSETKCTLKSFTVEKGIYQTSNFRVQPTESIVRFPNITNLCPFGEVFNATRFASVYAWNRKRISNCVADYSVLYNSASFSTFKCYGVSPTKLNDLCFTNVYADSFVIRGDEVREIAPGQTGKIADYNYKLPDDFTGCVIAWNSNNLDSKVGGNYNYLYRLFRKSNLKPFERDISTEIYQAGSTPCNGVEGFNCYFPLQSYGFQPTNGVGYQPYRVVVLSFELLHAPATVCGPKKSTNLVKNKCVNFNFNGLTGTGVLTESNKKFLPFQQFGRDIADTTDAVRDPQTLEILDITPCSFGGVSVITPGTNTSNQVAVLYQDVNCTEVPVAIHADQLTPTWRVYSTGSNVFQTRAGCLIGAEHVNNSYECDIPIGAGICASYQTQTNSPRRARSVASQSIIAYTMSLGAENSVAYSNNSIAIPTNFTISVTTEILPVSMTKTSVDCTMYICGDSTECSNLLLQYGSFCTQLNRALTGIAVEQDKNTQEVFAQVKQIYKTPPIKDFGGFNFSQILPDPSKPSKRSFIEDLLFNKVTLADAGFIKQYGDCLGDIAARDLICAQKFNGLTVLPPLLTDEMIAQYTSALLAGTITSGWTFGAGAALQIPFAMQMAYRFNGIGVTQNVLYENQKLIANQFNSAIGKIQDSLSSTASALGKLQDVVNQNAQALNTLVKQLSSNFGAISSVLNDILSRLDPPEAEVQIDRLITGRLQSLQTYVTQQLIRAAEIRASANLAATKMSECVLGQSKRVDFCGKGYQLMSFPQSAPHGVVFLNVTYVPAQEKNFTTAPAICNDGKAHFPREGVFVSNGTNWFVTQRNFYEPQIITTDNTFVSGNCDVVIGIVNNTVYDPLQPELDSFKEELDKYFKNHTSPDVDLGDISGINASVVNIQKEIDRLNEVAKNLNESLIDLQELGKYEQYIKGGGGSDIDPYKEFGSSYQLLNFLPLDFFPDLNALVDTATALYEEELTGREHCSPHHTAIRQALVCWDELTKLIAWMSSNITSEQVRTIIVNHVNDTWGLKVRQSLWFHLSCLTFGQHTVQEFLVSFGVWIRTPAPYRPPNAPILSTLPEHTVIC

SEQ ID NO: 6920 - protein, 1365 aa, Artificial Sequence
  SARS-CoV-2/Sweden/01/2020__EPI_ISL_411951 spike protein (1-1211)(K986P_V987P_ H1048Q_H1064N_ H1083N_H1101N) WhcAg construct
MFVFLVLLPLVSSQCVNLTTRTQLPPAYTNSFTRGVYYPDKVFRSSVLHSTQDLFLPFFSNVTWFHAIHVSGTNGTKRFDNPVLPFNDGVYFASTEKSNIIRGWIFGTTLDSKTQSLLIVNNATNVVIKVCEFQFCNDPFLGVYYHKNNKSWMESEFRVYSSANNCTFEYVSQPFLMDLEGKQGNFKNLREFVFKNIDGYFKIYSKHTPINLVRDLPQGFSALEPLVDLPIGINITRFQTLLALHRSYLTPGDSSSGWTAGAAAYYVGYLQPRTFLLKYNENGTITDAVDCALDPLSETKCTLKSFTVEKGIYQTSNFRVQPTESIVRFPNITNLCPFGEVFNATRFASVYAWNRKRISNCVADYSVLYNSASFSTFKCYGVSPTKLNDLCFTNVYADSFVIRGDEVRQIAPGQTGKIADYNYKLPDDFTGCVIAWNSNNLDSKVGGNYNYLYRLFRKSNLKPFERDISTEIYQAGSTPCNGVEGFNCYFPLQSYGFQPTNGVGYQPYRVVVLSFELLHAPATVCGPKKSTNLVKNKCVNFNFNGLTGTGVLTESNKKFLPFQQFGRDIADTTDAVRDPQTLEILDITPCSFGGVSVITPGTNTSNQVAVLYQDVNCTEVPVAIHADQLTPTWRVYSTGSNVFQTRAGCLIGAEHVNNSYECDIPIGAGICASYQTQTNSPRRARSVASQSIIAYTMSLGAENSVAYSNNSIAIPTNFTISVTTEILPVSMTKTSVDCTMYICGDSTECSNLLLQYGSFCTQLNRALTGIAVEQDKNTQEVFAQVKQIYKTPPIKDCGGFNFSQILPDPSKPSKRSFIEDLLFNKVTLADAGFIKQYGDCLGDIAARDLICAQKFNGLTVLPPLLTDEMIAQYTSALLAGTITSGWTFGAGAALQIPFAMQMAYRFNGIGVTQNVLYENQKLIANQFNSAIGKIQDSLSSTASALGKLQDVVNQNAQALNTLVKQLSSNFGAISSVLNDILSRLDPPEAEVQIDRLITGRLQSLQTYVTQQLIRAAEIRASANLAATKMSECVLGQSKRVDFCGKGYQLMSFPQSAPHGVVFLNVTYVPAQEKNFTTAPAICNDGKAHFPREGVFVSNGTNWFVTQRNFYEPQIITTDNTFVSGNCDVVIGIVNNTVYDPLQPELDSFKEELDKYFKNHTSPDVDLGDISGINASVVNIQKEIDRLNEVAKNLNESLIDLQELGKYEQYIKGGGGSDIDPYKEFGSSYQLLNFLPLDFFPDLNALVDTATALYEEELTGREHCSPHHTAIRQALVCWDELTKLIAWMSSNITSEQVRTIIVNHVNDTWGLKVRQSLWFHLSCLTFGQHTVQEFLVSFGVWIRTPAPYRPPNAPILSTLPEHTVIC

SEQ ID NO: 6921 - protein, 1365 aa, Artificial Sequence
  SARS-CoV-2/Tianmen/HBCDC-HB-07/2020__EPI_ISL_412983 spike protein (1-1211)(K986P_V987P_ H1048Q_H1064N_ H1083N_H1101N) WhcAg construct
MFVFLVLLPLVSSQCVNLTTRTQLPPAYTNSFTRGVYYPDKVFRSSVLHSTQDLFLPFFSNVTWFHAIHVSGTNGTKRFDNPVLPFNDGVYFASTEKSNIIRGWIFGTTLDSKTQSLLIVNNATNVVIKVCEFQFCNDPFLGVYYHKNNKSWMESEFRVYSSANNCTFEYVSQPFLMDLEGKQGNFKNLREFVFKNIDGYFKIYSKHTPINLVRDLPQGFSALEPLVDLPIGINITRFQTLLALHRSYLTPGDSSSGWTAGAAAYYVGYLQPRTFLLKYNENGTITDAVDCALDPLSETKCTLKSFTVEKGIYQTSNFRVQPTESIVRFPNITNLCPFGEVFNATRFASVYAWNRKRISNCVADYSVLYNSASFSTFKCYGVSPTKLNDLCFTNVYADSFVIRGDEVRQIAPGQTGKIADYNYKLPDDFTGCVIAWNSNNLDSKVGGNYNYLYRLFRKSNLKPFERDISTEIYQAGSTPCNGVEGFNCYFPLQSYGFQPTNGVGYQPYRVVVLSFELLHAPATVCGPKKSTNLVKNKCVNFNFNGLTGTGVLTESNKKFLPFQQFGRDIADTTDAVRDPQTLEILDITPCSFGGVSVITPGTNTSNQVAVLYQDLNCTEVPVAIHADQLTPTWRVYSTGSNVFQTRAGCLIGAEHVNNSYECDIPIGAGICASYQTQTNSPRRARSVASQSIIAYTMSLGAENSVAYSNNSIAIPTNFTISVTTEILPVSMTKTSVDCTMYICGDSTECSNLLLQYGSFCTQLNRALTGIAVEQDKNTQEVFAQVKQIYKTPPIKDFGGFNFSQILPDPSKPSKRSFIEDLLFNKVTLADAGFIKQYGDCLGDIAARDLICAQKFNGLTVLPPLLTDEMIAQYTSALLAGTITSGWTFGAGAALQIPFAMQMAYRFNGIGVTQNVLYENQKLIANQFNSAIGKIQDSLSSTASALGKLQDVVNQNAQALNTLVKQLSSNFGAISSVLNDILSRLDPPEAEVQIDRLITGRLQSLQTYVTQQLIRAAEIRASANLAATKMSECVLGQSKRVDFCGKGYQLMSFPQSAPHGVVFLNVTYVPAQEKNFTTAPAICNDGKAHFPREGVFVSNGTNWFVTQRNFYEPQIITTDNTFVSGNCDVVIGIVNNTVYDPLQPELDSFKEELDKYFKNHTSPDVDLGDISGINASVVNIQKEIDRLNEVAKNLNESLIDLQELGKYEQYIKGGGGSDIDPYKEFGSSYQLLNFLPLDFFPDLNALVDTATALYEEELTGREHCSPHHTAIRQALVCWDELTKLIAWMSSNITSEQVRTIIVNHVNDTWGLKVRQSLWFHLSCLTFGQHTVQEFLVSFGVWIRTPAPYRPPNAPILSTLPEHTVIC

SEQ ID NO: 6922 - protein, 1365 aa, Artificial Sequence
  SARS-CoV-2/Hong Kong/case42_VM20002493/2020__EPI_ISL_414527 spike protein (1-1211)(K986P_V987P_ H1048Q_H1064N_ H1083N_H1101N) WhcAg construct
MFVFLVLLPLVSSQCVNLTTRTQLPPAYTNSFTRGVYYPDKVFRSSVLHSTQDLFLPFFSNVTWFHAIHVSGTNGTKRFDNPVLPFNDGVYFASTEKSNIIRGWIFGTTLDSKTQSLLIVNNATNVVIKVCEFQFCNDPFLGVYYHKNNKSWMESEFRVYSSANNCTFEYVSQPFLMDLEGKQGNFKNLREFVFKNIDGYFKIYSKHTPINLVRDLPQGFSALEPLVDLPIGINITRFQTLLALHRSYLTPGDSSSGWTAGAAAYYVGYLQPRTFLLKYNENGTITDAVDCALDPLSETKCTLKSFTVEKGIYQTSNFRVQPTESIVRFPNITNLCPFGEVFNATRFASVYAWNRKRISNCVADYSVLYNSASFSTFKCYGVSPTKLNDLCFTNVYADSFVIRGDEVRQIAPGQTGKIADYNYKLPDDFTGCVIAWNSNNLDSKVGGNYNYLYRLFRKSNLKPFERDISTEIYQAGSTPCNGVEGFNCYFPLQSYGFQPTNGVGYQPYRVVVLSFELLHAPATVCGPKKSTNLVKNKCVNFNFNGLTGTGVLTESNKKFLPFQQFGRDIADTTDAVRDPQTLEILDITPCSFGGVSVITPGTNTSNQVAVLYQDVNCTEVPVAIHADQLTPTWRVYSTGSNVFQTRAGCLIGAEHVNNSYECDIPIGAGICASYQTQTNSPRRARSVASQSIIAYTMSLGAENSVAYSNNSIAIPTNFAISVTTEILPVSMTKTSVDCTMYICGDSTECSNLLLQYGSFCTQLNRALTGIAVEQDKNTQEVFAQVKQIYKTPPIKDFGGFNFSQILPDPSKPSKRSFIEDLLFNKVTLADAGFIKQYGDCLGDIAARDLICAQKFNGLTVLPPLLTDEMIAQYTSALLAGTITSGWTFGAGAALQIPFAMQMAYRFNGIGVTQNVLYENQKLIANQFNSAIGKIQDSLSSTASALGKLQDVVNQNAQALNTLVKQLSSNFGAISSVLNDILSRLDPPEAEVQIDRLITGRLQSLQTYVTQQLIRAAEIRASANLAATKMSECVLGQSKRVDFCGKGYQLMSFPQSAPHGVVFLNVTYVPAQEKNFTTAPAICNDGKAHFPREGVFVSNGTNWFVTQRNFYEPQIITTDNTFVSGNCDVVIGIVNNTVYDPLQPELDSFKEELDKYFKNHTSPDVDLGDISGINASVVNIQKEIDRLNEVAKNLNESLIDLQELGKYEQYIKGGGGSDIDPYKEFGSSYQLLNFLPLDFFPDLNALVDTATALYEEELTGREHCSPHHTAIRQALVCWDELTKLIAWMSSNITSEQVRTIIVNHVNDTWGLKVRQSLWFHLSCLTFGQHTVQEFLVSFGVWIRTPAPYRPPNAPILSTLPEHTVIC

SEQ ID NO: 6923 - protein, 1365 aa, Artificial Sequence
  SARS-CoV-2/USA/CruiseA-23/2020__EPI_ISL_414482 spike protein (1-1211)(K986P_V987P_ H1048Q_H1064N_ H1083N_H1101N) WhcAg construct
MFVFLVLLPLVSSQCVNLTTRTQLPPAYTNSFTRGVYYPDKVFRSSVLHSTQDLFLPFFSNVTWFHAIHVSGTNGTKRFDNPVLPFNDGVYFASTEKSNIIRGWIFGTTLDSKTQSLLIVNNATNVVIKVCEFQFCNDPFLGVYYHKNNKSWMESEFRVYSSANNCTFEYVSQPFLMDLEVKQGNFKNLREFVFKNIDGYFKIYSKHTPINLVRDLPQGFSALEPLVDLPIGINITRFQTLLALHRSYLTPGDSSSGWTAGAAAYYVGYLQPRTFLLKYNENGTITDAVDCALDPLSETKCTLKSFTVEKGIYQTSNFRVQPTESIVRFPNITNLCPFGEVFNATRFASVYAWNRKRISNCVADYSVLYNSASFSTFKCYGVSPTKLNDLCFTNVYADSFVIRGDEVRQIAPGQTGKIADYNYKLPDDFTGCVIAWNSNNLDSKVGGNYNYLYRLFRKSNLKPFERDISTEIYQAGSTPCNGVEGFNCYFPLQSYGFQPTNGVGYQPYRVVVLSFELLHAPATVCGPKKSTNLVKNKCVNFNFNGLTGTGVLTESNKKFLPFQQFGRDIADTTDAVRDPQTLEILDITPCSFGGVSVITPGTNTSNQVAVLYQDVNCTEVPVAIHADQLTPTWRVYSTGSNVFQTRAGCLIGAEHVNNSYECDIPIGAGICASYQTQTNSPRRARSVASQSIIAYTMSLGAENSVAYSNNSIAIPTNFTISVTTEILPVSMTKTSVDCTMYICGDSTECSNLLLQYGSFCTQLNRALTGIAVEQDKNTQEVFAQVKQIYKTPPIKDFGGFNFSQILPDPSKPSKRSFIEDLLFNKVTLADAGFIKQYGDCLGDIAARDLICAQKFNGLTVLPPLLTDEMIAQYTSALLAGTITSGWTFGAGAALQIPFAMQMAYRFNGIGVTQNVLYENQKLIANQFNSAIGKIQDSLSSTASALGKLQDVVNQNAQALNTLVKQLSSNFGAISSVLNDILSRLDPPEAEVQIDRLITGRLQSLQTYVTQQLIRAAEIRASANLAATKMSECVLGQSKRVDFCGKGYQLMSFPQSAPHGVVFLNVTYVPAQEKNFTTAPAICNDGKAHFPREGVFVSNGTNWFVTQRNFYEPQIITTDNTFVSGNCDVVIGIVNNTVYDPLQPELDSFKEELDKYFKNHTSPDVDLGDISGINASVVNIQKEIDRLNEVAKNLNESLIDLQELGKYEQYIKGGGGSDIDPYKEFGSSYQLLNFLPLDFFPDLNALVDTATALYEEELTGREHCSPHHTAIRQALVCWDELTKLIAWMSSNITSEQVRTIIVNHVNDTWGLKVRQSLWFHLSCLTFGQHTVQEFLVSFGVWIRTPAPYRPPNAPILSTLPEHTVIC

SEQ ID NO: 6924 - protein, 1365 aa, Artificial Sequence
  SARS-CoV-2/Hong Kong/case85_VM20002868/2020__EPI_ISL_414519 spike protein (1-1211)(K986P_V987P_ H1048Q_H1064N_ H1083N_H1101N) WhcAg construct
MFVFLVLVPLVSSQCVNLTTRTQLPPAYTNSFTRGVYYPDKVFRSSVLHSTQDLFLPFFSNVTWFHAIHVSGTNGTKRFDNPVLPFNDGVYFASTEKSNIIRGWIFGTTLDSKTQSLLIVNNATNVVIKVCEFQFCNDPFLGVYYHKNNKSWMESEFRVYSSANNCTFEYVSQPFLMDLEGKQGNFKNLREFVFKNIDGYFKIYSKHTPINLVRDLPQGFSALEPLVDLPIGINITRFQTLLALHRSYLTPGDSSSGWTAGAAAYYVGYLQPRTFLLKYNENGTITDAVDCALDPLSETKCTLKSFTVEKGIYQTSNFRVQPTESIVRFPNITNLCPFGEVFNATRFASVYAWNRKRISNCVADYSVLYNSASFSTFKCYGVSPTKLNDLCFTNVYADSFVIRGDEVRQIAPGQTGKIADYNYKLPDDFTGCVIAWNSNNLDSKVGGNYNYLYRLFRKSNLKPFERDISTEIYQAGSTPCNGVEGFNCYFPLQSYGFQPTNGVGYQPYRVVVLSFELLHAPATVCGPKKSTNLVKNKCVNFNFNGLTGTGVLTESNKKFLPFQQFGRDIADTTDAVRDPQTLEILDITPCSFGGVSVITPGTNTSNQVAVLYQDVNCTEVPVAIHADQLTPTWRVYSTGSNVFQTRAGCLIGAEHVNNSYECDIPIGAGICASYQTQTNSPRRARSVASQSIIAYTMSLGAENSVAYSNNSIAIPTNFTISVTTEILPVSMTKTSVDCTMYICGDSTECSNLLLQYGSFCTQLNRALTGIAVEQDKNTQEVFAQVKQIYKTPPIKDFGGFNFSQILPDPSKPSKRSFIEDLLFNKVTLADAGFIKQYGDCLGDIAARDLICAQKFNGLTVLPPLLTDEMIAQYTSALLAGTITSGWTFGAGAALQIPFAMQMAYRFNGIGVTQNVLYENQKLIANQFNSAIGKIQDSLSSTASALGKLQDVVNQNAQALNTLVKQLSSNFGAISSVLNDILSRLDPPEAEVQIDRLITGRLQSLQTYVTQQLIRAAEIRASANLAATKMSECVLGQSKRVDFCGKGYQLMSFPQSAPHGVVFLNVTYVPAQEKNFTTAPAICNDGKAHFPREGVFVSNGTNWFVTQRNFYEPQIITTDNTFVSGNCDVVIGIVNNTVYDPLQPELDSFKEELDKYFKNHTSPDVDLGDISGINASVVNIQKEIDRLNEVAKNLNESLIDLQELGKYEQYIKGGGGSDIDPYKEFGSSYQLLNFLPLDFFPDLNALVDTATALYEEELTGREHCSPHHTAIRQALVCWDELTKLIAWMSSNITSEQVRTIIVNHVNDTWGLKVRQSLWFHLSCLTFGQHTVQEFLVSFGVWIRTPAPYRPPNAPILSTLPEHTVIC

SEQ ID NO: 6925 - protein, 1365 aa, Artificial Sequence; identical to SEQ ID NO: 6915
  SARS-CoV-2/England/200990660/2020__EPI_ISL_414523 spike protein (1-1211)(K986P_V987P_ H1048Q_H1064N_ H1083N_H1101N) WhcAg construct

SEQ ID NO: 6926 - protein, 1365 aa, Artificial Sequence
  SARS-CoV-2/Australia/NSW09/2020__EPI_ISL_413595 spike protein (1-1211)(K986P_V987P_ H1048Q_H1064N_ H1083N_H1101N) WhcAg construct
MFVFLVLLPLVSSQCVNLTTRTQLPPAYTNSFTRGVYYPDKVFRSSVLHSTQDLFLPFFSNVTWFHAIHVSGTNGTKRFDNPVLPFNDGVYFASTEKSNIIRGWIFGTTLDSKTQSLLIVNNATNVVIKVCEFQFCNDPFLGVYYHKNNKSWMESEFRVYSSANNCTFEYVSQPFLMDLEGKQGNFKNLREFVFKNIDGYFKIYSKHTPINLVRDLPQGFSALEPLVDLPIGINITRFQTLLALHRSYLTPGDSSSGWTAGAAAYYVGYLQPRTFLLKYNENGTITDAVDCALDPLSETKCTLKSFTVEKGIYQTSNFRVQPTESIVRFPNITNLCPFGEVFNATRFASVYAWNRKRISNCVADYSVLYNSASFSTFKCYGVSPTKLNDLCFTNVYADSFVIRGDEVRQIAPGQTGKIADYNYKLPDDFTGCVIAWNSNNLDSKVGGNYNYLYRLFRKSNLKPFERDISTEIYQAGSTPCNGVEGFNCYFPLQSYGFQPTNGVGYQPYRVVVLSFELLHAPATVCGPKKSTNLVKNKCVNFNFNGLTGTGVLTESNKKFLPFQQFGRDIADTTDAVRDPQTLEILDITPCSFGGVSVITPGTNTSNQVAVLYQDVNCTEVPVAIHADQLTPTWRVYSTGSNVFQTRAGCLIGAEHVNNSYECDIPIGAGICASYQTQTNSPRRARSVASQSIIAYTMSLGAENSVAYSNNSIAIPTNFTISVTTEILPVSMTKTSVDCTMYICGDSTECSNLLLQYGSFCTQLNRALTGIAVEQDKNTQEVFAQVKQIYKTPPIKDFGGFNFSQILPDPSKPSKRSFIEDLLFNKVTLADAGFIKQYGDCLGDIAARDLICAQKFNGLTVLPPLLTDEMIAQYTSALLAGTITSGWTFGAGAALQIPFAMQMAYRFNGIGVTQNVLYENQKLIANQFNSAIGKIQDSLSFTASALGKLQDVVNQNAQALNTLVKQLSSNFGAISSVLNDILSRLDPPEAEVQIDRLITGRLQSLQTYVTQQLIRAAEIRASANLAATKMSECVLGQSKRVDFCGKGYQLMSFPQSAPHGVVFLNVTYVPAQEKNFTTAPAICNDGKAHFPREGVFVSNGTNWFVTQRNFYEPQIITTDNTFVSGNCDVVIGIVNNTVYDPLQPELDSFKEELDKYFKNHTSPDVDLGDISGINASVVNIQKEIDRLNEVAKNLNESLIDLQELGKYEQYIKGGGGSDIDPYKEFGSSYQLLNFLPLDFFPDLNALVDTATALYEEELTGREHCSPHHTAIRQALVCWDELTKLIAWMSSNITSEQVRTIIVNHVNDTWGLKVRQSLWFHLSCLTFGQHTVQEFLVSFGVWIRTPAPYRPPNAPILSTLPEHTVIC

SEQ ID NO: 6927 - protein, 1365 aa, Artificial Sequence; identical to SEQ ID NO: 6907
  SARS-CoV-2/Australia/NSW10/2020__EPI_ISL_413596 spike protein (1-1211)(K986P_V987P_ H1048Q_H1064N_ H1083N_H1101N) WhcAg construct

SEQ ID NO: 6928 - protein, 1365 aa, Artificial Sequence
  SARS-CoV-2/Switzerland/1000477797/2020__EPI_ISL_413023 spike protein (1-1211)(K986P_V987P_ H1048Q_H1064N_ H1083N_H1101N) WhcAg construct
MFVFLVLLPLVSSQCVNLTTRTQLPPAYTNSFTRGVYYPDKVFRSSVLHSTQDLFLPFFSNVTWFHAIHVSGTNGTKRFDNPVLPFNDGVYFASTEKSNIIRGWIFGTTLDSKTQSLLIVNNATNVVIKVCEFQFCNDPFLGVYYHKNNKSWMESEFRVYSSANNCTFEYVSQPFLMDLEGKQGNFKNLREFVFKNIDGYFNIYSKHTPINLVRDLPQGFSALEPLVDLPIGINITRFQTLLALHRSYLTPGDSSSGWTAGAAAYYVGYLQPRTFLLKYNENGTITDAVDCALDPLSETKCTLKSFTVEKGIYQTSNFRVQPTESIVRFPNITNLCPFGEVFNATRFASVYAWNRKRISNCVADYSVLYNSASFSTFKCYGVSPTKLNDLCFTNVYADSFVIRGDEVRQIAPGQTGKIADYNYKLPDDFTGCVIAWNSNNLDSKVGGNYNYLYRLFRKSNLKPFERDISTEIYQAGSTPCNGVEGFNCYFPLQSYGFQPTNGVGYQPYRVVVLSFELLHAPATVCGPKKSTNLVKNKCVNFNFNGLTGTGVLTESNKKFLPFQQFGRDIADTTDAVRDPQTLEILDITPCSFGGVSVITPGTNTSNQVAVLYQGVNCTEVPVAIHADQLTPTWRVYSTGSNVFQTRAGCLIGAEHVNNSYECDIPIGAGICASYQTQTNSPRRARSVASQSIIAYTMSLGAENSVAYSNNSIAIPTNFTISVTTEILPVSMTKTSVDCTMYICGDSTECSNLLLQYGSFCTQLNRALTGIAVEQDKNTQEVFAQVKQIYKTPPIKDFGGFNFSQILPDPSKPSKRSFIEDLLFNKVTLADAGFIKQYGDCLGDIAARDLICAQKFNGLTVLPPLLTDEMIAQYTSALLAGTITSGWTFGAGAALQIPFAMQMAYRFNGIGVTQNVLYENQKLIANQFNSAIGKIQDSLSSTASALGKLQDVVNQNAQALNTLVKQLSSNFGAISSVLNDILSRLDPPEAEVQIDRLITGRLQSLQTYVTQQLIRAAEIRASANLAATKMSECVLGQSKRVDFCGKGYQLMSFPQSAPHGVVFLNVTYVPAQEKNFTTAPAICNDGKAHFPREGVFVSNGTNWFVTQRNFYEPQIITTDNTFVSGNCDVVIGIVNNTVYDPLQPELDSFKEELDKYFKNHTSPDVDLGDISGINASVVNIQKEIDRLNEVAKNLNESLIDLQELGKYEQYIKGGGGSDIDPYKEFGSSYQLLNFLPLDFFPDLNALVDTATALYEEELTGREHCSPHHTAIRQALVCWDELTKLIAWMSSNITSEQVRTIIVNHVNDTWGLKVRQSLWFHLSCLTFGQHTVQEFLVSFGVWIRTPAPYRPPNAPILSTLPEHTVIC

SEQ ID NO: 6929 - protein, 1365 aa, Artificial Sequence
  SARS-CoV-2/Belgium/BA-02291/2020__EPI_ISL_415159 spike protein (1-1211)(K986P_V987P_ H1048Q_H1064N_ H1083N_H1101N) WhcAg construct
MFVFLVLLPLVSSQCVNLTTRTQLPPAYTNSFTRGVYYPDKVFRSSVLHSTQDLFLPFFSNVTWFHAIHVSGTNGTKRFDNPVLPFNDGVYFASTEKSNIIRGWIFGTTLDSKTQSLLIVNNATNVVIKVCEFQFCNDPFLGVYYHKNNKSWMESEFRVYSSANNCTFEYVSQPFLMDLEGKQGNFKNLREFVFKNIDGYFKIYSKHTPINLVRDLPQGFSALEPLVDLPIGINITRFQTLLALHRSYLTPGDSSSGWTAGAAAYYVGYLQPRTFLLKYNENGTITDAVDCALDPLSETKCTLKSFTVEKGIYQTSNFRVQPTESIVRFPNITNLCPFGEVFNATRFASVYAWNRKRISNCVADYSVLYNSASFSTFKCYGVSPTKLNDLCFTNVYADSFVIRGDEVRQIAPGQTGKIADYNYKLPDDFTGCVIAWNSNNLDSKVGGNYNYLYRLFRRSNLKPFERDISTEIYQAGSTPCNGVEGFNCYFPLQSYGFQPTNGVGYQPYRVVVLSFELLPAPATVCGPKKSTNLVKNKCVNFNFNGLTGTGVLTESNKKFLPFQQFGRDIADTTDAVRDPQTLEILDITPCSFGGVSVITPGTNTSNQVAVLYQGVNCTEVPVAIHADQLTPTWRVYSTGSNVFQTRAGCLIGAEHVNNSYECDIPIGAGICASYQTQTNSPRRARSVASQSIIAYTMSLGAENSVAYSNNSIAIPTNFTISVTTEILPVSMTKTSVDCTMYICGDSTECSNLLLQYGSFCTQLNRALTGIAVEQDKNTQEVFAQVKQIYKTPPIKDFGGFNFSQILPDPSKPSKRSFIEDLLFNKVTLADAGFIKQYGDCLGDIAARDLICAQKFNGLTVLPPLLTDEMIAQYTSALLAGTITSGWTFGAGAALQIPFAMQMAYRFNGIGVTQNVLYENQKLIANQFNSAIGKIQDSLSSAAPALGKLQDVVNQNAQALNTLVKQLSSNFGAISSVLNDILSRLDPPEAEVQIDRLITGRLQSLQTYVTQQLIRAAEIRASANLAATKMSECVLGQSKRVDFCGKGYQLMSFPQSAPHGVVFLNVTYVPAQEKNFTTAPAICNDGKAHFPREGVFVSNGTNWFVTQRNFYEPQIITTDNTFVSGNCDVVIGIVNNTVYDPLQPELDSFKEELDKYFKNHTSPDVDLGDISGINASVVNIQKEIDRLNEVAKNLNESLIDLQELGKYEQYIKGGGGSDIDPYKEFGSSYQLLNFLPLDFFPDLNALVDTATALYEEELTGREHCSPHHTAIRQALVCWDELTKLIAWMSSNITSEQVRTIIVNHVNDTWGLKVRQSLWFHLSCLTFGQHTVQEFLVSFGVWIRTPAPYRPPNAPILSTLPEHTVIC

SEQ ID NO: 6930 - protein, 1365 aa, Artificial Sequence
  SARS-CoV-2/USA/WA8-UW5/2020__EPI_ISL_413486 spike protein (1-1211)(K986P_V987P_ H1048Q_H1064N_ H1083N_H1101N) WhcAg construct
MFVFLVLLPLVSSQCVNLTTRTQLPPAYTNSFTRGVYYPDKVFRSSVLHSTQDLFLPFFSNVTWFHAIHVSGTNGTKRFDNPVLPFNDGVYFASTEKSNIIRGWIFGTTLDSKTQSLLIVNNATNVVIKVCEFQFCNDPFLGVYYHKNNKSWMESEFRVYSSANNCTFEYVSQPFLMDLEGKQGNFKNLREFVFKNIDGYFKIYSKHTPINLVRDLPQGFSALEPLVDLPIGINITRFQTLLALHRSYLTPGDSSSGWTAGAAAYYVGYLQPRTFLLKYNENGTITDAVDCALDPLSETKCTLKSFTVEKGIYQTSNFRVQPTESIVRFPNITNLCPFGEVFNATRFASVYAWNRKRISNCVADYSVLYNSASFSTFKCYGVSPTKLNDLCFTNVYADSFVIRGDEVRQIAPGQTGKIADYNYKLPDDFTGCVIAWNSNNLDSKVGGNYNYLYRLFRKSNLKPFERDISTEIYQAGSTPCNGVEGFNCYFPLQSYGFQPTNGVGYQPYRVVVLSFELLHAPATVCGPKKSTNLVKNKCVNFNFNGLTGTGVLTESNKKFLPFQQFGRDIADTTDAVRDPQTLEILDITPCSFGGVSVITPGTNTSNQVAVLYQDVNCTEVPVAIHADQLTPTWRVYSTGSNVFQTRAGCLIGAEYVNNSYECDIPIGAGICASYQTQTNSPRRARSVASQSIIAYTMSLGAENSVAYSNNSIAIPTNFTISVTTEILPVSMTKTSVDCTMYICGDSTECSNLLLQYGSFCTQLNRALTGIAVEQDKNTQEVFAQVKQIYKTPPIKDFGGFNFSQILPDPSKPSKRSFIEDLLFNKVTLADAGFIKQYGDCLGDIAARDLICAQKFNGLTVLPPLLTDEMIAQYTSALLAGTITSGWTFGAGAALQIPFAMQMAYRFNGIGVTQNVLYENQKLIANQFNSAIGKIQDSLSSTASALGKLQDVVNQNAQALNTLVKQLSSNFGAISSVLNDILSRLDPPEAEVQIDRLITGRLQSLQTYVTQQLIRAAEIRASANLAATKMSECVLGQSKRVDFCGKGYQLMSFPQSAPHGVVFLNVTYVPAQEKNFTTAPAICNDGKAHFPREGVFVSNGTNWFVTQRNFYEPQIITTDNTFVSGNCDVVIGIVNNTVYDPLQPELDSFKEELDKYFKNHTSPDVDLGDISGINASVVNIQKEIDRLNEVAKNLNESLIDLQELGKYEQYIKGGGGSDIDPYKEFGSSYQLLNFLPLDFFPDLNALVDTATALYEEELTGREHCSPHHTAIRQALVCWDELTKLIAWMSSNITSEQVRTIIVNHVNDTWGLKVRQSLWFHLSCLTFGQHTVQEFLVSFGVWIRTPAPYRPPNAPILSTLPEHTVIC

SEQ ID NO: 6931 - protein, 1365 aa, Artificial Sequence
  SARS-CoV-2/England/20102000506/2020__EPI_ISL_415147 spike protein (1-1211)(K986P_V987P_ H1048Q_H1064N_ H1083N_H1101N) WhcAg construct
MFVFLVLLPLVSSQCVNLTTRTQLPPAYTNSFTRGVYYPDKVFRSSVLHSTQDLFLPFFSNVTWFHAIHVSGTNGTKRFDNPVLPFNDGVYFASTEKSNIIRGWIFGTTLDSKTQSLLIVNNATNVVIKVCEFQFCNDPFLGVYYHKNNKSWMESEFRVYSSANNCTFEYVSQPFLMDLEGKQGNFKNLREFVFKNIDGYFKIYSKHTPINLVRDLPQGFSALEPLVDLPIGINITRFQTLLALHRSYLTPGDSSSGWTAGAAAYYVGYLQPRTFLLKYNENGTITDAVDCALDPLSETKCTLKSFTVEKGIYQTSNFRVQPTESIVRFPNITNLCPFGEVFNATRFASVYAWNRKRISNCVADYSVLYNSASFSTFKCYGVSPTKLNDLCFTNVYADSFVIRGDEVRQIAPGQTGKIADYNYKLPDDFTGCVIAWNSNNLDSKVGGNYNYLYRLFRKSNLKPFERDISTEIYQAGSTPCNGVEGFNCYFPLQSYGFQPTNGVGYQPYRVVVLSFELLHAPATVCGPKKSTNLVKNKCVNFNFNGLTGTGVLTESNKKFLPFQQFGRDIADTTDAVRDPQTLEILDITPCSFGGVSVITPGTNTSNQVAVLYQGVNCTEVPVAIHADQLTPTWRVYSTGSNVFQTRAGCLIGAEHVNNSYECDIPIGAGICASYQTQTNSPRRARSVASQSIIAYTMSLGAENSVAYSNNSIAIPTNFTISVTTEILPVSMTKTSVDCTMYICGDSTECSNLLLQYGSFCTQLNRALTGIAVEQDKNTQEVFAQVKQIYKTPPIKDFGGFNFSQILPDPSKPSKRSFIEDLLFNKVTLADAGFIKQYGYCLGDIAARDLICAQKFNGLTVLPPLLTDEMIAQYTSALLAGTITSGWTFGAGAALQIPFAMQMAYRFNGIGVTQNVLYENQKLIANQFNSAIGKIQDSLSSTASALGKLQDVVNQNAQALNTLVKQLSSNFGAISSVLNDILSRLDPPEAEVQIDRLITGRLQSLQTYVTQQLIRAAEIRASANLAATKMSECVLGQSKRVDFCGKGYQLMSFPQSAPHGVVFLNVTYVPAQEKNFTTAPAICNDGKAHFPREGVFVSNGTNWFVTQRNFYEPQIITTDNTFVSGNCDVVIGIVNNTVYDPLQPELDSFKEELDKYFKNHTSPDVDLGDISGINASVVNIQKEIDRLNEVAKNLNESLIDLQELGKYEQYIKGGGGSDIDPYKEFGSSYQLLNFLPLDFFPDLNALVDTATALYEEELTGREHCSPHHTAIRQALVCWDELTKLIAWMSSNITSEQVRTIIVNHVNDTWGLKVRQSLWFHLSCLTFGQHTVQEFLVSFGVWIRTPAPYRPPNAPILSTLPEHTVIC

SEQ ID NO: 6932 - protein, 1365 aa, Artificial Sequence
  SARS-CoV-2/Belgium/VAG-03013/2020__EPI_ISL_415155 spike protein (1-1211)(K986P_V987P_ H1048Q_H1064N_ H1083N_H1101N) WhcAg construct
MFVFLVLLPLVSSQCVNLTTRTQLPPAYTNSFTRGVYYPDKVFRSSVLHSTQDLFLPFFSNVTWFHAIHVSGTNGTKRFDNPVLPFNDGVYFASTEKSNIIRGWIFGTTLDSKTQSLLIVNNATNVVIKVCEFQFCNDPFLGVYYHKNNKSWMESEFRVYSSANNCTFEYVSQPFLMDLEGKQGNFKNLREFVFKNIDGYFKIYSKHTPINLVRDLPQGFSALEPLVDLPIGINITRFQTLLALHRSYLTPGDSSSGWTAGAAAYYVGYLQPRTFLLKYNENGTITDAVDCALDPLSETKCTLKSFTVEKGIYQTSNFRVQPTESIVRFPNITNLCPFGEVFNATRFASVYAWNRKRISNCVADYSVLYNSASFSTFKCYGVSPTKLNDLCFTNVYADSFVIRGDEVRQIAPGQTGKIADYNYKLPDDFTGCVIAWNSNNLDSKVGGNYNYLYRLFRKSNLKPFERDISTEIYQAGSTPCNGVEGFNCYFPLQSYGFQPTNGVGYQPYRVVVLSFELLHAPATVCGPKKSTNLVKNKCVNFNFNGLTGTGVLTESNKKFLPFQQFGRDIADTTDAVRDPQTLEILDITPCSFGGVSVITPGTNTSNQVAVLYQGVNCTEVPVAIHADQLTPTWRVYSTGSNVFQTRAGCLIGAEHVNNSYECDIPIGAGICASYQTQTNSPRRARSVASQSIIAYTMSLGAENSVAYSNNSIAIPTNFTISVTTEILPVSMTKTSVDCTMYICGDSTECSNLLLQYGSFCTQLNRALTGIAVEQDKNTQEVFAQVKQIYKTPPIKDFGGFNFSQILPDPSKPSKRSFIEDLLFNKVTLADAGFIKQYGDCLGDIAARDLICAQKFNGLTVLPPLLTDEMIAQYTSALLAGTITSGWTFGAGAALQIPFAMQMAYRFNGIGVTQNVLYENQKLIANQFNSAIGKIQDSLSSTATALGKLQDVVNQNAQALNTLVKQLSSNFGAISSVLNDILSRLDPPEAEVQIDRLITGRLQSLQTYVTQQLIRAAEIRASANLAATKMSECVLGQSKRVDFCGKGYQLMSFPQSAPHGVVFLNVTYVPAQEKNFTTAPAICNDGKAHFPREGVFVSNGTNWFVTQRNFYEPQIITTDNTFVSGNCDVVIGIVNNTVYDPLQPELDSFKEELDKYFKNHTSPDVDLGDISGINASVVNIQKEIDRLNEVAKNLNESLIDLQELGKYEQYIKGGGGSDIDPYKEFGSSYQLLNFLPLDFFPDLNALVDTATALYEEELTGREHCSPHHTAIRQALVCWDELTKLIAWMSSNITSEQVRTIIVNHVNDTWGLKVRQSLWFHLSCLTFGQHTVQEFLVSFGVWIRTPAPYRPPNAPILSTLPEHTVIC

SEQ ID NO: 6933 - protein, 1365 aa, Artificial Sequence
  SARS-CoV-2/Belgium/BC-03016/2020__EPI_ISL_415157 spike protein (1-1211)(K986P_V987P_ H1048Q_H1064N_ H1083N_H1101N) WhcAg construct
MFVFLVLLPLVSSQCVNLTTRTQLPPAYTNSFTRGVYYPDKVFRSSVLHSTQDLFLPFFSNVTWFHAIHVSGTNGTKRFDNPVLPFNDGVYFASTEKSNIIRGWIFGTTLDSKTQSLLIVNNATNVVIKVCEFQFCNDPFLGVYYHKNNKSWMESEFRVYSSANNCTFEYVSQPFLMDLEGKQGNFKNLREFVFKNIDGYFKIYSKHTPINLVRDLPQGFSALEPLVDLPIGINITRFQTLLALHRSYLTPGDSSSGWTAGAAAYYVGYLQPRTFLLKYNENGTITDAVDCALDPLSETKCTLKSFTVEKGIYQTSNFRVQPTESIVRFPNITNLCPFGEVFNATRFASVYAWNRKRISNCVADYSVLYNSASFSTFKCYGVSPTKLNDLCFTNVYADSFVIRGDEVRQIAPGQTGKIADYNYKLPDDFTGCVIAWNSNNLDSKVGGNYNYLYRLFRKSNLKPFERDISTEIYQAGSTPCNGVEGFNCYFPLQSYGFQPTNGVGYQPYRVVVLSFELLHAPATVCGPKKSTNLVKNKCVNFNFNGLTGTGVLTESNKKFLPFQQFGRDIADTTDAVRDPQTLEILDITPCSFGGVSVITPGTNTSNQVAVLYQGVNCTEVPVAIHADQLTPTWRVYSTGSNVFQTRAGCLIGAEHVNNSYECDIPIGAGICASYQTQTNSPRRARSVASQSIIAYTMSLGAENSVAYSNNSIAIPTNFTISVTTEILPVSMTKTSVDCTMYICGDSTECSNLLLQYGSFCTQLNRALTGIAVEQDKNTQEVFAQVKQIYKTPPIKDFGGFNFSQILPDPSKPSKRSFIEDLLFNKVTLADAGFIKQYGDCLGDIAARDLICAQKFNGLTVLPPLLTDEMIAQYTSALLAGTITSGWTFGAGAALQIPFAMQMAYRFNGIGVTQNVLYENQKLIANQFNSAIGKIQDSLSSTAPALGKLQDVVNQNAQALNTLVKQLSSNFGAISSVLNDILSRLDPPEAEVQIDRLITGRLQSLQTYVTQQLIRAAEIRASANLAATKMSECVLGQSKRVDFCGKGYQLMSFPQSAPHGVVFLNVTYVPAQEKNFTTAPAICNDGKAHFPREGVFVSNGTNWFVTQRNFYEPQIITTDNTFVSGNCDVVIGIVNNTVYDPLQPELDSFKEELDKYFKNHTSPDVDLGDISGINASVVNIQKEIDRLNEVAKNLNESLIDLQELGKYEQYIKGGGGSDIDPYKEFGSSYQLLNFLPLDFFPDLNALVDTATALYEEELTGREHCSPHHTAIRQALVCWDELTKLIAWMSSNITSEQVRTIIVNHVNDTWGLKVRQSLWFHLSCLTFGQHTVQEFLVSFGVWIRTPAPYRPPNAPILSTLPEHTVIC

SEQ ID NO: 6934 - protein, 1365 aa, Artificial Sequence
  SARS-CoV-2/Germany/BavPat3/2020__EPI_ISL_414521 spike protein (1-1211)(K986P_V987P_ H1048Q_H1064N_ H1083N_H1101N) WhcAg construct
MFVFLVLLPLVSSQCVNLTTRTQLPPAYTNSFTRGVYYPDKVFRSSVLHSTQDLFLPFFSNVTWFHAIHVSGTNGTKRFDNPVLPFNDGVYFASTEKSNIIRGWIFGTTLDSKTQSLLIVNNATNVVIKVCEFQFCNDPFLGVYYHKNNKSWMESEFRVYSSANNCTFEYVSQPFLMDLEGKQGNFKNLREFVFKNIDGYFKIYSKHTPINLVRDLPQGFSALEPLVDLPIGINITRFQTLLALHRSYLTPGDSSSGWTAGAAAYYVGYLQPRTFLLKYNENGTITDAVDCALDPLSETKCTLKSFTVEKGIYQTSNFRVQPTESIVRFPNITNLCPFGEVFNATRFASVYAWNRKRISNCVADYSVLYNSASFSTFKCYGVSPTKLNDLCFTNVYADSFVIRGDEVRQIAPGQTGKIADYNYKLPDDFTGCVIAWNSNNLDSKVGGNYNYLYRLFRKSNLKPFERDISTEIYQAGSTPCNGVEGFNCYFPLQSYGFQPTNGVGYQPYRVVVLSFELLHAPATVCGPKKSTNLVKNKCVNFNFNGLTGTGVLTESNKKFLPFQQFGRDIADTTDAVRDPQTLEILDITPCSFGGVSVITPGTNTSNQVAVLYQDVNCTEVPVAIHADQLTPTWRVYSTGSNVFQTRAGCLIGAEHVNNSYECDIPIGAGICASYQTQTNSPRRARSVASQSIIAYTMSLGAENSVAYSNNSIAIPTNFTISVTTEILPVSMTKTSVDCTMYICGDSTECSNLLLQYGSFCTQLNRALTGIAVEQDKNTQQVFAQVKQIYKTPPIKDFGGFNFSQILPDPSKPSKRSFIEDLLFNKVTLADAGFIKQYGDCLGDIAARDLICAQKFNGLTVLPPLLTDEMIAQYTSALLAGTITSGWTFGAGAALQIPFAMQMAYRFNGIGVTQNVLYENQKLIANQFNSAIGKIQDSLSSTASALGKLQDVVNQNAQALNTLVKQLSSNFGAISSVLNDILSRLDPPEAEVQIDRLITGRLQSLQTYVTQQLIRAAEIRASANLAATKMSECVLGQSKRVDFCGKGYQLMSFPQSAPHGVVFLNVTYVPAQEKNFTTAPAICNDGKAHFPREGVFVSNGTNWFVTQRNFYEPQIITTDNTFVSGNCDVVIGIVNNTVYDPLQPELDSFKEELDKYFKNHTSPDVDLGDISGINASVVNIQKEIDRLNEVAKNLNESLIDLQELGKYEQYIKGGGGSDIDPYKEFGSSYQLLNFLPLDFFPDLNALVDTATALYEEELTGREHCSPHHTAIRQALVCWDELTKLIAWMSSNITSEQVRTIIVNHVNDTWGLKVRQSLWFHLSCLTFGQHTVQEFLVSFGVWIRTPAPYRPPNAPILSTLPEHTVIC

SEQ ID NO: 6935 - protein, 1365 aa, Artificial Sequence
  SARS-CoV-2/France/HF1805/2020__EPI_ISL_414628 spike protein (1-1211)(K986P_V987P_ H1048Q_H1064N_ H1083N_H1101N) WhcAg construct
MFVFLVLLPLVSSQCVNLTTRTQLPPAYTNSFTRGVYYPDKVFRSSVLHSTQDLFLPFFSNVTWFHAIHVSGTNGTKRFDNPVLPFNDGVYFASTEKSNIIRGWIFGTTLDSKTQSLLIVNNATNVVIKVCEFQFCNDPFLGVYYHKNNKSWMESEFRVYSSANNCTFEYVSQPFLMDLEGKQGNFKNLREFVFKNIDGYFKIYSKHTPINLVRDLPQGFSALEPLVDLPIGINITRFQTLLALHRSYLTPGDSSSGWTAGAAAYYVGYLQPRTFLLKYNENGTITDAVDCALDPLSETKCTLKSFTVEKGIYQTSNFRVQPTESIVRFPNITNLCPFGEVFNATRFASVYAWNRKRISNCVADYSVLYNSASFSTFKCYGVSPTKLNDLCFTNVYADSFVIRGDEVRQIAPGQTGKIADYNYKLPDDFTGCVIAWNSNNLDSKVGGNYNYLYRLFRKSNLKPFERDISTEIYQAGSTPCNGVEGFNCYFPLQSYGFQPTNGVGYQPYRVVVLSFELLHAPATVCGPKKSTNLVKNKCVNFNFNGLTGTGVLTESNKKFLPFQQFGRDIADTTDAVRDPQTLEILDITPCSFGGVSVITPGTNTSNQVAVLYQGVNCTEVPVAIHADQLTPTWRVYSTGSNVFQTRAGCLIGAEHVNNSYECDIPIGAGICASYQTQTNSPRRARSVASQSIIAYTMSLGAENSVAYSNNSIAIPTNFTISVTTEILPVSMTKTSVDCTMYICGDSTECSNLLLQYGSFCTQLNRALTGIAVEQDKNTQEVFAQVKQIYKTPPIKDFGGFNFSQILPDPSKPSKRSFIEDLLFNKVTLADAGFIKQYGDCLGDIAARDLICAQKFNGLTVLPPLLTDEMIAQYTSALLAGTITSGWTFGAGAALQIPFAMQMAYRFNGIGVTQNVLYENQKLIANQFNSAIGKIQDSLSSTASALGKLQDVVNQNAQALNTLVKQLSSNFGAISSVLNDILSRLDPPEAEVQIDRLITGRLQSLQTYVTQQLIRAAEIRASANLAATKMSECVLGQSKRVDFCGKGYQLMSFPQSAPHGVVFLNVTYVPAQEKNFTTAPAICNDGKAHFPREGVFVSNGTNWFVTQRNFYEPQIITTDNTFVSGNCDVVIGVVNNTVYDPLQPELDSFKEELDKYFKNHTSPDVDLGDISGINASVVNIQKEIDRLNEVAKNLNESLIDLQELGKYEQYIKGGGGSDIDPYKEFGSSYQLLNFLPLDFFPDLNALVDTATALYEEELTGREHCSPHHTAIRQALVCWDELTKLIAWMSSNITSEQVRTIIVNHVNDTWGLKVRQSLWFHLSCLTFGQHTVQEFLVSFGVWIRTPAPYRPPNAPILSTLPEHTVIC

SEQ ID NO: 6936 - protein, 1365 aa, Artificial Sequence
  SARS-CoV-2/Netherlands/ZuidHolland_9/2020__EPI_ISL_414445 spike protein (1-1211)(K986P_V987P_ H1048Q_H1064N_ H1083N_H1101N) WhcAg construct
MFVFLVLLPLVSSQCVNLTTRTQLPPAYTNSFTRGVYYPDKVFRSSVLHSTQDLFLPFFSNVTWFHAIHVSGTNGTKRFDNPVLPFNDGVYFASTEKSNIIRGWIFGTTLDSKTQSLLIVNNATNVVIKVCEFQFCNDPFLGVYYHKNNKSWMESEFRVYSSANNCTFEYVSQPFLMDLEGKQGNFKNLREFVFKNIDGYFKIYSKHTPINLVRDLPQGFSALEPLVDLPIGINITRFQTLLALHRSYLTPGDSSSGWTAGAAAYYVGYLQPRTFLLKYNENGTITDAVDCALDPLSETKCTLKSFTVEKGIYQTSNFRVQPTESIVRFPNITNLCPFGEVFNATRFASVYAWNRKRISNCVADYSVLYNSASFSTFKCYGVSPTKLNDLCFTNVYADSFVIRGDEVRQIAPGQTGKIADYNYKLPDDFTGCVIAWNSNNLDSKVGGNYNYLYRLFRKSNLKPFERDISTEIYQAGSTPCNGVEGFNCYFPLQSYGFQPTNGVGYQPYRVVVLSFELLHAPATVCGPKKSTNLVKNKCVNFNFNGLTGTGVLTESNKKFLPFQQFGRDIADTTDAVRDPQTLEILDITPCSFGGVSVITPGTNTSNQVAVLYQGVNCTEVPVAIHADQLTPTWRVYSTGSNVFQTRAGCLIGAEHVNNSYECDIPIGAGICASYQTQTNSPRRARSVASQSIIAYTMSLGAENSVAYSNNSIAIPTNFTISVTTEILPVSMTKTSVDCTMYICGDSTECSNLLLQYGSFCTQLNRALTGIAVEQDKNTQEVFAQVKQIYKTPPIKDFGGFNFSQILPDPSKPSKRSFIEDLLFNKVTLADAGFIKQYGDCLGDIAARDLICVQKFNGLTVLPPLLTDEMIAQYTSALLAGTITSGWTFGAGAALQIPFAMQMAYRFNGIGVTQNVLYENQKLIANQFNSAIGKIQDSLSSTASALGKLQDVVNQNAQALNTLVKQLSSNFGAISSVLNDILSRLDPPEAEVQIDRLITGRLQSLQTYVTQQLIRAAEIRASANLAATKMSECVLGQSKRVDFCGKGYQLMSFPQSAPHGVVFLNVTYVPAQEKNFTTAPAICNDGKAHFPREGVFVSNGTNWFVTQRNFYEPQIITTDNTFVSGNCDVVIGIVNNTVYDPLQPELDSFKEELDKYFKNHTSPDVDLGDISGINASVVNIQKEIDRLNEVAKNLNESLIDLQELGKYEQYIKGGGGSDIDPYKEFGSSYQLLNFLPLDFFPDLNALVDTATALYEEELTGREHCSPHHTAIRQALVCWDELTKLIAWMSSNITSEQVRTIIVNHVNDTWGLKVRQSLWFHLSCLTFGQHTVQEFLVSFGVWIRTPAPYRPPNAPILSTLPEHTVIC

SEQ ID NO: 6937 - protein, 1365 aa, Artificial Sequence
  SARS-CoV-2/Finland/FIN03032020A/2020__EPI_ISL_413602 spike protein (1-1211)(K986P_V987P_ H1048Q_H1064N_ H1083N_H1101N) WhcAg construct
MFVFLVLLPLVSSQCVNLTTRTQLPPAYTNSFTRGVYYPDKVFRSSVLHSTQDLFLPFFSNVTWFHAIHVSGTNGTKRFDNPVLPFNDGVYFASTEKSNIIRGWIFGTTLDSKTQSLLIVNNATNVVIKVCEFQFCNDPFLGVYYHKNNKSWMESEFRVYSSANNCTFEYVSQPFLMDLEGKQGNFKNLREFVFKNIDGYFKIYSKHTPINLVRDLPQGFSALEPLVDLPIGINITRFQTLLALHRSYLTPGDSSSGWTAGAAAYYVGYLQPRTFLLKYNENGTITDAVDCALDPLSETKCTLKSFTVEKGIYQTSNFRVQPTESIVRFPNITNLCPFGEVFNATRFASVYAWNRKRISNCVADYSVLYNSASFSTFKCYGVSPTKLNDLCFTNVYADSFVIRGDEVRQIAPGQTGKIADYNYKLPDDFTGCVISWNSNNLDSKVGGNYNYLYRLFRKSNLKPFERDISTEIYQAGSTPCNGVEGFNCYFPLQSYGFQPTNGVGYQPYRVVVLSFELLHAPATVCGPKKSTNLVKNKCVNFNFNGLTGTGVLTESNKKFLPFQQFGRDIADTTDAVRDPQTLEILDITPCSFGGVSVITPGTNTSNQVAVLYQGVNCTEVPVAIHADQLTPTWRVYSTGSNVFQTRAGCLIGAEHVNNSYECDIPIGAGICASYQTQTNSPRRARSVASQSIIAYTMSLGAENSVAYSNNSIAIPTNFTISVTTEILPVSMTKTSVDCTMYICGDSTECSNLLLQYGSFCTQLNRALTGIAVEQDKNTQEVFAQVKQIYKTPPIKDFGGFNFSQILPDPSKPSKRSFIEDLLFNKVTLADAGFIKQYGDCLGDIAARDLICAQKFNGLTVLPPLLTDEMIAQYTSALLAGTITSGWTFGAGAALQIPFAMQMAYRFNGIGVTQNVLYENQKLIANQFNSAIGKIQDSLSSTASALGKLQDVVNQNAQALNTLVKQLSSNFGAISSVLNDILSRLDPPEAEVQIDRLITGRLQSLQTYVTQQLIRAAEIRASANLAATKMSECVLGQSKRVDFCGKGYQLMSFPQSAPHGVVFLNVTYVPAQEKNFTTAPAICNDGKAHFPREGVFVSNGTNWFVTQRNFYEPQIITTDNTFVSGNCDVVIGIVNNTVYDPLQPELDSFKEELDKYFKNHTSPDVDLGDISGINASVVNIQKEIDRLNEVAKNLNESLIDLQELGKYEQYIKGGGGSDIDPYKEFGSSYQLLNFLPLDFFPDLNALVDTATALYEEELTGREHCSPHHTAIRQALVCWDELTKLIAWMSSNITSEQVRTIIVNHVNDTWGLKVRQSLWFHLSCLTFGQHTVQEFLVSFGVWIRTPAPYRPPNAPILSTLPEHTVIC

SEQ ID NO: 6938 - protein, 1365 aa, Artificial Sequence
  SARS-CoV-2/France/GE1977/2020__EPI_ISL_414632 spike protein (1-1211)(K986P_V987P_ H1048Q_H1064N_ H1083N_H1101N) WhcAg construct
MFVFLVLLPLVSSQCVNLTTRTQLPPAYTNSFTRGVYYPDKVFRSSVLHSTQDLFLPFFSNVTWFHAIHVSGTNGTKRFDNPVLPFNDGVYFASTEKSNIIRGWIFGTTLDSKTQSLLIVNNATNVVIKVCEFQFCNDPFLGVYYHKNNKSWMESEFRVYSSANNCTFEYVSQPFLMDLEGKQGNFKNLREFVFKNIDGYFKIYSKHTPINLVRDLPQGFSALEPLVDLPIGINITRFQTLLALHRSYLTPGDSSSGWTAGAAAYYVGYLQPRTFLLKYNENGTITDAVDCALDPLSETKCTLKSFTVEKGIYQTSNFRVQPTESIVRFPNITNLCPFGEVFNATRFASVYAWNRKRISNCVADYSVLYNSASFSTFKCYGVSPTKLNDLCFTNVYADSFVIRGDEVRQIAPGQTGKIADYNYKLPDDFTGCVIAWNSNNLDSKVGGNYNYLYRLFRKSNLKPFERDISTEIYQAGSTPCNGVEGFNCYFPLQSYGFQPTNGVGYQPYRVVVLSFELLHAPATVCGPKKSTNLVKNKCVNFNFNGLTGTGVLTESNKKFLPFQQFGRDIADTTDAVRDPQTLEILDITPCSFGGVSVITPGTNTSNQVAVLYQGVNCTEVPVAIHADQLTPTWRVYSTGSNVFQTRAGCLIGAEHVNNSYECDIPIGAGICASYQTQTNSPRRARSVASQSIIAYTMSLGAENSVAYSNNSIAIPTNFTISVTTEILPVSMTKTSVDCTMYICGDSTECSNLLLQYGSFCTQLNRALTGIAVEQDKNTQEVFAQVKQIYKTPPIKDFGGFNFSQILPDPSKPSKRSFIEDLLFNKVTLADAGFIKQYGDCLGDIAARDLICAQKFNGLTVLPPLLTDEMIAQYTSALLAGTITSGWTFGAGAALQIPFAMQMAYRFNGIGVTQNVLYENQKLIANQFNSAIGKIQDSLFSTASALGKLQDVVNQNAQALNTLVKQLSSNFGAISSVLNDILSRLDPPEAEVQIDRLITGRLQSLQTYVTQQLIRAAEIRASANLAATKMSECVLGQSKRVDFCGKGYQLMSFPQSAPHGVVFLNVTYVPAQEKNFTTAPAICNDGKAHFPREGVFVSNGTNWFVTQRNFYEPQIITTDNTFVSGNCDVVIGIVNNTVYDPLQPELDSFKEELDKYFKNHTSPDVDLGDISGINASVVNIQKEIDRLNEVAKNLNESLIDLQELGKYEQYIKGGGGSDIDPYKEFGSSYQLLNFLPLDFFPDLNALVDTATALYEEELTGREHCSPHHTAIRQALVCWDELTKLIAWMSSNITSEQVRTIIVNHVNDTWGLKVRQSLWFHLSCLTFGQHTVQEFLVSFGVWIRTPAPYRPPNAPILSTLPEHTVIC

SEQ ID NO: 6939 - protein, 1365 aa, Artificial Sequence
  SARS-CoV-2/Finland/FIN-313/2020__EPI_ISL_414641 spike protein (1-1211)(K986P_V987P_ H1048Q_H1064N_ H1083N_H1101N) WhcAg construct
MFVFLVLLPLVSSQCVNLTTRTQLPPAYTNSFTRGVYYPDKVFRSSVLHSTQDLFLPFFSNVTWFHAIHVSGTNGTKRFDNPVLPFNDGVYFASTEKSNIIRGWIFGTTLDSKTQSLLIVNNATNVVIKVCEFQFCNDPFLGVYYHKNNKSWMESEFRVYSSANNCTFEYVSQPFLMDLEGKQGNFKNLREFVFKNIDGYFKIYSKHTPINLVRDLPQGFSALEPLVDLPIGINITRFKTLLALHRSYLTPGDSSSGWTAGAAAYYVGYLQPRTFLLKYNENGTITDAVDCALDPLSETKCTLKSFTVEKGIYQTSNFRVQPTESIVRFPNITNLCPFGEVFNATRFASVYAWNRKRISNCVADYSVLYNSASFSTFKCYGVSPTKLNDLCFTNVYADSFVIRGDEVRQIAPGQTGKIADYNYKLPDDFTGCVIAWNSNNLDSKVGGNYNYLYRLFRKSNLKPFERDISTEIYQAGSTPCNGVEGFNCYFPLQSYGFQPTNGVGYQPYRVVVLSFELLHAPATVCGPKKSTNLVKNKCVNFNFNGLTGTGVLTESNKKFLPFQQFGRDIADTTDAVRDPQTLEILDITPCSFGGVSVITPGTNTSNQVAVLYQGVNCTEVPVAIHADQLTPTWRVYSTGSNVFQTRAGCLIGAEHVNNSYECDIPIGAGICASYQTQTNSPRRARSVASQSIIAYTMSLGAENSVAYSNNSIAIPTNFTISVTTEILPVSMTKTSVDCTMYICGDSTECSNLLLQYGSFCTQLNRALTGIAVEQDKNTQEVFAQVKQIYKTPPIKDFGGFNFSQILPDPSKPSKRSFIEDLLFNKVTLADAGFIKQYGDCLGDIAARDLICAQKFNGLTVLPPLLTDEMIAQYTSALLAGTITSGWTFGAGAALQIPFAMQMAYRFNGIGVTQNVLYENQKLIANQFNSAIGKIQDSLSSTASALGKLQDVVNQNAQALNTLVKQLSSNFGAISSVLNDILSRLDPPEAEVQIDRLITGRLQSLQTYVTQQLIRAAEIRASANLAATKMSECVLGQSKRVDFCGKGYQLMSFPQSAPHGVVFLNVTYVPAQEKNFTTAPAICNDGKAHFPREGVFVSNGTNWFVTQRNFYEPQIITTDNTFVSGNCDVVIGIVNNTVYDPLQPELDSFKEELDKYFKNHTSPDVDLGDISGINASVVNIQKEIDRLNEVAKNLNESLIDLQELGKYEQYIKGGGGSDIDPYKEFGSSYQLLNFLPLDFFPDLNALVDTATALYEEELTGREHCSPHHTAIRQALVCWDELTKLIAWMSSNITSEQVRTIIVNHVNDTWGLKVRQSLWFHLSCLTFGQHTVQEFLVSFGVWIRTPAPYRPPNAPILSTLPEHTVIC

SEQ ID NO: 6940 - protein, 1365 aa, Artificial Sequence
  SARS-CoV-2/Netherlands/ZuidHolland_2/2020__EPI_ISL_414556 spike protein (1-1211)(K986P_V987P_ H1048Q_H1064N_ H1083N_H1101N) WhcAg construct
MFVFLVLLPLVSSQCVNLTTRTQLPPAYTNSFTRGVYYPDKVFRSSVLHSTQDLFLPFFSNVTWFHAIHVSGTNGTKRFDNPVLPFNDGVYFASTEKSNIIRGWIFGTTLDSKTQSLLIVNNATNVVIKVCEFQFCNDPFLGVYYHKNNKSWMESEFRVYSSANNCTFEYVSQPFLMDLEGKQGNFKNLREFVFKNIDGYFKIYSKHTPINLVRDLPQGFSALEPLVDLPIGINITRFQTLLALHRSYLTPGDSSSGWTAGAAAYYVGYLQPRTFLLKYNENGTITDAVDCALDPLSETKCTLKSFTVEKGIYQTSNFRVQPTESIVRFPNITNLCPFGEVFNATRFASVYAWNRKRISNCVADYSVLYNSASFSTFKCYGVSPTKLNDLCFTNVYADSFVIRGDEVRQIAPGQTGKIADYNYKLPDDFTGCVIAWNSNNLDSKVGGNYNYLYRLFRKSNLKPFERDISTEIYQAGSTPCNGVEGFNCYFPLQSYGFQPTNGVGYQPYRVVVLSFELLHAPATVCGPKKSTNLVKNKCVNFNFNGLTGTGVLTESNKKFLPFQQFGRDIADTTDAVRDPQTLEILDITPCSFGGVSVITPGTNTSNQVAVLYQGVNCTEVPVAIHADQLTPTWRVYSTGSNVFQTRAGCLIGAEHVNNSYECDIPIGAGICASYQTQTNSPRRARSVASQSIIAYTMSLGAENSVAYSNNSIAIPTNFTISVTTEILPVSMTKTSVDCTMYICGDSTECSNLLLQYGSFCTQLNRALTGIALEQDKNTQEVFAQVKQIYKTPPIKDFGGFNFSQILPDPSKPSKRSFIEDLLFNKVTLADAGFIKQYGDCLGDIAARDLICAQKFNGLTVLPPLLTDEMIAQYTSALLAGTITSGWTFGAGAALQIPFAMQMAYRFNGIGVTQNVLYENQKLIANQFNSAIGKIQDSLSSTASALGKLQDVVNQNAQALNTLVKQLSSNFGAISSVLNDILSRLDPPEAEVQIDRLITGRLQSLQTYVTQQLIRAAEIRASANLAATKMSECVLGQSKRVDFCGKGYQLMSFPQSAPHGVVFLNVTYVPAQEKNFTTAPAICNDGKAHFPREGVFVSNGTNWFVTQRNFYEPQIITTDNTFVSGNCDVVIGIVNNTVYDPLQPELDSFKEELDKYFKNHTSPDVDLGDISGINASVVNIQKEIDRLNEVAKNLNESLIDLQELGKYEQYIKGGGGSDIDPYKEFGSSYQLLNFLPLDFFPDLNALVDTATALYEEELTGREHCSPHHTAIRQALVCWDELTKLIAWMSSNITSEQVRTIIVNHVNDTWGLKVRQSLWFHLSCLTFGQHTVQEFLVSFGVWIRTPAPYRPPNAPILSTLPEHTVIC

SEQ ID NO: 6941 - protein, 1365 aa, Artificial Sequence
  SARS-CoV-2/USA/WA-UW31/2020__EPI_ISL_414618 spike protein (1-1211)(K986P_V987P_ H1048Q_H1064N_ H1083N_H1101N) WhcAg construct
MFVFLVLLPLVSSQCVNLTTRTQLPPAYTNSFTRGVYYPDKVFRSSVLHSTQDLFLPFFSNVTWFHAIHVSGTNGTKRFDNPVLPFNDGVYFASTEKSNIIRGWIFGTTLDSKTQSLLIVNNATNVVIKVCEFQFCNDPFLGVYYHKNNKSWMESEFRVYSSANNCTFEYVSQPFLMDLEGKQGNFKNLREFVFKNIDGYFKIYSKHTPINLVRDLPQGFSALEPLVDLPIGINITRFQTLLALHRSYLTPGDSSSGWTAGAAAYYVGYLQPRTFLLKYNENGTITDAVDCALDPLSETKCTLKSFTVEKGIYQTSNFRVQPTESIVRFPNITNLCPFGEVFNATRFASVYAWNRKRISNCVADYSVLYNSASFSTFKCYGVSPTKLNDLCFTNVYADSFVIRGDEVRQIAPGQTGKIADYNYKLPDDFTGCVIAWNSNNLDSKVGGNYNYLYRLFRKSNLKPFERDISTEIYQAGSTPCNGAEGFNCYFPLQSYGFQPTNGVGYQPYRVVVLSFELLHAPATVCGPKKSTNLVKNKCVNFNFNGLTGTGVLTESNKKFLPFQQFGRDIADTTDAVRDPQTLEILDITPCSFGGVSVITPGTNTSNQVAVLYQDVNCTEVPVAIHADQLTPTWRVYSTGSNVFQTRAGCLIGAEHVNNSYECDIPIGAGICASYQTQTNSPRRARSVASQSIIAYTMSLGAENSVAYSNNSIAIPTNFTISVTTEILPVSMTKTSVDCTMYICGDSTECSNLLLQYGSFCTQLNRALTGIAVEQDKNTQEVFAQVKQIYKTPPIKDFGGFNFSQILPDPSKPSKRSFIEDLLFNKVTLADAGFIKQYGDCLGDIAARDLICAQKFNGLTVLPPLLTDEMIAQYTSALLAGTITSGWTFGAGAALQIPFAMQMAYRFNGIGVTQNVLYENQKLIANQFNSAIGKIQDSLSSTASALGKLQDVVNQNAQALNTLVKQLSSNFGAISSVLNDILSRLDPPEAEVQIDRLITGRLQSLQTYVTQQLIRAAEIRASANLAATKMSECVLGQSKRVDFCGKGYQLMSFPQSAPHGVVFLNVTYVPAQEKNFTTAPAICNDGKAHFPREGVFVSNGTNWFVTQRNFYEPQIITTDNTFVSGNCDVVIGIVNNTVYDPLQPELDSFKEELDKYFKNHTSPDVDLGDISGINASVVNIQKEIDRLNEVAKNLNESLIDLQELGKYEQYIKGGGGSDIDPYKEFGSSYQLLNFLPLDFFPDLNALVDTATALYEEELTGREHCSPHHTAIRQALVCWDELTKLIAWMSSNITSEQVRTIIVNHVNDTWGLKVRQSLWFHLSCLTFGQHTVQEFLVSFGVWIRTPAPYRPPNAPILSTLPEHTVIC

SEQ ID NO: 6942 - protein, 1365 aa, Artificial Sequence
  SARS-CoV-2/South Korea/SNU01/2020__EPI_ISL_411929 spike protein (1-1211)(K986P_V987P_ H1048Q_H1064N_ H1083N_H1101N) WhcAg construct
MFVFLVLLPLVSSQCVNLTTRTQLPPAYTNSFTRGVYYPDKVFRSSVLHSTQDLFLPFFSNVTWFHAIHVSGTNGTKRFDNPVLPFNDGVYFASTEKSNIIRGWIFGTTLDSKTQSLLIVNNATNVVIKVCEFQFCNDPFLGVYYHKNNKSWMESEFRVYSSANNCTFEYVSQPFLMDLEGKQGNFKNLREFVFKNIDGYFKIYSKHTPINLVRDLPQGFWALEPLVDLPIGINITRFQTLLALHRSYLTPGDSSSGWTAGAAAYYVGYLQPRTFLLKYNENGTITDAVDCALDPLSETKCTLKSFTVEKGIYQTSNFRVQPTESIVRFPNITNLCPFGEVFNATRFASVYAWNRKRISNCVADYSVLYNSASFSTFKCYGVSPTKLNDLCFTNVYADSFVIRGDEVRQIAPGQTGKIADYNYKLPDDFTGCVIAWNSNNLDSKVGGNYNYLYRLFRKSNLKPFERDISTEIYQAGSTPCNGVEGFNCYFPLQSYGFQPTNGVGYQPYRVVVLSFELLHAPATVCGPKKSTNLVKNKCVNFNFNGLTGTGVLTESNKKFLPFQQFGRDIADTTDAVRDPQTLEILDITPCSFGGVSVITPGTNTSNQVAVLYQDVNCTEVPVAIHADQLTPTWRVYSTGSNVFQTRAGCLIGAEHVNNSYECDIPIGAGICASYQTQTNSPRRARSVASQSIIAYTMSLGAENSVAYSNNSIAIPTNFTISVTTEILPVSMTKTSVDCTMYICGDSTECSNLLLQYGSFCTQLNRALTGIAVEQDKNTQEVFAQVKQIYKTPPIKDFGGFNFSQILPDPSKPSKRSFIEDLLFNKVTLADAGFIKQYGDCLGDIAARDLICAQKFNGLTVLPPLLTDEMIAQYTSALLAGTITSGWTFGAGAALQIPFAMQMAYRFNGIGVTQNVLYENQKLIANQFNSAIGKIQDSLSSTASALGKLQDVVNQNAQALNTLVKQLSSNFGAISSVLNDILSRLDPPEAEVQIDRLITGRLQSLQTYVTQQLIRAAEIRASANLAATKMSECVLGQSKRVDFCGKGYQLMSFPQSAPHGVVFLNVTYVPAQEKNFTTAPAICNDGKAHFPREGVFVSNGTNWFVTQRNFYEPQIITTDNTFVSGNCDVVIGIVNNTVYDPLQPELDSFKEELDKYFKNHTSPDVDLGDISGINASVVNIQKEIDRLNEVAKNLNESLIDLQELGKYEQYIKGGGGSDIDPYKEFGSSYQLLNFLPLDFFPDLNALVDTATALYEEELTGREHCSPHHTAIRQALVCWDELTKLIAWMSSNITSEQVRTIIVNHVNDTWGLKVRQSLWFHLSCLTFGQHTVQEFLVSFGVWIRTPAPYRPPNAPILSTLPEHTVIC

SEQ ID NO: 6943 - protein, 1365 aa, Artificial Sequence
  SARS-CoV-2/China/WF0004/2020__EPI_ISL_413694 spike protein (1-1211)(K986P_V987P_ H1048Q_H1064N_ H1083N_H1101N) WhcAg construct
MFVFLVLLPLVSSQCVNLTTRTQLPPAYTNSFTRGVYYPDKVFRSSVLHSTQDLFLPFFSNVTWFHAIHVSGTNGTKRFDNPVLPFNDGVYFASTEKSNIIRGWIFGTTLDSKTQSLLIVNNATNVVIKVCEFQFCNDPFLGVYYHKNNKSWTESEFRVYSSANNCTFEYVSQPFLMDLEGKQGNFKNLREFVFKNIDGYFKIYSKHTPINLVRDLPQGFSALEPLVDLPIGINITRFQTLLALHRSYLTPGDSSSGWTAGAAAYYVGYLQPRTFLLKYNENGTITDAVDCALDPLSETKCTLKSFTVEKGIYQTSNFRVQPTESIVRFPNITNLCPFGEVFNATRFASVYAWNRKRISNCVADYSVLYNSASFSTFKCYGVSPTKLNDLCFTNVYADSFVIRGDEVRQIAPGQTGKIADYNYKLPDDFTGCVIAWNSNNLDSKVGGNYNYLYRLFRKSNLKPFERDISTEIYQAGSTPCNGVEGFNCYFPLQSYGFQPTNGVGYQPYRVVVLSFELLHAPATVCGPKKSTNLVKNKCVNFNFNGLTGTGVLTESNKKFLPFQQFGRDIADTTDAVRDPQTLEILDITPCSFGGVSVITPGTNTSNQVAVLYQDVNCTEVPVAIHADQLTPTWRVYSTGSNVFQTRAGCLIGAEHVNNSYECDIPIGAGICASYQTQTNSPRRARSVASQSIIAYTMSLGAENSVAYSNNSIAIPTNFTISVTTEILPVSMTKTSVDCTMYICGDSTECSNLLLQYGSFCTQLNRALTGIAVEQDKNTQEVFAQVKQIYKTPPIKDFGGFNFSQILPDPSKPSKRSFIEDLLFNKVTLADAGFIKQYGDCLGDIAARDLICAQKFNGLTVLPPLLTDEMIAQYTSALLAGTITSGWTFGAGAALQIPFAMQMAYRFNGIGVTQNVLYENQKLIANQFNSAIGKIQDSLSSTASALGKLQDVVNQNAQALNTLVKQLSSNFGAISSVLNDILSRLDPPEAEVQIDRLITGRLQSLQTYVTQQLIRAAEIRASANLAATKMSECVLGQSKRFDFCGKGYQLMSFPQSAPHGVVFLNVTYVPAQEKNFTTAPAICNDGKAHFPREGVFVSNGTNWFVTQRNFYEPQIITTDNTFVSGNCDVVIGIVNNTVYDPLQPELDSFKEELDKYFKNHTSPDVDLGDISGINASVVNIQKEIDRLNEVAKNLNESLIDLQELGKYEQYIKGGGGSDIDPYKEFGSSYQLLNFLPLDFFPDLNALVDTATALYEEELTGREHCSPHHTAIRQALVCWDELTKLIAWMSSNITSEQVRTIIVNHVNDTWGLKVRQSLWFHLSCLTFGQHTVQEFLVSFGVWIRTPAPYRPPNAPILSTLPEHTVIC

SEQ ID NO: 6944 - protein, 1365 aa, Artificial Sequence
  SARS-CoV-2/China/WF0028/2020__EPI_ISL_413791 spike protein (1-1211)(K986P_V987P_ H1048Q_H1064N_ H1083N_H1101N) WhcAg construct
MFVFLVLLPLVSSQCVNLTTRTQLPPAYTNSFTRGVYYPDKVFRSSVLHSTQDLFLPFFSNVTWFHAIHVSGTNGTKRFDNPVLPFNDGVYFASTEKSNIIRGWIFGTTLDSKTQSLLIVNNATNVVIKVCEFQFCNDPFLGVYYHKNNKSWMESEFRVYSSANNCTFEYVSQPFLMDLEGKQGNFKNLREFVFKNIDGYFKIYSKHTPINLVRDLPQGFSALEPLVDLPIGINITRFQTLLALHRSYLTPGDSSSGWTAGAAAYYVGYLQPRTFLLKYNENGTITDAVDCALDPLSETKCTLKSFTVEKGIYQTSNFRVQPTESIVRFPNITNLCPFGEVFNATRFASVYAWNRKRISNCVADYSVLYNSASFSTFKCYGVSPTKLNDLCFTNVYADSFVIRGDEVRQIAPGQTGKIADYNYKLPDDFTGCVIAWNSNNLDSKVGGNYNYLYRLFRKSNLKPFERDISTEIYQAGSTPCNGVEGFNCYFPLQSYGFQPTNGVGYQPYRVVVLSFELLHAPATVCGPKKSTNLVKNKCVNFNFNGLTGTGVLTESNKKFLPFQQFGRDIADTTDAVRDPQTLEILDITPCSFGGVSVITPGTNTSNQVAVLYQDVNCTEVPVAIHADQLTPTWRVYSTGSNVFQTRAGCLIGAEHVNNSYECDIPIGAGICASYQTQTNSPRRARSVASQSIIAYTMSLGAENSVAYSNNSIAIPTNFTISVTTEILPVSMTKTSVDCTMYICGDSTECSNLLLQYGSFCTQLNRALTGIAVEQDKNTQEVFAQVKQIYKTPPIKDFGGFNFSQILPDPSKPSKRSFIEDLLFNKVTLADAGFIKQYGDCLGDIAARDLICAQKFNGLTVLPPLLTDEMIAQYTSALLAGTITSGWTFGAGAALQIPFAMQMAYRFNGIGVTQNVLYENQKLIANQFNSAIGKIQDSLSSTASALGKLQDVVNQNAQALNTLVKQLSSNFGAISSVLNDILSRLDPPEAEVQIDRLITGRLQSLQTYVTQQLIRAAEIRASANLAATKMSECVLGQSKRVDFCGKGYQLMSFPQSAPHGVVFLNVTYVPAQEKNFTTAPAICNDGKAHFPREGVFVSNGTNWFVTQRNFYEPQIITTDNTFVSGNCDVVIGIVNNTVYDPLQPELESFKEELDKYFKNHTSPDVDLGDISGINASVVNIQKEIDRLNEVAKNLNESLIDLQELGKYEQYIKGGGGSDIDPYKEFGSSYQLLNFLPLDFFPDLNALVDTATALYEEELTGREHCSPHHTAIRQALVCWDELTKLIAWMSSNITSEQVRTIIVNHVNDTWGLKVRQSLWFHLSCLTFGQHTVQEFLVSFGVWIRTPAPYRPPNAPILSTLPEHTVIC

SEQ ID NO: 6945 - protein, 1365 aa, Artificial Sequence
  SARS-CoV-2/2019-nCoV/USA-CruiseA-18/2020__MT159716.1 spike protein (1-1211)(K986P_V987P_ H1048Q_H1064N_ H1083N_H1101N) WhcAg construct
MFVFLVLLPLVSSQCVNLTTRTQLPPAYTNSFTRGVYYPDKVFRSSVLHSTQDLFLPFFSNVTWFHAIHVSGTNGTKRFDNPVLPFNDGVYFASTEKSNIIRGWIFGTTLDSKTQSLLIVNNATNVVIKVCEFQFCNDPFLGVYYHKNNKSWMESELRVYSSANNCTFEYVSQPFLMDLEGKQGNFKNLREFVFKNIDGYFKIYSKHTPINLVRDLPQGFSALEPLVDLPIGINITRFQTLLALHRSYLTPGDSSSGWTAGAAAYYVGYLQPRTFLLKYNENGTITDAVDCALDPLSETKCTLKSFTVEKGIYQTSNFRVQPTESIVRFPNITNLCPFGEVFNATRFASVYAWNRKRISNCVADYSVLYNSASFSTFKCYGVSPTKLNDLCFTNVYADSFVIRGDEVRQIAPGQTGKIADYNYKLPDDFTGCVIAWNSNNLDSKVGGNYNYLYRLFRKSNLKPFERDISTEIYQAGSTPCNGVEGFNCYFPLQSYGFQPTNGVGYQPYRVVVLSFELLHAPATVCGPKKSTNLVKNKCVNFNFNGLTGTGVLTESNKKFLPFQQFGRDIADTTDAVRDPQTLEILDITPCSFGGVSVITPGTNTSNQVAVLYQDVNCTEVPVAIHADQLTPTWRVYSTGSNVFQTRAGCLIGAEHVNNSYECDIPIGAGICASYQTQTNSPRRARSVASQSIIAYTMSLGAENSVAYSNNSIAIPTNFTISVTTEILPVSMTKTSVDCTMYICGDSTECSNLLLQYGSFCTQLNRALTGIAVEQDKNTQEVFAQVKQIYKTPPIKDFGGFNFSQILPDPSKPSKRSFIEDLLFNKVTLADAGFIKQYGDCLGDIAARDLICAQKFNGLTVLPPLLTDEMIAQYTSALLAGTITSGWTFGAGAALQIPFAMQMAYRFNGIGVTQNVLYENQKLIANQFNSAIGKIQDSLSSTASALGKLQDVVNQNAQALNTLVKQLSSNFGAISSVLNDILSRLDPPEAEVQIDRLITGRLQSLQTYVTQQLIRAAEIRASANLAATKMSECVLGQSKRVDFCGKGYQLMSFPQSAPHGVVFLNVTYVPAQEKNFTTAPAICNDGKAHFPREGVFVSNGTNWFVTQRNFYEPQIITTDNTFVSGNCDVVIGIVNNTVYDPLQPELDSFKEELDKYFKNHTSPDVDLGDISGINASVVNIQKEIDRLNEVAKNLNESLIDLQELGKYEQYIKGGGGSDIDPYKEFGSSYQLLNFLPLDFFPDLNALVDTATALYEEELTGREHCSPHHTAIRQALVCWDELTKLIAWMSSNITSEQVRTIIVNHVNDTWGLKVRQSLWFHLSCLTFGQHTVQEFLVSFGVWIRTPAPYRPPNAPILSTLPEHTVIC

SEQ ID NO: 6946 - protein, 1365 aa, Artificial Sequence
  SARS-CoV-2/SARS-CoV-2/Yunnan-01/human/2020/CHN__MT049951.1 spike protein (1-1211)(K986P_V987P_ H1048Q_H1064N_ H1083N_H1101N) WhcAg construct
MFVFLVLLPLVSSQCVNLTTRTQLPPANTNSFTRGVYYPDKVFRSSVLHSTQDLFLPFFSNVTWFHAIHVSGTNGTKRFDNPVLPFNDGVYFASTEKSNIIRGWIFGTTLDSKTQSLLIVNNATNVVIKVCEFQFCNDPFLGVYYHKNNKSWMESEFRVYSSANNCTFEYVSQPFLMDLEGKQGNFKNLREFVFKNIDGYFKIYSKHTPINLVRDLPQGFSALEPLVDLPIGINITRFQTLLALHRSYLTPGDSSSGWTAGAAAYYVGYLQPRTFLLKYNENGTITDAVDCALDPLSETKCTLKSFTVEKGIYQTSNFRVQPTESIVRFPNITNLCPFGEVFNATRFASVYAWNRKRISNCVADYSVLYNSASFSTFKCYGVSPTKLNDLCFTNVYADSFVIRGDEVRQIAPGQTGKIADYNYKLPDDFTGCVIAWNSNNLDSKVGGNYNYLYRLFRKSNLKPFERDISTEIYQAGSTPCNGVEGFNCYFPLQSYGFQPTNGVGYQPYRVVVLSFELLHAPATVCGPKKSTNLVKNKCVNFNFNGLTGTGVLTESNKKFLPFQQFGRDIADTTDAVRDPQTLEILDITPCSFGGVSVITPGTNTSNQVAVLYQDVNCTEVPVAIHADQLTPTWRVYSTGSNVFQTRAGCLIGAEHVNNSYECDIPIGAGICASYQTQTNSPRRARSVASQSIIAYTMSLGAENSVAYSNNSIAIPTNFTISVTTEILPVSMTKTSVDCTMYICGDSTECSNLLLQYGSFCTQLNRALTGIAVEQDKNTQEVFAQVKQIYKTPPIKDFGGFNFSQILPDPSKPSKRSFIEDLLFNKVTLADAGFIKQYGDCLGDIAARDLICAQKFNGLTVLPPLLTDEMIAQYTSALLAGTITSGWTFGAGAALQIPFAMQMAYRFNGIGVTQNVLYENQKLIANQFNSAIGKIQDSLSSTASALGKLQDVVNQNAQALNTLVKQLSSNFGAISSVLNDILSRLDPPEAEVQIDRLITGRLQSLQTYVTQQLIRAAEIRASANLAATKMSECVLGQSKRVDFCGKGYQLMSFPQSAPHGVVFLNVTYVPAQEKNFTTAPAICNDGKAHFPREGVFVSNGTNWFVTQRNFYEPQIITTDNTFVSGNCDVVIGIVNNTVYDPLQPELDSFKEELDKYFKNHTSPDVDLGDISGINASVVNIQKEIDRLNEVAKNLNESLIDLQELGKYEQYIKGGGGSDIDPYKEFGSSYQLLNFLPLDFFPDLNALVDTATALYEEELTGREHCSPHHTAIRQALVCWDELTKLIAWMSSNITSEQVRTIIVNHVNDTWGLKVRQSLWFHLSCLTFGQHTVQEFLVSFGVWIRTPAPYRPPNAPILSTLPEHTVIC

SEQ ID NO: 6947 - protein, 1365 aa, Artificial Sequence
  SARS-CoV-2/USA/WA-UW292/2020__EPI_ISL_418077 spike protein (1-1211)(K986P_V987P_ H1048Q_H1064N_ H1083N_H1101N) WhcAg construct
MFVFLVLLPLVSSQCVNLTTRTQLPPAYTNSFTRGVYYPDKVFRSSVLHSTQDLFLPFFSNVTWFHAIHVSGTNGTKRFDNPVLPFNDGVYFASTEKSNIIRGWIFGTTLDSKTQSLLIVNNATNVVIKVCEFQFCNDPFLGVYYHKNNKSWMESEFRVYSSANNCTFEYVSQPFLMDLEGKQGNFKNLREFVFKNIDGYFKIYSKHTPINLVRDLPQGFSALEPLVDLPIGINITRFQTLLALHRSYLTPGDSSSGWTAGAAAYYVGYLQPRTFLLKYNENGTITDAVDCALDPLSETKCTLKSFTVEKGIYQTSNFRVQPTESIVRFPNITNLCPFGEVFNATRFASVYAWNRKRISNCVADYSVLYNSASFSTFKCYGVSPTKLNDLCFTNVYADSFVIRGDEVRQIAPGQTGKIADYNYKLPDDFTGCVIAWNSNNLDSKVGGNYNYLYRLFRKSNLKPFERDISTEIYQASSTPCNGVEGFNCYFPLQSYGFQPTNGVGYQPYRVVVLSFELLHAPATVCGPKKSTNLVKNKCVNFNFNGLTGTGVLTESNKKFLPFQQFGRDIADTTDAVRDPQTLEILDITPCSFGGVSVITPGTNTSNQVAVLYQDVNCTEVPVAIHADQLTPTWRVYSTGSNVFQTRAGCLIGAEHVNNSYECDIPIGAGICASYQTQTNSPRRARSVASQSIIAYTMSLGAENSVAYSNNSIAIPTNFTISVTTEILPVSMTKTSVDCTMYICGDSTECSNLLLQYGSFCTQLNRALTGIAVEQDKNTQEVFAQVKQIYKTPPIKDFGGFNFSQILPDPSKPSKRSFIEDLLFNKVTLADAGFIKQYGDCLGDIAARDLICAQKFNGLTVLPPLLTDEMIAQYTSALLAGTITSGWTFGAGAALQIPFAMQMAYRFNGIGVTQNVLYENQKLIANQFNSAIGKIQDSLSSTASALGKLQDVVNQNAQALNTLVKQLSSNFGAISSVLNDILSRLDPPEAEVQIDRLITGRLQSLQTYVTQQLIRAAEIRASANLAATKMSECVLGQSKRVDFCGKGYQLMSFPQSAPHGVVFLNVTYVPAQEKNFTTAPAICNDGKAHFPREGVFVSNGTNWFVTQRNFYEPQIITTDNTFVSGNCDVVIGIVNNTVYDPLQPELDSFKEELDKYFKNHTSPDVDLGDISGINASVVNIQKEIDRLNEVAKNLNESLIDLQELGKYEQYIKGGGGSDIDPYKEFGSSYQLLNFLPLDFFPDLNALVDTATALYEEELTGREHCSPHHTAIRQALVCWDELTKLIAWMSSNITSEQVRTIIVNHVNDTWGLKVRQSLWFHLSCLTFGQHTVQEFLVSFGVWIRTPAPYRPPNAPILSTLPEHTVIC

SEQ ID NO: 6948 - protein, 1365 aa, Artificial Sequence
  SARS-CoV-2/Iceland/192/2020__EPI_ISL_417819 spike protein (1-1211)(K986P_V987P_ H1048Q_H1064N_ H1083N_H1101N) WhcAg construct
MFVFFVLLPLVSSQCVNLTTRTQLPPAYTNSFTRGVYYPDKVFRSSVLHSTQDLFLPFFSNVTWFHAIHVSGTNGTKRFDNPVLPFNDGVYFASTEKSNIIRGWIFGTTLDSKTQSLLIVNNATNVVIKVCEFQFCNDPFLGVYYHKNNKSWMESEFRVYSSANNCTFEYVSQPFLMDLEGKQGNFKNLREFVFKNIDGYFKIYSKHTPINLVRDLPQGFSALEPLVDLPIGINITRFQTLLALHRSYLTPGDSSSGWTAGAAAYYVGYLQPRTFLLKYNENGTITDAVDCALDPLSETKCTLKSFTVEKGIYQTSNFRVQPTESIVRFPNITNLCPFGEVFNATRFASVYAWNRKRISNCVADYSVLYNSASFSTFKCYGVSPTKLNDLCFTNVYADSFVIRGDEVRQIAPGQTGKIADYNYKLPDDFTGCVIAWNSNNLDSKVGGNYNYLYRLFRKSNLKPFERDISTEIYQAGSTPCNGVEGFNCYFPLQSYGFQPTNGVGYQPYRVVVLSFELLHAPATVCGPKKSTNLVKNKCVNFNFNGLTGTGVLTESNKKFLPFQQFGRDIADTTDAVRDPQTLEILDITPCSFGGVSVITPGTNTSNQVAVLYQGVNCTEVPVAIHADQLTPTWRVYSTGSNVFQTRAGCLIGAEHVNNSYECDIPIGAGICASYQTQTNSPRRARSVASQSIIAYTMSLGAENSVAYSNNSIAIPTNFTISVTTEILPVSMTKTSVDCTMYICGDSTECSNLLLQYGSFCTQLNRALTGIAVEQDKNTQEVFAQVKQIYKTPPIKDFGGFNFSQILPDPSKPSKRSFIEDLLFNKVTLADAGFIKQYGDCLGDIAARDLICAQKFNGLTVLPPLLTDEMIAQYTSALLAGTITSGWTFGAGAALQIPFAMQMAYRFNGIGVTQNVLYENQKLIANQFNSAIGKIQDSLSSTASALGKLQDVVNQNAQALNTLVKQLSSNFGAISSVLNDILSRLDPPEAEVQIDRLITGRLQSLQTYVTQQLIRAAEIRASANLAATKMSECVLGQSKRVDFCGKGYQLMSFPQSAPHGVVFLNVTYVPAQEKNFTTAPAICNDGKAHFPREGVFVSNGTNWFVTQRNFYEPQIITTDNTFVSGNCDVVIGIVNNTVYDPLQPELDSFKEELDKYFKNHTSPDVDLGDISGINASVVNIQKEIDRLNEVAKNLNESLIDLQELGKYEQYIKGGGGSDIDPYKEFGSSYQLLNFLPLDFFPDLNALVDTATALYEEELTGREHCSPHHTAIRQALVCWDELTKLIAWMSSNITSEQVRTIIVNHVNDTWGLKVRQSLWFHLSCLTFGQHTVQEFLVSFGVWIRTPAPYRPPNAPILSTLPEHTVIC

SEQ ID NO: 6949 - protein, 1365 aa, Artificial Sequence
  SARS-CoV-2/Belgium/ULG-6939/2020__EPI_ISL_417020 spike protein (1-1211)(K986P_V987P_ H1048Q_H1064N_ H1083N_H1101N) WhcAg construct
MFVFLVLLPLVSSQCVNLTTRTQLPPAYTNSFTRGVYYPDKVFRSSVLHSTQDLFLPFFSNVTWFHAIHVSGTNGTKRFDNPVLPFNDGVYFASTEKSNIIRGWIFGTTLDSKTQSLLIVNNATNVVIKVCEFQFCNDPFLGVYYHKNNKSWMESEFRVYSSANNCTFEYVSQPFLMDLEGKQGNFKNLREFVFKNIDGYFKIYSKHTPINLVRDLPQGFSALEPLVDLPIGINITRFQTLLALHRSYLTPGDSSSGWTAGAAAYYVGYLQPRTFLLKYNENGTITDAVDCALDPLSETKCTLKSFTVEKGIYQTSNFRVQPTESIVRFPNITNLCPFGEVFNATRFASVYAWNRKRISNCVADYSVLYNSASFSTFKCYGVSPTKLNDLCFTNVYADSFVIRGDEVRQIAPGQTGKIADYNYKLPDDFTGCVIAWNSNNLDSKVGGNYNYLYRLFRKSNLKPFERDISTEIYQAGSTPCNGVEGFNCYFPLQSYGFQPTNGVGYQPYRVVVLSFELLHAPATVCGPKKSTNLVKNKCVNFNFNGLTGTGVLTESNKKFLPFQQFGRDIADTTDAVRDPQTLEILDITPCSFGGVSVITPGTNTSNQVAVLYQGVNCTEVPVAIHADQLTPTWRVYSTGSNVFQTRAGCLIGAEHVNNSYECDIPIGAGICASYQTQTNSPRRARSVASQSIIAYTMSLGAENSVVYSNNSIAIPTNFTISVTTEILPVSMTKTSVDCTMYICGDSTECSNLLLQYGSFCTQLNRALTGIAVEQDKNTQEVFAQVKQIYKTPPIKDFGGFNFSQILPDPSKPSKRSFIEDLLFNKVTLADAGFIKQYGDCLGDIAARDLICAQKFNGLTVLPPLLTDEMIAQYTSALLAGTITSGWTFGAGAALQIPFAMQMAYRFNGIGVTQNVLYENQKLIANQFNSAIGKIQDSLSSTASALGKLQDVVNQNAQALNTLVKQLSSNFGAISSVLNDILSRLDPPEAEVQIDRLITGRLQSLQTYVTQQLIRAAEIRASANLAATKMSECVLGQSKRVDFCGKGYQLMSFPQSAPHGVVFLNVTYVPAQEKNFTTAPAICNDGKAHFPREGVFVSNGTNWFVTQRNFYEPQIITTDNTFVSGNCDVVIGIVNNTVYDPLQPELDSFKEELDKYFKNHTSPDVDLGDISGINASVVNIQKEIDRLNEVAKNLNESLIDLQELGKYEQYIKGGGGSDIDPYKEFGSSYQLLNFLPLDFFPDLNALVDTATALYEEELTGREHCSPHHTAIRQALVCWDELTKLIAWMSSNITSEQVRTIIVNHVNDTWGLKVRQSLWFHLSCLTFGQHTVQEFLVSFGVWIRTPAPYRPPNAPILSTLPEHTVIC

SEQ ID NO: 6950 - protein, 1365 aa, Artificial Sequence
  SARS-CoV-2/France/HF2496/2020__EPI_ISL_418231 spike protein (1-1211)(K986P_V987P_ H1048Q_H1064N_ H1083N_H1101N) WhcAg construct
MFVFLVLLPLVSSQCVNLTTRTQLPPAYTNSFTRGVYYPDKVFRSSVLHSTQDLFLPFFSNVTWFHAIHVSGTNGTKRFDNPVLPFNDGVYFASTEKSNIIRGWIFGTTLDSKTQSLLIVNNATNVVIKVCEFQFCNDPFLGVYYHKNNKSWMESEFRVYSSANNCTFEYVSQPFLMDLEGKQGNFKNLREFVFKNIDGYFKIYSKHTPINLVRDLPQGFSALEPLVDLPIGINITRFQTLLALHRSYLTPGDSSSGWTAGAAAYYVGYLQPRTFLLKYNENGTITDAVDCALDPLSETKCTLKSFTVEKGIYQTSNFRVQPTESIVRFPNITNLCPFGEVFNATRFASVYAWNRKRISNCVADYSVLYNSASFSTFKCYGVSPTKLNDLCFTNVYADSFVIRGDEVRQIAPGQTGKIADYNYKLPDDFTGCVIAWNSNNLDSKVGGNYNYLYRLFRKSNLKPFERDISTEIYQAGSTPCNGVEGFNCYFPLQSYGFQPTNGVGYQPYRVVVLSFELLHAPATVCGPKKSTNLVKNKCVNFNFNGLTGTGVLTESNKKFLPFQQFGRDIADTTDAVRDPQTLEILDITPCSFGGVSVITPGTNTSNQVAVLYQGVNCTEVPVAIHADQLTPTWRVYSTGSNVFQTRAGCLIGAEHVNNSYECDIPIGAGICASYQTQTNSPRRARSVASQSIIAYTMSLGAENSVAYSNNSIAIPTNFTISVTTEILPVSMTKTSVDCTMYICGDSTECSNLLLQYGSFCTQLNRALTGIAVEQDKNTQEVFAQVKQIYKTPPIKDFGGFNFSQILPDPSKPSKRSFIEDLLFNKVTLADAGFIKQYGDCLGDIVARDLICAQKFNGLTVLPPLLTDEMIAQYTSALLAGTITSGWTFGAGAALQIPFAMQMAYRFNGIGVTQNVLYENQKLIANQFNSAIGKIQDSLSSTASALGKLQDVVNQNAQALNTLVKQLSSNFGAISSVLNDILSRLDPPEAEVQIDRLITGRLQSLQTYVTQQLIRAAEIRASANLAATKMSECVLGQSKRVDFCGKGYQLMSFPQSAPHGVVFLNVTYVPAQEKNFTTAPAICNDGKAHFPREGVFVSNGTNWFVTQRNFYEPQIITTDNTFVSGNCDVVIGIVNNTVYDPLQPELDSFKEELDKYFKNHTSPDVDLGDISGINASVVNIQKEIDRLNEVAKNLNESLIDLQELGKYEQYIKGGGGSDIDPYKEFGSSYQLLNFLPLDFFPDLNALVDTATALYEEELTGREHCSPHHTAIRQALVCWDELTKLIAWMSSNITSEQVRTIIVNHVNDTWGLKVRQSLWFHLSCLTFGQHTVQEFLVSFGVWIRTPAPYRPPNAPILSTLPEHTVIC

SEQ ID NO: 6951 - protein, 1365 aa, Artificial Sequence
  SARS-CoV-2/USA/WA-UW291/2020__EPI_ISL_418076 spike protein (1-1211)(K986P_V987P_ H1048Q_H1064N_ H1083N_H1101N) WhcAg construct
MFVFLVLLPLVSSQCVNLTTRTQLPPAYTNSFTRGVYYPDKVFRSSVLHSTQDLFLPFFSNVTWFHAIHVSGTNGTKRFDNPVLPFNDGVYFASTEKSNIIRGWIFGTTLDSKTQSLLIVNNATNVVIKVCEFQFCNDPFLGVYYHKNNKSWMESEFRVYSSANNCTFEYVSQPFLMDLEGKQGNFKNLREFVFKNIDGYFKIYSKHTPINLVRDLPQGFSALEPLVDLPIGINITRFQTLLALHRSYLTPGDSSSGWTAGAAAYYVGYLQPRTFLLKYNENGTITDAVDCALDPLSETKCTLKSFTVEKGIYQTSNFRVQPTESIVRFPNITNLCPFGEVFNATRFASVYAWNRKRISNCVADYSVLYNSASFSTFKCYGVSPTKLNDLCFTNVYADSFVIRGDEVRQIAPGQTGKIADYNYKLPDDFTGCVIAWNSNNLDSKVGGNYNYLYRLFRKSNLKPFERDISTEIYQAGSTPCNGVEGFNCYFPLQSYGFQPTNGVGYQPYRVVVLSFELLHAPATVCGPKKSTNLVKNKCVNFNFNGLTGTGVLTESNKKFLPFQQFGRDIADTTDAVRDPQTLEILDITPCSFGGVSVITPGTNTSNQVAVLYQGVNCTEVPVAIHADQLTPTWRVYSTGSNVFQTRAGCLIGAEHVNNSYECDIPIGAGICASYQTQTNSPRRARSVASQSIIAYTMSLGAENSVAYSNNSIAIPTNFTISVTTEILPVSMTKTSVDCTMYICGDSTECSNLLLQYGSFCTQLNRALTGIAVEQDKNTQEVFAQVKQIYKTPPIKDFGGFNFSQILPDPSKPSKRSFIEDLLFNKVTLADAGFIKQYGDCLGDIAARDLICAQKFNGLTVLPPLLTDEMIAQYTSALLAGTITSGWTFGAGAALQIPFAMQMAYRFNGIGVTQNVLYENQKLIANQFNSAIGKIQYSLSSTASALGKLQDVVNQNAQALNTLVKQLSSNFGAISSVLNDILSRLDPPEAEVQIDRLITGRLQSLQTYVTQQLIRAAEIRASANLAATKMSECVLGQSKRVDFCGKGYQLMSFPQSAPHGVVFLNVTYVPAQEKNFTTAPAICNDGKAHFPREGVFVSNGTNWFVTQRNFYEPQIITTDNTFVSGNCDVVIGIVNNTVYDPLQPELDSFKEELDKYFKNHTSPDVDLGDISGINASVVNIQKEIDRLNEVAKNLNESLIDLQELGKYEQYIKGGGGSDIDPYKEFGSSYQLLNFLPLDFFPDLNALVDTATALYEEELTGREHCSPHHTAIRQALVCWDELTKLIAWMSSNITSEQVRTIIVNHVNDTWGLKVRQSLWFHLSCLTFGQHTVQEFLVSFGVWIRTPAPYRPPNAPILSTLPEHTVIC

SEQ ID NO: 6952 - protein, 1365 aa, Artificial Sequence; identical to SEQ ID NO: 6915
  SARS-CoV-2/Portugal/PT0034/2020__EPI_ISL_418019 spike protein (1-1211)(K986P_V987P_ H1048Q_H1064N_ H1083N_H1101N) WhcAg construct

SEQ ID NO: 6953 - protein, 1365 aa, Artificial Sequence
  SARS-CoV-2/Iceland/202/2020__EPI_ISL_417750 spike protein (1-1211)(K986P_V987P_ H1048Q_H1064N_ H1083N_H1101N) WhcAg construct
MFVFLVLLPLVSSQCVNLTTRTQLPPAYTNSFTRGVYYPDKVFRSSVLHSTQDLFLPFFSNVTWFHAIHVSGTNGTKRFDNPVLPFNDGVYFASTEKSNIIRGWIFGTTLDSKTQSLLIVNNATNVVIKVCEFQFCNDPFLGVYYHKNNKSWMESEFRVYSSANNCTFEYVSQPFLMDLEGKQGNFKNLREFVFKNIDGYFKIYSKHTPINLVRDLPQGFSALEPLVDLPIGINITRFQTLLALHRSYLTPGDSSSGWTAGAAAYYVGYLQPRTFLLKYNENGTITDAVDCALDPLSETKCTLKSFTVEKGIYQTSNFRVQPTESIVRFPNITNLCPFGEVFNATRFASVYAWNRKRISNCVADYSVLYNSASFSTFKCYGVSPTKLNDLCFTNVYADSFVIRGDEVRQIAPGQTGKIADYNYKLPDDFTGCVIAWNSNNLDSKVGGNYNYLYRLFRKSNLKPFERDISTEIYQAGSTPCNGVEGFNCYFPLQSYGFQPTNGVGYQPYRVVVLSFELLHAPATVCGPKKSTNLVKNKCVNFNFNGLTGTGVLTESNKKFLPFQQFGRDIADTTDAVRDPQTLEILDITPCSFGGVSVITPGTNTSNQVAVLYQDVNCTEVPVAIHADQLTPTWRVYSTGSNVFQTRAGCLIGAEHVNNSYECDIPIGAGICASYQTQTNSPRRARSVASQSIIAYTMSLGAENSVAYSNNSIAIPTNFTISVTTEILPVSMTKTSVDCTMYICGDSTECSNLLLQYGSFCTQLNRALTGIAVEQDKNTQEVFAQVKQIYKTPPIKDFGGFNFSQILPDPSKPSKRSFIEDLLFNKVTLADAGFIKQYGDCLGDIAARDLICAQKFNGLTVLPPLLTDEMIAQYTSALLAGTITSGWTFGAGAALQIPFAMQMAYRFNGIGVTQNVLYENQKLIANQFNSAIGKIQDSLSSTASALGKLQDVVNQNAQALNTLVKQLSSNFGAISSVLNDILSRLDPPEAEVQIDRLITGRLQSLQTYVTQQLIRAAEIRASANLAATKMSECVLGQSKRVDFCGKGYQLMSFPQSAPHGVVFLNVTYVPAQEKNFTTAPAICNDGKAHFPREGVFVSNGTNWFVTQRNFYEPQIITTDNTFVSGNCDVVIGIVNNTVYDPLQPELDSFKEELDKYFKNHTSPDVDLGDIPGINASVVNIQKEIDRLNEVAKNLNESLIDLQELGKYEQYIKGGGGSDIDPYKEFGSSYQLLNFLPLDFFPDLNALVDTATALYEEELTGREHCSPHHTAIRQALVCWDELTKLIAWMSSNITSEQVRTIIVNHVNDTWGLKVRQSLWFHLSCLTFGQHTVQEFLVSFGVWIRTPAPYRPPNAPILSTLPEHTVIC

SEQ ID NO: 6954 - protein, 1365 aa, Artificial Sequence
  SARS-CoV-2/USA/WA-UW261/2020__EPI_ISL_418046 spike protein (1-1211)(K986P_V987P_ H1048Q_H1064N_ H1083N_H1101N) WhcAg construct
MFVFLVLLPLVSSQCVNLTTRTQLPPAYTNSFTRGVYYPDKVFRSSVLHSTQDLFLPFFSNVTWFHAIHVSGTNGTKRFDNPVLPFNDGVYFASTEKSNIIRGWIFGTTLDSKTQSLLIVNNATNVVIKVCEFQFCNDPFLGVYYHKNNKSWMESEFRVYSSANNCTFEYVSQPFLMDLEGKQGNFKNLREFVFKNIDGYFKIYSKHTPINLVRDLPQGFSALEPLVDLPIGINITRFQTLLALHRSYLTPGDSSSGWTAGAAAYYVGYLQPRTFLLKYNENGTITDAVDCALDPLSETKCTLKSFTVEKGIYQTSNFRVQPTESIVRFPNITNLCPFGEVFNATRFTSVYAWNRKRISNCVADYSVLYNSASFSTFKCYGVSPTKLNDLCFTNVYADSFVIRGDEVRQIAPGQTGKIADYNYKLPDDFTGCVIAWNSNNLDSKVGGNYNYLYRLFRKSNLKPFERDISTEIYQAGSTPCNGVEGFNCYFPLQSYGFQPTNGVGYQPYRVVVLSFELLHAPATVCGPKKSTNLVKNKCVNFNFNGLTGTGVLTESNKKFLPFQQFGRDIADTTDAVRDPQTLEILDITPCSFGGVSVITPGTNTSNQVAVLYQDVNCTEVPVAIHADQLTPTWRVYSTGSNVFQTRAGCLIGAEHVNNSYECDIPIGAGICASYQTQTNSPRRARSVASQSIIAYTMSLGAENSVAYSNNSIAIPTNFTISVTTEILPVSMTKTSVDCTMYICGDSTECSNLLLQYGSFCTQLNRALTGIAVEQDKNTQEVFAQVKQIYKTPPIKDFGGFNFSQILPDPSKPSKRSFIEDLLFNKVTLADAGFIKQYGDCLGDIAARDLICAQKFNGLTVLPPLLTDEMIAQYTSALLAGTITSGWTFGAGAALQIPFAMQMAYRFNGIGVTQNVLYENQKLIANQFNSAIGKIQDSLSSTASALGKLQDVVNQNAQALNTLVKQLSSNFGAISSVLNDILSRLDPPEAEVQIDRLITGRLQSLQTYVTQQLIRAAEIRASANLAATKMSECVLGQSKRVDFCGKGYQLMSFPQSAPHGVVFLNVTYVPAQEKNFTTAPAICNDGKAHFPREGVFVSNGTNWFVTQRNFYEPQIITTDNTFVSGNCDVVIGIVNNTVYDPLQPELDSFKEELDKYFKNHTSPDVDLGDISGINASVVNIQKEIDRLNEVAKNLNESLIDLQELGKYEQYIKGGGGSDIDPYKEFGSSYQLLNFLPLDFFPDLNALVDTATALYEEELTGREHCSPHHTAIRQALVCWDELTKLIAWMSSNITSEQVRTIIVNHVNDTWGLKVRQSLWFHLSCLTFGQHTVQEFLVSFGVWIRTPAPYRPPNAPILSTLPEHTVIC

SEQ ID NO: 6955 - protein, 1365 aa, Artificial Sequence
  SARS-CoV-2/Portugal/PT0035/2020__EPI_ISL_418020 spike protein (1-1211)(K986P_V987P_ H1048Q_H1064N_ H1083N_H1101N) WhcAg construct
MFVFLVLLPLVSSQCVNLTTRTQLPPAYTNSFTRGVYYPDKVFRSSVLHSTQDLFLPFFSNVTWFHAIHVSGTNGTKRFDNPVLPFNDGVYFASTEKSNIIRGWIFGTTLDSKTQSLLIVNNATNVVIKVCEFQFCNDPFLGVYYHKNNKSWMESEFRVYSSANNCTFEYVSQPFLMDLEGKQGNFKNLREFVFKNIDGYFKIYSKHTPINLVRDLPQGFSALEPLVDLPIGINITRFQTLLALHRSYLTPGDSSSGWTAGAAAYYVGYLQPRTFLLKYNENGTITDAVDCALDPLSETKCTLKSFTVEKGIYQTSNFRVQPTESIVRFPNITNLCPFGEVFNATRFASVYAWNRKRISNCVADYSVLYNSASFSTFKCYGVSPTKLNDLCFTNVYADSFVIRGDEVRQIAPGQTGKIADYNYKLPDDFTGCVIAWNSNNLDSKVGGNYNYLYRLFRKSNLKPFERDISTEIYQAGSTPCNGVEGFNCYFPLQSYGFQPTNGVGYQPYRVVVLSFELLHAPATVCGPKKSTNLVKNKCVNFNFNGLTGTGVLTESNKKFLPFQQFGRDIADTTDAVRDPQTLEILDITPCSFGGVSVITPGTNTSNQVAVLYQDVNCTEVPVAIHADQLTPTWRVYSTGSNVFQTRAGCLIGAEHVNNSYECDIPIGAGICASYQTQTNSPRRARSVASQSIIAYTMSLGAENSVAYSNNSIAIPTNFTISVTTEILPVSMTKTSVDCTMYICGDSTECSNLLLQYGSFCTQLNRALTGIAVEQDKNTQEVFAQVKQIYKTPPIKDFGGFNFSQILPDPSKPSKRSFIEDLLFNKVTLADAGFIKQYGDCLGDISARDLICAQKFNGLTVLPPLLTDEMIAQYTSALLAGTITSGWTFGAGAALQIPFAMQMAYRFNGIGVTQNVLYENQKLIANQFNSAIGKIQDSLSSTASALGKLQDVVNQNAQALNTLVKQLSSNFGAISSVLNDILSRLDPPEAEVQIDRLITGRLQSLQTYVTQQLIRAAEIRASANLAATKMSECVLGQSKRVDFCGKGYQLMSFPQSAPHGVVFLNVTYVPAQEKNFTTAPAICNDGKAHFPREGVFVSNGTNWFVTQRNFYEPQIITTDNTFVSGNCDVVIGIVNNTVYDPLQPELDSFKEELDKYFKNHTSPDVDLGDISGINASVVNIQKEIDRLNEVAKNLNESLIDLQELGKYEQYIKGGGGSDIDPYKEFGSSYQLLNFLPLDFFPDLNALVDTATALYEEELTGREHCSPHHTAIRQALVCWDELTKLIAWMSSNITSEQVRTIIVNHVNDTWGLKVRQSLWFHLSCLTFGQHTVQEFLVSFGVWIRTPAPYRPPNAPILSTLPEHTVIC

SEQ ID NO: 6956 - protein, 1365 aa, Artificial Sequence
  SARS-CoV-2/USA/NY-NYUMC7/2020__EPI_ISL_418192 spike protein (1-1211)(K986P_V987P_ H1048Q_H1064N_ H1083N_H1101N) WhcAg construct
MFVFLVLLPLVSSQCVNLTTRTQLPPAYTNSFTRGVYYPDKVFRSSVLHSTQDLFLPFFSNVTWFHAIHVSGTNGTKRFDNPVLPFNDGVYFASTEKSNIIRGWIFGTTLDSKTQSLLIVNNATNVVIKVCEFQFCNDPFLGVYHHKNNKSWMESEFRVYSSANNCTFEYVSQPFLMDLEGKQGNFKNLREFVFKNIDGYFKIYSKHTPINLVRDLPQGFSALEPLVDLPIGINITRFQTLLALHRSYLTPGDSSSGWTAGAAAYYVGYLQPRTFLLKYNENGTITDAVDCALDPLSETKCTLKSFTVEKGIYQTSNFRVQPTESIVRFPNITNLCPFGEVFNATRFASVYAWNRKRISNCVADYSVLYNSASFSTFKCYGVSPTKLNDLCFTNVYADSFVIRGDEVRQIAPGQTGKIADYNYKLPDDFTGCVIAWNSNNLDSKVGGNYNYLYRLFRKSNLKPFERDISTEIYQAGSTPCNGVEGFNCYFPLQSYGFQPTNGVGYQPYRVVVLSFELLHAPATVCGPKKSTNLVKNKCVNFNFNGLTGTGVLTESNKKFLPFQQFGRDIADTTDAVRDPQTLEILDITPCSFGGVSVITPGTNTSNQVAVLYQGVNCTEVPVAIHADQLTPTWRVYSTGSNVFQTRAGCLIGAEHVNNSYECDIPIGAGICASYQTQTNSPRRARSVASQSIIAYTMSLGAENSVAYSNNSIAIPTNFTISVTTEILPVSMTKTSVDCTMYICGDSTECSNLLLQYGSFCTQLNRALTGIAVEQDKNTQEVFAQVKQIYKTPPIKDFGGFNFSQILPDPSKPSKRSFIEDLLFNKVTLADAGFIKQYGDCLGDIAARDLICAQKFNGLTVLPPLLTDEMIAQYTSALLAGTITSGWTFGAGAALQIPFAMQMAYRFNGIGVTQNVLYENQKLIANQFNSAIGKIQDSLSSTASALGKLQDVVNQNAQALNTLVKQLSSNFGAISSVLNDILSRLDPPEAEVQIDRLITGRLQSLQTYVTQQLIRAAEIRASANLAATKMSECVLGQSKRVDFCGKGYQLMSFPQSAPHGVVFLNVTYVPAQEKNFTTAPAICNDGKAHFPREGVFVSNGTNWFVTQRNFYEPQIITTDNTFVSGNCDVVIGIVNNTVYDPLQPELDSFKEELDKYFKNHTSPDVDLGDISGINASVVNIQKEIDRLNEVAKNLNESLIDLQELGKYEQYIKGGGGSDIDPYKEFGSSYQLLNFLPLDFFPDLNALVDTATALYEEELTGREHCSPHHTAIRQALVCWDELTKLIAWMSSNITSEQVRTIIVNHVNDTWGLKVRQSLWFHLSCLTFGQHTVQEFLVSFGVWIRTPAPYRPPNAPILSTLPEHTVIC

SEQ ID NO: 6957 - protein, 1365 aa, Artificial Sequence
  SARS-CoV-2/Iceland/189/2020__EPI_ISL_417709 spike protein (1-1211)(K986P_V987P_ H1048Q_H1064N_ H1083N_H1101N) WhcAg construct
MFVFLVLLPLVSSQCVNLTTRTQLPPAYTNSFTRGVYYPDKVFRSSVLHSTQDLFLPFFSNVTWFHAIHVSGTNGTKRFDNPVLPFNDGVYFASTEKSNIIRGWIFGTTLDSKTQSLLIVNNATNVVIKVCEFQFCNDPFLGVYYHKNNKSWMESEFRVYSSANNCTFEYVSQPFLMDLEGKQGNFKNLREFVFKNIDGYFKIYSKHTPINLVRDLPQGFSALEPLVDLPIGINITRFQTLLALHRSYLTPGDSSSGWTAGAAAYYVGYLQPRTFLLKYNENGTITDAVDCALDPLSETKCTLKSFTVEKGIYQTSNFRVQPTESIVRFPNITNLCPFGEVFNATRFASVYAWNRKRISNCVADYSVLYNSASFSTFKCYGVSPTKLNDLCFTNVYADSFVIRGDEVRQIAPGQTGKIADYNYKLPDDFTGCVIAWNSNNLDSKVGGNYNYLYRLFRKSNLKPFERDISTEIYQAGSTPCNGVEGFNCYFPLQSYGFQPTNGVGYQPYRVVVLSFELLHAPATVCGPKKSTNLVKNKCVNFNFNGLTGTGVLTESNKKFLPFQQFGRDIADTTDAVRDPQTLEILDITPCSFGGVSVITPGTNTSNQVAVLYQGVNCTEVPVAIHADQLTPTWRVYSTGSNVFQTRAGCLIGAEHVNNSYECDIPIGAGICASYQTQTNSPRRARSVASQSIIAYTMSLGAENSVAYSNNSIAIPTNFTISVTTEILPVSMTKTSVDCTMYICGDSTECSNLLLQYGSFCTQLNRALTGIAVEQDKNTQEVFAQVKQIYKTPPIKDFGGFNFSQILPDPSKPSKRSFIEDLLFNKVTLADAGFTKQYGDCLGDIAARDLICAQKFNGLTVLPPLLTDEMIAQYTSALLAGTITSGWTFGAGAALQIPFAMQMAYRFNGIGVTQNVLYENQKLIANQFNSAIGKIQDSLSSTASALGKLQDVVNQNAQALNTLVKQLSSNFGAISSVLNDILSRLDPPEAEVQIDRLITGRLQSLQTYVTQQLIRAAEIRASANLAATKMSECVLGQSKRVDFCGKGYQLMSFPQSAPHGVVFLNVTYVPAQEKNFTTAPAICNDGKAHFPREGVFVSNGTNWFVTQRNFYEPQIITTDNTFVSGNCDVVIGIVNNTVYDPLQPELDSFKEELDKYFKNHTSPDVDLGDISGINASVVNIQKEIDRLNEVAKNLNESLIDLQELGKYEQYIKGGGGSDIDPYKEFGSSYQLLNFLPLDFFPDLNALVDTATALYEEELTGREHCSPHHTAIRQALVCWDELTKLIAWMSSNITSEQVRTIIVNHVNDTWGLKVRQSLWFHLSCLTFGQHTVQEFLVSFGVWIRTPAPYRPPNAPILSTLPEHTVIC

SEQ ID NO: 6958 - protein, 1365 aa, Artificial Sequence
  SARS-CoV-2/Australia/NSW56/2020__EPI_ISL_417408 spike protein (1-1211)(K986P_V987P_ H1048Q_H1064N_ H1083N_H1101N) WhcAg construct
MFVFLVLLPLVSSQCVNLTTRTQLPPAYTNSFTRGVYYPDKVFRSSVLHSTQDLFLPFFSNVTWFHAIHVSGTNGTKRFDNPVLPFNDGVYFASTEKSNIIRGWIFGTTLDSKTQSLLIVNNATNVVIKVCEFQFCNDPFLGVYYHKNNKSWMESEFRVYSSANNCTFEYVSQPFLMDLEGKQGNFKNLREFVFKNIDGYFKIYSKHTPINLVRDLPQGFSALEPLVDLPIGINITRFQTLLALHRSYLTPGDSSSGWTAGAAAYYVGYLQPRTFLLKYNENGTITDAVDCALDPLSETKCTLKSFTVEKGIYQTSNFRVQPTESIVRFPNITNLCPFGEVFNATRFASVYAWNRKRISNCVADYSVLYNSASFSTFKCYGVSPTKLNDLCFTNVYADSFVIRGDEVRQIAPGQTGKIADYNYKLPDDFTGCVIAWNSNNLDSKVGGNYNYLYRLFRKSNLKPFERDISTEIYQAGSTPCNGVEGFNCYFPLQSYGFQPTNGVGYQPYRVVVLSFELLHAPATVCGPKKSTNLVKNKCVNFNFNGLTGTGVLTESNKKFLPFQQFGRDIADTTDAVRDPQTLEILDITPCSFGGVSVITPGTNTSNQVAVLYQDVNCTEVPVAIHADQLTPTWRVYSTGSNVFQTRAGCLIGAEHVNNSYECDIPIGAGICASYQTQTNSPRRARSVASQSIIAYTMSLGAENSVAYSNNSIAIPTNFTISVTTEILPVSMTKTSVDCTMYICGDSTECSNLLLQYGSFCTQLNRALTGIAVEQDKNTQEVFAQVKQIYKTPPIKDFGGFNFSQILPDSSKPSKRSFIEDLLFNKVTLADAGFIKQYGDCLGDIAARDLICAQKFNGLTVLPPLLTDEMIAQYTSALLAGTITSGWTFGAGAALQIPFAMQMAYRFNGIGVTQNVLYENQKLIANQFNSAIGKIQDSLSSTASALGKLQDVVNQNAQALNTLVKQLSSNFGAISSVLNDILSRLDPPEAEVQIDRLITGRLQSLQTYVTQQLIRAAEIRASANLAATKMSECVLGQSKRVDFCGKGYQLMSFPQSAPHGVVFLNVTYVPAQEKNFTTAPAICNDGKAHFPREGVFVSNGTNWFVTQRNFYEPQIITTDNTFVSGNCDVVIGIVNNTVYDPLQPELDSFKEELDKYFKNHTSPDVDLGDISGINASVVNIQKEIDRLNEVAKNLNESLIDLQELGKYEQYIKGGGGSDIDPYKEFGSSYQLLNFLPLDFFPDLNALVDTATALYEEELTGREHCSPHHTAIRQALVCWDELTKLIAWMSSNITSEQVRTIIVNHVNDTWGLKVRQSLWFHLSCLTFGQHTVQEFLVSFGVWIRTPAPYRPPNAPILSTLPEHTVIC

SEQ ID NO: 6959 - protein, 1365 aa, Artificial Sequence
  SARS-CoV-2/Iceland/280/2020__EPI_ISL_417608 spike protein (1-1211)(K986P_V987P_ H1048Q_H1064N_ H1083N_H1101N) WhcAg construct
MFVFLVLLPLVSSQCVNLTTRTQLPPAYTNSFTRGVYYPDKVFRSSVLHSTQDLFLPFFSNVTWFHAIHVSGTNGTKRFDNPVLPFNDGVYFASTEKSNIIRGWIFGTTLDSKTQSLLIVNNATNVVIKVCEFQFCNDPFLGVYYHKNNKSWMESEFRVYSSANNCTFEYVSQPFLMDLEGKQGNFKNLREFVFKNIDGYFKIYSKHTPINLVRDLPQGFSALEPLVDLPIGINITRFQTLLALHRSYLTPGDSSSGWTAGAAAYYVGYLQPRTFLLKYNENGTITDAVDCALDPLSETKCTLKSFTVEKGIYQTSNFRVQPTESIVRFPNITNLCPFGEVFNATRFASVYAWNRKRISNCVADYSVLYNSASFSTFKCYGVSPTKLNDLCFTNVYADSFVIRGDEVRQIAPGQTGKIADYNYKLPDDFTGCVIAWNSNNLDSKVGGNYNYLYRLFRKSNLKPFERDISTEIYQAGSTPCNGVEGFNCYFPLQSYGFQPTNGVGYQPYRVVVLSFELLHAPATVCGPKKSTNLVKNKCVNFNFNGLTGTGVLTESNKKFLPFQQFGRDIADTTDAVRDPQTLEILDITPCSFGGVSVITPGTNTSNQVAVLYQGVNCTEVPVAIHADQLTPTWRVYSTGSNVFQTRAGCLIGAEHVNNSYECDIPIGAGICASYHTQTNSPRRARSVASQSIIAYTMSLGAENSVAYSNNSIAIPTNFTISVTTEILPVSMTKTSVDCTMYICGDSTECSNLLLQYGSFCTQLNRALTGIAVEQDKNTQEVFAQVKQIYKTPPIKDFGGFNFSQILPDPSKPSKRSFIEDLLFNKVTLADAGFIKQYGDCLGDIAARDLICAQKFNGLTVLPPLLTDEMIAQYTSALLAGTITSGWTFGAGAALQIPFAMQMAYRFNGIGVTQNVLYENQKLIANQFNSAIGKIQDSLSSTASALGKLQDVVNQNAQALNTLVKQLSSNFGAISSVLNDILSRLDPPEAEVQIDRLITGRLQSLQTYVTQQLIRAAEIRASANLAATKMSECVLGQSKRVDFCGKGYQLMSFPQSAPHGVVFLNVTYVPAQEKNFTTAPAICNDGKAHFPREGVFVSNGTNWFVTQRNFYEPQIITTDNTFVSGNCDVVIGIVNNTVYDPLQPELDSFKEELDKYFKNHTSPDVDLGDISGINASVVNIQKEIDRLNEVAKNLNESLIDLQELGKYEQYIKGGGGSDIDPYKEFGSSYQLLNFLPLDFFPDLNALVDTATALYEEELTGREHCSPHHTAIRQALVCWDELTKLIAWMSSNITSEQVRTIIVNHVNDTWGLKVRQSLWFHLSCLTFGQHTVQEFLVSFGVWIRTPAPYRPPNAPILSTLPEHTVIC

SEQ ID NO: 6960 - protein, 1365 aa, Artificial Sequence; identical to SEQ ID NO: 6915
  SARS-CoV-2/Iceland/247/2020__EPI_ISL_417575 spike protein (1-1211)(K986P_V987P_ H1048Q_H1064N_ H1083N_H1101N) WhcAg construct

SEQ ID NO: 6961 - protein, 1365 aa, Artificial Sequence
  SARS-CoV-2/Iceland/238/2020__EPI_ISL_417566 spike protein (1-1211)(K986P_V987P_ H1048Q_H1064N_ H1083N_H1101N) WhcAg construct
MFVFLVLLPLVSSQCVNLTTRTQLPPAYTNSFTRGVYYPDKVFRSSVLHSTQDLFLPFFSNVTWFHAIHVSGTNGTKRFDNPVLPFNDGVYFASTEKSNIIRGWIFGTTLDSKTQSLLIVNNATNVVIKVCEFQFCNDPFLGVYYHKNNKSWMESEFRVYSSANNCTFEYVSQPFLMDLEGKQGNFKNLREFVFKNIDGYFKIYSKHTPINLVRDLPQGFSALEPLVDLPIGINITRFQTLLALHRSYLTPGDSSSGWTAGAAAYYVGYLQPRTFLLKYNENGTITDAVDCALDPLSETKCTLKSFTVEKGIYQTSNFRVQPTESIVRFPNITNLCPFGEVFNATRFASVYAWNRKRISNCVADYSVLYNSASFSTFKCYGVSPTKLNDLCFTNVYADSFVIRGDEVRQIAPGQTGKIADYNYKLPDDFTGCVIAWNSNNLDSKVGGNYNYLYRLFRKSNLKPFERDISTEIYQAGSTPCNGVEGFNCYFPLQSYGFQPTNGVGYQPYRVVVLSFELLHAPATVCGPKKSTNLVKNKCVNFNFNGLTGTGVLTESNKKFLPFQQFGRDIADTTDAVRDPQTLEILDITPCSFGGVSVITPGTNTSNQVAVLYQGVNCTEVPVAIHADQLTPTWRVYSTGSNVFQTRAGCLIGAEHVNNSYECDIPIGAGICASYQTQTNSPRRARSVASQSIIAYTMSLGAENSVAYSNNSIAIPTNFTISVTTEILPVSMTKTSVDCTMYICGDSTECSNLLLQYGSFCTQLNRALTGIAVEQDKNTQEVFAQVKQIYKTPPIKDFGGFNFSQILPDPSKPSKRSFIEDLLFNKVTLADVGFIKQYGDCLGDIAARDLICAQKFNGLTVLPPLLTDEMIAQYTSALLAGTITSGWTFGAGAALQIPFAMQMAYRFNGIGVTQNVLYENQKLIANQFNSAIGKIQDSLSSTASALGKLQDVVNQNAQALNTLVKQLSSNFGAISSVLNDILSRLDPPEAEVQIDRLITGRLQSLQTYVTQQLIRAAEIRASANLAATKMSECVLGQSKRVDFCGKGYQLMSFPQSAPHGVVFLNVTYVPAQEKNFTTAPAICNDGKAHFPREGVFVSNGTNWFVTQRNFYEPQIITTDNTFVSGNCDVVIGIVNNTVYDPLQPELDSFKEELDKYFKNHTSPDVDLGDISGINASVVNIQKEIDRLNEVAKNLNESLIDLQELGKYEQYIKGGGGSDIDPYKEFGSSYQLLNFLPLDFFPDLNALVDTATALYEEELTGREHCSPHHTAIRQALVCWDELTKLIAWMSSNITSEQVRTIIVNHVNDTWGLKVRQSLWFHLSCLTFGQHTVQEFLVSFGVWIRTPAPYRPPNAPILSTLPEHTVIC

SEQ ID NO: 6962 - protein, 1365 aa, Artificial Sequence
  SARS-CoV-2/Greece/16/2020__EPI_ISL_418265 spike protein (1-1211)(K986P_V987P_ H1048Q_H1064N_ H1083N_H1101N) WhcAg construct
MFVFLVLLPLVSSQCVNLTTRTQLPPAYTNSFTRGVYYPDKVFRSSVLHSTQDLFLPFFSNVTWFHAIHVSGTNGTKRFDNPVLPFNDGVYFASTEKSNIIRGWIFGTTLDSKTQSLLIVNNATNVVIKVCEFQFCNDPFLGVYYHKNNKSWMESEFRVYSSANNCTFEYVSQPFLMDLEGKQGNFKNLREFVFKNVDGYFKIYSKHTPINLVRDLPQGFSALEPLVDLPIGINITRFQTLLALHRSYLTPGDSSSGWTAGAAAYYVGYLQPRTFLLKYNENGTITDAVDCALDPLSETKCTLKSFTVEKGIYQTSNFRVQPTESIVRFPNITNLCPFGEVFNATRFASVYAWNRKRISNCVADYSVLYNSASFSTFKCYGVSPTKLNDLCFTNVYADSFVIRGDEVRQIAPGQTGKIADYNYKLPDDFTGCVIAWNSNNLDSKVGGNYNYLYRLFRKSNLKPFERDISTEIYQAGSTPCNGVEGFNCYFPLQSYGFQPTNGVGYQPYRVVVLSFELLHAPATVCGPKKSTNLVKNKCVNFNFNGLTGTGVLTESNKKFLPFQQFGRDIADTTDAVRDPQTLEILDITPCSFGGVSVITPGTNTSNQVAVLYQDVNCTEVPVAIHADQLTPTWRVYSTGSNVFQTRAGCLIGAEHVNNSYECDIPIGAGICASYQTQTNSPRRARSVASQSIIAYTMSLGAENSVAYSNNSIAIPTNFTISVTTEILPVSMTKTSVDCTMYICGDSTECSNLLLQYGSFCTQLNRALTGIAVEQDKNTQEVFAQVKQIYKTPPIKDFGGFNFSQILPDPSKPSKRSFIEDLLFNKVTLADAGFIKQYGDCLGDIAARDLICAQKFNGLTVLPPLLTDEMIAQYTSALLAGTITSGWTFGAGAALQIPFAMQMAYRFNGIGVTQNVLYENQKLIANQFNSAIGKIQDSLSSTASALGKLQDVVNQNAQALNTLVKQLSSNFGAISSVLNDILSRLDPPEAEVQIDRLITGRLQSLQTYVTQQLIRAAEIRASANLAATKMSECVLGQSKRVDFCGKGYQLMSFPQSAPHGVVFLNVTYVPAQEKNFTTAPAICNDGKAHFPREGVFVSNGTNWFVTQRNFYEPQIITTDNTFVSGNCDVVIGIVNNTVYDPLQPELDSFKEELDKYFKNHTSPDVDLGDISGINASVVNIQKEIDRLNEVAKNLNESLIDLQELGKYEQYIKGGGGSDIDPYKEFGSSYQLLNFLPLDFFPDLNALVDTATALYEEELTGREHCSPHHTAIRQALVCWDELTKLIAWMSSNITSEQVRTIIVNHVNDTWGLKVRQSLWFHLSCLTFGQHTVQEFLVSFGVWIRTPAPYRPPNAPILSTLPEHTVIC

SEQ ID NO: 6963 - protein, 1365 aa, Artificial Sequence
  SARS-CoV-2/Iceland/319/2020__EPI_ISL_417648 spike protein (1-1211)(K986P_V987P_ H1048Q_H1064N_ H1083N_H1101N) WhcAg construct
MFVFLVLLPLVSSQCVNLTTRTQLPPAYTNSFTRGVYYPDKVFRSSVLHSTQDLFLPFFSNVTWFHAIHVSGTNGTKRFDNPVLPFNDGVYFASTEKSNIIRGWIFGTTLDSKTQSLLIVNNATNVVIKVCEFQFCNDPFLGVYYHKNNKSWMESEFRVYSSANNCTFEYVSQPFLIDLEGKQGNFKNLREFVFKNIDGYFKIYSKHTPINLVRDLPQGFSALEPLVDLPIGINITRFQTLLALHRSYLTPGDSSSGWTAGAAAYYVGYLQPRTFLLKYNENGTITDAVDCALDPLSETKCTLKSFTVEKGIYQTSNFRVQPTESIVRFPNITNLCPFGEVFNATRFASVYAWNRKRISNCVADYSVLYNSASFSTFKCYGVSPTKLNDLCFTNVYADSFVIRGDEVRQIAPGQTGKIADYNYKLPDDFTGCVIAWNSNNLDSKVGGNYNYLYRLFRKSNLKPFERDISTEIYQAGSTPCNGVEGFNCYFPLQSYGFQPTNGVGYQPYRVVVLSFELLHAPATVCGPKKSTNLVKNKCVNFNFNGLTGTGVLTESNKKFLPFQQFGRDIADTTDAVRDPQTLEILDITPCSFGGVSVITPGTNTSNQVAVLYQGVNCTEVPVAIHADQLTPTWRVYSTGSNVFQTRAGCLIGAEHVNNSYECDIPIGAGICASYQTQTNSPRRARSVASQSIIAYTMSLGAENSVAYSNNSIAIPTNFTISVTTEILPVSMTKTSVDCTMYICGDSTECSNLLLQYGSFCTQLNRALTGIAVEQDKNTQEVFAQVKQIYKTPPIKDFGGFNFSQILPDPSKPSKRSFIEDLLFNKVTLADAGFIKQYGDCLGDIAARDLICAQKFNGLTVLPPLLTDEMIAQYTSALLAGTITSGWTFGAGAALQIPFAMQMAYRFNGIGVTQNVLYENQKLIANQFNSAIGKIQDSLSSTASALGKLQDVVNQNAQALNTLVKQLSSNFGAISSVLNDILSRLDPPEAEVQIDRLITGRLQSLQTYVTQQLIRAAEIRASANLAATKMSECVLGQSKRVDFCGKGYQLMSFPQSAPHGVVFLNVTYVPAQEKNFTTAPAICNDGKAHFPREGVFVSNGTNWFVTQRNFYEPQIITTDNTFVSGNCDVVIGIVNNTVYDPLQPELDSFKEELDKYFKNHTSPDVDLGDISGINASVVNIQKEIDRLNEVAKNLNESLIDLQELGKYEQYIKGGGGSDIDPYKEFGSSYQLLNFLPLDFFPDLNALVDTATALYEEELTGREHCSPHHTAIRQALVCWDELTKLIAWMSSNITSEQVRTIIVNHVNDTWGLKVRQSLWFHLSCLTFGQHTVQEFLVSFGVWIRTPAPYRPPNAPILSTLPEHTVIC

SEQ ID NO: 6964 - protein, 1365 aa, Artificial Sequence
  SARS-CoV-2/Congo/94/2020__EPI_ISL_417947 spike protein (1-1211)(K986P_V987P_ H1048Q_H1064N_ H1083N_H1101N) WhcAg construct
MFVFLVLLPLVSSQCVNLTTRTQLPPAYTNSFTRGVYYPDKVFRSSVLHSTQDLFLPFFSNVTWFHAIHVSGTNGTKRFDNPVLPFNDGVYFASTEKSNIIRGWIFGTTLDSKTQSLLIVNNATNVVIKVCEFQFCNDPFLGVYYHKNNKSWMESEFRVYSSANNCTFEYVSQPFLMDLEGKQGNFKNLREFVFKNIDGYFKIYSKHTPINLVRDLPQGFSALEPLVDLPIGINITRFQTLLALHRSYLTPGDSSSGWTAGAAAYYVGYLQPRTFLLKYNENGTITDAVDCALDPLSETKCTLKSFTVEKGIYQTSNFRVQPTESIVRFPNITNLCPFGEVFNATRFASVYAWNRKRISNCVADYSVLYNSASFSTFKCYGVSPTKLNDLCFTNVYADSFVIRGDEVRQIAPGQTGKIADYNYKLPDDFTGCVIAWNSNNLDSKVGGNYNYLYRLFRKSNLKPFERDISTEIYQAGSTPCNGVEGFNCYFPLQSYGFQPTNGVGYQPYRVVVLSFELLHAPATVCGPKKSTNLVKNKCVNFNFNGLTGTGVLTESNKKFLPFQQFGRDIADTTDAVRDPQTLEILDITPCSFGGVSVITPGTNTSNQVAVLYQGVNCTEVPVAIHADQLTPTWRVYSTGSNVFQTRAGCLIGAEHVNNSYECDIPIGAGICASYQTQTNSPRRARSVASQSIIAYTMSLGAENSVAYSNNSIAIPTNFTISVTTEILPVSMTKTSVDCTMYICGDSTECSNLLLQYGSFCTQLNRALTGIAVEQDKNTQEVFAQVKQIYKTPPIKDFGGFNFSQILPDPSKPSKRSFIEDILFNKVTLADAGFIKQYGDCLGDIAARDLICAQKFNGLTVLPPLLTDEMIAQYTSALLAGTITSGWTFGAGAALQIPFAMQMAYRFNGIGVTQNVLYENQKLIANQFNSAIGKIQDSLSSTASALGKLQDVVNQNAQALNTLVKQLSSNFGAISSVLNDILSRLDPPEAEVQIDRLITGRLQSLQTYVTQQLIRAAEIRASANLAATKMSECVLGQSKRVDFCGKGYQLMSFPQSAPHGVVFLNVTYVPAQEKNFTTAPAICNDGKAHFPREGVFVSNGTNWFVTQRNFYEPQIITTDNTFVSGNCDVVIGIVNNTVYDPLQPELDSFKEELDKYFKNHTSPDVDLGDISGINASVVNIQKEIDRLNEVAKNLNESLIDLQELGKYEQYIKGGGGSDIDPYKEFGSSYQLLNFLPLDFFPDLNALVDTATALYEEELTGREHCSPHHTAIRQALVCWDELTKLIAWMSSNITSEQVRTIIVNHVNDTWGLKVRQSLWFHLSCLTFGQHTVQEFLVSFGVWIRTPAPYRPPNAPILSTLPEHTVIC

SEQ ID NO: 6965 - protein, 1365 aa, Artificial Sequence
  SARS-CoV-2/Congo/158/2020__EPI_ISL_417950 spike protein (1-1211)(K986P_V987P_ H1048Q_H1064N_ H1083N_H1101N) WhcAg construct
MFVFLVLLPLVSSQCVNLTTRTQLPPAYTNSFTRGVYYPDKVFRSSVLHSTQDLFLPFFSNVTWFHAIHVSGTNGTKRFDNPVLPFNDGVYFASTEKSNIIRGWIFGTTLDSKTQSLLIVNNATNVVIKVCEFQFCNDPFLGVYYHKNNKSWMESEFRVYSSANNCTFEYVSQPFLMDLEGKQGNFKNLREFVFKNIDGYFKIYSKHTPINLVRDLPQGFSALEPLVDLPIGINITRFQTLLALHRSYLTPGDSSSGWTAGAAAYYVGYLQPRTFLLKYNENGTITDAVDCALDPLSETKCTLKSFTVEKGIYQTSNFRVQPTESIVRFPNITNLCPFGEVFNATRFASVYAWNRKRISNCVADYSVLYNSASFSTFKCYGVSPTKLNDLCFTNVYADSFVIRGDEVRQIAPGQTGKIADYNYKLPDDFTGCVIAWNSNNLDSKVGGNYNYLYRLFRKSNLKPFERDISTEIYQAGSTPCNGVEGFNCYFPLQSYGFQPTNGVGYQPYRVVVLSFELLHAPATVCGPKKSTNLVKNKCVNFNFNGLTGTGVLTESNKKFLPFQQFGRDIADTTDAVRDPQTLEILDITPCSFGGVSVITPGTNTSNQVAVLYQDVNCTEVPVAIHADQLTPTWRVYSTGSNVFQTRAGCLIGAEHVNNSYECDIPIGAGICASYQTQTNSPRRARSVASQSIIAYTMSLGAENSVAYSNNSIAIPTNFTISVTTEILPVSMTKTSVDCTMYICGDSTECSNLLLQYGSFCTQLNRALTGIAVEQDKNTQEVFAQVKQIYKTPPIKDFGGFNFSQILPDPSKPSKRSFIEDLLFNKVTLADAGFIKQYGDCLGDIAARDLICAQKFNGLTVLPPLLTDEMIAQYTSALLAGTITSGWTFGAGAALQIPFAMQMAYRFNGIGVTQNVLYENQKLIANQFNSAIGKIQDSLSSTASALGKLQDVVNQNAQALNTLVKQLSSNFGAISSVLNDILSRLDPPEAEVQIDRLITGRLQSLQTYVTQQLIRAAEIRASANLAATKMSECVLGQSKRVDFCGKGYQLMSFPQSAPHGVVFLNVTYVPAQEKNFTTAPAICNDGKAHFPREGVFVSNGTNWFVTQRNFYEPQIITTDNTFLSGNCDVVIGIVNNTVYDPLQPELDSFKEELDKYFKNHTSPDVDLGDISGINASVVNIQKEIDRLNEVAKNLNESLIDLQELGKYEQYIKGGGGSDIDPYKEFGSSYQLLNFLPLDFFPDLNALVDTATALYEEELTGREHCSPHHTAIRQALVCWDELTKLIAWMSSNITSEQVRTIIVNHVNDTWGLKVRQSLWFHLSCLTFGQHTVQEFLVSFGVWIRTPAPYRPPNAPILSTLPEHTVIC

SEQ ID NO: 6966 - protein, 1365 aa, Artificial Sequence
  SARS-CoV-2/USA/UT-00034/2020__EPI_ISL_417977 spike protein (1-1211)(K986P_V987P_ H1048Q_H1064N_ H1083N_H1101N) WhcAg construct
MFVFLVLLPLVSSQCVNLTTRTQLPPAYTNSFTRGVYYPDKVFRSSVLHSTQDLFLPFFSNVTWFHAIHVSGTNGTKRFDNPVLPFNDGVYFASTEKSNIIRGWIFGTTLDSKTQSLLIVNNATNVVIKVCEFQFCNDPFLGVYYYKNNKSWMESEFRVYSSANNCTFEYVSQPFLMDLEGKQGNFKNLREFVFKNIDGYFKIYSKHTPINLVRDLPQGFSALEPLVDLPIGINITRFQTLLALHRSYLTPGDSSSGWTAGAAAYYVGYLQPRTFLLKYNENGTITDAVDCALDPLSETKCTLKSFTVEKGIYQTSNFRVQPTESIVRFPNITNLCPFGEVFNATRFASVYAWNRKRISNCVADYSVLYNSASFSTFKCYGVSPTKLNDLCFTNVYADSFVIRGDEVRQIAPGQTGKIADYNYKLPDDFTGCVIAWNSNNLDSKVGGNYNYLYRLFRKSNLKPFERDISTEIYQAGSTPCNGVEGFNCYFPLQSYGFQPTNGVGYQPYRVVVLSFELLHAPATVCGPKKSTNLVKNKCVNFNFNGLTGTGVLTESNKKFLPFQQFGRDIADTTDAVRDPQTLEILDITPCSFGGVSVITPGTNTSNQVAVLYQGVNCTEVPVAIHADQLTPTWRVYSTGSNVFQTRAGCLIGAEHVNNSYECDIPIGAGICASYQTQTNSPRRARSVASQSIIAYTMSLGAENSVAYSNNSIAIPTNFTISVTTEILPVSMTKTSVDCTMYICGDSTECSNLLLQYGSFCTQLNRALTGIAVEQDKNTQEVFAQVKQIYKTPPIKDFGGFNFSQILPDPSKPSKRSFIEDLLFNKVTLADAGFIKQYGDCLGDIAARDLICAQKFNGLTVLPPLLTDEMIAQYTSALLAGTITSGWTFGAGAALQIPFAMQMAYRFNGIGVTQNVLYENQKLIANQFNSAIGKIQDSLSSTASALGKLQDVVNQNAQALNTLVKQLSSNFGAISSVLNDILSRLDPPEAEVQIDRLITGRLQSLQTYVTQQLIRAAEIRASANLAATKMSECVLGQSKRVDFCGKGYQLMSFPQSAPHGVVFLNVTYVPAQEKNFTTAPAICNDGKAHFPREGVFVSNGTNWFVTQRNFYEPQIITTDNTFVSGNCDVVIGIVNNTVYDPLQPELDSFKEELDKYFKNHTSPDVDLGDISGINASVVNIQKEIDRLNEVAKNLNESLIDLQELGKYEQYIKGGGGSDIDPYKEFGSSYQLLNFLPLDFFPDLNALVDTATALYEEELTGREHCSPHHTAIRQALVCWDELTKLIAWMSSNITSEQVRTIIVNHVNDTWGLKVRQSLWFHLSCLTFGQHTVQEFLVSFGVWIRTPAPYRPPNAPILSTLPEHTVIC

SEQ ID NO: 6967 - protein, 1365 aa, Artificial Sequence
  SARS-CoV-2/USA/UT-00033/2020__EPI_ISL_417976 spike protein (1-1211)(K986P_V987P_ H1048Q_H1064N_ H1083N_H1101N) WhcAg construct
MFVFLVLLPLVSSQCVNLTTRTQLPPAYTNSFTRGVYYPDKVFRSSVLHSTQDLFLPFFSNVTWFHAIHVSGTNGTKRFDNPVLPFNDGVYFASTEKSNIIRGWIFGTTLDSKTQSLLIVNNATNVVIKVCEFQFCNDPFLGVYYHKNNKSWMESEFRVYSSANNCTFEYVSQPFLMDLEGKQGNFKNLREFVFKNIDGYFKIYSKHTPINLVRDLPQGFSALEPLVDLPIGINITRFQTLLALHRSYLTPGDSSSGLTAGAAAYYVGYLQPRTFLLKYNENGTITDAVDCALDPLSETKCTLKSFTVEKGIYQTSNFRVQPTESIVRFPNITNLCPFGEVFNATRFASVYAWNRKRISNCVADYSVLYNSASFSTFKCYGVSPTKLNDLCFTNVYADSFVIRGDEVRQIAPGQTGKIADYNYKLPDDFTGCVIAWNSNNLDSKVGGNYNYLYRLFRKSNLKPFERDISTEIYQAGSTPCNGVEGFNCYFPLQSYGFQPTNGVGYQPYRVVVLSFELLHAPATVCGPKKSTNLVKNKCVNFNFNGLTGTGVLTESNKKFLPFQQFGRDIADTTDAVRDPQTLEILDITPCSFGGVSVITPGTNTSNQVAVLYQGVNCTEVPVAIHADQLTPTWRVYSTGSNVFQTRAGCLIGAEHVNNSYECDIPIGAGICASYQTQTNSPRRARSVASQSIIAYTMSLGAENSVAYSNNSIAIPTNFTISVTTEILPVSMTKTSVDCTMYICGDSTECSNLLLQYGSFCTQLNRALTGIAVEQDKNTQEVFAQVKQIYKTPPIKDFGGFNFSQILPDPSKPSKRSFIEDLLFNKVTLADAGFIKQYGDCLGDIAARDLICAQKFNGLTVLPPLLTDEMIAQYTSALLAGTITSGWTFGAGAALQIPFAMQMAYRFNGIGVTQNVLYENQKLIANQFNSAIGKIQDSLSSTASALGKLQDVVNQNAQALNTLVKQLSSNFGAISSVLNDILSRLDPPEAEVQIDRLITGRLQSLQTYVTQQLIRAAEIRASANLAATKMSECVLGQSKRVDFCGKGYQLMSFPQSAPHGVVFLNVTYVPAQEKNFTTAPAICNDGKAHFPREGVFVSNGTNWFVTQRNFYEPQIITTDNTFVSGNCDVVIGIVNNTVYDPLQPELDSFKEELDKYFKNHTSPDVDLGDISGINASVVNIQKEIDRLNEVAKNLNESLIDLQELGKYEQYIKGGGGSDIDPYKEFGSSYQLLNFLPLDFFPDLNALVDTATALYEEELTGREHCSPHHTAIRQALVCWDELTKLIAWMSSNITSEQVRTIIVNHVNDTWGLKVRQSLWFHLSCLTFGQHTVQEFLVSFGVWIRTPAPYRPPNAPILSTLPEHTVIC

SEQ ID NO: 6968 - protein, 1365 aa, Artificial Sequence
  SARS-CoV-2/USA/WI-13/2020__EPI_ISL_417516 spike protein (1-1211)(K986P_V987P_ H1048Q_H1064N_ H1083N_H1101N) WhcAg construct
MFVFLVLLPLVSSQCVNLTTRTQLPPAYTNSFTRGVYYPDKVFRSSVLHSTQDLFLPFFSNVTWFHAIHVSGTNGTKRFDNPVLPFNDGVYFASTEKSNIIRGWIFGTTLDSKTQSLLIVNNATNVVIKVCEFQFCNDPFLGVYYHKNNKSWMESEFRVYSSANNCTFEYVSQPFLMDLEGKQGNFKNLREFVFKNIDGYFKIYSKHTPINLVRDLPQGFSALEPLVDLPIGINITRFQTLLALHRSYLTPGDSSSGWTAGAAAYYVGYLQPRTFLLKYNENGTITDAVDCALDPLSETKCTLKSFTVEKGIYQTSNFRVLPTESIVRFPNITNLCPFGEVFNATRFASVYAWNRKRISNCVADYSVLYNSASFSTFKCYGVSPTKLNDLCFTNVYADSFVIRGDEVRQIAPGQTGKIADYNYKLPDDFTGCVIAWNSNNLDSKVGGNYNYLYRLFRKSNLKPFERDISTEIYQAGSTPCNGVEGFNCYFPLQSYGFQPTNGVGYQPYRVVVLSFELLHAPATVCGPKKSTNLVKNKCVNFNFNGLTGTGVLTESNKKFLPFQQFGRDIADTTDAVRDPQTLEILDITPCSFGGVSVITPGTNTSNQVAVLYQGVNCTEVPVAIHADQLTPTWRVYSTGSNVFQTRAGCLIGAEHVNNSYECDIPIGAGICASYQTQTNSPRRARSVASQSIIAYTMSLGAENSVAYSNNSIAIPTNFTISVTTEILPVSMTKTSVDCTMYICGDSTECSNLLLQYGSFCTQLNRALTGIAVEQDKNTQEVFAQVKQIYKTPPIKDFGGFNFSQILPDPSKPSKRSFIEDLLFNKVTLADAGFIKQYGDCLGDIAARDLICAQKFNGLTVLPPLLTDEMIAQYTSALLAGTITSGWTFGAGAALQIPFAMQMAYRFNGIGVTQNVLYENQKLIANQFNSAIGKIQDSLSSTASALGKLQDVVNQNAQALNTLVKQLSSNFGAISSVLNDILSRLDPPEAEVQIDRLITGRLQSLQTYVTQQLIRAAEIRASANLAATKMSECVLGQSKRVDFCGKGYQLMSFPQSAPHGVVFLNVTYVPAQEKNFTTAPAICNDGKAHFPREGVFVSNGTNWFVTQRNFYEPQIITTDNTFVSGNCDVVIGIVNNTVYDPLQPELDSFKEELDKYFKNHTSPDVDLGDISGINASVVNIQKEIDRLNEVAKNLNESLIDLQELGKYEQYIKGGGGSDIDPYKEFGSSYQLLNFLPLDFFPDLNALVDTATALYEEELTGREHCSPHHTAIRQALVCWDELTKLIAWMSSNITSEQVRTIIVNHVNDTWGLKVRQSLWFHLSCLTFGQHTVQEFLVSFGVWIRTPAPYRPPNAPILSTLPEHTVIC

SEQ ID NO: 6969 - protein, 1364 aa, Artificial Sequence
  SARS-CoV-2/India/1-27/2020__EPI_ISL_413522 spike protein (1-1210)(K985P_V986P_ H1047Q_H1063N_ H1082N_H1100N) WhcAg construct
MFVFLVLLPLVSSQCVNLTTRTQLPPAYTNSFTRGVYYPDKVFRSSVLHSTQDLFLPFFSNVTWFHAIHVSGTNGTKRFDNPVLPFNDGVYFASTEKSNIIRGWIFGTTLDSKTQSLLIVNNATNVVIKVCEFQFCNDPFLGVYHKNNKSWMESEFRVYSSANNCTFEYVSQPFLMDLEGKQGNFKNLREFVFKNIDGYFKIYSKHTPINLVRDLPQGFSALEPLVDLPIGINITRFQTLLALHRSYLTPGDSSSGWTAGAAAYYVGYLQPRTFLLKYNENGTITDAVDCALDPLSETKCTLKSFTVEKGIYQTSNFRVQPTESIVRFPNITNLCPFGEVFNATRFASVYAWNRKRISNCVADYSVLYNSASFSTFKCYGVSPTKLNDLCFTNVYADSFVIRGDEVIQIAPGQTGKIADYNYKLPDDFTGCVIAWNSNNLDSKVGGNYNYLYRLFRKSNLKPFERDISTEIYQAGSTPCNGVEGFNCYFPLQSYGFQPTNGVGYQPYRVVVLSFELLHAPATVCGPKKSTNLVKNKCVNFNFNGLTGTGVLTESNKKFLPFQQFGRDIADTTDAVRDPQTLEILDITPCSFGGVSVITPGTNTSNQVAVLYQDVNCTEVPVAIHADQLTPTWRVYSTGSNVFQTRAGCLIGAEHVNNSYECDIPIGAGICASYQTQTNSPRRARSVASQSIIAYTMSLGAENSVAYSNNSIAIPTNFTISVTTEILPVSMTKTSVDCTMYICGDSTECSNLLLQYGSFCTQLNRALTGIAVEQDKNTQEVFAQVKQIYKTPPIKDFGGFNFSQILPDPSKPSKRSFIEDLLFNKVTLADAGFIKQYGDCLGDIAARDLICAQKFNGLTVLPPLLTDEMIAQYTSALLAGTITSGWTFGAGAALQIPFAMQMAYRFNGIGVTQNVLYENQKLIANQFNSAIGKIQDSLSSTASALGKLQDVVNQNAQALNTLVKQLSSNFGAISSVLNDILSRLDPPEAEVQIDRLITGRLQSLQTYVTQQLIRAAEIRASANLAATKMSECVLGQSKRVDFCGKGYQLMSFPQSAPHGVVFLNVTYVPAQEKNFTTAPAICNDGKAHFPREGVFVSNGTNWFVTQRNFYEPQIITTDNTFVSGNCDVVIGIVNNTVYDPLQPELDSFKEELDKYFKNHTSPDVDLGDISGINASVVNIQKEIDRLNEVAKNLNESLIDLQELGKYEQYIKGGGGSDIDPYKEFGSSYQLLNFLPLDFFPDLNALVDTATALYEEELTGREHCSPHHTAIRQALVCWDELTKLIAWMSSNITSEQVRTIIVNHVNDTWGLKVRQSLWFHLSCLTFGQHTVQEFLVSFGVWIRTPAPYRPPNAPILSTLPEHTVIC

SEQ ID NO: 6970 - protein, 1359 aa, Artificial Sequence
  SARS-CoV-2/pangolin/Guangxi/P4L/2017__EPI_ISL_410538 spike protein (1-1205)(K980P_V981P_ H1042Q_H1058N_ H1077N_H1095N) WhcAg construct
MFVFLFVLPLVSSQCVNLTTRTGIPPGYTNSSTRGVYYPDKVFRSSILHLTQDLFLPFFSNVTWFNTINYQGGFKKFDNPVLPFNDGVYFASTEKSNIIRGWIFGTTLDARTQSLLIVNNATNVVIKVCEFQFCTDPFLGVYYHNNNKTWVENEFRVYSSANNCTFEYISQPFLMDLEGKQGNFKNLREFVFKNVDGYFKIYSKHTPIDLVRDLPRGFAALEPLVDLPIGINITRFQTLLALHRSYLTPGNLESGWTTGAAAYYVGYLQQRTFLLSYNQNGTITDAVDCSLDPLSETKCTLKSLTVEKGIYQTSNFRVQPTISIVRFPNITNLCPFGEVFNASKFASVYAWNRKRISNCVADYSVLYNSTSFSTFKCYGVSPTKLNDLCFTNVYADSFVVKGDEVRQIAPGQTGVIADYNYKLPDDFTGCVIAWNSVKQDALTGGNYGYLYRLFRKSKLKPFERDISTEIYQAGSTPCNGQVGLNCYYPLERYGFHPTTGVNYQPFRVVVLSFELLNGPATVCGPKLSTTLVKDKCVNFNFNGLTGTGVLTTSKKQFLPFQQFGRDISDTTDAVRDPQTLEILDITPCSFGGVSVITPGTNTSNQVAVLYQDVNCTEVPMAIHAEQLTPAWRVYSAGANVFQTRAGCLVGAEHVNNSYECDIPVGAGICASYHSMSSLRSVNQRSIIAYTMSLGAENSVAYSNNSIAIPTNFTISVTTEILPVSMTKTSVDCTMYICGDSIECSNLLLQYGSFCTQLNRALTGIAVEQDKNTQEVFAQVKQIYKTPPIKDFGGFNFSQILPDPSKPSKRSFIEDLLFNKVTLADAGFIKQYGDCLGDIAARDLICAQKFNGLTVLPPLLTDEMIAQYTSALLAGTITSGWTFGAGAALQIPFAMQMAYRFNGIGVTQNVLYENQKLIANQFNSAIGKIQDSLSSTASALGKLQDVVNQNAQALNTLVKQLSSNFGAISSVLNDILSRLDPPEAEVQIDRLITGRLQSLQTYVTQQLIRAAEIRASANLAATKMSECVLGQSKRVDFCGKGYQLMSFPQSAPHGVVFLNVTYVPAQEKNFTTAPAICNEGKAHFPREGVFVSNGTNWFITQRNFYEPQIITTDNTFVSGSCDVVIGIVNNTVYDPLQPELDSFKEELDKYFKNHTSPDVDLGDISGINASVVNIQKEIDRLNEVAKNLNESPIDLQELGKYEQYIKGGGGSDIDPYKEFGSSYQLLNFLPLDFFPDLNALVDTATALYEEELTGREHCSPHHTAIRQALVCWDELTKLIAWMSSNITSEQVRTIIVNHVNDTWGLKVRQSLWFHLSCLTFGQHTVQEFLVSFGVWIRTPAPYRPPNAPILSTLPEHTVIC

SEQ ID NO: 6971 - protein, 1359 aa, Artificial Sequence
  SARS-CoV-2/pangolin/Guangxi/P5L/2017__EPI_ISL_410540 spike protein (1-1205)(K980P_V981P_ H1042Q_H1058N_ H1077N_H1095N) WhcAg construct
MFVFLFVLPLVSSQCVNLTTRTGIPPGYTNSSTRGVYYPDKVFRSSILHLTQDLFLPFFSNVTWFNTINYQGGFKKFDNPVLPFNDGVYFASTEKSNIIRGWIFGTTLDARTQSLLIVNNATNVVIKVCEFQFCTDPFLGVYYHNNNKTWVENEFRVYSSANNCTFEYISQPFLMDLEGKQGNFKNLREFVFKNVDGYFKIYSKHTPIDLVRDLPRGFAALEPLVDLPIGINITRFQTLLALHRSYLTPGKLESGWTTGAAAYYVGYLQQRTFLLSYNQNGTITDAVDCSLDPLSETKCTLKSLTVEKGIYQTSNFRVQPTISIVRFPNITNLCPFGEVFNASKFASVYAWNRKRISNCVADYSVLYNSTSFSTFKCYGVSPTKLNDLCFTNVYADSFVVKGDEVRQIAPGQTGVIADYNYKLPDDFTGCVIAWNSVKQDALTGGNYGYLYRLFRKSKLKPFERDISTEIYQAGSTPCNGQVGLNCYYPLERYGFHPTTGVNYQPFRVVVLSFELLNGPATVCGPKLSTTLVKDKCVNFNFNGLTGTGVLTTSKKQFLPFQQFGRDISDTTDAVRDPQTLEILDITPCSFGGVSVITPGTNTSNQVAVLYQDVNCTEVPMAIHAEQLTPAWRVYSAGANVFQTRAGCLVGAEHVNNSYECDIPVGAGICASYHSMSSFRSVNQRSIIAYTMSLGAENSVAYSNNSIAIPTNFTISVTTEILPVSMTKTSVDCTMYICGDSIECSNLLLQYGSFCTQLNRALTGIAVEQDKNTQEVFAQVKQIYKTPPIKDFGGFNFSQILPDPSKPSKRSFIEDLLFNKVTLADAGFIKQYGDCLGDIAARDLICAQKFNGLTVLPPLLTDEMIAQYTSALLAGTITSGWTFGAGAALQIPFAMQMAYRFNGIGVTQNVLYENQKLIANQFNSAIGKIQDSLSSTASALGKLQDVVNQNAQALNTLVKQLSSNFGAISSVLNDILSRLDPPEAEVQIDRLITGRLQSLQTYVTQQLIRAAEIRASANLAATKMSECVLGQSKRVDFCGKGYQLMSFPQSAPHGVVFLNVTYVPAQEKNFTTAPAICNEGKAHFPREGVFVSNGTNWFITQRNFYEPQIITTDNTFVSGSCDVVIGIVNNTVYDPLQPELDSFKEELDKYFKNHTSPDVDLGDISGINASVVNIQKEIDRLNEVAKNLNESLIDLQELGKYEQYIKGGGGSDIDPYKEFGSSYQLLNFLPLDFFPDLNALVDTATALYEEELTGREHCSPHHTAIRQALVCWDELTKLIAWMSSNITSEQVRTIIVNHVNDTWGLKVRQSLWFHLSCLTFGQHTVQEFLVSFGVWIRTPAPYRPPNAPILSTLPEHTVIC

SEQ ID NO: 6972 - protein, 1359 aa, Artificial Sequence
  SARS-CoV-2/pangolin/Guangxi/P5E/2017__EPI_ISL_410541 spike protein (1-1205)(K980P_V981P_ H1042Q_H1058N_ H1077N_H1095N) WhcAg construct
MFVFLFVLPLVSSQCVNLTTRTGIPPGYTNSSTRGVYYPDKVFRSSILHLTQDLFLPFFSNVTWFNTITYQGGSKKFDNPVLPFNDGVYFASTEKSNIIRGWIFGTTLDARTQSLLIVNNATNVVIKVCEFQFCTDPFLGVYYHNNNKTWVENEFRVYSSANNCTFEYISQPFLMDLEGKQGNFKNLREFVFKNVDGYFKIYSKHTPIDLVRDLPRGFAALEPLVDLPIGINITRFQTLLALHRSYLTPGKLESGWTTGAAAYYVGYLQQRTFLLSYNQNGTITDAVDCSLDPLSETKCTLKSLTVEKGIYQTSNFRVQPTISIVRFPNITNLCPFGEVFNASKFASVYAWNRKRISNCVADYSVLYNSTSFSTFKCYGVSPTKLNDLCFTNVYADSFVVKGDEVRQIAPGQTGVIADYNYKLPDDFTGCVIAWNSVKQDALTGDNYGYLYRLFRKSKLKPFERDISTEIYQAGSTPCNGQVGLNCYYPLERYGFHPTTGVNYQPFRVVVLSFELLNGPATVCGPKLSTTLVKDKCVNFNFNGLTGTGVLTTSKKQFLPFQQFGRDISDTTDAVRDPQTLEILDITPCSFGGVSVITPGTNTSNQVAVLYQDVNCTEVPMAIHAEQLTPAWRVYSAGANVFQTRAGCLVGAEHVNNSYECDIPVGAGICASYHSMSSFRSVNQRSIIAYTMSLGAENSVAYSNNSIAIPTNFTISVTTEILPVSMTKTSVDCTMYICGDSIECSNLLLQYGSFCTQLNRALTGIAVEQDKNTQEVFAQVKQIYKTPPIKDFGGFNFSQILPDPSKPSKRSFIEDLLFNKVTLADAGFIKQYGDCLGDIAARDLICAQKFNGLTVLPPLLTDEMIAQYTSALLAGTITSGWTFGAGAALQIPFAMQMAYRFNGIGVTQNVLYENQKLIANQFNSAIGKIQDSLSSTASALGKLQDVVNQNAQALNTLVKQLSSNFGAISSVLNDILSRLDPPEAEVQIDRLITGRLQSLQTYVTQQLIRAAEIRASANLAATKMSECVLGQSKRVDFCGKGYQLMSFPQSAPHGVVFLNVTYVPAQEKNFTTAPAICNEGKAHFPREGVFVSNGTNWFITQRNFYEPQIITTDNTFVSGSCDVVIGIVNNTVYDPLQPELDSFKEELDKYFKNHTSPDVDLGDISGINASVVNIQKEIDRLNEVAKNLNESLIDLQELGKYEQYIKGGGGSDIDPYKEFGSSYQLLNFLPLDFFPDLNALVDTATALYEEELTGREHCSPHHTAIRQALVCWDELTKLIAWMSSNITSEQVRTIIVNHVNDTWGLKVRQSLWFHLSCLTFGQHTVQEFLVSFGVWIRTPAPYRPPNAPILSTLPEHTVIC

SEQ ID NO: 6973 - protein, 1357 aa, Artificial Sequence
  SARS-CoV-2/pangolin/Guangxi/P1E/2017__EPI_ISL_410539 spike protein (1-1203)(K978P_V979P_ H1040Q_H1056N_ H1075N_H1093N) WhcAg construct
MFVFLFVLPLVSSQCVNLTTRTGIQPGYTNSSTRGVYYPDKVFRSSILHLTQDLFLPFFSNVTWFNTINYQGGFKKFDNPVLPFNDGVYFASTEKSNIIRGWIFGTTLDARTQSLLIVNNATNVVIKVCEFQFCTDPFLGVYYHNNNKTWVENEFRVYSSANNCTFEYISQPFLMDLEGKQGNFKNLREFVFKNVDGYFKIYSKHTPIDLVRDLPRGFAALEPLVDLPIGINITRFQTLLALHRSYLTPGKLESGWTTGAAAYYVGYLQQRTFLLSYNQNGTITDAVDCSLDPLSETKCTLKSLTVEKGIYQTSNFRVQPTISIVRFPNITNLCPFGEVFNASKFASVYAWNRKRISNCVADYSVLYNSTSFSTFKCYGVSPTKLNDLCFTNVYADSFVVKGDEVRQIAPGQTGVIADYNYKLPDDFTGCVIAWNSVKQDALTGGNYLYRLFRKSKLKPFERDISTEIYQAGSTPCNGQVGLNCYYPLERYGFHPTTGVNYQPFRVVVLSFELLNGPATVCGPKLSTTLVKDKCVNFNFNGLTGTGVLTTSKKQFLPFQQFGRDISDTTDAVRDPQTLEILDITPCSFGGVSVITPGTNTSNQVAVLYQDVNCTEVPMAIHAEQLTPAWRVYSAGANVFQTRAGCLVGAEHVNNSYECDIPVGAGICASYHSMSSLRSVNQRSIIAYTMSLGAENSVAYSNNSIAIPTNFTISVTTEILPVSMTKTSVDCTMYICGDSIECSNLLLQYGSFCTQLNRALTGIAVEQDKNTQEVFAQVKQIYKTPPIKDFGGFNFSQILPDPSKPSKRSFIEDLLFNKVTLADAGFIKQYGDCLGDIAARDLICAQKFNGLTVLPPLLTDEMIAQYTSALLAGTITSGWTFGAGAALQIPFAMQMAYRFNGIGVTQNVLYENQKLIANQFNSAIGKIQDSLSSTASALGKLQDVVNQNAQALNTLVKQLSSNFGAISSVLNDILSRLDPPEAEVQIDRLITGRLQSLQTYVTQQLIRAAEIRASANLAATKMSECVLGQSKRVDFCGKGYQLMSFPQSAPHGVVFLNVTYVPAQEKNFTTAPAICNEGKAHFPREGVFVSNGTNWFITQRNFYEPQIITTDNTFVSGSCDVVIGIVNNTVYDPLQPELDSFKEELDKYFKNHTSPDVDLGDISGINASVVNIQKEIDRLNEVAKNLNESLIDLQELGKYEQYIKGGGGSDIDPYKEFGSSYQLLNFLPLDFFPDLNALVDTATALYEEELTGREHCSPHHTAIRQALVCWDELTKLIAWMSSNITSEQVRTIIVNHVNDTWGLKVRQSLWFHLSCLTFGQHTVQEFLVSFGVWIRTPAPYRPPNAPILSTLPEHTVIC

SEQ ID NO: 6974 - protein, 1365 aa, Artificial Sequence
  SARS-CoV-2/Wuhan/WIV05/2019__EPI_ISL_402128 spike protein (1-1211)(I712C_T1077C) WhcAg construct
MFVFLVLLPLVSSQCVNLTTRTQLPPAYTNSFTRGVYYPDKVFRSSVLHSTQDLFLPFFSNVTWFHAIHVSGTNGTKRFDNPVLPFNDGVYFASTEKSNIIRGWIFGTTLDSKTQSLLIVNNATNVVIKVCEFQFCNDPFLGVYYHKNNKSWMESEFRVYSSANNCTFEYVSQPFLMDLEGKQGNFKNLREFVFKNIDGYFKIYSKHTPINLVRDLPQGFSALEPLVDLPIGINITRFQTLLALHRSYLTPGDSSSGWTAGAAAYYVGYLQPRTFLLKYNENGTITDAVDCALDPLSETKCTLKSFTVEKGIYQTSNFRVQPTESIVRFPNITNLCPFGEVFNATRFASVYAWNRKRISNCVADYSVLYNSASFSTFKCYGVSPTKLNDLCFTNVYADSFVIRGDEVRQIAPGQTGKIADYNYKLPDDFTGCVIAWNSNNLDSKVGGNYNYLYRLFRKSNLKPFERDISTEIYQAGSTPCNGVEGFNCYFPLQSYGFQPTNGVGYQPYRVVVLSFELLHAPATVCGPKKSTNLVKNKCVNFNFNGLTGTGVLTESNKKFLPFQQFGRDIADTTDAVRDPQTLEILDITPCSFGGVSVITPGTNTSNQVAVLYQDVNCTEVPVAIHADQLTPTWRVYSTGSNVFQTRAGCLIGAEHVNNSYECDIPIGAGICASYQTQTNSPRRARSVASQSIIAYTMSLGAENSVAYSNNSCAIPTNFTISVTTEILPVSMTKTSVDCTMYICGDSTECSNLLLQYGSFCTQLNRALTGIAVEQDKNTQEVFAQVKQIYKTPPIKDFGGFNFSQILPDPSKPSKRSFIEDLLFNKVTLADAGFIKQYGDCLGDIAARDLICAQKFNGLTVLPPLLTDEMIAQYTSALLAGTITSGWTFGAGAALQIPFAMQMAYRFNGIGVTQNVLYENQKLIANQFNSAIGKIQDSLSSTASALGKLQDVVNQNAQALNTLVKQLSSNFGAISSVLNDILSRLDKVEAEVQIDRLITGRLQSLQTYVTQQLIRAAEIRASANLAATKMSECVLGQSKRVDFCGKGYHLMSFPQSAPHGVVFLHVTYVPAQEKNFTCAPAICHDGKAHFPREGVFVSNGTHWFVTQRNFYEPQIITTDNTFVSGNCDVVIGIVNNTVYDPLQPELDSFKEELDKYFKNHTSPDVDLGDISGINASVVNIQKEIDRLNEVAKNLNESLIDLQELGKYEQYIKGGGGSDIDPYKEFGSSYQLLNFLPLDFFPDLNALVDTATALYEEELTGREHCSPHHTAIRQALVCWDELTKLIAWMSSNITSEQVRTIIVNHVNDTWGLKVRQSLWFHLSCLTFGQHTVQEFLVSFGVWIRTPAPYRPPNAPILSTLPEHTVIC

SEQ ID NO: 6975 - protein, 1361 aa, Artificial Sequence
  SARS-CoV-2/bat/Yunnan/RaTG13/2013__EPI_ISL_402131 spike protein (1-1207)(I708C_T1073C) WhcAg construct
MFVFLVLLPLVSSQCVNLTTRTQLPPAYTNSSTRGVYYPDKVFRSSVLHLTQDLFLPFFSNVTWFHAIHVSGTNGIKRFDNPVLPFNDGVYFASTEKSNIIRGWIFGTTLDSKTQSLLIVNNATNVVIKVCEFQFCNDPFLGVYYHKNNKSWMESEFRVYSSANNCTFEYVSQPFLMDLEGKQGNFKNLREFVFKNIDGYFKIYSKHTPINLVRDLPPGFSALEPLVDLPIGINITRFQTLLALHRSYLTPGDSSSGWTAGAAAYYVGYLQPRTFLLKYNENGTITDAVDCALDPLSETKCTLKSFTVEKGIYQTSNFRVQPTDSIVRFPNITNLCPFGEVFNATTFASVYAWNRKRISNCVADYSVLYNSTSFSTFKCYGVSPTKLNDLCFTNVYADSFVITGDEVRQIAPGQTGKIADYNYKLPDDFTGCVIAWNSKHIDAKEGGNFNYLYRLFRKANLKPFERDISTEIYQAGSKPCNGQTGLNCYYPLYRYGFYPTDGVGHQPYRVVVLSFELLNAPATVCGPKKSTNLVKNKCVNFNFNGLTGTGVLTESNKKFLPFQQFGRDIADTTDAVRDPQTLEILDITPCSFGGVSVITPGTNASNQVAVLYQDVNCTEVPVAIHADQLTPTWRVYSTGSNVFQTRAGCLIGAEHVNNSYECDIPIGAGICASYQTQTNSRSVASQSIIAYTMSLGAENSVAYSNNSCAIPTNFTISVTTEILPVSMTKTSVDCTMYICGDSTECSNLLLQYGSFCTQLNRALTGIAVEQDKNTQEVFAQVKQIYKTPPIKDFGGFNFSQILPDPSKPSKRSFIEDLLFNKVTLADAGFIKQYGDCLGDIAARDLICAQKFNGLTVLPPLLTDEMIAQYTSALLAGTITSGWTFGAGAALQIPFAMQMAYRFNGIGVTQNVLYENQKLIANQFNSAIGKIQDSLSSTASALGKLQDVVNQNAQALNTLVKQLSSNFGAISSVLNDILSRLDKVEAEVQIDRLITGRLQSLQTYVTQQLIRAAEIRASANLAATKMSECVLGQSKRVDFCGKGYHLMSFPQSAPHGVVFLHVTYVPAQEKNFTCAPAICHDGKAHFPREGVFVSNGTHWFVTQRNFYEPQIITTDNTFVSGSCDVVIGIVNNTVYDPLQPELDSFKEELDKYFKNHTSPDVDLGDISGINASVVNIQKEIDRLNEVAKNLNESLIDLQELGKYEQYIKGGGGSDIDPYKEFGSSYQLLNFLPLDFFPDLNALVDTATALYEEELTGREHCSPHHTAIRQALVCWDELTKLIAWMSSNITSEQVRTIIVNHVNDTWGLKVRQSLWFHLSCLTFGQHTVQEFLVSFGVWIRTPAPYRPPNAPILSTLPEHTVIC

SEQ ID NO: 6976 - protein, 1365 aa, Artificial Sequence
  SARS-CoV-2/Wuhan/HBCDC-HB-01/2019__EPI_ISL_402132 spike protein (1-1211)(I712C_T1077C) WhcAg construct
MFVFLVLLPLVSSQCVNLTTRTQLPPAYTNSITRGVYYPDKVFRSSVLHSTQDLFLPFFSNVTWFHAIHVSGTNGTKRFDNPVLPFNDGVYFASTEKSNIIRGWIFGTTLDSKTQSLLIVNNATNVVIKVCEFQFCNDPFLGVYYHKNNKSWMESEFRVYSSANNCTFEYVSQPFLMDLEGKQGNFKNLREFVFKNIDGYFKIYSKHTPINLVRDLPQGFSALEPLVDLPIGINITRFQTLLALHRSYLTPGDSSSGWTAGAAAYYVGYLQPRTFLLKYNENGTITDAVDCALDPLSETKCTLKSFTVEKGIYQTSNFRVQPTESIVRFPNITNLCPFGEVFNATRFASVYAWNRKRISNCVADYSVLYNSASFSTFKCYGVSPTKLNDLCFTNVYADSFVIRGDEVRQIAPGQTGKIADYNYKLPDDFTGCVIAWNSNNLDSKVGGNYNYLYRLFRKSNLKPFERDISTEIYQAGSTPCNGVEGFNCYFPLQSYGFQPTNGVGYQPYRVVVLSFELLHAPATVCGPKKSTNLVKNKCVNFNFNGLTGTGVLTESNKKFLPFQQFGRDIADTTDAVRDPQTLEILDITPCSFGGVSVITPGTNTSNQVAVLYQDVNCTEVPVAIHADQLTPTWRVYSTGSNVFQTRAGCLIGAEHVNNSYECDIPIGAGICASYQTQTNSPRRARSVASQSIIAYTMSLGAENSVAYSNNSCAIPTNFTISVTTEILPVSMTKTSVDCTMYICGDSTECSNLLLQYGSFCTQLNRALTGIAVEQDKNTQEVFAQVKQIYKTPPIKDFGGFNFSQILPDPSKPSKRSFIEDLLFNKVTLADAGFIKQYGDCLGDIAARDLICAQKFNGLTVLPPLLTDEMIAQYTSALLAGTITSGWTFGAGAALQIPFAMQMAYRFNGIGVTQNVLYENQKLIANQFNSAIGKIQDSLSSTASALGKLQDVVNQNAQALNTLVKQLSSNFGAISSVLNDILSRLDKVEAEVQIDRLITGRLQSLQTYVTQQLIRAAEIRASANLAATKMSECVLGQSKRVDFCGKGYHLMSFPQSAPHGVVFLHVTYVPAQEKNFTCAPAICHDGKAHFPREGVFVSNGTHWFVTQRNFYEPQIITTDNTFVSGNCDVVIGIVNNTVYDPLQPELDSFKEELDKYFKNHTSPDVDLGDISGINASVVNIQKEIDRLNEVAKNLNESLIDLQELGKYEQYIKGGGGSDIDPYKEFGSSYQLLNFLPLDFFPDLNALVDTATALYEEELTGREHCSPHHTAIRQALVCWDELTKLIAWMSSNITSEQVRTIIVNHVNDTWGLKVRQSLWFHLSCLTFGQHTVQEFLVSFGVWIRTPAPYRPPNAPILSTLPEHTVIC

SEQ ID NO: 6977 - protein, 1365 aa, Artificial Sequence
  SARS-CoV-2/Guangdong/20SF028/2020__EPI_ISL_403936 spike protein (1-1211)(I712C_T1077C) WhcAg construct
MFVFLVLLPLVSSQCVNLTTRTQLPPAYTNSFTRGVYYPDKVFRSSVLYSTQDLFLPFFSNVTWFHAIHVSGTNGTKRFDNPVLPFNDGVYFASTEKSNIIRGWIFGTTLDSKTQSLLIVNNATNVVIKVCEFQFCNDPFLGVYYHKNNKSWMESEFRVYSSANNCTFEYVSQPFLMDLEGKQGNFKNLREFVFKNIDGYFKIYSKHTPINLVRDLPQGFSALEPLVDLPIGINITRFQTLLALHRSYLTPGDSSSGWTAGAAAYYVGYLQPRTFLLKYNENGTITDAVDCALDPLSETKCTLKSFTVEKGIYQTSNFRVQPTESIVRFPNITNLCPFGEVFNATRFASVYAWNRKRISNCVADYSVLYNSASFSTFKCYGVSPTKLNDLCFTNVYADSFVIRGDEVRQIAPGQTGKIADYNYKLPDDFTGCVIAWNSNNLDSKVGGNYNYLYRLFRKSNLKPFERDISTEIYQAGSTPCNGVEGFNCYFPLQSYGFQPTNGVGYQPYRVVVLSFELLHAPATVCGPKKSTNLVKNKCVNFNFNGLTGTGVLTESNKKFLPFQQFGRDIADTTDAVRDPQTLEILDITPCSFGGVSVITPGTNTSNQVAVLYQDVNCTEVPVAIHADQLTPTWRVYSTGSNVFQTRAGCLIGAEHVNNSYECDIPIGAGICASYQTQTNSPRRARSVASQSIIAYTMSLGAENSVAYSNNSCAIPTNFTISVTTEILPVSMTKTSVDCTMYICGDSTECSNLLLQYGSFCTQLNRALTGIAVEQDKNTQEVFAQVKQIYKTPPIKDFGGFNFSQILPDPSKPSKRSFIEDLLFNKVTLADAGFIKQYGDCLGDIAARDLICAQKFNGLTVLPPLLTDEMIAQYTSALLAGTITSGWTFGAGAALQIPFAMQMAYRFNGIGVTQNVLYENQKLIANQFNSAIGKIQDSLSSTASALGKLQDVVNQNAQALNTLVKQLSSNFGAISSVLNDILSRLDKVEAEVQIDRLITGRLQSLQTYVTQQLIRAAEIRASANLAATKMSECVLGQSKRVDFCGKGYHLMSFPQSAPHGVVFLHVTYVPAQEKNFTCAPAICHDGKAHFPREGVFVSNGTHWFVTQRNFYEPQIITTDNTFVSGNCDVVIGIVNNTVYDPLQPELDSFKEELDKYFKNHTSPDVDLGDISGINASVVNIQKEIDRLNEVAKNLNESLIDLQELGKYEQYIKGGGGSDIDPYKEFGSSYQLLNFLPLDFFPDLNALVDTATALYEEELTGREHCSPHHTAIRQALVCWDELTKLIAWMSSNITSEQVRTIIVNHVNDTWGLKVRQSLWFHLSCLTFGQHTVQEFLVSFGVWIRTPAPYRPPNAPILSTLPEHTVIC

SEQ ID NO: 6978 - protein, 1365 aa, Artificial Sequence
  SARS-CoV-2/Shenzhen/SZTH-001/2020__EPI_ISL_406592 spike protein (1-1211)(I712C_T1077C) WhcAg construct
MFVFLVLLPLVSSQCVNLTTRTQLPPAYTNSFTRGVYYPDKVFRSSVLHSTQDLFLPFFSNVTWFHAIHVSGTNGTKRFDNPVLPFNDGVYFASTEKSNIIRGWIFGTTLDSKTQSLLIVNNATNVVIKVCEFQFCNDPFLGVYYHKNNKSWMESEFRVYSSANNCTFEYVSQPFLMDLEGKQGNFKNLREFVFKNIDGYFKIYSKHTPINLVRDLPQGFSALEPLVDLPIGINITRFQTLLALHRSYLTPGDSSSGWTAGAAAYYVGYLQPRTFLLKYNENGTITDAVDCALDPLSETKCTLKSFTVEKGIYQTSNFRVQPTESIVRFPNITNLCPFGEVFNATRFASVYAWNRKRISNCVADYSVLYNSASFSTFKCYGVSPTKLNDLCFTNVYADSFVIRGDEVRQIAPGQTGKIADYNYKLPDDFTGCVIAWNSNNLDSKVGGNYNYLYRLFRKSNLKPFERDISTEIYQAGSTPCNGVEGFNCYFPLQSYGFQPTNGVGYQPYRVVVLSFELLHAPATVCGPKKSTNLVKNKCVNFNFNGLTGTGVLTESNKKFLPFQQFGRDIADTTDAVRDPQTLEILDITPCSFGGVSVITPGTNTSNQVAVLYQDVNCTEVPVAIHADQLTPTWRVYSTGSNVFQTRAGCLIGAEHVNNSYECDIPIGAGICASYQTQTNSPRRARSVASQSIIAYTMSLGAENSVAYSNNSCAIPTNFTISVTTEILPVSMTKTSVDCTMYICGDSTECSNLLLQYGSFCTQLNRALTGIAVEQDKNTQEVFAQVKQIYKTPPIKDFGGFNFSQILPDPSKPSKRSFIEDLLFNKVTLADAGFIKQYGDCLGDIAARDLICAQKFNGLTVLPPLLTDEMIAQYTSALLAGTITSGWTFGAGAALQIPFAMQMAYRFNGIGVTQNVLYENQKLIANQFNSAIGKIQDSLSSTASALGKLQDVVNQNAQALNTLVKQLSSNFGAISSVLNDILSRLDKVEAEVQIDRLITGRLQSLQTYVTQQLIRAAEIRASANLAATKMSECVLGQSKRVDFCGKGYHLMSFPQSAPHGVVFLHVTYVPAQEKNFTCAPAICHDGKAHFPREGVFVSNGTHWFVTQRNFYEPQIITTDNTFVSGNCDVLIGIVNNTVYDPLQPELDSFKEELDKYFKNHTSPDVDLGDISGINASVVNIQKEIDRLNEVAKNLNESLIDLQELGKYEQYIKGGGGSDIDPYKEFGSSYQLLNFLPLDFFPDLNALVDTATALYEEELTGREHCSPHHTAIRQALVCWDELTKLIAWMSSNITSEQVRTIIVNHVNDTWGLKVRQSLWFHLSCLTFGQHTVQEFLVSFGVWIRTPAPYRPPNAPILSTLPEHTVIC

SEQ ID NO: 6979 - protein, 1365 aa, Artificial Sequence
  SARS-CoV-2/Shenzhen/SZTH-004/2020__EPI_ISL_406595 spike protein (1-1211)(I712C_T1077C) WhcAg construct
MFVFLVLLPLVSSQCVNLTTRTQLPPAYTNSFTRGVYYPDKVFRSSVLHSTQDLFLPFFSNVTWFHAIHVSGTNGTKRFDNPVLPFNDGVYFASTEKSNIIRGWIFGTTLDSKTQSLLIVNNATNVVIKVCEFQFCNDPFLGVYYHKNNKSWMESEFRVYSSANNCTFEYVSQPFLMDLEGKQGNFKNLREFVFKNIDGYFKIYSKHTPINLVRDLPQGFSALEPLVDLPIGINITRFQTLLALHRSYLTPGDSSSGWTAGAAAYYVGYLQPRTFLLKYNENGTITDAVDCALDPLSETKCTLKSFTVEKGIYQTSNFRVQPTESIVRFPNITNLCPFGEVFNATRFASVYAWDRKRISNCVAYYSVLYNSASFSTFKCYGVSPTKLNDLCFTNVYADSFVIRGDEVRQIAPGQTGKIADYNYKLPDDFTGCVIAWNSNNLDSKVGGNYNYLYRLFRKSNLKPFERDISTEIYQAGSTPCNGVEGFNCYFPLQSYGFQPTNGVGYQPYRVVVLSFELLHAPATVCGPKKSTNLVKNKCVNFNFNGLTGTGVLTESNKKFLPFQQFGRDIADTTDAVRDPQTLEILDITPCSFGGVSVITPGTNTSNQVAVLYQDVNCTEVPVAIHADQLTPTWRVYSTGSNVFQTRAGCLIGAEHVNNSYECDIPIGAGICASYQTQTNSPRRARSVASQSIIAYTMSLGAENSVAYSNNSCAIPTNFTISVTTEILPVSMTKTSVDCTMYICGDSTECSNLLLQYGSFCTQLNRALTGIAVEQDKNTQEVFAQVKQIYKTPPIKDFGGFNFSQILPDPSKPSKRSFIEDLLFNKVTLADAGFIKQYGDCLGDIAARDLICAQKFNGLTVLPPLLTDEMIAQYTSALLAGTITSGWTFGAGAALQIPFAMQMAYRFNGIGVTQNVLYENQKLIANQFNSAIGKIQDSLSSTASALGKLQDVVNQNAQALNTLVKQLSSNFGAISSVLNDILSRLDKVEAEVQIDRLITGRLQSLQTYVTQQLIRAAEIRASANLAATKMSECVLGQSKRVDFCGKGYHLMSFPQSAPHGVVFLHVTYVPAQEKNFTCAPAICHDGKAHFPREGVFVSNGTHWFVTQRNFYEPQIITTDNTFVSGNCDVVIGIVNNTVYDPLQPELDSFKEELDKYFKNHTSPDVDLGDISGINASVVNIQKEIDRLNEVAKNLNESLIDLQELGKYEQYIKGGGGSDIDPYKEFGSSYQLLNFLPLDFFPDLNALVDTATALYEEELTGREHCSPHHTAIRQALVCWDELTKLIAWMSSNITSEQVRTIIVNHVNDTWGLKVRQSLWFHLSCLTFGQHTVQEFLVSFGVWIRTPAPYRPPNAPILSTLPEHTVIC

SEQ ID NO: 6980 - protein, 1365 aa, Artificial Sequence
  SARS-CoV-2/France/IDF0372/2020__EPI_ISL_406596 spike protein (1-1211)(I712C_T1077C) WhcAg construct
MFVFLVLLPLVSSQCVNLTTRTQLPPAYTNSFTRGVYYPDKVFRSSVLHSTQDLFLPFFSNVTWFHAIHVSGTNGTKRFDNPVLPFNDGVYFASTEKSNIIRGWIFGTTLDSKTQSLLIVNNATNVVIKVCEFQFCNDPFLGVYYHKNNKSWMESEFRVYSSANNCTFEYVSQPFLMDLEGKQGNFKNLREFVFKNIDGYFKIYSKHTPINLVRDLPQGFSALEPLVDLPIGINITRFQTLLALHRSYLTPGDSSSGWTAGAAAYYVGYLQPRTFLLKYNENGTITDAVDCALDPLSETKCTLKSFTVEKGIYQTSNFRVQPTESIVRFPNITNLCPFGEVFNATRFASVYAWNRKRISNCVADYSFLYNSASFSTFKCYGVSPTKLNDLCFTNVYADSFVIRGDEVRQIAPGQTGKIADYNYKLPDDFTGCVIAWNSNNLDSKVGGNYNYLYRLFRKSNLKPFERDISTEIYQAGSTPCNGVEGFNCYFPLQSYGFQPTNGVGYQPYRVVVLSFELLHAPATVCGPKKSTNLVKNKCVNFNFNGLTGTGVLTESNKKFLPFQQFGRDIADTTDAVRDPQTLEILDITPCSFGGVSVITPGTNTSNQVAVLYQDVNCTEVPVAIHADQLTPTWRVYSTGSNVFQTRAGCLIGAEHVNNSYECDIPIGAGICASYQTQTNSPRRARSVASQSIIAYTMSLGAENSVAYSNNSCAIPTNFTISVTTEILPVSMTKTSVDCTMYICGDSTECSNLLLQYGSFCTQLNRALTGIAVEQDKNTQEVFAQVKQIYKTPPIKDFGGFNFSQILPDPSKPSKRSFIEDLLFNKVTLADAGFIKQYGDCLGDIAARDLICAQKFNGLTVLPPLLTDEMIAQYTSALLAGTITSGWTFGAGAALQIPFAMQMAYRFNGIGVTQNVLYENQKLIANQFNSAIGKIQDSLSSTASALGKLQDVVNQNAQALNTLVKQLSSNFGAISSVLNDILSRLDKVEAEVQIDRLITGRLQSLQTYVTQQLIRAAEIRASANLAATKMSECVLGQSKRVDFCGKGYHLMSFPQSAPHGVVFLHVTYVPAQEKNFTCAPAICHDGKAHFPREGVFVSNGTHWFVTQRNFYEPQIITTDNTFVSGNCDVVIGIVNNTVYDPLQPELDSFKEELDKYFKNHTSPDVDLGDISGINASVVNIQKEIDRLNEVAKNLNESLIDLQELGKYEQYIKGGGGSDIDPYKEFGSSYQLLNFLPLDFFPDLNALVDTATALYEEELTGREHCSPHHTAIRQALVCWDELTKLIAWMSSNITSEQVRTIIVNHVNDTWGLKVRQSLWFHLSCLTFGQHTVQEFLVSFGVWIRTPAPYRPPNAPILSTLPEHTVIC

SEQ ID NO: 6981 - protein, 1365 aa, Artificial Sequence
  SARS-CoV-2/Australia/VIC01/2020__EPI_ISL_406844 spike protein (1-1211)(I712C_T1077C) WhcAg construct
MFVFLVLLPLVSSQCVNLTTRTQLPPAYTNSFTRGVYYPDKVFRSSVLHSTQDLFLPFFSNVTWFHAIHVSGTNGTKRFDNPVLPFNDGVYFASTEKSNIIRGWIFGTTLDSKTQSLLIVNNATNVVIKVCEFQFCNDPFLGVYYHKNNKSWMESEFRVYSSANNCTFEYVSQPFLMDLEGKQGNFKNLREFVFKNIDGYFKIYSKHTPINLVRDLPQGFSALEPLVDLPIGINITRFQTLLALHRRYLTPGDSSSGWTAGAAAYYVGYLQPRTFLLKYNENGTITDAVDCALDPLSETKCTLKSFTVEKGIYQTSNFRVQPTESIVRFPNITNLCPFGEVFNATRFASVYAWNRKRISNCVADYSVLYNSASFSTFKCYGVSPTKLNDLCFTNVYADSFVIRGDEVRQIAPGQTGKIADYNYKLPDDFTGCVIAWNSNNLDSKVGGNYNYLYRLFRKSNLKPFERDISTEIYQAGSTPCNGVEGFNCYFPLQSYGFQPTNGVGYQPYRVVVLSFELLHAPATVCGPKKSTNLVKNKCVNFNFNGLTGTGVLTESNKKFLPFQQFGRDIADTTDAVRDPQTLEILDITPCSFGGVSVITPGTNTSNQVAVLYQDVNCTEVPVAIHADQLTPTWRVYSTGSNVFQTRAGCLIGAEHVNNSYECDIPIGAGICASYQTQTNSPRRARSVASQSIIAYTMSLGAENSVAYSNNSCAIPTNFTISVTTEILPVSMTKTSVDCTMYICGDSTECSNLLLQYGSFCTQLNRALTGIAVEQDKNTQEVFAQVKQIYKTPPIKDFGGFNFSQILPDPSKPSKRSFIEDLLFNKVTLADAGFIKQYGDCLGDIAARDLICAQKFNGLTVLPPLLTDEMIAQYTSALLAGTITSGWTFGAGAALQIPFAMQMAYRFNGIGVTQNVLYENQKLIANQFNSAIGKIQDSLSSTASALGKLQDVVNQNAQALNTLVKQLSSNFGAISSVLNDILSRLDKVEAEVQIDRLITGRLQSLQTYVTQQLIRAAEIRASANLAATKMSECVLGQSKRVDFCGKGYHLMSFPQSAPHGVVFLHVTYVPAQEKNFTCAPAICHDGKAHFPREGVFVSNGTHWFVTQRNFYEPQIITTDNTFVSGNCDVVIGIVNNTVYDPLQPELDSFKEELDKYFKNHTSPDVDLGDISGINASVVNIQKEIDRLNEVAKNLNESLIDLQELGKYEQYIKGGGGSDIDPYKEFGSSYQLLNFLPLDFFPDLNALVDTATALYEEELTGREHCSPHHTAIRQALVCWDELTKLIAWMSSNITSEQVRTIIVNHVNDTWGLKVRQSLWFHLSCLTFGQHTVQEFLVSFGVWIRTPAPYRPPNAPILSTLPEHTVIC

SEQ ID NO: 6982 - protein, 1365 aa, Artificial Sequence
  SARS-CoV-2/Germany/BavPat1/2020__EPI_ISL_406862 spike protein (1-1211)(I712C_T1077C) WhcAg construct
MFVFLVLLPLVSSQCVNLTTRTQLPPAYTNSFTRGVYYPDKVFRSSVLHSTQDLFLPFFSNVTWFHAIHVSGTNGTKRFDNPVLPFNDGVYFASTEKSNIIRGWIFGTTLDSKTQSLLIVNNATNVVIKVCEFQFCNDPFLGVYYHKNNKSWMESEFRVYSSANNCTFEYVSQPFLMDLEGKQGNFKNLREFVFKNIDGYFKIYSKHTPINLVRDLPQGFSALEPLVDLPIGINITRFQTLLALHRSYLTPGDSSSGWTAGAAAYYVGYLQPRTFLLKYNENGTITDAVDCALDPLSETKCTLKSFTVEKGIYQTSNFRVQPTESIVRFPNITNLCPFGEVFNATRFASVYAWNRKRISNCVADYSVLYNSASFSTFKCYGVSPTKLNDLCFTNVYADSFVIRGDEVRQIAPGQTGKIADYNYKLPDDFTGCVIAWNSNNLDSKVGGNYNYLYRLFRKSNLKPFERDISTEIYQAGSTPCNGVEGFNCYFPLQSYGFQPTNGVGYQPYRVVVLSFELLHAPATVCGPKKSTNLVKNKCVNFNFNGLTGTGVLTESNKKFLPFQQFGRDIADTTDAVRDPQTLEILDITPCSFGGVSVITPGTNTSNQVAVLYQGVNCTEVPVAIHADQLTPTWRVYSTGSNVFQTRAGCLIGAEHVNNSYECDIPIGAGICASYQTQTNSPRRARSVASQSIIAYTMSLGAENSVAYSNNSCAIPTNFTISVTTEILPVSMTKTSVDCTMYICGDSTECSNLLLQYGSFCTQLNRALTGIAVEQDKNTQEVFAQVKQIYKTPPIKDFGGFNFSQILPDPSKPSKRSFIEDLLFNKVTLADAGFIKQYGDCLGDIAARDLICAQKFNGLTVLPPLLTDEMIAQYTSALLAGTITSGWTFGAGAALQIPFAMQMAYRFNGIGVTQNVLYENQKLIANQFNSAIGKIQDSLSSTASALGKLQDVVNQNAQALNTLVKQLSSNFGAISSVLNDILSRLDKVEAEVQIDRLITGRLQSLQTYVTQQLIRAAEIRASANLAATKMSECVLGQSKRVDFCGKGYHLMSFPQSAPHGVVFLHVTYVPAQEKNFTCAPAICHDGKAHFPREGVFVSNGTHWFVTQRNFYEPQIITTDNTFVSGNCDVVIGIVNNTVYDPLQPELDSFKEELDKYFKNHTSPDVDLGDISGINASVVNIQKEIDRLNEVAKNLNESLIDLQELGKYEQYIKGGGGSDIDPYKEFGSSYQLLNFLPLDFFPDLNALVDTATALYEEELTGREHCSPHHTAIRQALVCWDELTKLIAWMSSNITSEQVRTIIVNHVNDTWGLKVRQSLWFHLSCLTFGQHTVQEFLVSFGVWIRTPAPYRPPNAPILSTLPEHTVIC

SEQ ID NO: 6983 - protein, 1365 aa, Artificial Sequence
  SARS-CoV-2/Wuhan/HBCDC-HB-02/2020__EPI_ISL_412978 spike protein (1-1211)(I712C_T1077C) WhcAg construct
MFVFLVLLPLVSSQCVNLTTRTQLPPAYTNSFTRGVYYPDKVFRSSVLHSTQDLFLPFFSNVTWFHAIHVSGTNGTKRFDNPVLPFNDGVYFASTEKSNIIRGWIFGTTLDSKTQSLLIVNNATNVVIKVCEFQFCNDPFLGVYYHKNNKSWMESEFRVYSSANNCTFEYVSQPFLMDLEGKQGNFKNLREFVFKNIDGYFKIYSKHTPINLVRDLPQGFSALEPLVDLPIGINITRFQTLLALHRSYLTPGDSSSGWTAGAAAYYVGYLQPRTFLLKYNENGTITDAVDCALDPLSETKCTLKSFTVEKGIYQTSNFRVQPTESIVRFPNITNLCPFGEVFNATRFASVYAWNRKRISNCVADYSVLYNSASFSTFKCYGVSPTKLNDLCFTNVYADSFVIRGDEVRQIAPGQTGKIADYNYKLPDDFTGCVIAWNSNNLDSKVGGNYNYLYRLFRKSNLKPFERDISTEIYQAGSTPCNGVEGFNCYFPLQSYGFQPTNGVGYQPYRVVVLSFELLHAPATVCGPKKSTNLVKNKCVNFNFNGLTGTGVLTESNKKFLPFQQFGRDIADTTDAVRDPQTLEILDITPCSFGGVSVITPGTNTSNQVAVLYQDVNCTEVPVAIHADQLTPTWRVYSTGSNVFQTRAGCLIGAEHVNNSYECDIPIGAGICASYQTQTNSPRRARSVASQSIIAYTMSLGAENSVAYSNNSCAIPTNFTISVTTEILPVSMTKTSVDCTMYICGDSTECSNFLLQYGSFCTQLNRALTGIAVEQDKNTQEVFAQVKQIYKTPPIKDFGGFNFSQILPDPSKPSKRSFIEDLLFNKVTLADAGFIKQYGDCLGDIAARDLICAQKFNGLTVLPPLLTDEMIAQYTSALLAGTITSGWTFGAGAALQIPFAMQMAYRFNGIGVTQNVLYENQKLIANQFNSAIGKIQDSLSSTASALGKLQDVVNQNAQALNTLVKQLSSNFGAISSVLNDILSRLDKVEAEVQIDRLITGRLQSLQTYVTQQLIRAAEIRASANLAATKMSECVLGQSKRVDFCGKGYHLMSFPQSAPHGVVFLHVTYVPAQEKNFTCAPAICHDGKAHFPREGVFVSNGTHWFVTQRNFYEPQIITTDNTFVSGNCDVVIGIVNNTVYDPLQPELDSFKEELDKYFKNHTSPDVDLGDISGINASVVNIQKEIDRLNEVAKNLNESLIDLQELGKYEQYIKGGGGSDIDPYKEFGSSYQLLNFLPLDFFPDLNALVDTATALYEEELTGREHCSPHHTAIRQALVCWDELTKLIAWMSSNITSEQVRTIIVNHVNDTWGLKVRQSLWFHLSCLTFGQHTVQEFLVSFGVWIRTPAPYRPPNAPILSTLPEHTVIC

SEQ ID NO: 6984 - protein, 1365 aa, Artificial Sequence
  SARS-CoV-2/Australia/QLD02/2020__EPI_ISL_407896 spike protein (1-1211)(I712C_T1077C) WhcAg construct
MFVFLVLLPLVSSQCVNLTTRTQLPPAYTNSFTRGVYYPDKVFRSSVLHSTQDLFLPFFSNVTWFHAIHVSGTNGTKRFDNPVLPFNDGVYFASTEKSNIIRGWIFGTTLDSKTQSLLIVNNATNVVIKVCEFQFCNDPFLGVYYHKNNKSWMESEFRVYSSANNCTFEYVSQPFLMDLEGKQGNFKNLREFVFKNIDGYFKIYSKHTPINLVRDLPQGFSALEPLVDLPIGINITRFQTLLALHRSYLTPGDSSSGWTAGAAAYYVGYLQPRTFLLKYNENGTITDAVDCALDPLSETKCTLKSFTVEKGIYQTSNFRVQPTESIVRFPNITNLCPFGEVFNATRFASVYAWNRKRISNCVADYSVLYNSASFSTFKCYGVSPTKLNDLCFTNVYADSFVIRGDEVRQIAPGQTGKIADYNYKLPDDFTGCVIAWNSNNLDSKVGGNYNYLYRLFRKSNLKPFERDISTEIYQAGSTPCNGVEGFNCYFPLQSYGFQPTNGVGYQPYRVVVLSFELLHAPATVCGPKKSTNLVKNKCVNFNFNGLTGTGVLTESNKKFLPFQQFGRDIADTTDAVRDPQTLEILDITPCSFGGVSVITPGTNTSNQVAVLYQDVNCTEVPVAIHADQLTPTWRVYSTGSNVFQTRAGCLIGAEHVNNSYECDIPIGAGICASYQTQTNSPRRARSVASQSIIAYTMSLGAENSVAYSNNSCAIPTNFTISVTTEILPVSMTKTSVDCTMYICGDSTECSNLLLQYGSFCTQLNRALTGIAVEQDKNTQEVFAQVKQIYKTPPIKDFGGFNFSQILPDPSKPSKRSFIEDLLFNKVTLADAGFIKQYGDCLGDIAARDLICAQKFNGLTVLPPLLTDEMIAQYTSALLAGTITSGWTFGAGAALQIPFAMQMAYRFNGIGVTQNVLYENQKLIANQFNSAIGKIQDSLSSTASALGKLQDVVNQNAQALNTLVKQLSSNFGAISSVLNDILSRLDKVEAEVQIDRLITGRLQSLQTYVTQQLIRAAEIRASANLAATKMSECVLGQSKRVDFCGKGYHLMSFPQSAPHGVVFLHVTYVPAQEKNFTCAPAICHDGKAHFPREGVFVSNGTHWFVTQRNFYEPQIITTDNTFVSGNCDVVIGIVNNTVYDPLQLELDSFKEELDKYFKNHTSPDVDLGDISGINASVVNIQKEIDRLNEVAKNLNESLIDLQELGKYEQYIKGGGGSDIDPYKEFGSSYQLLNFLPLDFFPDLNALVDTATALYEEELTGREHCSPHHTAIRQALVCWDELTKLIAWMSSNITSEQVRTIIVNHVNDTWGLKVRQSLWFHLSCLTFGQHTVQEFLVSFGVWIRTPAPYRPPNAPILSTLPEHTVIC

SEQ ID NO: 6985 - protein, 1365 aa, Artificial Sequence
  SARS-CoV-2/India/1-31/2020__EPI_ISL_413523 spike protein (1-1211)(I712C_T1077C) WhcAg construct
MFVFLVLLPLVSSQCVNLTTRTQLPPAYTNSFTRGVYYPDKVFRSSVLHSTQDLFLPFFSNVTWFHAIHVSGTNGTKRFDNPVLPFNDGVYFASTEKSNIIRGWIFGTTLDSKTQSLLIVNNATNVVIKVCEFQFCNDPFLGVYYHKNNKSWMESEFRVYSSANNCTFEYVSQPFLMDLEGKQGNFKNLREFVFKNIDGYFKIYSKHTPINLVRDLPQGFSALEPLVDLPIGINITRFQTLLALHRSYLTPGDSSSGWTAGAAAYYVGYLQPRTFLLKYNENGTITDAVDCALDPLSETKCTLKSFTVEKGIYQTSNFRVQPTESIVRFPNITNLCPFGEVFNATRFASVYAWNRKRISNCVADYSVLYNSASFSTFKCYGVSPTKLNDLCFTNVYADSFVIRGDEVRQIAPGQTGKIADYNYKLPDDFTGCVIAWNSNNLDSKVGGNYNYLYRLFRKSNLKPFERDISTEIYQAGSTPCNGVEGFNCYFPLQSYGFQPTNGVGYQPYRVVVLSFELLHAPATVCGPKKSTNLVKNKCVNFNFNGLTGTGVLTESNKKFLPFQQFGRDIADTTDAVRDPQTLEILDITPCSFGGVSVITPGTNTSNQVAVLYQDVNCTEVPVAIHADQLTPTWRVYSTGSNVFQTRAGCLIGAEHVNNSYECDIPIGAGICASYQTQTNSPRRARSVASQSIIAYTMSLGAENSVAYSNNSCAIPTNFTISVTTEILPVSMTKTSVDCTMYICGDSTECSNLLLQYGSFCTQLNRALTGIAVEQDKNTQEVFAQVKQIYKTPPIKDFGGFNFSQILPDPSKPSKRSFIEDLLFNKVTLADAGFIKQYGDCLGDIAARDLICAQKFNGLTVLPPLLTDEMIAQYTSALLAGTITSGWTFGAGAALQIPFAMQMAYRFNGIGVTQNVLYENQKLIANQFNSVIGKIQDSLSSTASALGKLQDVVNQNAQALNTLVKQLSSNFGAISSVLNDILSRLDKVEAEVQIDRLITGRLQSLQTYVTQQLIRAAEIRASANLAATKMSECVLGQSKRVDFCGKGYHLMSFPQSAPHGVVFLHVTYVPAQEKNFTCAPAICHDGKAHFPREGVFVSNGTHWFVTQRNFYEPQIITTDNTFVSGNCDVVIGIVNNTVYDPLQPELDSFKEELDKYFKNHTSPDVDLGDISGINASVVNIQKEIDRLNEVAKNLNESLIDLQELGKYEQYIKGGGGSDIDPYKEFGSSYQLLNFLPLDFFPDLNALVDTATALYEEELTGREHCSPHHTAIRQALVCWDELTKLIAWMSSNITSEQVRTIIVNHVNDTWGLKVRQSLWFHLSCLTFGQHTVQEFLVSFGVWIRTPAPYRPPNAPILSTLPEHTVIC

SEQ ID NO: 6986 - protein, 1365 aa, Artificial Sequence
  SARS-CoV-2/Guangdong/GD2020087-P0008/2020__EPI_ISL_413863 spike protein (1-1211)(I712C_T1077C) WhcAg construct
MFVFLVLLPLVSSQCVNLTTRTQLPPAYTNSFTRGVYYPDKVFRSSVLHSTQDLFLPFFSNVTWFHAIHVSGTNGTKRFDNPVLPFNDGVYFASTEKSNIIRGWIFGTTLDSKTQSLLIVNNATNVVIKVCEFQFCNDPFLGVYYHKNNKSWMESEFRVYSSANNCTFEYVSQPFLMDLEGKQGNFKNLREFVFKNIDGYFKIYSKHTPINLVRDLPQGFSALEPLVDLPIGINITRFQTLLALHRSYLTPGDSSSGWTAGAAAYYVGYLQPRTFLLKYNENGTITDAVDCALDPLSETKCTLKSFTVEKGIYQTSNFRVQPTESIVRFPNITNLCPFGEVFNATRFASVYAWNRKRISNCVADYSVLYNSASFSTFKCYGVSPTKLNDLCFTNVYADSFVIRGDEVREIAPGQTGKIADYNYKLPDDFTGCVIAWNSNNLDSKVGGNYNYLYRLFRKSNLKPFERDISTEIYQAGSTPCNGVEGFNCYFPLQSYGFQPTNGVGYQPYRVVVLSFELLHAPATVCGPKKSTNLVKNKCVNFNFNGLTGTGVLTESNKKFLPFQQFGRDIADTTDAVRDPQTLEILDITPCSFGGVSVITPGTNTSNQVAVLYQDVNCTEVPVAIHADQLTPTWRVYSTGSNVFQTRAGCLIGAEHVNNSYECDIPIGAGICASYQTQTNSPRRARSVASQSIIAYTMSLGAENSVAYSNNSCAIPTNFTISVTTEILPVSMTKTSVDCTMYICGDSTECSNLLLQYGSFCTQLNRALTGIAVEQDKNTQEVFAQVKQIYKTPPIKDFGGFNFSQILPDPSKPSKRSFIEDLLFNKVTLADAGFIKQYGDCLGDIAARDLICAQKFNGLTVLPPLLTDEMIAQYTSALLAGTITSGWTFGAGAALQIPFAMQMAYRFNGIGVTQNVLYENQKLIANQFNSAIGKIQDSLSSTASALGKLQDVVNQNAQALNTLVKQLSSNFGAISSVLNDILSRLDKVEAEVQIDRLITGRLQSLQTYVTQQLIRAAEIRASANLAATKMSECVLGQSKRVDFCGKGYHLMSFPQSAPHGVVFLHVTYVPAQEKNFTCAPAICHDGKAHFPREGVFVSNGTHWFVTQRNFYEPQIITTDNTFVSGNCDVVIGIVNNTVYDPLQPELDSFKEELDKYFKNHTSPDVDLGDISGINASVVNIQKEIDRLNEVAKNLNESLIDLQELGKYEQYIKGGGGSDIDPYKEFGSSYQLLNFLPLDFFPDLNALVDTATALYEEELTGREHCSPHHTAIRQALVCWDELTKLIAWMSSNITSEQVRTIIVNHVNDTWGLKVRQSLWFHLSCLTFGQHTVQEFLVSFGVWIRTPAPYRPPNAPILSTLPEHTVIC

SEQ ID NO: 6987 - protein, 1365 aa, Artificial Sequence
  SARS-CoV-2/Sweden/01/2020__EPI_ISL_411951 spike protein (1-1211)(I712C_T1077C) WhcAg construct
MFVFLVLLPLVSSQCVNLTTRTQLPPAYTNSFTRGVYYPDKVFRSSVLHSTQDLFLPFFSNVTWFHAIHVSGTNGTKRFDNPVLPFNDGVYFASTEKSNIIRGWIFGTTLDSKTQSLLIVNNATNVVIKVCEFQFCNDPFLGVYYHKNNKSWMESEFRVYSSANNCTFEYVSQPFLMDLEGKQGNFKNLREFVFKNIDGYFKIYSKHTPINLVRDLPQGFSALEPLVDLPIGINITRFQTLLALHRSYLTPGDSSSGWTAGAAAYYVGYLQPRTFLLKYNENGTITDAVDCALDPLSETKCTLKSFTVEKGIYQTSNFRVQPTESIVRFPNITNLCPFGEVFNATRFASVYAWNRKRISNCVADYSVLYNSASFSTFKCYGVSPTKLNDLCFTNVYADSFVIRGDEVRQIAPGQTGKIADYNYKLPDDFTGCVIAWNSNNLDSKVGGNYNYLYRLFRKSNLKPFERDISTEIYQAGSTPCNGVEGFNCYFPLQSYGFQPTNGVGYQPYRVVVLSFELLHAPATVCGPKKSTNLVKNKCVNFNFNGLTGTGVLTESNKKFLPFQQFGRDIADTTDAVRDPQTLEILDITPCSFGGVSVITPGTNTSNQVAVLYQDVNCTEVPVAIHADQLTPTWRVYSTGSNVFQTRAGCLIGAEHVNNSYECDIPIGAGICASYQTQTNSPRRARSVASQSIIAYTMSLGAENSVAYSNNSCAIPTNFTISVTTEILPVSMTKTSVDCTMYICGDSTECSNLLLQYGSFCTQLNRALTGIAVEQDKNTQEVFAQVKQIYKTPPIKDCGGFNFSQILPDPSKPSKRSFIEDLLFNKVTLADAGFIKQYGDCLGDIAARDLICAQKFNGLTVLPPLLTDEMIAQYTSALLAGTITSGWTFGAGAALQIPFAMQMAYRFNGIGVTQNVLYENQKLIANQFNSAIGKIQDSLSSTASALGKLQDVVNQNAQALNTLVKQLSSNFGAISSVLNDILSRLDKVEAEVQIDRLITGRLQSLQTYVTQQLIRAAEIRASANLAATKMSECVLGQSKRVDFCGKGYHLMSFPQSAPHGVVFLHVTYVPAQEKNFTCAPAICHDGKAHFPREGVFVSNGTHWFVTQRNFYEPQIITTDNTFVSGNCDVVIGIVNNTVYDPLQPELDSFKEELDKYFKNHTSPDVDLGDISGINASVVNIQKEIDRLNEVAKNLNESLIDLQELGKYEQYIKGGGGSDIDPYKEFGSSYQLLNFLPLDFFPDLNALVDTATALYEEELTGREHCSPHHTAIRQALVCWDELTKLIAWMSSNITSEQVRTIIVNHVNDTWGLKVRQSLWFHLSCLTFGQHTVQEFLVSFGVWIRTPAPYRPPNAPILSTLPEHTVIC

SEQ ID NO: 6988 - protein, 1365 aa, Artificial Sequence
  SARS-CoV-2/Tianmen/HBCDC-HB-07/2020__EPI_ISL_412983 spike protein (1-1211)(I712C_T1077C) WhcAg construct
MFVFLVLLPLVSSQCVNLTTRTQLPPAYTNSFTRGVYYPDKVFRSSVLHSTQDLFLPFFSNVTWFHAIHVSGTNGTKRFDNPVLPFNDGVYFASTEKSNIIRGWIFGTTLDSKTQSLLIVNNATNVVIKVCEFQFCNDPFLGVYYHKNNKSWMESEFRVYSSANNCTFEYVSQPFLMDLEGKQGNFKNLREFVFKNIDGYFKIYSKHTPINLVRDLPQGFSALEPLVDLPIGINITRFQTLLALHRSYLTPGDSSSGWTAGAAAYYVGYLQPRTFLLKYNENGTITDAVDCALDPLSETKCTLKSFTVEKGIYQTSNFRVQPTESIVRFPNITNLCPFGEVFNATRFASVYAWNRKRISNCVADYSVLYNSASFSTFKCYGVSPTKLNDLCFTNVYADSFVIRGDEVRQIAPGQTGKIADYNYKLPDDFTGCVIAWNSNNLDSKVGGNYNYLYRLFRKSNLKPFERDISTEIYQAGSTPCNGVEGFNCYFPLQSYGFQPTNGVGYQPYRVVVLSFELLHAPATVCGPKKSTNLVKNKCVNFNFNGLTGTGVLTESNKKFLPFQQFGRDIADTTDAVRDPQTLEILDITPCSFGGVSVITPGTNTSNQVAVLYQDLNCTEVPVAIHADQLTPTWRVYSTGSNVFQTRAGCLIGAEHVNNSYECDIPIGAGICASYQTQTNSPRRARSVASQSIIAYTMSLGAENSVAYSNNSCAIPTNFTISVTTEILPVSMTKTSVDCTMYICGDSTECSNLLLQYGSFCTQLNRALTGIAVEQDKNTQEVFAQVKQIYKTPPIKDFGGFNFSQILPDPSKPSKRSFIEDLLFNKVTLADAGFIKQYGDCLGDIAARDLICAQKFNGLTVLPPLLTDEMIAQYTSALLAGTITSGWTFGAGAALQIPFAMQMAYRFNGIGVTQNVLYENQKLIANQFNSAIGKIQDSLSSTASALGKLQDVVNQNAQALNTLVKQLSSNFGAISSVLNDILSRLDKVEAEVQIDRLITGRLQSLQTYVTQQLIRAAEIRASANLAATKMSECVLGQSKRVDFCGKGYHLMSFPQSAPHGVVFLHVTYVPAQEKNFTCAPAICHDGKAHFPREGVFVSNGTHWFVTQRNFYEPQIITTDNTFVSGNCDVVIGIVNNTVYDPLQPELDSFKEELDKYFKNHTSPDVDLGDISGINASVVNIQKEIDRLNEVAKNLNESLIDLQELGKYEQYIKGGGGSDIDPYKEFGSSYQLLNFLPLDFFPDLNALVDTATALYEEELTGREHCSPHHTAIRQALVCWDELTKLIAWMSSNITSEQVRTIIVNHVNDTWGLKVRQSLWFHLSCLTFGQHTVQEFLVSFGVWIRTPAPYRPPNAPILSTLPEHTVIC

SEQ ID NO: 6989 - protein, 1365 aa, Artificial Sequence
  SARS-CoV-2/Hong Kong/case42_VM20002493/2020__EPI_ISL_414527 spike protein (1-1211)(I712C_T1077C) WhcAg construct
MFVFLVLLPLVSSQCVNLTTRTQLPPAYTNSFTRGVYYPDKVFRSSVLHSTQDLFLPFFSNVTWFHAIHVSGTNGTKRFDNPVLPFNDGVYFASTEKSNIIRGWIFGTTLDSKTQSLLIVNNATNVVIKVCEFQFCNDPFLGVYYHKNNKSWMESEFRVYSSANNCTFEYVSQPFLMDLEGKQGNFKNLREFVFKNIDGYFKIYSKHTPINLVRDLPQGFSALEPLVDLPIGINITRFQTLLALHRSYLTPGDSSSGWTAGAAAYYVGYLQPRTFLLKYNENGTITDAVDCALDPLSETKCTLKSFTVEKGIYQTSNFRVQPTESIVRFPNITNLCPFGEVFNATRFASVYAWNRKRISNCVADYSVLYNSASFSTFKCYGVSPTKLNDLCFTNVYADSFVIRGDEVRQIAPGQTGKIADYNYKLPDDFTGCVIAWNSNNLDSKVGGNYNYLYRLFRKSNLKPFERDISTEIYQAGSTPCNGVEGFNCYFPLQSYGFQPTNGVGYQPYRVVVLSFELLHAPATVCGPKKSTNLVKNKCVNFNFNGLTGTGVLTESNKKFLPFQQFGRDIADTTDAVRDPQTLEILDITPCSFGGVSVITPGTNTSNQVAVLYQDVNCTEVPVAIHADQLTPTWRVYSTGSNVFQTRAGCLIGAEHVNNSYECDIPIGAGICASYQTQTNSPRRARSVASQSIIAYTMSLGAENSVAYSNNSCAIPTNFAISVTTEILPVSMTKTSVDCTMYICGDSTECSNLLLQYGSFCTQLNRALTGIAVEQDKNTQEVFAQVKQIYKTPPIKDFGGFNFSQILPDPSKPSKRSFIEDLLFNKVTLADAGFIKQYGDCLGDIAARDLICAQKFNGLTVLPPLLTDEMIAQYTSALLAGTITSGWTFGAGAALQIPFAMQMAYRFNGIGVTQNVLYENQKLIANQFNSAIGKIQDSLSSTASALGKLQDVVNQNAQALNTLVKQLSSNFGAISSVLNDILSRLDKVEAEVQIDRLITGRLQSLQTYVTQQLIRAAEIRASANLAATKMSECVLGQSKRVDFCGKGYHLMSFPQSAPHGVVFLHVTYVPAQEKNFTCAPAICHDGKAHFPREGVFVSNGTHWFVTQRNFYEPQIITTDNTFVSGNCDVVIGIVNNTVYDPLQPELDSFKEELDKYFKNHTSPDVDLGDISGINASVVNIQKEIDRLNEVAKNLNESLIDLQELGKYEQYIKGGGGSDIDPYKEFGSSYQLLNFLPLDFFPDLNALVDTATALYEEELTGREHCSPHHTAIRQALVCWDELTKLIAWMSSNITSEQVRTIIVNHVNDTWGLKVRQSLWFHLSCLTFGQHTVQEFLVSFGVWIRTPAPYRPPNAPILSTLPEHTVIC

SEQ ID NO: 6990 - protein, 1365 aa, Artificial Sequence
  SARS-CoV-2/USA/CruiseA-23/2020__EPI_ISL_414482 spike protein (1-1211)(I712C_T1077C) WhcAg construct
MFVFLVLLPLVSSQCVNLTTRTQLPPAYTNSFTRGVYYPDKVFRSSVLHSTQDLFLPFFSNVTWFHAIHVSGTNGTKRFDNPVLPFNDGVYFASTEKSNIIRGWIFGTTLDSKTQSLLIVNNATNVVIKVCEFQFCNDPFLGVYYHKNNKSWMESEFRVYSSANNCTFEYVSQPFLMDLEVKQGNFKNLREFVFKNIDGYFKIYSKHTPINLVRDLPQGFSALEPLVDLPIGINITRFQTLLALHRSYLTPGDSSSGWTAGAAAYYVGYLQPRTFLLKYNENGTITDAVDCALDPLSETKCTLKSFTVEKGIYQTSNFRVQPTESIVRFPNITNLCPFGEVFNATRFASVYAWNRKRISNCVADYSVLYNSASFSTFKCYGVSPTKLNDLCFTNVYADSFVIRGDEVRQIAPGQTGKIADYNYKLPDDFTGCVIAWNSNNLDSKVGGNYNYLYRLFRKSNLKPFERDISTEIYQAGSTPCNGVEGFNCYFPLQSYGFQPTNGVGYQPYRVVVLSFELLHAPATVCGPKKSTNLVKNKCVNFNFNGLTGTGVLTESNKKFLPFQQFGRDIADTTDAVRDPQTLEILDITPCSFGGVSVITPGTNTSNQVAVLYQDVNCTEVPVAIHADQLTPTWRVYSTGSNVFQTRAGCLIGAEHVNNSYECDIPIGAGICASYQTQTNSPRRARSVASQSIIAYTMSLGAENSVAYSNNSCAIPTNFTISVTTEILPVSMTKTSVDCTMYICGDSTECSNLLLQYGSFCTQLNRALTGIAVEQDKNTQEVFAQVKQIYKTPPIKDFGGFNFSQILPDPSKPSKRSFIEDLLFNKVTLADAGFIKQYGDCLGDIAARDLICAQKFNGLTVLPPLLTDEMIAQYTSALLAGTITSGWTFGAGAALQIPFAMQMAYRFNGIGVTQNVLYENQKLIANQFNSAIGKIQDSLSSTASALGKLQDVVNQNAQALNTLVKQLSSNFGAISSVLNDILSRLDKVEAEVQIDRLITGRLQSLQTYVTQQLIRAAEIRASANLAATKMSECVLGQSKRVDFCGKGYHLMSFPQSAPHGVVFLHVTYVPAQEKNFTCAPAICHDGKAHFPREGVFVSNGTHWFVTQRNFYEPQIITTDNTFVSGNCDVVIGIVNNTVYDPLQPELDSFKEELDKYFKNHTSPDVDLGDISGINASVVNIQKEIDRLNEVAKNLNESLIDLQELGKYEQYIKGGGGSDIDPYKEFGSSYQLLNFLPLDFFPDLNALVDTATALYEEELTGREHCSPHHTAIRQALVCWDELTKLIAWMSSNITSEQVRTIIVNHVNDTWGLKVRQSLWFHLSCLTFGQHTVQEFLVSFGVWIRTPAPYRPPNAPILSTLPEHTVIC

SEQ ID NO: 6991 - protein, 1365 aa, Artificial Sequence
  SARS-CoV-2/Hong Kong/case85_VM20002868/2020__EPI_ISL_414519 spike protein (1-1211)(I712C_T1077C) WhcAg construct
MFVFLVLVPLVSSQCVNLTTRTQLPPAYTNSFTRGVYYPDKVFRSSVLHSTQDLFLPFFSNVTWFHAIHVSGTNGTKRFDNPVLPFNDGVYFASTEKSNIIRGWIFGTTLDSKTQSLLIVNNATNVVIKVCEFQFCNDPFLGVYYHKNNKSWMESEFRVYSSANNCTFEYVSQPFLMDLEGKQGNFKNLREFVFKNIDGYFKIYSKHTPINLVRDLPQGFSALEPLVDLPIGINITRFQTLLALHRSYLTPGDSSSGWTAGAAAYYVGYLQPRTFLLKYNENGTITDAVDCALDPLSETKCTLKSFTVEKGIYQTSNFRVQPTESIVRFPNITNLCPFGEVFNATRFASVYAWNRKRISNCVADYSVLYNSASFSTFKCYGVSPTKLNDLCFTNVYADSFVIRGDEVRQIAPGQTGKIADYNYKLPDDFTGCVIAWNSNNLDSKVGGNYNYLYRLFRKSNLKPFERDISTEIYQAGSTPCNGVEGFNCYFPLQSYGFQPTNGVGYQPYRVVVLSFELLHAPATVCGPKKSTNLVKNKCVNFNFNGLTGTGVLTESNKKFLPFQQFGRDIADTTDAVRDPQTLEILDITPCSFGGVSVITPGTNTSNQVAVLYQDVNCTEVPVAIHADQLTPTWRVYSTGSNVFQTRAGCLIGAEHVNNSYECDIPIGAGICASYQTQTNSPRRARSVASQSIIAYTMSLGAENSVAYSNNSCAIPTNFTISVTTEILPVSMTKTSVDCTMYICGDSTECSNLLLQYGSFCTQLNRALTGIAVEQDKNTQEVFAQVKQIYKTPPIKDFGGFNFSQILPDPSKPSKRSFIEDLLFNKVTLADAGFIKQYGDCLGDIAARDLICAQKFNGLTVLPPLLTDEMIAQYTSALLAGTITSGWTFGAGAALQIPFAMQMAYRFNGIGVTQNVLYENQKLIANQFNSAIGKIQDSLSSTASALGKLQDVVNQNAQALNTLVKQLSSNFGAISSVLNDILSRLDKVEAEVQIDRLITGRLQSLQTYVTQQLIRAAEIRASANLAATKMSECVLGQSKRVDFCGKGYHLMSFPQSAPHGVVFLHVTYVPAQEKNFTCAPAICHDGKAHFPREGVFVSNGTHWFVTQRNFYEPQIITTDNTFVSGNCDVVIGIVNNTVYDPLQPELDSFKEELDKYFKNHTSPDVDLGDISGINASVVNIQKEIDRLNEVAKNLNESLIDLQELGKYEQYIKGGGGSDIDPYKEFGSSYQLLNFLPLDFFPDLNALVDTATALYEEELTGREHCSPHHTAIRQALVCWDELTKLIAWMSSNITSEQVRTIIVNHVNDTWGLKVRQSLWFHLSCLTFGQHTVQEFLVSFGVWIRTPAPYRPPNAPILSTLPEHTVIC

SEQ ID NO: 6992 - protein, 1365 aa, Artificial Sequence; identical to SEQ ID NO: 6982
  SARS-CoV-2/England/200990660/2020__EPI_ISL_414523 spike protein (1-1211)(I712C_T1077C) WhcAg construct

SEQ ID NO: 6993 - protein, 1365 aa, Artificial Sequence
  SARS-CoV-2/Australia/NSW09/2020__EPI_ISL_413595 spike protein (1-1211)(I712C_T1077C) WhcAg construct
MFVFLVLLPLVSSQCVNLTTRTQLPPAYTNSFTRGVYYPDKVFRSSVLHSTQDLFLPFFSNVTWFHAIHVSGTNGTKRFDNPVLPFNDGVYFASTEKSNIIRGWIFGTTLDSKTQSLLIVNNATNVVIKVCEFQFCNDPFLGVYYHKNNKSWMESEFRVYSSANNCTFEYVSQPFLMDLEGKQGNFKNLREFVFKNIDGYFKIYSKHTPINLVRDLPQGFSALEPLVDLPIGINITRFQTLLALHRSYLTPGDSSSGWTAGAAAYYVGYLQPRTFLLKYNENGTITDAVDCALDPLSETKCTLKSFTVEKGIYQTSNFRVQPTESIVRFPNITNLCPFGEVFNATRFASVYAWNRKRISNCVADYSVLYNSASFSTFKCYGVSPTKLNDLCFTNVYADSFVIRGDEVRQIAPGQTGKIADYNYKLPDDFTGCVIAWNSNNLDSKVGGNYNYLYRLFRKSNLKPFERDISTEIYQAGSTPCNGVEGFNCYFPLQSYGFQPTNGVGYQPYRVVVLSFELLHAPATVCGPKKSTNLVKNKCVNFNFNGLTGTGVLTESNKKFLPFQQFGRDIADTTDAVRDPQTLEILDITPCSFGGVSVITPGTNTSNQVAVLYQDVNCTEVPVAIHADQLTPTWRVYSTGSNVFQTRAGCLIGAEHVNNSYECDIPIGAGICASYQTQTNSPRRARSVASQSIIAYTMSLGAENSVAYSNNSCAIPTNFTISVTTEILPVSMTKTSVDCTMYICGDSTECSNLLLQYGSFCTQLNRALTGIAVEQDKNTQEVFAQVKQIYKTPPIKDFGGFNFSQILPDPSKPSKRSFIEDLLFNKVTLADAGFIKQYGDCLGDIAARDLICAQKFNGLTVLPPLLTDEMIAQYTSALLAGTITSGWTFGAGAALQIPFAMQMAYRFNGIGVTQNVLYENQKLIANQFNSAIGKIQDSLSFTASALGKLQDVVNQNAQALNTLVKQLSSNFGAISSVLNDILSRLDKVEAEVQIDRLITGRLQSLQTYVTQQLIRAAEIRASANLAATKMSECVLGQSKRVDFCGKGYHLMSFPQSAPHGVVFLHVTYVPAQEKNFTCAPAICHDGKAHFPREGVFVSNGTHWFVTQRNFYEPQIITTDNTFVSGNCDVVIGIVNNTVYDPLQPELDSFKEELDKYFKNHTSPDVDLGDISGINASVVNIQKEIDRLNEVAKNLNESLIDLQELGKYEQYIKGGGGSDIDPYKEFGSSYQLLNFLPLDFFPDLNALVDTATALYEEELTGREHCSPHHTAIRQALVCWDELTKLIAWMSSNITSEQVRTIIVNHVNDTWGLKVRQSLWFHLSCLTFGQHTVQEFLVSFGVWIRTPAPYRPPNAPILSTLPEHTVIC

SEQ ID NO: 6994 - protein, 1365 aa, Artificial Sequence; identical to SEQ ID NO: 6974
  SARS-CoV-2/Australia/NSW10/2020__EPI_ISL_413596 spike protein (1-1211)(I712C_T1077C) WhcAg construct

SEQ ID NO: 6995 - protein, 1365 aa, Artificial Sequence
  SARS-CoV-2/Switzerland/1000477797/2020__EPI_ISL_413023 spike protein (1-1211)(I712C_T1077C) WhcAg construct
MFVFLVLLPLVSSQCVNLTTRTQLPPAYTNSFTRGVYYPDKVFRSSVLHSTQDLFLPFFSNVTWFHAIHVSGTNGTKRFDNPVLPFNDGVYFASTEKSNIIRGWIFGTTLDSKTQSLLIVNNATNVVIKVCEFQFCNDPFLGVYYHKNNKSWMESEFRVYSSANNCTFEYVSQPFLMDLEGKQGNFKNLREFVFKNIDGYFNIYSKHTPINLVRDLPQGFSALEPLVDLPIGINITRFQTLLALHRSYLTPGDSSSGWTAGAAAYYVGYLQPRTFLLKYNENGTITDAVDCALDPLSETKCTLKSFTVEKGIYQTSNFRVQPTESIVRFPNITNLCPFGEVFNATRFASVYAWNRKRISNCVADYSVLYNSASFSTFKCYGVSPTKLNDLCFTNVYADSFVIRGDEVRQIAPGQTGKIADYNYKLPDDFTGCVIAWNSNNLDSKVGGNYNYLYRLFRKSNLKPFERDISTEIYQAGSTPCNGVEGFNCYFPLQSYGFQPTNGVGYQPYRVVVLSFELLHAPATVCGPKKSTNLVKNKCVNFNFNGLTGTGVLTESNKKFLPFQQFGRDIADTTDAVRDPQTLEILDITPCSFGGVSVITPGTNTSNQVAVLYQGVNCTEVPVAIHADQLTPTWRVYSTGSNVFQTRAGCLIGAEHVNNSYECDIPIGAGICASYQTQTNSPRRARSVASQSIIAYTMSLGAENSVAYSNNSCAIPTNFTISVTTEILPVSMTKTSVDCTMYICGDSTECSNLLLQYGSFCTQLNRALTGIAVEQDKNTQEVFAQVKQIYKTPPIKDFGGFNFSQILPDPSKPSKRSFIEDLLFNKVTLADAGFIKQYGDCLGDIAARDLICAQKFNGLTVLPPLLTDEMIAQYTSALLAGTITSGWTFGAGAALQIPFAMQMAYRFNGIGVTQNVLYENQKLIANQFNSAIGKIQDSLSSTASALGKLQDVVNQNAQALNTLVKQLSSNFGAISSVLNDILSRLDKVEAEVQIDRLITGRLQSLQTYVTQQLIRAAEIRASANLAATKMSECVLGQSKRVDFCGKGYHLMSFPQSAPHGVVFLHVTYVPAQEKNFTCAPAICHDGKAHFPREGVFVSNGTHWFVTQRNFYEPQIITTDNTFVSGNCDVVIGIVNNTVYDPLQPELDSFKEELDKYFKNHTSPDVDLGDISGINASVVNIQKEIDRLNEVAKNLNESLIDLQELGKYEQYIKGGGGSDIDPYKEFGSSYQLLNFLPLDFFPDLNALVDTATALYEEELTGREHCSPHHTAIRQALVCWDELTKLIAWMSSNITSEQVRTIIVNHVNDTWGLKVRQSLWFHLSCLTFGQHTVQEFLVSFGVWIRTPAPYRPPNAPILSTLPEHTVIC

SEQ ID NO: 6996 - protein, 1365 aa, Artificial Sequence
  SARS-CoV-2/Belgium/BA-02291/2020__EPI_ISL_415159 spike protein (1-1211)(I712C_T1077C) WhcAg construct
MFVFLVLLPLVSSQCVNLTTRTQLPPAYTNSFTRGVYYPDKVFRSSVLHSTQDLFLPFFSNVTWFHAIHVSGTNGTKRFDNPVLPFNDGVYFASTEKSNIIRGWIFGTTLDSKTQSLLIVNNATNVVIKVCEFQFCNDPFLGVYYHKNNKSWMESEFRVYSSANNCTFEYVSQPFLMDLEGKQGNFKNLREFVFKNIDGYFKIYSKHTPINLVRDLPQGFSALEPLVDLPIGINITRFQTLLALHRSYLTPGDSSSGWTAGAAAYYVGYLQPRTFLLKYNENGTITDAVDCALDPLSETKCTLKSFTVEKGIYQTSNFRVQPTESIVRFPNITNLCPFGEVFNATRFASVYAWNRKRISNCVADYSVLYNSASFSTFKCYGVSPTKLNDLCFTNVYADSFVIRGDEVRQIAPGQTGKIADYNYKLPDDFTGCVIAWNSNNLDSKVGGNYNYLYRLFRRSNLKPFERDISTEIYQAGSTPCNGVEGFNCYFPLQSYGFQPTNGVGYQPYRVVVLSFELLPAPATVCGPKKSTNLVKNKCVNFNFNGLTGTGVLTESNKKFLPFQQFGRDIADTTDAVRDPQTLEILDITPCSFGGVSVITPGTNTSNQVAVLYQGVNCTEVPVAIHADQLTPTWRVYSTGSNVFQTRAGCLIGAEHVNNSYECDIPIGAGICASYQTQTNSPRRARSVASQSIIAYTMSLGAENSVAYSNNSCAIPTNFTISVTTEILPVSMTKTSVDCTMYICGDSTECSNLLLQYGSFCTQLNRALTGIAVEQDKNTQEVFAQVKQIYKTPPIKDFGGFNFSQILPDPSKPSKRSFIEDLLFNKVTLADAGFIKQYGDCLGDIAARDLICAQKFNGLTVLPPLLTDEMIAQYTSALLAGTITSGWTFGAGAALQIPFAMQMAYRFNGIGVTQNVLYENQKLIANQFNSAIGKIQDSLSSAAPALGKLQDVVNQNAQALNTLVKQLSSNFGAISSVLNDILSRLDKVEAEVQIDRLITGRLQSLQTYVTQQLIRAAEIRASANLAATKMSECVLGQSKRVDFCGKGYHLMSFPQSAPHGVVFLHVTYVPAQEKNFTCAPAICHDGKAHFPREGVFVSNGTHWFVTQRNFYEPQIITTDNTFVSGNCDVVIGIVNNTVYDPLQPELDSFKEELDKYFKNHTSPDVDLGDISGINASVVNIQKEIDRLNEVAKNLNESLIDLQELGKYEQYIKGGGGSDIDPYKEFGSSYQLLNFLPLDFFPDLNALVDTATALYEEELTGREHCSPHHTAIRQALVCWDELTKLIAWMSSNITSEQVRTIIVNHVNDTWGLKVRQSLWFHLSCLTFGQHTVQEFLVSFGVWIRTPAPYRPPNAPILSTLPEHTVIC

SEQ ID NO: 6997 - protein, 1365 aa, Artificial Sequence
  SARS-CoV-2/USA/WA8-UW5/2020__EPI_ISL_413486 spike protein (1-1211)(I712C_T1077C) WhcAg construct
MFVFLVLLPLVSSQCVNLTTRTQLPPAYTNSFTRGVYYPDKVFRSSVLHSTQDLFLPFFSNVTWFHAIHVSGTNGTKRFDNPVLPFNDGVYFASTEKSNIIRGWIFGTTLDSKTQSLLIVNNATNVVIKVCEFQFCNDPFLGVYYHKNNKSWMESEFRVYSSANNCTFEYVSQPFLMDLEGKQGNFKNLREFVFKNIDGYFKIYSKHTPINLVRDLPQGFSALEPLVDLPIGINITRFQTLLALHRSYLTPGDSSSGWTAGAAAYYVGYLQPRTFLLKYNENGTITDAVDCALDPLSETKCTLKSFTVEKGIYQTSNFRVQPTESIVRFPNITNLCPFGEVFNATRFASVYAWNRKRISNCVADYSVLYNSASFSTFKCYGVSPTKLNDLCFTNVYADSFVIRGDEVRQIAPGQTGKIADYNYKLPDDFTGCVIAWNSNNLDSKVGGNYNYLYRLFRKSNLKPFERDISTEIYQAGSTPCNGVEGFNCYFPLQSYGFQPTNGVGYQPYRVVVLSFELLHAPATVCGPKKSTNLVKNKCVNFNFNGLTGTGVLTESNKKFLPFQQFGRDIADTTDAVRDPQTLEILDITPCSFGGVSVITPGTNTSNQVAVLYQDVNCTEVPVAIHADQLTPTWRVYSTGSNVFQTRAGCLIGAEYVNNSYECDIPIGAGICASYQTQTNSPRRARSVASQSIIAYTMSLGAENSVAYSNNSCAIPTNFTISVTTEILPVSMTKTSVDCTMYICGDSTECSNLLLQYGSFCTQLNRALTGIAVEQDKNTQEVFAQVKQIYKTPPIKDFGGFNFSQILPDPSKPSKRSFIEDLLFNKVTLADAGFIKQYGDCLGDIAARDLICAQKFNGLTVLPPLLTDEMIAQYTSALLAGTITSGWTFGAGAALQIPFAMQMAYRFNGIGVTQNVLYENQKLIANQFNSAIGKIQDSLSSTASALGKLQDVVNQNAQALNTLVKQLSSNFGAISSVLNDILSRLDKVEAEVQIDRLITGRLQSLQTYVTQQLIRAAEIRASANLAATKMSECVLGQSKRVDFCGKGYHLMSFPQSAPHGVVFLHVTYVPAQEKNFTCAPAICHDGKAHFPREGVFVSNGTHWFVTQRNFYEPQIITTDNTFVSGNCDVVIGIVNNTVYDPLQPELDSFKEELDKYFKNHTSPDVDLGDISGINASVVNIQKEIDRLNEVAKNLNESLIDLQELGKYEQYIKGGGGSDIDPYKEFGSSYQLLNFLPLDFFPDLNALVDTATALYEEELTGREHCSPHHTAIRQALVCWDELTKLIAWMSSNITSEQVRTIIVNHVNDTWGLKVRQSLWFHLSCLTFGQHTVQEFLVSFGVWIRTPAPYRPPNAPILSTLPEHTVIC

SEQ ID NO: 6998 - protein, 1365 aa, Artificial Sequence
  SARS-CoV-2/England/20102000506/2020__EPI_ISL_415147 spike protein (1-1211)(I712C_T1077C) WhcAg construct
MFVFLVLLPLVSSQCVNLTTRTQLPPAYTNSFTRGVYYPDKVFRSSVLHSTQDLFLPFFSNVTWFHAIHVSGTNGTKRFDNPVLPFNDGVYFASTEKSNIIRGWIFGTTLDSKTQSLLIVNNATNVVIKVCEFQFCNDPFLGVYYHKNNKSWMESEFRVYSSANNCTFEYVSQPFLMDLEGKQGNFKNLREFVFKNIDGYFKIYSKHTPINLVRDLPQGFSALEPLVDLPIGINITRFQTLLALHRSYLTPGDSSSGWTAGAAAYYVGYLQPRTFLLKYNENGTITDAVDCALDPLSETKCTLKSFTVEKGIYQTSNFRVQPTESIVRFPNITNLCPFGEVFNATRFASVYAWNRKRISNCVADYSVLYNSASFSTFKCYGVSPTKLNDLCFTNVYADSFVIRGDEVRQIAPGQTGKIADYNYKLPDDFTGCVIAWNSNNLDSKVGGNYNYLYRLFRKSNLKPFERDISTEIYQAGSTPCNGVEGFNCYFPLQSYGFQPTNGVGYQPYRVVVLSFELLHAPATVCGPKKSTNLVKNKCVNFNFNGLTGTGVLTESNKKFLPFQQFGRDIADTTDAVRDPQTLEILDITPCSFGGVSVITPGTNTSNQVAVLYQGVNCTEVPVAIHADQLTPTWRVYSTGSNVFQTRAGCLIGAEHVNNSYECDIPIGAGICASYQTQTNSPRRARSVASQSIIAYTMSLGAENSVAYSNNSCAIPTNFTISVTTEILPVSMTKTSVDCTMYICGDSTECSNLLLQYGSFCTQLNRALTGIAVEQDKNTQEVFAQVKQIYKTPPIKDFGGFNFSQILPDPSKPSKRSFIEDLLFNKVTLADAGFIKQYGYCLGDIAARDLICAQKFNGLTVLPPLLTDEMIAQYTSALLAGTITSGWTFGAGAALQIPFAMQMAYRFNGIGVTQNVLYENQKLIANQFNSAIGKIQDSLSSTASALGKLQDVVNQNAQALNTLVKQLSSNFGAISSVLNDILSRLDKVEAEVQIDRLITGRLQSLQTYVTQQLIRAAEIRASANLAATKMSECVLGQSKRVDFCGKGYHLMSFPQSAPHGVVFLHVTYVPAQEKNFTCAPAICHDGKAHFPREGVFVSNGTHWFVTQRNFYEPQIITTDNTFVSGNCDVVIGIVNNTVYDPLQPELDSFKEELDKYFKNHTSPDVDLGDISGINASVVNIQKEIDRLNEVAKNLNESLIDLQELGKYEQYIKGGGGSDIDPYKEFGSSYQLLNFLPLDFFPDLNALVDTATALYEEELTGREHCSPHHTAIRQALVCWDELTKLIAWMSSNITSEQVRTIIVNHVNDTWGLKVRQSLWFHLSCLTFGQHTVQEFLVSFGVWIRTPAPYRPPNAPILSTLPEHTVIC

SEQ ID NO: 6999 - protein, 1365 aa, Artificial Sequence
  SARS-CoV-2/Belgium/VAG-03013/2020__EPI_ISL_415155 spike protein (1-1211)(I712C_T1077C) WhcAg construct
MFVFLVLLPLVSSQCVNLTTRTQLPPAYTNSFTRGVYYPDKVFRSSVLHSTQDLFLPFFSNVTWFHAIHVSGTNGTKRFDNPVLPFNDGVYFASTEKSNIIRGWIFGTTLDSKTQSLLIVNNATNVVIKVCEFQFCNDPFLGVYYHKNNKSWMESEFRVYSSANNCTFEYVSQPFLMDLEGKQGNFKNLREFVFKNIDGYFKIYSKHTPINLVRDLPQGFSALEPLVDLPIGINITRFQTLLALHRSYLTPGDSSSGWTAGAAAYYVGYLQPRTFLLKYNENGTITDAVDCALDPLSETKCTLKSFTVEKGIYQTSNFRVQPTESIVRFPNITNLCPFGEVFNATRFASVYAWNRKRISNCVADYSVLYNSASFSTFKCYGVSPTKLNDLCFTNVYADSFVIRGDEVRQIAPGQTGKIADYNYKLPDDFTGCVIAWNSNNLDSKVGGNYNYLYRLFRKSNLKPFERDISTEIYQAGSTPCNGVEGFNCYFPLQSYGFQPTNGVGYQPYRVVVLSFELLHAPATVCGPKKSTNLVKNKCVNFNFNGLTGTGVLTESNKKFLPFQQFGRDIADTTDAVRDPQTLEILDITPCSFGGVSVITPGTNTSNQVAVLYQGVNCTEVPVAIHADQLTPTWRVYSTGSNVFQTRAGCLIGAEHVNNSYECDIPIGAGICASYQTQTNSPRRARSVASQSIIAYTMSLGAENSVAYSNNSCAIPTNFTISVTTEILPVSMTKTSVDCTMYICGDSTECSNLLLQYGSFCTQLNRALTGIAVEQDKNTQEVFAQVKQIYKTPPIKDFGGFNFSQILPDPSKPSKRSFIEDLLFNKVTLADAGFIKQYGDCLGDIAARDLICAQKFNGLTVLPPLLTDEMIAQYTSALLAGTITSGWTFGAGAALQIPFAMQMAYRFNGIGVTQNVLYENQKLIANQFNSAIGKIQDSLSSTATALGKLQDVVNQNAQALNTLVKQLSSNFGAISSVLNDILSRLDKVEAEVQIDRLITGRLQSLQTYVTQQLIRAAEIRASANLAATKMSECVLGQSKRVDFCGKGYHLMSFPQSAPHGVVFLHVTYVPAQEKNFTCAPAICHDGKAHFPREGVFVSNGTHWFVTQRNFYEPQIITTDNTFVSGNCDVVIGIVNNTVYDPLQPELDSFKEELDKYFKNHTSPDVDLGDISGINASVVNIQKEIDRLNEVAKNLNESLIDLQELGKYEQYIKGGGGSDIDPYKEFGSSYQLLNFLPLDFFPDLNALVDTATALYEEELTGREHCSPHHTAIRQALVCWDELTKLIAWMSSNITSEQVRTIIVNHVNDTWGLKVRQSLWFHLSCLTFGQHTVQEFLVSFGVWIRTPAPYRPPNAPILSTLPEHTVIC

SEQ ID NO: 7000 - protein, 1365 aa, Artificial Sequence
  SARS-CoV-2/Belgium/BC-03016/2020__EPI_ISL_415157 spike protein (1-1211)(I712C_T1077C) WhcAg construct
MFVFLVLLPLVSSQCVNLTTRTQLPPAYTNSFTRGVYYPDKVFRSSVLHSTQDLFLPFFSNVTWFHAIHVSGTNGTKRFDNPVLPFNDGVYFASTEKSNIIRGWIFGTTLDSKTQSLLIVNNATNVVIKVCEFQFCNDPFLGVYYHKNNKSWMESEFRVYSSANNCTFEYVSQPFLMDLEGKQGNFKNLREFVFKNIDGYFKIYSKHTPINLVRDLPQGFSALEPLVDLPIGINITRFQTLLALHRSYLTPGDSSSGWTAGAAAYYVGYLQPRTFLLKYNENGTITDAVDCALDPLSETKCTLKSFTVEKGIYQTSNFRVQPTESIVRFPNITNLCPFGEVFNATRFASVYAWNRKRISNCVADYSVLYNSASFSTFKCYGVSPTKLNDLCFTNVYADSFVIRGDEVRQIAPGQTGKIADYNYKLPDDFTGCVIAWNSNNLDSKVGGNYNYLYRLFRKSNLKPFERDISTEIYQAGSTPCNGVEGFNCYFPLQSYGFQPTNGVGYQPYRVVVLSFELLHAPATVCGPKKSTNLVKNKCVNFNFNGLTGTGVLTESNKKFLPFQQFGRDIADTTDAVRDPQTLEILDITPCSFGGVSVITPGTNTSNQVAVLYQGVNCTEVPVAIHADQLTPTWRVYSTGSNVFQTRAGCLIGAEHVNNSYECDIPIGAGICASYQTQTNSPRRARSVASQSIIAYTMSLGAENSVAYSNNSCAIPTNFTISVTTEILPVSMTKTSVDCTMYICGDSTECSNLLLQYGSFCTQLNRALTGIAVEQDKNTQEVFAQVKQIYKTPPIKDFGGFNFSQILPDPSKPSKRSFIEDLLFNKVTLADAGFIKQYGDCLGDIAARDLICAQKFNGLTVLPPLLTDEMIAQYTSALLAGTITSGWTFGAGAALQIPFAMQMAYRFNGIGVTQNVLYENQKLIANQFNSAIGKIQDSLSSTAPALGKLQDVVNQNAQALNTLVKQLSSNFGAISSVLNDILSRLDKVEAEVQIDRLITGRLQSLQTYVTQQLIRAAEIRASANLAATKMSECVLGQSKRVDFCGKGYHLMSFPQSAPHGVVFLHVTYVPAQEKNFTCAPAICHDGKAHFPREGVFVSNGTHWFVTQRNFYEPQIITTDNTFVSGNCDVVIGIVNNTVYDPLQPELDSFKEELDKYFKNHTSPDVDLGDISGINASVVNIQKEIDRLNEVAKNLNESLIDLQELGKYEQYIKGGGGSDIDPYKEFGSSYQLLNFLPLDFFPDLNALVDTATALYEEELTGREHCSPHHTAIRQALVCWDELTKLIAWMSSNITSEQVRTIIVNHVNDTWGLKVRQSLWFHLSCLTFGQHTVQEFLVSFGVWIRTPAPYRPPNAPILSTLPEHTVIC

SEQ ID NO: 7001 - protein, 1365 aa, Artificial Sequence
  SARS-CoV-2/Germany/BavPat3/2020__EPI_ISL_414521 spike protein (1-1211)(I712C_T1077C) WhcAg construct
MFVFLVLLPLVSSQCVNLTTRTQLPPAYTNSFTRGVYYPDKVFRSSVLHSTQDLFLPFFSNVTWFHAIHVSGTNGTKRFDNPVLPFNDGVYFASTEKSNIIRGWIFGTTLDSKTQSLLIVNNATNVVIKVCEFQFCNDPFLGVYYHKNNKSWMESEFRVYSSANNCTFEYVSQPFLMDLEGKQGNFKNLREFVFKNIDGYFKIYSKHTPINLVRDLPQGFSALEPLVDLPIGINITRFQTLLALHRSYLTPGDSSSGWTAGAAAYYVGYLQPRTFLLKYNENGTITDAVDCALDPLSETKCTLKSFTVEKGIYQTSNFRVQPTESIVRFPNITNLCPFGEVFNATRFASVYAWNRKRISNCVADYSVLYNSASFSTFKCYGVSPTKLNDLCFTNVYADSFVIRGDEVRQIAPGQTGKIADYNYKLPDDFTGCVIAWNSNNLDSKVGGNYNYLYRLFRKSNLKPFERDISTEIYQAGSTPCNGVEGFNCYFPLQSYGFQPTNGVGYQPYRVVVLSFELLHAPATVCGPKKSTNLVKNKCVNFNFNGLTGTGVLTESNKKFLPFQQFGRDIADTTDAVRDPQTLEILDITPCSFGGVSVITPGTNTSNQVAVLYQDVNCTEVPVAIHADQLTPTWRVYSTGSNVFQTRAGCLIGAEHVNNSYECDIPIGAGICASYQTQTNSPRRARSVASQSIIAYTMSLGAENSVAYSNNSCAIPTNFTISVTTEILPVSMTKTSVDCTMYICGDSTECSNLLLQYGSFCTQLNRALTGIAVEQDKNTQQVFAQVKQIYKTPPIKDFGGFNFSQILPDPSKPSKRSFIEDLLFNKVTLADAGFIKQYGDCLGDIAARDLICAQKFNGLTVLPPLLTDEMIAQYTSALLAGTITSGWTFGAGAALQIPFAMQMAYRFNGIGVTQNVLYENQKLIANQFNSAIGKIQDSLSSTASALGKLQDVVNQNAQALNTLVKQLSSNFGAISSVLNDILSRLDKVEAEVQIDRLITGRLQSLQTYVTQQLIRAAEIRASANLAATKMSECVLGQSKRVDFCGKGYHLMSFPQSAPHGVVFLHVTYVPAQEKNFTCAPAICHDGKAHFPREGVFVSNGTHWFVTQRNFYEPQIITTDNTFVSGNCDVVIGIVNNTVYDPLQPELDSFKEELDKYFKNHTSPDVDLGDISGINASVVNIQKEIDRLNEVAKNLNESLIDLQELGKYEQYIKGGGGSDIDPYKEFGSSYQLLNFLPLDFFPDLNALVDTATALYEEELTGREHCSPHHTAIRQALVCWDELTKLIAWMSSNITSEQVRTIIVNHVNDTWGLKVRQSLWFHLSCLTFGQHTVQEFLVSFGVWIRTPAPYRPPNAPILSTLPEHTVIC

SEQ ID NO: 7002 - protein, 1365 aa, Artificial Sequence
  SARS-CoV-2/France/HF1805/2020__EPI_ISL_414628 spike protein (1-1211)(I712C_T1077C) WhcAg construct
MFVFLVLLPLVSSQCVNLTTRTQLPPAYTNSFTRGVYYPDKVFRSSVLHSTQDLFLPFFSNVTWFHAIHVSGTNGTKRFDNPVLPFNDGVYFASTEKSNIIRGWIFGTTLDSKTQSLLIVNNATNVVIKVCEFQFCNDPFLGVYYHKNNKSWMESEFRVYSSANNCTFEYVSQPFLMDLEGKQGNFKNLREFVFKNIDGYFKIYSKHTPINLVRDLPQGFSALEPLVDLPIGINITRFQTLLALHRSYLTPGDSSSGWTAGAAAYYVGYLQPRTFLLKYNENGTITDAVDCALDPLSETKCTLKSFTVEKGIYQTSNFRVQPTESIVRFPNITNLCPFGEVFNATRFASVYAWNRKRISNCVADYSVLYNSASFSTFKCYGVSPTKLNDLCFTNVYADSFVIRGDEVRQIAPGQTGKIADYNYKLPDDFTGCVIAWNSNNLDSKVGGNYNYLYRLFRKSNLKPFERDISTEIYQAGSTPCNGVEGFNCYFPLQSYGFQPTNGVGYQPYRVVVLSFELLHAPATVCGPKKSTNLVKNKCVNFNFNGLTGTGVLTESNKKFLPFQQFGRDIADTTDAVRDPQTLEILDITPCSFGGVSVITPGTNTSNQVAVLYQGVNCTEVPVAIHADQLTPTWRVYSTGSNVFQTRAGCLIGAEHVNNSYECDIPIGAGICASYQTQTNSPRRARSVASQSIIAYTMSLGAENSVAYSNNSCAIPTNFTISVTTEILPVSMTKTSVDCTMYICGDSTECSNLLLQYGSFCTQLNRALTGIAVEQDKNTQEVFAQVKQIYKTPPIKDFGGFNFSQILPDPSKPSKRSFIEDLLFNKVTLADAGFIKQYGDCLGDIAARDLICAQKFNGLTVLPPLLTDEMIAQYTSALLAGTITSGWTFGAGAALQIPFAMQMAYRFNGIGVTQNVLYENQKLIANQFNSAIGKIQDSLSSTASALGKLQDVVNQNAQALNTLVKQLSSNFGAISSVLNDILSRLDKVEAEVQIDRLITGRLQSLQTYVTQQLIRAAEIRASANLAATKMSECVLGQSKRVDFCGKGYHLMSFPQSAPHGVVFLHVTYVPAQEKNFTCAPAICHDGKAHFPREGVFVSNGTHWFVTQRNFYEPQIITTDNTFVSGNCDVVIGVVNNTVYDPLQPELDSFKEELDKYFKNHTSPDVDLGDISGINASVVNIQKEIDRLNEVAKNLNESLIDLQELGKYEQYIKGGGGSDIDPYKEFGSSYQLLNFLPLDFFPDLNALVDTATALYEEELTGREHCSPHHTAIRQALVCWDELTKLIAWMSSNITSEQVRTIIVNHVNDTWGLKVRQSLWFHLSCLTFGQHTVQEFLVSFGVWIRTPAPYRPPNAPILSTLPEHTVIC

SEQ ID NO: 7003 - protein, 1365 aa, Artificial Sequence
  SARS-CoV-2/Netherlands/ZuidHolland_9/2020__EPI_ISL_414445 spike protein (1-1211)(I712C_T1077C) WhcAg construct
MFVFLVLLPLVSSQCVNLTTRTQLPPAYTNSFTRGVYYPDKVFRSSVLHSTQDLFLPFFSNVTWFHAIHVSGTNGTKRFDNPVLPFNDGVYFASTEKSNIIRGWIFGTTLDSKTQSLLIVNNATNVVIKVCEFQFCNDPFLGVYYHKNNKSWMESEFRVYSSANNCTFEYVSQPFLMDLEGKQGNFKNLREFVFKNIDGYFKIYSKHTPINLVRDLPQGFSALEPLVDLPIGINITRFQTLLALHRSYLTPGDSSSGWTAGAAAYYVGYLQPRTFLLKYNENGTITDAVDCALDPLSETKCTLKSFTVEKGIYQTSNFRVQPTESIVRFPNITNLCPFGEVFNATRFASVYAWNRKRISNCVADYSVLYNSASFSTFKCYGVSPTKLNDLCFTNVYADSFVIRGDEVRQIAPGQTGKIADYNYKLPDDFTGCVIAWNSNNLDSKVGGNYNYLYRLFRKSNLKPFERDISTEIYQAGSTPCNGVEGFNCYFPLQSYGFQPTNGVGYQPYRVVVLSFELLHAPATVCGPKKSTNLVKNKCVNFNFNGLTGTGVLTESNKKFLPFQQFGRDIADTTDAVRDPQTLEILDITPCSFGGVSVITPGTNTSNQVAVLYQGVNCTEVPVAIHADQLTPTWRVYSTGSNVFQTRAGCLIGAEHVNNSYECDIPIGAGICASYQTQTNSPRRARSVASQSIIAYTMSLGAENSVAYSNNSCAIPTNFTISVTTEILPVSMTKTSVDCTMYICGDSTECSNLLLQYGSFCTQLNRALTGIAVEQDKNTQEVFAQVKQIYKTPPIKDFGGFNFSQILPDPSKPSKRSFIEDLLFNKVTLADAGFIKQYGDCLGDIAARDLICVQKFNGLTVLPPLLTDEMIAQYTSALLAGTITSGWTFGAGAALQIPFAMQMAYRFNGIGVTQNVLYENQKLIANQFNSAIGKIQDSLSSTASALGKLQDVVNQNAQALNTLVKQLSSNFGAISSVLNDILSRLDKVEAEVQIDRLITGRLQSLQTYVTQQLIRAAEIRASANLAATKMSECVLGQSKRVDFCGKGYHLMSFPQSAPHGVVFLHVTYVPAQEKNFTCAPAICHDGKAHFPREGVFVSNGTHWFVTQRNFYEPQIITTDNTFVSGNCDVVIGIVNNTVYDPLQPELDSFKEELDKYFKNHTSPDVDLGDISGINASVVNIQKEIDRLNEVAKNLNESLIDLQELGKYEQYIKGGGGSDIDPYKEFGSSYQLLNFLPLDFFPDLNALVDTATALYEEELTGREHCSPHHTAIRQALVCWDELTKLIAWMSSNITSEQVRTIIVNHVNDTWGLKVRQSLWFHLSCLTFGQHTVQEFLVSFGVWIRTPAPYRPPNAPILSTLPEHTVIC

SEQ ID NO: 7004 - protein, 1365 aa, Artificial Sequence
  SARS-CoV-2/Finland/FIN03032020A/2020__EPI_ISL_413602 spike protein (1-1211)(I712C_T1077C) WhcAg construct
MFVFLVLLPLVSSQCVNLTTRTQLPPAYTNSFTRGVYYPDKVFRSSVLHSTQDLFLPFFSNVTWFHAIHVSGTNGTKRFDNPVLPFNDGVYFASTEKSNIIRGWIFGTTLDSKTQSLLIVNNATNVVIKVCEFQFCNDPFLGVYYHKNNKSWMESEFRVYSSANNCTFEYVSQPFLMDLEGKQGNFKNLREFVFKNIDGYFKIYSKHTPINLVRDLPQGFSALEPLVDLPIGINITRFQTLLALHRSYLTPGDSSSGWTAGAAAYYVGYLQPRTFLLKYNENGTITDAVDCALDPLSETKCTLKSFTVEKGIYQTSNFRVQPTESIVRFPNITNLCPFGEVFNATRFASVYAWNRKRISNCVADYSVLYNSASFSTFKCYGVSPTKLNDLCFTNVYADSFVIRGDEVRQIAPGQTGKIADYNYKLPDDFTGCVISWNSNNLDSKVGGNYNYLYRLFRKSNLKPFERDISTEIYQAGSTPCNGVEGFNCYFPLQSYGFQPTNGVGYQPYRVVVLSFELLHAPATVCGPKKSTNLVKNKCVNFNFNGLTGTGVLTESNKKFLPFQQFGRDIADTTDAVRDPQTLEILDITPCSFGGVSVITPGTNTSNQVAVLYQGVNCTEVPVAIHADQLTPTWRVYSTGSNVFQTRAGCLIGAEHVNNSYECDIPIGAGICASYQTQTNSPRRARSVASQSIIAYTMSLGAENSVAYSNNSCAIPTNFTISVTTEILPVSMTKTSVDCTMYICGDSTECSNLLLQYGSFCTQLNRALTGIAVEQDKNTQEVFAQVKQIYKTPPIKDFGGFNFSQILPDPSKPSKRSFIEDLLFNKVTLADAGFIKQYGDCLGDIAARDLICAQKFNGLTVLPPLLTDEMIAQYTSALLAGTITSGWTFGAGAALQIPFAMQMAYRFNGIGVTQNVLYENQKLIANQFNSAIGKIQDSLSSTASALGKLQDVVNQNAQALNTLVKQLSSNFGAISSVLNDILSRLDKVEAEVQIDRLITGRLQSLQTYVTQQLIRAAEIRASANLAATKMSECVLGQSKRVDFCGKGYHLMSFPQSAPHGVVFLHVTYVPAQEKNFTCAPAICHDGKAHFPREGVFVSNGTHWFVTQRNFYEPQIITTDNTFVSGNCDVVIGIVNNTVYDPLQPELDSFKEELDKYFKNHTSPDVDLGDISGINASVVNIQKEIDRLNEVAKNLNESLIDLQELGKYEQYIKGGGGSDIDPYKEFGSSYQLLNFLPLDFFPDLNALVDTATALYEEELTGREHCSPHHTAIRQALVCWDELTKLIAWMSSNITSEQVRTIIVNHVNDTWGLKVRQSLWFHLSCLTFGQHTVQEFLVSFGVWIRTPAPYRPPNAPILSTLPEHTVIC

SEQ ID NO: 7005 - protein, 1365 aa, Artificial Sequence
  SARS-CoV-2/France/GE1977/2020__EPI_ISL_414632 spike protein (1-1211)(I712C_T1077C) WhcAg construct
MFVFLVLLPLVSSQCVNLTTRTQLPPAYTNSFTRGVYYPDKVFRSSVLHSTQDLFLPFFSNVTWFHAIHVSGTNGTKRFDNPVLPFNDGVYFASTEKSNIIRGWIFGTTLDSKTQSLLIVNNATNVVIKVCEFQFCNDPFLGVYYHKNNKSWMESEFRVYSSANNCTFEYVSQPFLMDLEGKQGNFKNLREFVFKNIDGYFKIYSKHTPINLVRDLPQGFSALEPLVDLPIGINITRFQTLLALHRSYLTPGDSSSGWTAGAAAYYVGYLQPRTFLLKYNENGTITDAVDCALDPLSETKCTLKSFTVEKGIYQTSNFRVQPTESIVRFPNITNLCPFGEVFNATRFASVYAWNRKRISNCVADYSVLYNSASFSTFKCYGVSPTKLNDLCFTNVYADSFVIRGDEVRQIAPGQTGKIADYNYKLPDDFTGCVIAWNSNNLDSKVGGNYNYLYRLFRKSNLKPFERDISTEIYQAGSTPCNGVEGFNCYFPLQSYGFQPTNGVGYQPYRVVVLSFELLHAPATVCGPKKSTNLVKNKCVNFNFNGLTGTGVLTESNKKFLPFQQFGRDIADTTDAVRDPQTLEILDITPCSFGGVSVITPGTNTSNQVAVLYQGVNCTEVPVAIHADQLTPTWRVYSTGSNVFQTRAGCLIGAEHVNNSYECDIPIGAGICASYQTQTNSPRRARSVASQSIIAYTMSLGAENSVAYSNNSCAIPTNFTISVTTEILPVSMTKTSVDCTMYICGDSTECSNLLLQYGSFCTQLNRALTGIAVEQDKNTQEVFAQVKQIYKTPPIKDFGGFNFSQILPDPSKPSKRSFIEDLLFNKVTLADAGFIKQYGDCLGDIAARDLICAQKFNGLTVLPPLLTDEMIAQYTSALLAGTITSGWTFGAGAALQIPFAMQMAYRFNGIGVTQNVLYENQKLIANQFNSAIGKIQDSLFSTASALGKLQDVVNQNAQALNTLVKQLSSNFGAISSVLNDILSRLDKVEAEVQIDRLITGRLQSLQTYVTQQLIRAAEIRASANLAATKMSECVLGQSKRVDFCGKGYHLMSFPQSAPHGVVFLHVTYVPAQEKNFTCAPAICHDGKAHFPREGVFVSNGTHWFVTQRNFYEPQIITTDNTFVSGNCDVVIGIVNNTVYDPLQPELDSFKEELDKYFKNHTSPDVDLGDISGINASVVNIQKEIDRLNEVAKNLNESLIDLQELGKYEQYIKGGGGSDIDPYKEFGSSYQLLNFLPLDFFPDLNALVDTATALYEEELTGREHCSPHHTAIRQALVCWDELTKLIAWMSSNITSEQVRTIIVNHVNDTWGLKVRQSLWFHLSCLTFGQHTVQEFLVSFGVWIRTPAPYRPPNAPILSTLPEHTVIC

SEQ ID NO: 7006 - protein, 1365 aa, Artificial Sequence
  SARS-CoV-2/Finland/FIN-313/2020__EPI_ISL_414641 spike protein (1-1211)(I712C_T1077C) WhcAg construct
MFVFLVLLPLVSSQCVNLTTRTQLPPAYTNSFTRGVYYPDKVFRSSVLHSTQDLFLPFFSNVTWFHAIHVSGTNGTKRFDNPVLPFNDGVYFASTEKSNIIRGWIFGTTLDSKTQSLLIVNNATNVVIKVCEFQFCNDPFLGVYYHKNNKSWMESEFRVYSSANNCTFEYVSQPFLMDLEGKQGNFKNLREFVFKNIDGYFKIYSKHTPINLVRDLPQGFSALEPLVDLPIGINITRFKTLLALHRSYLTPGDSSSGWTAGAAAYYVGYLQPRTFLLKYNENGTITDAVDCALDPLSETKCTLKSFTVEKGIYQTSNFRVQPTESIVRFPNITNLCPFGEVFNATRFASVYAWNRKRISNCVADYSVLYNSASFSTFKCYGVSPTKLNDLCFTNVYADSFVIRGDEVRQIAPGQTGKIADYNYKLPDDFTGCVIAWNSNNLDSKVGGNYNYLYRLFRKSNLKPFERDISTEIYQAGSTPCNGVEGFNCYFPLQSYGFQPTNGVGYQPYRVVVLSFELLHAPATVCGPKKSTNLVKNKCVNFNFNGLTGTGVLTESNKKFLPFQQFGRDIADTTDAVRDPQTLEILDITPCSFGGVSVITPGTNTSNQVAVLYQGVNCTEVPVAIHADQLTPTWRVYSTGSNVFQTRAGCLIGAEHVNNSYECDIPIGAGICASYQTQTNSPRRARSVASQSIIAYTMSLGAENSVAYSNNSCAIPTNFTISVTTEILPVSMTKTSVDCTMYICGDSTECSNLLLQYGSFCTQLNRALTGIAVEQDKNTQEVFAQVKQIYKTPPIKDFGGFNFSQILPDPSKPSKRSFIEDLLFNKVTLADAGFIKQYGDCLGDIAARDLICAQKFNGLTVLPPLLTDEMIAQYTSALLAGTITSGWTFGAGAALQIPFAMQMAYRFNGIGVTQNVLYENQKLIANQFNSAIGKIQDSLSSTASALGKLQDVVNQNAQALNTLVKQLSSNFGAISSVLNDILSRLDKVEAEVQIDRLITGRLQSLQTYVTQQLIRAAEIRASANLAATKMSECVLGQSKRVDFCGKGYHLMSFPQSAPHGVVFLHVTYVPAQEKNFTCAPAICHDGKAHFPREGVFVSNGTHWFVTQRNFYEPQIITTDNTFVSGNCDVVIGIVNNTVYDPLQPELDSFKEELDKYFKNHTSPDVDLGDISGINASVVNIQKEIDRLNEVAKNLNESLIDLQELGKYEQYIKGGGGSDIDPYKEFGSSYQLLNFLPLDFFPDLNALVDTATALYEEELTGREHCSPHHTAIRQALVCWDELTKLIAWMSSNITSEQVRTIIVNHVNDTWGLKVRQSLWFHLSCLTFGQHTVQEFLVSFGVWIRTPAPYRPPNAPILSTLPEHTVIC

SEQ ID NO: 7007 - protein, 1365 aa, Artificial Sequence
  SARS-CoV-2/Netherlands/ZuidHolland_2/2020__EPI_ISL_414556 spike protein (1-1211)(I712C_T1077C) WhcAg construct
MFVFLVLLPLVSSQCVNLTTRTQLPPAYTNSFTRGVYYPDKVFRSSVLHSTQDLFLPFFSNVTWFHAIHVSGTNGTKRFDNPVLPFNDGVYFASTEKSNIIRGWIFGTTLDSKTQSLLIVNNATNVVIKVCEFQFCNDPFLGVYYHKNNKSWMESEFRVYSSANNCTFEYVSQPFLMDLEGKQGNFKNLREFVFKNIDGYFKIYSKHTPINLVRDLPQGFSALEPLVDLPIGINITRFQTLLALHRSYLTPGDSSSGWTAGAAAYYVGYLQPRTFLLKYNENGTITDAVDCALDPLSETKCTLKSFTVEKGIYQTSNFRVQPTESIVRFPNITNLCPFGEVFNATRFASVYAWNRKRISNCVADYSVLYNSASFSTFKCYGVSPTKLNDLCFTNVYADSFVIRGDEVRQIAPGQTGKIADYNYKLPDDFTGCVIAWNSNNLDSKVGGNYNYLYRLFRKSNLKPFERDISTEIYQAGSTPCNGVEGFNCYFPLQSYGFQPTNGVGYQPYRVVVLSFELLHAPATVCGPKKSTNLVKNKCVNFNFNGLTGTGVLTESNKKFLPFQQFGRDIADTTDAVRDPQTLEILDITPCSFGGVSVITPGTNTSNQVAVLYQGVNCTEVPVAIHADQLTPTWRVYSTGSNVFQTRAGCLIGAEHVNNSYECDIPIGAGICASYQTQTNSPRRARSVASQSIIAYTMSLGAENSVAYSNNSCAIPTNFTISVTTEILPVSMTKTSVDCTMYICGDSTECSNLLLQYGSFCTQLNRALTGIALEQDKNTQEVFAQVKQIYKTPPIKDFGGFNFSQILPDPSKPSKRSFIEDLLFNKVTLADAGFIKQYGDCLGDIAARDLICAQKFNGLTVLPPLLTDEMIAQYTSALLAGTITSGWTFGAGAALQIPFAMQMAYRFNGIGVTQNVLYENQKLIANQFNSAIGKIQDSLSSTASALGKLQDVVNQNAQALNTLVKQLSSNFGAISSVLNDILSRLDKVEAEVQIDRLITGRLQSLQTYVTQQLIRAAEIRASANLAATKMSECVLGQSKRVDFCGKGYHLMSFPQSAPHGVVFLHVTYVPAQEKNFTCAPAICHDGKAHFPREGVFVSNGTHWFVTQRNFYEPQIITTDNTFVSGNCDVVIGIVNNTVYDPLQPELDSFKEELDKYFKNHTSPDVDLGDISGINASVVNIQKEIDRLNEVAKNLNESLIDLQELGKYEQYIKGGGGSDIDPYKEFGSSYQLLNFLPLDFFPDLNALVDTATALYEEELTGREHCSPHHTAIRQALVCWDELTKLIAWMSSNITSEQVRTIIVNHVNDTWGLKVRQSLWFHLSCLTFGQHTVQEFLVSFGVWIRTPAPYRPPNAPILSTLPEHTVIC

SEQ ID NO: 7008 - protein, 1365 aa, Artificial Sequence
  SARS-CoV-2/USA/WA-UW31/2020__EPI_ISL_414618 spike protein (1-1211)(I712C_T1077C) WhcAg construct
MFVFLVLLPLVSSQCVNLTTRTQLPPAYTNSFTRGVYYPDKVFRSSVLHSTQDLFLPFFSNVTWFHAIHVSGTNGTKRFDNPVLPFNDGVYFASTEKSNIIRGWIFGTTLDSKTQSLLIVNNATNVVIKVCEFQFCNDPFLGVYYHKNNKSWMESEFRVYSSANNCTFEYVSQPFLMDLEGKQGNFKNLREFVFKNIDGYFKIYSKHTPINLVRDLPQGFSALEPLVDLPIGINITRFQTLLALHRSYLTPGDSSSGWTAGAAAYYVGYLQPRTFLLKYNENGTITDAVDCALDPLSETKCTLKSFTVEKGIYQTSNFRVQPTESIVRFPNITNLCPFGEVFNATRFASVYAWNRKRISNCVADYSVLYNSASFSTFKCYGVSPTKLNDLCFTNVYADSFVIRGDEVRQIAPGQTGKIADYNYKLPDDFTGCVIAWNSNNLDSKVGGNYNYLYRLFRKSNLKPFERDISTEIYQAGSTPCNGAEGFNCYFPLQSYGFQPTNGVGYQPYRVVVLSFELLHAPATVCGPKKSTNLVKNKCVNFNFNGLTGTGVLTESNKKFLPFQQFGRDIADTTDAVRDPQTLEILDITPCSFGGVSVITPGTNTSNQVAVLYQDVNCTEVPVAIHADQLTPTWRVYSTGSNVFQTRAGCLIGAEHVNNSYECDIPIGAGICASYQTQTNSPRRARSVASQSIIAYTMSLGAENSVAYSNNSCAIPTNFTISVTTEILPVSMTKTSVDCTMYICGDSTECSNLLLQYGSFCTQLNRALTGIAVEQDKNTQEVFAQVKQIYKTPPIKDFGGFNFSQILPDPSKPSKRSFIEDLLFNKVTLADAGFIKQYGDCLGDIAARDLICAQKFNGLTVLPPLLTDEMIAQYTSALLAGTITSGWTFGAGAALQIPFAMQMAYRFNGIGVTQNVLYENQKLIANQFNSAIGKIQDSLSSTASALGKLQDVVNQNAQALNTLVKQLSSNFGAISSVLNDILSRLDKVEAEVQIDRLITGRLQSLQTYVTQQLIRAAEIRASANLAATKMSECVLGQSKRVDFCGKGYHLMSFPQSAPHGVVFLHVTYVPAQEKNFTCAPAICHDGKAHFPREGVFVSNGTHWFVTQRNFYEPQIITTDNTFVSGNCDVVIGIVNNTVYDPLQPELDSFKEELDKYFKNHTSPDVDLGDISGINASVVNIQKEIDRLNEVAKNLNESLIDLQELGKYEQYIKGGGGSDIDPYKEFGSSYQLLNFLPLDFFPDLNALVDTATALYEEELTGREHCSPHHTAIRQALVCWDELTKLIAWMSSNITSEQVRTIIVNHVNDTWGLKVRQSLWFHLSCLTFGQHTVQEFLVSFGVWIRTPAPYRPPNAPILSTLPEHTVIC

SEQ ID NO: 7009 - protein, 1365 aa, Artificial Sequence
  SARS-CoV-2/South Korea/SNU01/2020__EPI_ISL_411929 spike protein (1-1211)(I712C_T1077C) WhcAg construct
MFVFLVLLPLVSSQCVNLTTRTQLPPAYTNSFTRGVYYPDKVFRSSVLHSTQDLFLPFFSNVTWFHAIHVSGTNGTKRFDNPVLPFNDGVYFASTEKSNIIRGWIFGTTLDSKTQSLLIVNNATNVVIKVCEFQFCNDPFLGVYYHKNNKSWMESEFRVYSSANNCTFEYVSQPFLMDLEGKQGNFKNLREFVFKNIDGYFKIYSKHTPINLVRDLPQGFWALEPLVDLPIGINITRFQTLLALHRSYLTPGDSSSGWTAGAAAYYVGYLQPRTFLLKYNENGTITDAVDCALDPLSETKCTLKSFTVEKGIYQTSNFRVQPTESIVRFPNITNLCPFGEVFNATRFASVYAWNRKRISNCVADYSVLYNSASFSTFKCYGVSPTKLNDLCFTNVYADSFVIRGDEVRQIAPGQTGKIADYNYKLPDDFTGCVIAWNSNNLDSKVGGNYNYLYRLFRKSNLKPFERDISTEIYQAGSTPCNGVEGFNCYFPLQSYGFQPTNGVGYQPYRVVVLSFELLHAPATVCGPKKSTNLVKNKCVNFNFNGLTGTGVLTESNKKFLPFQQFGRDIADTTDAVRDPQTLEILDITPCSFGGVSVITPGTNTSNQVAVLYQDVNCTEVPVAIHADQLTPTWRVYSTGSNVFQTRAGCLIGAEHVNNSYECDIPIGAGICASYQTQTNSPRRARSVASQSIIAYTMSLGAENSVAYSNNSCAIPTNFTISVTTEILPVSMTKTSVDCTMYICGDSTECSNLLLQYGSFCTQLNRALTGIAVEQDKNTQEVFAQVKQIYKTPPIKDFGGFNFSQILPDPSKPSKRSFIEDLLFNKVTLADAGFIKQYGDCLGDIAARDLICAQKFNGLTVLPPLLTDEMIAQYTSALLAGTITSGWTFGAGAALQIPFAMQMAYRFNGIGVTQNVLYENQKLIANQFNSAIGKIQDSLSSTASALGKLQDVVNQNAQALNTLVKQLSSNFGAISSVLNDILSRLDKVEAEVQIDRLITGRLQSLQTYVTQQLIRAAEIRASANLAATKMSECVLGQSKRVDFCGKGYHLMSFPQSAPHGVVFLHVTYVPAQEKNFTCAPAICHDGKAHFPREGVFVSNGTHWFVTQRNFYEPQIITTDNTFVSGNCDVVIGIVNNTVYDPLQPELDSFKEELDKYFKNHTSPDVDLGDISGINASVVNIQKEIDRLNEVAKNLNESLIDLQELGKYEQYIKGGGGSDIDPYKEFGSSYQLLNFLPLDFFPDLNALVDTATALYEEELTGREHCSPHHTAIRQALVCWDELTKLIAWMSSNITSEQVRTIIVNHVNDTWGLKVRQSLWFHLSCLTFGQHTVQEFLVSFGVWIRTPAPYRPPNAPILSTLPEHTVIC

SEQ ID NO: 7010 - protein, 1365 aa, Artificial Sequence
  SARS-CoV-2/China/WF0004/2020__EPI_ISL_413694 spike protein (1-1211)(I712C_T1077C) WhcAg construct
MFVFLVLLPLVSSQCVNLTTRTQLPPAYTNSFTRGVYYPDKVFRSSVLHSTQDLFLPFFSNVTWFHAIHVSGTNGTKRFDNPVLPFNDGVYFASTEKSNIIRGWIFGTTLDSKTQSLLIVNNATNVVIKVCEFQFCNDPFLGVYYHKNNKSWTESEFRVYSSANNCTFEYVSQPFLMDLEGKQGNFKNLREFVFKNIDGYFKIYSKHTPINLVRDLPQGFSALEPLVDLPIGINITRFQTLLALHRSYLTPGDSSSGWTAGAAAYYVGYLQPRTFLLKYNENGTITDAVDCALDPLSETKCTLKSFTVEKGIYQTSNFRVQPTESIVRFPNITNLCPFGEVFNATRFASVYAWNRKRISNCVADYSVLYNSASFSTFKCYGVSPTKLNDLCFTNVYADSFVIRGDEVRQIAPGQTGKIADYNYKLPDDFTGCVIAWNSNNLDSKVGGNYNYLYRLFRKSNLKPFERDISTEIYQAGSTPCNGVEGFNCYFPLQSYGFQPTNGVGYQPYRVVVLSFELLHAPATVCGPKKSTNLVKNKCVNFNFNGLTGTGVLTESNKKFLPFQQFGRDIADTTDAVRDPQTLEILDITPCSFGGVSVITPGTNTSNQVAVLYQDVNCTEVPVAIHADQLTPTWRVYSTGSNVFQTRAGCLIGAEHVNNSYECDIPIGAGICASYQTQTNSPRRARSVASQSIIAYTMSLGAENSVAYSNNSCAIPTNFTISVTTEILPVSMTKTSVDCTMYICGDSTECSNLLLQYGSFCTQLNRALTGIAVEQDKNTQEVFAQVKQIYKTPPIKDFGGFNFSQILPDPSKPSKRSFIEDLLFNKVTLADAGFIKQYGDCLGDIAARDLICAQKFNGLTVLPPLLTDEMIAQYTSALLAGTITSGWTFGAGAALQIPFAMQMAYRFNGIGVTQNVLYENQKLIANQFNSAIGKIQDSLSSTASALGKLQDVVNQNAQALNTLVKQLSSNFGAISSVLNDILSRLDKVEAEVQIDRLITGRLQSLQTYVTQQLIRAAEIRASANLAATKMSECVLGQSKRFDFCGKGYHLMSFPQSAPHGVVFLHVTYVPAQEKNFTCAPAICHDGKAHFPREGVFVSNGTHWFVTQRNFYEPQIITTDNTFVSGNCDVVIGIVNNTVYDPLQPELDSFKEELDKYFKNHTSPDVDLGDISGINASVVNIQKEIDRLNEVAKNLNESLIDLQELGKYEQYIKGGGGSDIDPYKEFGSSYQLLNFLPLDFFPDLNALVDTATALYEEELTGREHCSPHHTAIRQALVCWDELTKLIAWMSSNITSEQVRTIIVNHVNDTWGLKVRQSLWFHLSCLTFGQHTVQEFLVSFGVWIRTPAPYRPPNAPILSTLPEHTVIC

SEQ ID NO: 7011 - protein, 1365 aa, Artificial Sequence
  SARS-CoV-2/China/WF0028/2020__EPI_ISL_413791 spike protein (1-1211)(I712C_T1077C) WhcAg construct
MFVFLVLLPLVSSQCVNLTTRTQLPPAYTNSFTRGVYYPDKVFRSSVLHSTQDLFLPFFSNVTWFHAIHVSGTNGTKRFDNPVLPFNDGVYFASTEKSNIIRGWIFGTTLDSKTQSLLIVNNATNVVIKVCEFQFCNDPFLGVYYHKNNKSWMESEFRVYSSANNCTFEYVSQPFLMDLEGKQGNFKNLREFVFKNIDGYFKIYSKHTPINLVRDLPQGFSALEPLVDLPIGINITRFQTLLALHRSYLTPGDSSSGWTAGAAAYYVGYLQPRTFLLKYNENGTITDAVDCALDPLSETKCTLKSFTVEKGIYQTSNFRVQPTESIVRFPNITNLCPFGEVFNATRFASVYAWNRKRISNCVADYSVLYNSASFSTFKCYGVSPTKLNDLCFTNVYADSFVIRGDEVRQIAPGQTGKIADYNYKLPDDFTGCVIAWNSNNLDSKVGGNYNYLYRLFRKSNLKPFERDISTEIYQAGSTPCNGVEGFNCYFPLQSYGFQPTNGVGYQPYRVVVLSFELLHAPATVCGPKKSTNLVKNKCVNFNFNGLTGTGVLTESNKKFLPFQQFGRDIADTTDAVRDPQTLEILDITPCSFGGVSVITPGTNTSNQVAVLYQDVNCTEVPVAIHADQLTPTWRVYSTGSNVFQTRAGCLIGAEHVNNSYECDIPIGAGICASYQTQTNSPRRARSVASQSIIAYTMSLGAENSVAYSNNSCAIPTNFTISVTTEILPVSMTKTSVDCTMYICGDSTECSNLLLQYGSFCTQLNRALTGIAVEQDKNTQEVFAQVKQIYKTPPIKDFGGFNFSQILPDPSKPSKRSFIEDLLFNKVTLADAGFIKQYGDCLGDIAARDLICAQKFNGLTVLPPLLTDEMIAQYTSALLAGTITSGWTFGAGAALQIPFAMQMAYRFNGIGVTQNVLYENQKLIANQFNSAIGKIQDSLSSTASALGKLQDVVNQNAQALNTLVKQLSSNFGAISSVLNDILSRLDKVEAEVQIDRLITGRLQSLQTYVTQQLIRAAEIRASANLAATKMSECVLGQSKRVDFCGKGYHLMSFPQSAPHGVVFLHVTYVPAQEKNFTCAPAICHDGKAHFPREGVFVSNGTHWFVTQRNFYEPQIITTDNTFVSGNCDVVIGIVNNTVYDPLQPELESFKEELDKYFKNHTSPDVDLGDISGINASVVNIQKEIDRLNEVAKNLNESLIDLQELGKYEQYIKGGGGSDIDPYKEFGSSYQLLNFLPLDFFPDLNALVDTATALYEEELTGREHCSPHHTAIRQALVCWDELTKLIAWMSSNITSEQVRTIIVNHVNDTWGLKVRQSLWFHLSCLTFGQHTVQEFLVSFGVWIRTPAPYRPPNAPILSTLPEHTVIC

SEQ ID NO: 7012 - protein, 1365 aa, Artificial Sequence
  SARS-CoV-2/2019-nCoV/USA-CruiseA-18/2020__MT159716.1 spike protein (1-1211)(I712C_T1077C) WhcAg construct
MFVFLVLLPLVSSQCVNLTTRTQLPPAYTNSFTRGVYYPDKVFRSSVLHSTQDLFLPFFSNVTWFHAIHVSGTNGTKRFDNPVLPFNDGVYFASTEKSNIIRGWIFGTTLDSKTQSLLIVNNATNVVIKVCEFQFCNDPFLGVYYHKNNKSWMESELRVYSSANNCTFEYVSQPFLMDLEGKQGNFKNLREFVFKNIDGYFKIYSKHTPINLVRDLPQGFSALEPLVDLPIGINITRFQTLLALHRSYLTPGDSSSGWTAGAAAYYVGYLQPRTFLLKYNENGTITDAVDCALDPLSETKCTLKSFTVEKGIYQTSNFRVQPTESIVRFPNITNLCPFGEVFNATRFASVYAWNRKRISNCVADYSVLYNSASFSTFKCYGVSPTKLNDLCFTNVYADSFVIRGDEVRQIAPGQTGKIADYNYKLPDDFTGCVIAWNSNNLDSKVGGNYNYLYRLFRKSNLKPFERDISTEIYQAGSTPCNGVEGFNCYFPLQSYGFQPTNGVGYQPYRVVVLSFELLHAPATVCGPKKSTNLVKNKCVNFNFNGLTGTGVLTESNKKFLPFQQFGRDIADTTDAVRDPQTLEILDITPCSFGGVSVITPGTNTSNQVAVLYQDVNCTEVPVAIHADQLTPTWRVYSTGSNVFQTRAGCLIGAEHVNNSYECDIPIGAGICASYQTQTNSPRRARSVASQSIIAYTMSLGAENSVAYSNNSCAIPTNFTISVTTEILPVSMTKTSVDCTMYICGDSTECSNLLLQYGSFCTQLNRALTGIAVEQDKNTQEVFAQVKQIYKTPPIKDFGGFNFSQILPDPSKPSKRSFIEDLLFNKVTLADAGFIKQYGDCLGDIAARDLICAQKFNGLTVLPPLLTDEMIAQYTSALLAGTITSGWTFGAGAALQIPFAMQMAYRFNGIGVTQNVLYENQKLIANQFNSAIGKIQDSLSSTASALGKLQDVVNQNAQALNTLVKQLSSNFGAISSVLNDILSRLDKVEAEVQIDRLITGRLQSLQTYVTQQLIRAAEIRASANLAATKMSECVLGQSKRVDFCGKGYHLMSFPQSAPHGVVFLHVTYVPAQEKNFTCAPAICHDGKAHFPREGVFVSNGTHWFVTQRNFYEPQIITTDNTFVSGNCDVVIGIVNNTVYDPLQPELDSFKEELDKYFKNHTSPDVDLGDISGINASVVNIQKEIDRLNEVAKNLNESLIDLQELGKYEQYIKGGGGSDIDPYKEFGSSYQLLNFLPLDFFPDLNALVDTATALYEEELTGREHCSPHHTAIRQALVCWDELTKLIAWMSSNITSEQVRTIIVNHVNDTWGLKVRQSLWFHLSCLTFGQHTVQEFLVSFGVWIRTPAPYRPPNAPILSTLPEHTVIC

SEQ ID NO: 7013 - protein, 1365 aa, Artificial Sequence
  SARS-CoV-2/SARS-CoV-2/Yunnan-01/human/2020/CHN__MT049951.1 spike protein (1-1211)(I712C_T1077C) WhcAg construct
MFVFLVLLPLVSSQCVNLTTRTQLPPANTNSFTRGVYYPDKVFRSSVLHSTQDLFLPFFSNVTWFHAIHVSGTNGTKRFDNPVLPFNDGVYFASTEKSNIIRGWIFGTTLDSKTQSLLIVNNATNVVIKVCEFQFCNDPFLGVYYHKNNKSWMESEFRVYSSANNCTFEYVSQPFLMDLEGKQGNFKNLREFVFKNIDGYFKIYSKHTPINLVRDLPQGFSALEPLVDLPIGINITRFQTLLALHRSYLTPGDSSSGWTAGAAAYYVGYLQPRTFLLKYNENGTITDAVDCALDPLSETKCTLKSFTVEKGIYQTSNFRVQPTESIVRFPNITNLCPFGEVFNATRFASVYAWNRKRISNCVADYSVLYNSASFSTFKCYGVSPTKLNDLCFTNVYADSFVIRGDEVRQIAPGQTGKIADYNYKLPDDFTGCVIAWNSNNLDSKVGGNYNYLYRLFRKSNLKPFERDISTEIYQAGSTPCNGVEGFNCYFPLQSYGFQPTNGVGYQPYRVVVLSFELLHAPATVCGPKKSTNLVKNKCVNFNFNGLTGTGVLTESNKKFLPFQQFGRDIADTTDAVRDPQTLEILDITPCSFGGVSVITPGTNTSNQVAVLYQDVNCTEVPVAIHADQLTPTWRVYSTGSNVFQTRAGCLIGAEHVNNSYECDIPIGAGICASYQTQTNSPRRARSVASQSIIAYTMSLGAENSVAYSNNSCAIPTNFTISVTTEILPVSMTKTSVDCTMYICGDSTECSNLLLQYGSFCTQLNRALTGIAVEQDKNTQEVFAQVKQIYKTPPIKDFGGFNFSQILPDPSKPSKRSFIEDLLFNKVTLADAGFIKQYGDCLGDIAARDLICAQKFNGLTVLPPLLTDEMIAQYTSALLAGTITSGWTFGAGAALQIPFAMQMAYRFNGIGVTQNVLYENQKLIANQFNSAIGKIQDSLSSTASALGKLQDVVNQNAQALNTLVKQLSSNFGAISSVLNDILSRLDKVEAEVQIDRLITGRLQSLQTYVTQQLIRAAEIRASANLAATKMSECVLGQSKRVDFCGKGYHLMSFPQSAPHGVVFLHVTYVPAQEKNFTCAPAICHDGKAHFPREGVFVSNGTHWFVTQRNFYEPQIITTDNTFVSGNCDVVIGIVNNTVYDPLQPELDSFKEELDKYFKNHTSPDVDLGDISGINASVVNIQKEIDRLNEVAKNLNESLIDLQELGKYEQYIKGGGGSDIDPYKEFGSSYQLLNFLPLDFFPDLNALVDTATALYEEELTGREHCSPHHTAIRQALVCWDELTKLIAWMSSNITSEQVRTIIVNHVNDTWGLKVRQSLWFHLSCLTFGQHTVQEFLVSFGVWIRTPAPYRPPNAPILSTLPEHTVIC

SEQ ID NO: 7014 - protein, 1365 aa, Artificial Sequence
  SARS-CoV-2/USA/WA-UW292/2020__EPI_ISL_418077 spike protein (1-1211)(I712C_T1077C) WhcAg construct
MFVFLVLLPLVSSQCVNLTTRTQLPPAYTNSFTRGVYYPDKVFRSSVLHSTQDLFLPFFSNVTWFHAIHVSGTNGTKRFDNPVLPFNDGVYFASTEKSNIIRGWIFGTTLDSKTQSLLIVNNATNVVIKVCEFQFCNDPFLGVYYHKNNKSWMESEFRVYSSANNCTFEYVSQPFLMDLEGKQGNFKNLREFVFKNIDGYFKIYSKHTPINLVRDLPQGFSALEPLVDLPIGINITRFQTLLALHRSYLTPGDSSSGWTAGAAAYYVGYLQPRTFLLKYNENGTITDAVDCALDPLSETKCTLKSFTVEKGIYQTSNFRVQPTESIVRFPNITNLCPFGEVFNATRFASVYAWNRKRISNCVADYSVLYNSASFSTFKCYGVSPTKLNDLCFTNVYADSFVIRGDEVRQIAPGQTGKIADYNYKLPDDFTGCVIAWNSNNLDSKVGGNYNYLYRLFRKSNLKPFERDISTEIYQASSTPCNGVEGFNCYFPLQSYGFQPTNGVGYQPYRVVVLSFELLHAPATVCGPKKSTNLVKNKCVNFNFNGLTGTGVLTESNKKFLPFQQFGRDIADTTDAVRDPQTLEILDITPCSFGGVSVITPGTNTSNQVAVLYQDVNCTEVPVAIHADQLTPTWRVYSTGSNVFQTRAGCLIGAEHVNNSYECDIPIGAGICASYQTQTNSPRRARSVASQSIIAYTMSLGAENSVAYSNNSCAIPTNFTISVTTEILPVSMTKTSVDCTMYICGDSTECSNLLLQYGSFCTQLNRALTGIAVEQDKNTQEVFAQVKQIYKTPPIKDFGGFNFSQILPDPSKPSKRSFIEDLLFNKVTLADAGFIKQYGDCLGDIAARDLICAQKFNGLTVLPPLLTDEMIAQYTSALLAGTITSGWTFGAGAALQIPFAMQMAYRFNGIGVTQNVLYENQKLIANQFNSAIGKIQDSLSSTASALGKLQDVVNQNAQALNTLVKQLSSNFGAISSVLNDILSRLDKVEAEVQIDRLITGRLQSLQTYVTQQLIRAAEIRASANLAATKMSECVLGQSKRVDFCGKGYHLMSFPQSAPHGVVFLHVTYVPAQEKNFTCAPAICHDGKAHFPREGVFVSNGTHWFVTQRNFYEPQIITTDNTFVSGNCDVVIGIVNNTVYDPLQPELDSFKEELDKYFKNHTSPDVDLGDISGINASVVNIQKEIDRLNEVAKNLNESLIDLQELGKYEQYIKGGGGSDIDPYKEFGSSYQLLNFLPLDFFPDLNALVDTATALYEEELTGREHCSPHHTAIRQALVCWDELTKLIAWMSSNITSEQVRTIIVNHVNDTWGLKVRQSLWFHLSCLTFGQHTVQEFLVSFGVWIRTPAPYRPPNAPILSTLPEHTVIC

SEQ ID NO: 7015 - protein, 1365 aa, Artificial Sequence
  SARS-CoV-2/Iceland/192/2020__EPI_ISL_417819 spike protein (1-1211)(I712C_T1077C) WhcAg construct
MFVFFVLLPLVSSQCVNLTTRTQLPPAYTNSFTRGVYYPDKVFRSSVLHSTQDLFLPFFSNVTWFHAIHVSGTNGTKRFDNPVLPFNDGVYFASTEKSNIIRGWIFGTTLDSKTQSLLIVNNATNVVIKVCEFQFCNDPFLGVYYHKNNKSWMESEFRVYSSANNCTFEYVSQPFLMDLEGKQGNFKNLREFVFKNIDGYFKIYSKHTPINLVRDLPQGFSALEPLVDLPIGINITRFQTLLALHRSYLTPGDSSSGWTAGAAAYYVGYLQPRTFLLKYNENGTITDAVDCALDPLSETKCTLKSFTVEKGIYQTSNFRVQPTESIVRFPNITNLCPFGEVFNATRFASVYAWNRKRISNCVADYSVLYNSASFSTFKCYGVSPTKLNDLCFTNVYADSFVIRGDEVRQIAPGQTGKIADYNYKLPDDFTGCVIAWNSNNLDSKVGGNYNYLYRLFRKSNLKPFERDISTEIYQAGSTPCNGVEGFNCYFPLQSYGFQPTNGVGYQPYRVVVLSFELLHAPATVCGPKKSTNLVKNKCVNFNFNGLTGTGVLTESNKKFLPFQQFGRDIADTTDAVRDPQTLEILDITPCSFGGVSVITPGTNTSNQVAVLYQGVNCTEVPVAIHADQLTPTWRVYSTGSNVFQTRAGCLIGAEHVNNSYECDIPIGAGICASYQTQTNSPRRARSVASQSIIAYTMSLGAENSVAYSNNSCAIPTNFTISVTTEILPVSMTKTSVDCTMYICGDSTECSNLLLQYGSFCTQLNRALTGIAVEQDKNTQEVFAQVKQIYKTPPIKDFGGFNFSQILPDPSKPSKRSFIEDLLFNKVTLADAGFIKQYGDCLGDIAARDLICAQKFNGLTVLPPLLTDEMIAQYTSALLAGTITSGWTFGAGAALQIPFAMQMAYRFNGIGVTQNVLYENQKLIANQFNSAIGKIQDSLSSTASALGKLQDVVNQNAQALNTLVKQLSSNFGAISSVLNDILSRLDKVEAEVQIDRLITGRLQSLQTYVTQQLIRAAEIRASANLAATKMSECVLGQSKRVDFCGKGYHLMSFPQSAPHGVVFLHVTYVPAQEKNFTCAPAICHDGKAHFPREGVFVSNGTHWFVTQRNFYEPQIITTDNTFVSGNCDVVIGIVNNTVYDPLQPELDSFKEELDKYFKNHTSPDVDLGDISGINASVVNIQKEIDRLNEVAKNLNESLIDLQELGKYEQYIKGGGGSDIDPYKEFGSSYQLLNFLPLDFFPDLNALVDTATALYEEELTGREHCSPHHTAIRQALVCWDELTKLIAWMSSNITSEQVRTIIVNHVNDTWGLKVRQSLWFHLSCLTFGQHTVQEFLVSFGVWIRTPAPYRPPNAPILSTLPEHTVIC

SEQ ID NO: 7016 - protein, 1365 aa, Artificial Sequence
  SARS-CoV-2/Belgium/ULG-6939/2020__EPI_ISL_417020 spike protein (1-1211)(I712C_T1077C) WhcAg construct
MFVFLVLLPLVSSQCVNLTTRTQLPPAYTNSFTRGVYYPDKVFRSSVLHSTQDLFLPFFSNVTWFHAIHVSGTNGTKRFDNPVLPFNDGVYFASTEKSNIIRGWIFGTTLDSKTQSLLIVNNATNVVIKVCEFQFCNDPFLGVYYHKNNKSWMESEFRVYSSANNCTFEYVSQPFLMDLEGKQGNFKNLREFVFKNIDGYFKIYSKHTPINLVRDLPQGFSALEPLVDLPIGINITRFQTLLALHRSYLTPGDSSSGWTAGAAAYYVGYLQPRTFLLKYNENGTITDAVDCALDPLSETKCTLKSFTVEKGIYQTSNFRVQPTESIVRFPNITNLCPFGEVFNATRFASVYAWNRKRISNCVADYSVLYNSASFSTFKCYGVSPTKLNDLCFTNVYADSFVIRGDEVRQIAPGQTGKIADYNYKLPDDFTGCVIAWNSNNLDSKVGGNYNYLYRLFRKSNLKPFERDISTEIYQAGSTPCNGVEGFNCYFPLQSYGFQPTNGVGYQPYRVVVLSFELLHAPATVCGPKKSTNLVKNKCVNFNFNGLTGTGVLTESNKKFLPFQQFGRDIADTTDAVRDPQTLEILDITPCSFGGVSVITPGTNTSNQVAVLYQGVNCTEVPVAIHADQLTPTWRVYSTGSNVFQTRAGCLIGAEHVNNSYECDIPIGAGICASYQTQTNSPRRARSVASQSIIAYTMSLGAENSVVYSNNSCAIPTNFTISVTTEILPVSMTKTSVDCTMYICGDSTECSNLLLQYGSFCTQLNRALTGIAVEQDKNTQEVFAQVKQIYKTPPIKDFGGFNFSQILPDPSKPSKRSFIEDLLFNKVTLADAGFIKQYGDCLGDIAARDLICAQKFNGLTVLPPLLTDEMIAQYTSALLAGTITSGWTFGAGAALQIPFAMQMAYRFNGIGVTQNVLYENQKLIANQFNSAIGKIQDSLSSTASALGKLQDVVNQNAQALNTLVKQLSSNFGAISSVLNDILSRLDKVEAEVQIDRLITGRLQSLQTYVTQQLIRAAEIRASANLAATKMSECVLGQSKRVDFCGKGYHLMSFPQSAPHGVVFLHVTYVPAQEKNFTCAPAICHDGKAHFPREGVFVSNGTHWFVTQRNFYEPQIITTDNTFVSGNCDVVIGIVNNTVYDPLQPELDSFKEELDKYFKNHTSPDVDLGDISGINASVVNIQKEIDRLNEVAKNLNESLIDLQELGKYEQYIKGGGGSDIDPYKEFGSSYQLLNFLPLDFFPDLNALVDTATALYEEELTGREHCSPHHTAIRQALVCWDELTKLIAWMSSNITSEQVRTIIVNHVNDTWGLKVRQSLWFHLSCLTFGQHTVQEFLVSFGVWIRTPAPYRPPNAPILSTLPEHTVIC

SEQ ID NO: 7017 - protein, 1365 aa, Artificial Sequence
  SARS-CoV-2/France/HF2496/2020__EPI_ISL_418231 spike protein (1-1211)(I712C_T1077C) WhcAg construct
MFVFLVLLPLVSSQCVNLTTRTQLPPAYTNSFTRGVYYPDKVFRSSVLHSTQDLFLPFFSNVTWFHAIHVSGTNGTKRFDNPVLPFNDGVYFASTEKSNIIRGWIFGTTLDSKTQSLLIVNNATNVVIKVCEFQFCNDPFLGVYYHKNNKSWMESEFRVYSSANNCTFEYVSQPFLMDLEGKQGNFKNLREFVFKNIDGYFKIYSKHTPINLVRDLPQGFSALEPLVDLPIGINITRFQTLLALHRSYLTPGDSSSGWTAGAAAYYVGYLQPRTFLLKYNENGTITDAVDCALDPLSETKCTLKSFTVEKGIYQTSNFRVQPTESIVRFPNITNLCPFGEVFNATRFASVYAWNRKRISNCVADYSVLYNSASFSTFKCYGVSPTKLNDLCFTNVYADSFVIRGDEVRQIAPGQTGKIADYNYKLPDDFTGCVIAWNSNNLDSKVGGNYNYLYRLFRKSNLKPFERDISTEIYQAGSTPCNGVEGFNCYFPLQSYGFQPTNGVGYQPYRVVVLSFELLHAPATVCGPKKSTNLVKNKCVNFNFNGLTGTGVLTESNKKFLPFQQFGRDIADTTDAVRDPQTLEILDITPCSFGGVSVITPGTNTSNQVAVLYQGVNCTEVPVAIHADQLTPTWRVYSTGSNVFQTRAGCLIGAEHVNNSYECDIPIGAGICASYQTQTNSPRRARSVASQSIIAYTMSLGAENSVAYSNNSCAIPTNFTISVTTEILPVSMTKTSVDCTMYICGDSTECSNLLLQYGSFCTQLNRALTGIAVEQDKNTQEVFAQVKQIYKTPPIKDFGGFNFSQILPDPSKPSKRSFIEDLLFNKVTLADAGFIKQYGDCLGDIVARDLICAQKFNGLTVLPPLLTDEMIAQYTSALLAGTITSGWTFGAGAALQIPFAMQMAYRFNGIGVTQNVLYENQKLIANQFNSAIGKIQDSLSSTASALGKLQDVVNQNAQALNTLVKQLSSNFGAISSVLNDILSRLDKVEAEVQIDRLITGRLQSLQTYVTQQLIRAAEIRASANLAATKMSECVLGQSKRVDFCGKGYHLMSFPQSAPHGVVFLHVTYVPAQEKNFTCAPAICHDGKAHFPREGVFVSNGTHWFVTQRNFYEPQIITTDNTFVSGNCDVVIGIVNNTVYDPLQPELDSFKEELDKYFKNHTSPDVDLGDISGINASVVNIQKEIDRLNEVAKNLNESLIDLQELGKYEQYIKGGGGSDIDPYKEFGSSYQLLNFLPLDFFPDLNALVDTATALYEEELTGREHCSPHHTAIRQALVCWDELTKLIAWMSSNITSEQVRTIIVNHVNDTWGLKVRQSLWFHLSCLTFGQHTVQEFLVSFGVWIRTPAPYRPPNAPILSTLPEHTVIC

SEQ ID NO: 7018 - protein, 1365 aa, Artificial Sequence
  SARS-CoV-2/USA/WA-UW291/2020__EPI_ISL_418076 spike protein (1-1211)(I712C_T1077C) WhcAg construct
MFVFLVLLPLVSSQCVNLTTRTQLPPAYTNSFTRGVYYPDKVFRSSVLHSTQDLFLPFFSNVTWFHAIHVSGTNGTKRFDNPVLPFNDGVYFASTEKSNIIRGWIFGTTLDSKTQSLLIVNNATNVVIKVCEFQFCNDPFLGVYYHKNNKSWMESEFRVYSSANNCTFEYVSQPFLMDLEGKQGNFKNLREFVFKNIDGYFKIYSKHTPINLVRDLPQGFSALEPLVDLPIGINITRFQTLLALHRSYLTPGDSSSGWTAGAAAYYVGYLQPRTFLLKYNENGTITDAVDCALDPLSETKCTLKSFTVEKGIYQTSNFRVQPTESIVRFPNITNLCPFGEVFNATRFASVYAWNRKRISNCVADYSVLYNSASFSTFKCYGVSPTKLNDLCFTNVYADSFVIRGDEVRQIAPGQTGKIADYNYKLPDDFTGCVIAWNSNNLDSKVGGNYNYLYRLFRKSNLKPFERDISTEIYQAGSTPCNGVEGFNCYFPLQSYGFQPTNGVGYQPYRVVVLSFELLHAPATVCGPKKSTNLVKNKCVNFNFNGLTGTGVLTESNKKFLPFQQFGRDIADTTDAVRDPQTLEILDITPCSFGGVSVITPGTNTSNQVAVLYQGVNCTEVPVAIHADQLTPTWRVYSTGSNVFQTRAGCLIGAEHVNNSYECDIPIGAGICASYQTQTNSPRRARSVASQSIIAYTMSLGAENSVAYSNNSCAIPTNFTISVTTEILPVSMTKTSVDCTMYICGDSTECSNLLLQYGSFCTQLNRALTGIAVEQDKNTQEVFAQVKQIYKTPPIKDFGGFNFSQILPDPSKPSKRSFIEDLLFNKVTLADAGFIKQYGDCLGDIAARDLICAQKFNGLTVLPPLLTDEMIAQYTSALLAGTITSGWTFGAGAALQIPFAMQMAYRFNGIGVTQNVLYENQKLIANQFNSAIGKIQYSLSSTASALGKLQDVVNQNAQALNTLVKQLSSNFGAISSVLNDILSRLDKVEAEVQIDRLITGRLQSLQTYVTQQLIRAAEIRASANLAATKMSECVLGQSKRVDFCGKGYHLMSFPQSAPHGVVFLHVTYVPAQEKNFTCAPAICHDGKAHFPREGVFVSNGTHWFVTQRNFYEPQIITTDNTFVSGNCDVVIGIVNNTVYDPLQPELDSFKEELDKYFKNHTSPDVDLGDISGINASVVNIQKEIDRLNEVAKNLNESLIDLQELGKYEQYIKGGGGSDIDPYKEFGSSYQLLNFLPLDFFPDLNALVDTATALYEEELTGREHCSPHHTAIRQALVCWDELTKLIAWMSSNITSEQVRTIIVNHVNDTWGLKVRQSLWFHLSCLTFGQHTVQEFLVSFGVWIRTPAPYRPPNAPILSTLPEHTVIC

SEQ ID NO: 7019 - protein, 1365 aa, Artificial Sequence; identical to SEQ ID NO: 6982
  SARS-CoV-2/Portugal/PT0034/2020__EPI_ISL_418019 spike protein (1-1211)(I712C_T1077C) WhcAg construct

SEQ ID NO: 7020 - protein, 1365 aa, Artificial Sequence
  SARS-CoV-2/Iceland/202/2020__EPI_ISL_417750 spike protein (1-1211)(I712C_T1077C) WhcAg construct
MFVFLVLLPLVSSQCVNLTTRTQLPPAYTNSFTRGVYYPDKVFRSSVLHSTQDLFLPFFSNVTWFHAIHVSGTNGTKRFDNPVLPFNDGVYFASTEKSNIIRGWIFGTTLDSKTQSLLIVNNATNVVIKVCEFQFCNDPFLGVYYHKNNKSWMESEFRVYSSANNCTFEYVSQPFLMDLEGKQGNFKNLREFVFKNIDGYFKIYSKHTPINLVRDLPQGFSALEPLVDLPIGINITRFQTLLALHRSYLTPGDSSSGWTAGAAAYYVGYLQPRTFLLKYNENGTITDAVDCALDPLSETKCTLKSFTVEKGIYQTSNFRVQPTESIVRFPNITNLCPFGEVFNATRFASVYAWNRKRISNCVADYSVLYNSASFSTFKCYGVSPTKLNDLCFTNVYADSFVIRGDEVRQIAPGQTGKIADYNYKLPDDFTGCVIAWNSNNLDSKVGGNYNYLYRLFRKSNLKPFERDISTEIYQAGSTPCNGVEGFNCYFPLQSYGFQPTNGVGYQPYRVVVLSFELLHAPATVCGPKKSTNLVKNKCVNFNFNGLTGTGVLTESNKKFLPFQQFGRDIADTTDAVRDPQTLEILDITPCSFGGVSVITPGTNTSNQVAVLYQDVNCTEVPVAIHADQLTPTWRVYSTGSNVFQTRAGCLIGAEHVNNSYECDIPIGAGICASYQTQTNSPRRARSVASQSIIAYTMSLGAENSVAYSNNSCAIPTNFTISVTTEILPVSMTKTSVDCTMYICGDSTECSNLLLQYGSFCTQLNRALTGIAVEQDKNTQEVFAQVKQIYKTPPIKDFGGFNFSQILPDPSKPSKRSFIEDLLFNKVTLADAGFIKQYGDCLGDIAARDLICAQKFNGLTVLPPLLTDEMIAQYTSALLAGTITSGWTFGAGAALQIPFAMQMAYRFNGIGVTQNVLYENQKLIANQFNSAIGKIQDSLSSTASALGKLQDVVNQNAQALNTLVKQLSSNFGAISSVLNDILSRLDKVEAEVQIDRLITGRLQSLQTYVTQQLIRAAEIRASANLAATKMSECVLGQSKRVDFCGKGYHLMSFPQSAPHGVVFLHVTYVPAQEKNFTCAPAICHDGKAHFPREGVFVSNGTHWFVTQRNFYEPQIITTDNTFVSGNCDVVIGIVNNTVYDPLQPELDSFKEELDKYFKNHTSPDVDLGDIPGINASVVNIQKEIDRLNEVAKNLNESLIDLQELGKYEQYIKGGGGSDIDPYKEFGSSYQLLNFLPLDFFPDLNALVDTATALYEEELTGREHCSPHHTAIRQALVCWDELTKLIAWMSSNITSEQVRTIIVNHVNDTWGLKVRQSLWFHLSCLTFGQHTVQEFLVSFGVWIRTPAPYRPPNAPILSTLPEHTVIC

SEQ ID NO: 7021 - protein, 1365 aa, Artificial Sequence
  SARS-CoV-2/USA/WA-UW261/2020__EPI_ISL_418046 spike protein (1-1211)(I712C_T1077C) WhcAg construct
MFVFLVLLPLVSSQCVNLTTRTQLPPAYTNSFTRGVYYPDKVFRSSVLHSTQDLFLPFFSNVTWFHAIHVSGTNGTKRFDNPVLPFNDGVYFASTEKSNIIRGWIFGTTLDSKTQSLLIVNNATNVVIKVCEFQFCNDPFLGVYYHKNNKSWMESEFRVYSSANNCTFEYVSQPFLMDLEGKQGNFKNLREFVFKNIDGYFKIYSKHTPINLVRDLPQGFSALEPLVDLPIGINITRFQTLLALHRSYLTPGDSSSGWTAGAAAYYVGYLQPRTFLLKYNENGTITDAVDCALDPLSETKCTLKSFTVEKGIYQTSNFRVQPTESIVRFPNITNLCPFGEVFNATRFTSVYAWNRKRISNCVADYSVLYNSASFSTFKCYGVSPTKLNDLCFTNVYADSFVIRGDEVRQIAPGQTGKIADYNYKLPDDFTGCVIAWNSNNLDSKVGGNYNYLYRLFRKSNLKPFERDISTEIYQAGSTPCNGVEGFNCYFPLQSYGFQPTNGVGYQPYRVVVLSFELLHAPATVCGPKKSTNLVKNKCVNFNFNGLTGTGVLTESNKKFLPFQQFGRDIADTTDAVRDPQTLEILDITPCSFGGVSVITPGTNTSNQVAVLYQDVNCTEVPVAIHADQLTPTWRVYSTGSNVFQTRAGCLIGAEHVNNSYECDIPIGAGICASYQTQTNSPRRARSVASQSIIAYTMSLGAENSVAYSNNSCAIPTNFTISVTTEILPVSMTKTSVDCTMYICGDSTECSNLLLQYGSFCTQLNRALTGIAVEQDKNTQEVFAQVKQIYKTPPIKDFGGFNFSQILPDPSKPSKRSFIEDLLFNKVTLADAGFIKQYGDCLGDIAARDLICAQKFNGLTVLPPLLTDEMIAQYTSALLAGTITSGWTFGAGAALQIPFAMQMAYRFNGIGVTQNVLYENQKLIANQFNSAIGKIQDSLSSTASALGKLQDVVNQNAQALNTLVKQLSSNFGAISSVLNDILSRLDKVEAEVQIDRLITGRLQSLQTYVTQQLIRAAEIRASANLAATKMSECVLGQSKRVDFCGKGYHLMSFPQSAPHGVVFLHVTYVPAQEKNFTCAPAICHDGKAHFPREGVFVSNGTHWFVTQRNFYEPQIITTDNTFVSGNCDVVIGIVNNTVYDPLQPELDSFKEELDKYFKNHTSPDVDLGDISGINASVVNIQKEIDRLNEVAKNLNESLIDLQELGKYEQYIKGGGGSDIDPYKEFGSSYQLLNFLPLDFFPDLNALVDTATALYEEELTGREHCSPHHTAIRQALVCWDELTKLIAWMSSNITSEQVRTIIVNHVNDTWGLKVRQSLWFHLSCLTFGQHTVQEFLVSFGVWIRTPAPYRPPNAPILSTLPEHTVIC

SEQ ID NO: 7022 - protein, 1365 aa, Artificial Sequence
  SARS-CoV-2/Portugal/PT0035/2020__EPI_ISL_418020 spike protein (1-1211)(I712C_T1077C) WhcAg construct
MFVFLVLLPLVSSQCVNLTTRTQLPPAYTNSFTRGVYYPDKVFRSSVLHSTQDLFLPFFSNVTWFHAIHVSGTNGTKRFDNPVLPFNDGVYFASTEKSNIIRGWIFGTTLDSKTQSLLIVNNATNVVIKVCEFQFCNDPFLGVYYHKNNKSWMESEFRVYSSANNCTFEYVSQPFLMDLEGKQGNFKNLREFVFKNIDGYFKIYSKHTPINLVRDLPQGFSALEPLVDLPIGINITRFQTLLALHRSYLTPGDSSSGWTAGAAAYYVGYLQPRTFLLKYNENGTITDAVDCALDPLSETKCTLKSFTVEKGIYQTSNFRVQPTESIVRFPNITNLCPFGEVFNATRFASVYAWNRKRISNCVADYSVLYNSASFSTFKCYGVSPTKLNDLCFTNVYADSFVIRGDEVRQIAPGQTGKIADYNYKLPDDFTGCVIAWNSNNLDSKVGGNYNYLYRLFRKSNLKPFERDISTEIYQAGSTPCNGVEGFNCYFPLQSYGFQPTNGVGYQPYRVVVLSFELLHAPATVCGPKKSTNLVKNKCVNFNFNGLTGTGVLTESNKKFLPFQQFGRDIADTTDAVRDPQTLEILDITPCSFGGVSVITPGTNTSNQVAVLYQDVNCTEVPVAIHADQLTPTWRVYSTGSNVFQTRAGCLIGAEHVNNSYECDIPIGAGICASYQTQTNSPRRARSVASQSIIAYTMSLGAENSVAYSNNSCAIPTNFTISVTTEILPVSMTKTSVDCTMYICGDSTECSNLLLQYGSFCTQLNRALTGIAVEQDKNTQEVFAQVKQIYKTPPIKDFGGFNFSQILPDPSKPSKRSFIEDLLFNKVTLADAGFIKQYGDCLGDISARDLICAQKFNGLTVLPPLLTDEMIAQYTSALLAGTITSGWTFGAGAALQIPFAMQMAYRFNGIGVTQNVLYENQKLIANQFNSAIGKIQDSLSSTASALGKLQDVVNQNAQALNTLVKQLSSNFGAISSVLNDILSRLDKVEAEVQIDRLITGRLQSLQTYVTQQLIRAAEIRASANLAATKMSECVLGQSKRVDFCGKGYHLMSFPQSAPHGVVFLHVTYVPAQEKNFTCAPAICHDGKAHFPREGVFVSNGTHWFVTQRNFYEPQIITTDNTFVSGNCDVVIGIVNNTVYDPLQPELDSFKEELDKYFKNHTSPDVDLGDISGINASVVNIQKEIDRLNEVAKNLNESLIDLQELGKYEQYIKGGGGSDIDPYKEFGSSYQLLNFLPLDFFPDLNALVDTATALYEEELTGREHCSPHHTAIRQALVCWDELTKLIAWMSSNITSEQVRTIIVNHVNDTWGLKVRQSLWFHLSCLTFGQHTVQEFLVSFGVWIRTPAPYRPPNAPILSTLPEHTVIC

SEQ ID NO: 7023 - protein, 1365 aa, Artificial Sequence
  SARS-CoV-2/USA/NY-NYUMC7/2020__EPI_ISL_418192 spike protein (1-1211)(I712C_T1077C) WhcAg construct
MFVFLVLLPLVSSQCVNLTTRTQLPPAYTNSFTRGVYYPDKVFRSSVLHSTQDLFLPFFSNVTWFHAIHVSGTNGTKRFDNPVLPFNDGVYFASTEKSNIIRGWIFGTTLDSKTQSLLIVNNATNVVIKVCEFQFCNDPFLGVYHHKNNKSWMESEFRVYSSANNCTFEYVSQPFLMDLEGKQGNFKNLREFVFKNIDGYFKIYSKHTPINLVRDLPQGFSALEPLVDLPIGINITRFQTLLALHRSYLTPGDSSSGWTAGAAAYYVGYLQPRTFLLKYNENGTITDAVDCALDPLSETKCTLKSFTVEKGIYQTSNFRVQPTESIVRFPNITNLCPFGEVFNATRFASVYAWNRKRISNCVADYSVLYNSASFSTFKCYGVSPTKLNDLCFTNVYADSFVIRGDEVRQIAPGQTGKIADYNYKLPDDFTGCVIAWNSNNLDSKVGGNYNYLYRLFRKSNLKPFERDISTEIYQAGSTPCNGVEGFNCYFPLQSYGFQPTNGVGYQPYRVVVLSFELLHAPATVCGPKKSTNLVKNKCVNFNFNGLTGTGVLTESNKKFLPFQQFGRDIADTTDAVRDPQTLEILDITPCSFGGVSVITPGTNTSNQVAVLYQGVNCTEVPVAIHADQLTPTWRVYSTGSNVFQTRAGCLIGAEHVNNSYECDIPIGAGICASYQTQTNSPRRARSVASQSIIAYTMSLGAENSVAYSNNSCAIPTNFTISVTTEILPVSMTKTSVDCTMYICGDSTECSNLLLQYGSFCTQLNRALTGIAVEQDKNTQEVFAQVKQIYKTPPIKDFGGFNFSQILPDPSKPSKRSFIEDLLFNKVTLADAGFIKQYGDCLGDIAARDLICAQKFNGLTVLPPLLTDEMIAQYTSALLAGTITSGWTFGAGAALQIPFAMQMAYRFNGIGVTQNVLYENQKLIANQFNSAIGKIQDSLSSTASALGKLQDVVNQNAQALNTLVKQLSSNFGAISSVLNDILSRLDKVEAEVQIDRLITGRLQSLQTYVTQQLIRAAEIRASANLAATKMSECVLGQSKRVDFCGKGYHLMSFPQSAPHGVVFLHVTYVPAQEKNFTCAPAICHDGKAHFPREGVFVSNGTHWFVTQRNFYEPQIITTDNTFVSGNCDVVIGIVNNTVYDPLQPELDSFKEELDKYFKNHTSPDVDLGDISGINASVVNIQKEIDRLNEVAKNLNESLIDLQELGKYEQYIKGGGGSDIDPYKEFGSSYQLLNFLPLDFFPDLNALVDTATALYEEELTGREHCSPHHTAIRQALVCWDELTKLIAWMSSNITSEQVRTIIVNHVNDTWGLKVRQSLWFHLSCLTFGQHTVQEFLVSFGVWIRTPAPYRPPNAPILSTLPEHTVIC

SEQ ID NO: 7024 - protein, 1365 aa, Artificial Sequence
  SARS-CoV-2/Iceland/189/2020__EPI_ISL_417709 spike protein (1-1211)(I712C_T1077C) WhcAg construct
MFVFLVLLPLVSSQCVNLTTRTQLPPAYTNSFTRGVYYPDKVFRSSVLHSTQDLFLPFFSNVTWFHAIHVSGTNGTKRFDNPVLPFNDGVYFASTEKSNIIRGWIFGTTLDSKTQSLLIVNNATNVVIKVCEFQFCNDPFLGVYYHKNNKSWMESEFRVYSSANNCTFEYVSQPFLMDLEGKQGNFKNLREFVFKNIDGYFKIYSKHTPINLVRDLPQGFSALEPLVDLPIGINITRFQTLLALHRSYLTPGDSSSGWTAGAAAYYVGYLQPRTFLLKYNENGTITDAVDCALDPLSETKCTLKSFTVEKGIYQTSNFRVQPTESIVRFPNITNLCPFGEVFNATRFASVYAWNRKRISNCVADYSVLYNSASFSTFKCYGVSPTKLNDLCFTNVYADSFVIRGDEVRQIAPGQTGKIADYNYKLPDDFTGCVIAWNSNNLDSKVGGNYNYLYRLFRKSNLKPFERDISTEIYQAGSTPCNGVEGFNCYFPLQSYGFQPTNGVGYQPYRVVVLSFELLHAPATVCGPKKSTNLVKNKCVNFNFNGLTGTGVLTESNKKFLPFQQFGRDIADTTDAVRDPQTLEILDITPCSFGGVSVITPGTNTSNQVAVLYQGVNCTEVPVAIHADQLTPTWRVYSTGSNVFQTRAGCLIGAEHVNNSYECDIPIGAGICASYQTQTNSPRRARSVASQSIIAYTMSLGAENSVAYSNNSCAIPTNFTISVTTEILPVSMTKTSVDCTMYICGDSTECSNLLLQYGSFCTQLNRALTGIAVEQDKNTQEVFAQVKQIYKTPPIKDFGGFNFSQILPDPSKPSKRSFIEDLLFNKVTLADAGFTKQYGDCLGDIAARDLICAQKFNGLTVLPPLLTDEMIAQYTSALLAGTITSGWTFGAGAALQIPFAMQMAYRFNGIGVTQNVLYENQKLIANQFNSAIGKIQDSLSSTASALGKLQDVVNQNAQALNTLVKQLSSNFGAISSVLNDILSRLDKVEAEVQIDRLITGRLQSLQTYVTQQLIRAAEIRASANLAATKMSECVLGQSKRVDFCGKGYHLMSFPQSAPHGVVFLHVTYVPAQEKNFTCAPAICHDGKAHFPREGVFVSNGTHWFVTQRNFYEPQIITTDNTFVSGNCDVVIGIVNNTVYDPLQPELDSFKEELDKYFKNHTSPDVDLGDISGINASVVNIQKEIDRLNEVAKNLNESLIDLQELGKYEQYIKGGGGSDIDPYKEFGSSYQLLNFLPLDFFPDLNALVDTATALYEEELTGREHCSPHHTAIRQALVCWDELTKLIAWMSSNITSEQVRTIIVNHVNDTWGLKVRQSLWFHLSCLTFGQHTVQEFLVSFGVWIRTPAPYRPPNAPILSTLPEHTVIC

SEQ ID NO: 7025 - protein, 1365 aa, Artificial Sequence
  SARS-CoV-2/Australia/NSW56/2020__EPI_ISL_417408 spike protein (1-1211)(I712C_T1077C) WhcAg construct
MFVFLVLLPLVSSQCVNLTTRTQLPPAYTNSFTRGVYYPDKVFRSSVLHSTQDLFLPFFSNVTWFHAIHVSGTNGTKRFDNPVLPFNDGVYFASTEKSNIIRGWIFGTTLDSKTQSLLIVNNATNVVIKVCEFQFCNDPFLGVYYHKNNKSWMESEFRVYSSANNCTFEYVSQPFLMDLEGKQGNFKNLREFVFKNIDGYFKIYSKHTPINLVRDLPQGFSALEPLVDLPIGINITRFQTLLALHRSYLTPGDSSSGWTAGAAAYYVGYLQPRTFLLKYNENGTITDAVDCALDPLSETKCTLKSFTVEKGIYQTSNFRVQPTESIVRFPNITNLCPFGEVFNATRFASVYAWNRKRISNCVADYSVLYNSASFSTFKCYGVSPTKLNDLCFTNVYADSFVIRGDEVRQIAPGQTGKIADYNYKLPDDFTGCVIAWNSNNLDSKVGGNYNYLYRLFRKSNLKPFERDISTEIYQAGSTPCNGVEGFNCYFPLQSYGFQPTNGVGYQPYRVVVLSFELLHAPATVCGPKKSTNLVKNKCVNFNFNGLTGTGVLTESNKKFLPFQQFGRDIADTTDAVRDPQTLEILDITPCSFGGVSVITPGTNTSNQVAVLYQDVNCTEVPVAIHADQLTPTWRVYSTGSNVFQTRAGCLIGAEHVNNSYECDIPIGAGICASYQTQTNSPRRARSVASQSIIAYTMSLGAENSVAYSNNSCAIPTNFTISVTTEILPVSMTKTSVDCTMYICGDSTECSNLLLQYGSFCTQLNRALTGIAVEQDKNTQEVFAQVKQIYKTPPIKDFGGFNFSQILPDSSKPSKRSFIEDLLFNKVTLADAGFIKQYGDCLGDIAARDLICAQKFNGLTVLPPLLTDEMIAQYTSALLAGTITSGWTFGAGAALQIPFAMQMAYRFNGIGVTQNVLYENQKLIANQFNSAIGKIQDSLSSTASALGKLQDVVNQNAQALNTLVKQLSSNFGAISSVLNDILSRLDKVEAEVQIDRLITGRLQSLQTYVTQQLIRAAEIRASANLAATKMSECVLGQSKRVDFCGKGYHLMSFPQSAPHGVVFLHVTYVPAQEKNFTCAPAICHDGKAHFPREGVFVSNGTHWFVTQRNFYEPQIITTDNTFVSGNCDVVIGIVNNTVYDPLQPELDSFKEELDKYFKNHTSPDVDLGDISGINASVVNIQKEIDRLNEVAKNLNESLIDLQELGKYEQYIKGGGGSDIDPYKEFGSSYQLLNFLPLDFFPDLNALVDTATALYEEELTGREHCSPHHTAIRQALVCWDELTKLIAWMSSNITSEQVRTIIVNHVNDTWGLKVRQSLWFHLSCLTFGQHTVQEFLVSFGVWIRTPAPYRPPNAPILSTLPEHTVIC

SEQ ID NO: 7026 - protein, 1365 aa, Artificial Sequence
  SARS-CoV-2/Iceland/280/2020__EPI_ISL_417608 spike protein (1-1211)(I712C_T1077C) WhcAg construct
MFVFLVLLPLVSSQCVNLTTRTQLPPAYTNSFTRGVYYPDKVFRSSVLHSTQDLFLPFFSNVTWFHAIHVSGTNGTKRFDNPVLPFNDGVYFASTEKSNIIRGWIFGTTLDSKTQSLLIVNNATNVVIKVCEFQFCNDPFLGVYYHKNNKSWMESEFRVYSSANNCTFEYVSQPFLMDLEGKQGNFKNLREFVFKNIDGYFKIYSKHTPINLVRDLPQGFSALEPLVDLPIGINITRFQTLLALHRSYLTPGDSSSGWTAGAAAYYVGYLQPRTFLLKYNENGTITDAVDCALDPLSETKCTLKSFTVEKGIYQTSNFRVQPTESIVRFPNITNLCPFGEVFNATRFASVYAWNRKRISNCVADYSVLYNSASFSTFKCYGVSPTKLNDLCFTNVYADSFVIRGDEVRQIAPGQTGKIADYNYKLPDDFTGCVIAWNSNNLDSKVGGNYNYLYRLFRKSNLKPFERDISTEIYQAGSTPCNGVEGFNCYFPLQSYGFQPTNGVGYQPYRVVVLSFELLHAPATVCGPKKSTNLVKNKCVNFNFNGLTGTGVLTESNKKFLPFQQFGRDIADTTDAVRDPQTLEILDITPCSFGGVSVITPGTNTSNQVAVLYQGVNCTEVPVAIHADQLTPTWRVYSTGSNVFQTRAGCLIGAEHVNNSYECDIPIGAGICASYHTQTNSPRRARSVASQSIIAYTMSLGAENSVAYSNNSCAIPTNFTISVTTEILPVSMTKTSVDCTMYICGDSTECSNLLLQYGSFCTQLNRALTGIAVEQDKNTQEVFAQVKQIYKTPPIKDFGGFNFSQILPDPSKPSKRSFIEDLLFNKVTLADAGFIKQYGDCLGDIAARDLICAQKFNGLTVLPPLLTDEMIAQYTSALLAGTITSGWTFGAGAALQIPFAMQMAYRFNGIGVTQNVLYENQKLIANQFNSAIGKIQDSLSSTASALGKLQDVVNQNAQALNTLVKQLSSNFGAISSVLNDILSRLDKVEAEVQIDRLITGRLQSLQTYVTQQLIRAAEIRASANLAATKMSECVLGQSKRVDFCGKGYHLMSFPQSAPHGVVFLHVTYVPAQEKNFTCAPAICHDGKAHFPREGVFVSNGTHWFVTQRNFYEPQIITTDNTFVSGNCDVVIGIVNNTVYDPLQPELDSFKEELDKYFKNHTSPDVDLGDISGINASVVNIQKEIDRLNEVAKNLNESLIDLQELGKYEQYIKGGGGSDIDPYKEFGSSYQLLNFLPLDFFPDLNALVDTATALYEEELTGREHCSPHHTAIRQALVCWDELTKLIAWMSSNITSEQVRTIIVNHVNDTWGLKVRQSLWFHLSCLTFGQHTVQEFLVSFGVWIRTPAPYRPPNAPILSTLPEHTVIC

SEQ ID NO: 7027 - protein, 1365 aa, Artificial Sequence; identical to SEQ ID NO: 6982
  SARS-CoV-2/Iceland/247/2020__EPI_ISL_417575 spike protein (1-1211)(I712C_T1077C) WhcAg construct

SEQ ID NO: 7028 - protein, 1365 aa, Artificial Sequence
  SARS-CoV-2/Iceland/238/2020__EPI_ISL_417566 spike protein (1-1211)(I712C_T1077C) WhcAg construct
MFVFLVLLPLVSSQCVNLTTRTQLPPAYTNSFTRGVYYPDKVFRSSVLHSTQDLFLPFFSNVTWFHAIHVSGTNGTKRFDNPVLPFNDGVYFASTEKSNIIRGWIFGTTLDSKTQSLLIVNNATNVVIKVCEFQFCNDPFLGVYYHKNNKSWMESEFRVYSSANNCTFEYVSQPFLMDLEGKQGNFKNLREFVFKNIDGYFKIYSKHTPINLVRDLPQGFSALEPLVDLPIGINITRFQTLLALHRSYLTPGDSSSGWTAGAAAYYVGYLQPRTFLLKYNENGTITDAVDCALDPLSETKCTLKSFTVEKGIYQTSNFRVQPTESIVRFPNITNLCPFGEVFNATRFASVYAWNRKRISNCVADYSVLYNSASFSTFKCYGVSPTKLNDLCFTNVYADSFVIRGDEVRQIAPGQTGKIADYNYKLPDDFTGCVIAWNSNNLDSKVGGNYNYLYRLFRKSNLKPFERDISTEIYQAGSTPCNGVEGFNCYFPLQSYGFQPTNGVGYQPYRVVVLSFELLHAPATVCGPKKSTNLVKNKCVNFNFNGLTGTGVLTESNKKFLPFQQFGRDIADTTDAVRDPQTLEILDITPCSFGGVSVITPGTNTSNQVAVLYQGVNCTEVPVAIHADQLTPTWRVYSTGSNVFQTRAGCLIGAEHVNNSYECDIPIGAGICASYQTQTNSPRRARSVASQSIIAYTMSLGAENSVAYSNNSCAIPTNFTISVTTEILPVSMTKTSVDCTMYICGDSTECSNLLLQYGSFCTQLNRALTGIAVEQDKNTQEVFAQVKQIYKTPPIKDFGGFNFSQILPDPSKPSKRSFIEDLLFNKVTLADVGFIKQYGDCLGDIAARDLICAQKFNGLTVLPPLLTDEMIAQYTSALLAGTITSGWTFGAGAALQIPFAMQMAYRFNGIGVTQNVLYENQKLIANQFNSAIGKIQDSLSSTASALGKLQDVVNQNAQALNTLVKQLSSNFGAISSVLNDILSRLDKVEAEVQIDRLITGRLQSLQTYVTQQLIRAAEIRASANLAATKMSECVLGQSKRVDFCGKGYHLMSFPQSAPHGVVFLHVTYVPAQEKNFTCAPAICHDGKAHFPREGVFVSNGTHWFVTQRNFYEPQIITTDNTFVSGNCDVVIGIVNNTVYDPLQPELDSFKEELDKYFKNHTSPDVDLGDISGINASVVNIQKEIDRLNEVAKNLNESLIDLQELGKYEQYIKGGGGSDIDPYKEFGSSYQLLNFLPLDFFPDLNALVDTATALYEEELTGREHCSPHHTAIRQALVCWDELTKLIAWMSSNITSEQVRTIIVNHVNDTWGLKVRQSLWFHLSCLTFGQHTVQEFLVSFGVWIRTPAPYRPPNAPILSTLPEHTVIC

SEQ ID NO: 7029 - protein, 1365 aa, Artificial Sequence
  SARS-CoV-2/Greece/16/2020__EPI_ISL_418265 spike protein (1-1211)(I712C_T1077C) WhcAg construct
MFVFLVLLPLVSSQCVNLTTRTQLPPAYTNSFTRGVYYPDKVFRSSVLHSTQDLFLPFFSNVTWFHAIHVSGTNGTKRFDNPVLPFNDGVYFASTEKSNIIRGWIFGTTLDSKTQSLLIVNNATNVVIKVCEFQFCNDPFLGVYYHKNNKSWMESEFRVYSSANNCTFEYVSQPFLMDLEGKQGNFKNLREFVFKNVDGYFKIYSKHTPINLVRDLPQGFSALEPLVDLPIGINITRFQTLLALHRSYLTPGDSSSGWTAGAAAYYVGYLQPRTFLLKYNENGTITDAVDCALDPLSETKCTLKSFTVEKGIYQTSNFRVQPTESIVRFPNITNLCPFGEVFNATRFASVYAWNRKRISNCVADYSVLYNSASFSTFKCYGVSPTKLNDLCFTNVYADSFVIRGDEVRQIAPGQTGKIADYNYKLPDDFTGCVIAWNSNNLDSKVGGNYNYLYRLFRKSNLKPFERDISTEIYQAGSTPCNGVEGFNCYFPLQSYGFQPTNGVGYQPYRVVVLSFELLHAPATVCGPKKSTNLVKNKCVNFNFNGLTGTGVLTESNKKFLPFQQFGRDIADTTDAVRDPQTLEILDITPCSFGGVSVITPGTNTSNQVAVLYQDVNCTEVPVAIHADQLTPTWRVYSTGSNVFQTRAGCLIGAEHVNNSYECDIPIGAGICASYQTQTNSPRRARSVASQSIIAYTMSLGAENSVAYSNNSCAIPTNFTISVTTEILPVSMTKTSVDCTMYICGDSTECSNLLLQYGSFCTQLNRALTGIAVEQDKNTQEVFAQVKQIYKTPPIKDFGGFNFSQILPDPSKPSKRSFIEDLLFNKVTLADAGFIKQYGDCLGDIAARDLICAQKFNGLTVLPPLLTDEMIAQYTSALLAGTITSGWTFGAGAALQIPFAMQMAYRFNGIGVTQNVLYENQKLIANQFNSAIGKIQDSLSSTASALGKLQDVVNQNAQALNTLVKQLSSNFGAISSVLNDILSRLDKVEAEVQIDRLITGRLQSLQTYVTQQLIRAAEIRASANLAATKMSECVLGQSKRVDFCGKGYHLMSFPQSAPHGVVFLHVTYVPAQEKNFTCAPAICHDGKAHFPREGVFVSNGTHWFVTQRNFYEPQIITTDNTFVSGNCDVVIGIVNNTVYDPLQPELDSFKEELDKYFKNHTSPDVDLGDISGINASVVNIQKEIDRLNEVAKNLNESLIDLQELGKYEQYIKGGGGSDIDPYKEFGSSYQLLNFLPLDFFPDLNALVDTATALYEEELTGREHCSPHHTAIRQALVCWDELTKLIAWMSSNITSEQVRTIIVNHVNDTWGLKVRQSLWFHLSCLTFGQHTVQEFLVSFGVWIRTPAPYRPPNAPILSTLPEHTVIC

SEQ ID NO: 7030 - protein, 1365 aa, Artificial Sequence
  SARS-CoV-2/Iceland/319/2020__EPI_ISL_417648 spike protein (1-1211)(I712C_T1077C) WhcAg construct
MFVFLVLLPLVSSQCVNLTTRTQLPPAYTNSFTRGVYYPDKVFRSSVLHSTQDLFLPFFSNVTWFHAIHVSGTNGTKRFDNPVLPFNDGVYFASTEKSNIIRGWIFGTTLDSKTQSLLIVNNATNVVIKVCEFQFCNDPFLGVYYHKNNKSWMESEFRVYSSANNCTFEYVSQPFLIDLEGKQGNFKNLREFVFKNIDGYFKIYSKHTPINLVRDLPQGFSALEPLVDLPIGINITRFQTLLALHRSYLTPGDSSSGWTAGAAAYYVGYLQPRTFLLKYNENGTITDAVDCALDPLSETKCTLKSFTVEKGIYQTSNFRVQPTESIVRFPNITNLCPFGEVFNATRFASVYAWNRKRISNCVADYSVLYNSASFSTFKCYGVSPTKLNDLCFTNVYADSFVIRGDEVRQIAPGQTGKIADYNYKLPDDFTGCVIAWNSNNLDSKVGGNYNYLYRLFRKSNLKPFERDISTEIYQAGSTPCNGVEGFNCYFPLQSYGFQPTNGVGYQPYRVVVLSFELLHAPATVCGPKKSTNLVKNKCVNFNFNGLTGTGVLTESNKKFLPFQQFGRDIADTTDAVRDPQTLEILDITPCSFGGVSVITPGTNTSNQVAVLYQGVNCTEVPVAIHADQLTPTWRVYSTGSNVFQTRAGCLIGAEHVNNSYECDIPIGAGICASYQTQTNSPRRARSVASQSIIAYTMSLGAENSVAYSNNSCAIPTNFTISVTTEILPVSMTKTSVDCTMYICGDSTECSNLLLQYGSFCTQLNRALTGIAVEQDKNTQEVFAQVKQIYKTPPIKDFGGFNFSQILPDPSKPSKRSFIEDLLFNKVTLADAGFIKQYGDCLGDIAARDLICAQKFNGLTVLPPLLTDEMIAQYTSALLAGTITSGWTFGAGAALQIPFAMQMAYRFNGIGVTQNVLYENQKLIANQFNSAIGKIQDSLSSTASALGKLQDVVNQNAQALNTLVKQLSSNFGAISSVLNDILSRLDKVEAEVQIDRLITGRLQSLQTYVTQQLIRAAEIRASANLAATKMSECVLGQSKRVDFCGKGYHLMSFPQSAPHGVVFLHVTYVPAQEKNFTCAPAICHDGKAHFPREGVFVSNGTHWFVTQRNFYEPQIITTDNTFVSGNCDVVIGIVNNTVYDPLQPELDSFKEELDKYFKNHTSPDVDLGDISGINASVVNIQKEIDRLNEVAKNLNESLIDLQELGKYEQYIKGGGGSDIDPYKEFGSSYQLLNFLPLDFFPDLNALVDTATALYEEELTGREHCSPHHTAIRQALVCWDELTKLIAWMSSNITSEQVRTIIVNHVNDTWGLKVRQSLWFHLSCLTFGQHTVQEFLVSFGVWIRTPAPYRPPNAPILSTLPEHTVIC

SEQ ID NO: 7031 - protein, 1365 aa, Artificial Sequence
  SARS-CoV-2/Congo/94/2020__EPI_ISL_417947 spike protein (1-1211)(I712C_T1077C) WhcAg construct
MFVFLVLLPLVSSQCVNLTTRTQLPPAYTNSFTRGVYYPDKVFRSSVLHSTQDLFLPFFSNVTWFHAIHVSGTNGTKRFDNPVLPFNDGVYFASTEKSNIIRGWIFGTTLDSKTQSLLIVNNATNVVIKVCEFQFCNDPFLGVYYHKNNKSWMESEFRVYSSANNCTFEYVSQPFLMDLEGKQGNFKNLREFVFKNIDGYFKIYSKHTPINLVRDLPQGFSALEPLVDLPIGINITRFQTLLALHRSYLTPGDSSSGWTAGAAAYYVGYLQPRTFLLKYNENGTITDAVDCALDPLSETKCTLKSFTVEKGIYQTSNFRVQPTESIVRFPNITNLCPFGEVFNATRFASVYAWNRKRISNCVADYSVLYNSASFSTFKCYGVSPTKLNDLCFTNVYADSFVIRGDEVRQIAPGQTGKIADYNYKLPDDFTGCVIAWNSNNLDSKVGGNYNYLYRLFRKSNLKPFERDISTEIYQAGSTPCNGVEGFNCYFPLQSYGFQPTNGVGYQPYRVVVLSFELLHAPATVCGPKKSTNLVKNKCVNFNFNGLTGTGVLTESNKKFLPFQQFGRDIADTTDAVRDPQTLEILDITPCSFGGVSVITPGTNTSNQVAVLYQGVNCTEVPVAIHADQLTPTWRVYSTGSNVFQTRAGCLIGAEHVNNSYECDIPIGAGICASYQTQTNSPRRARSVASQSIIAYTMSLGAENSVAYSNNSCAIPTNFTISVTTEILPVSMTKTSVDCTMYICGDSTECSNLLLQYGSFCTQLNRALTGIAVEQDKNTQEVFAQVKQIYKTPPIKDFGGFNFSQILPDPSKPSKRSFIEDILFNKVTLADAGFIKQYGDCLGDIAARDLICAQKFNGLTVLPPLLTDEMIAQYTSALLAGTITSGWTFGAGAALQIPFAMQMAYRFNGIGVTQNVLYENQKLIANQFNSAIGKIQDSLSSTASALGKLQDVVNQNAQALNTLVKQLSSNFGAISSVLNDILSRLDKVEAEVQIDRLITGRLQSLQTYVTQQLIRAAEIRASANLAATKMSECVLGQSKRVDFCGKGYHLMSFPQSAPHGVVFLHVTYVPAQEKNFTCAPAICHDGKAHFPREGVFVSNGTHWFVTQRNFYEPQIITTDNTFVSGNCDVVIGIVNNTVYDPLQPELDSFKEELDKYFKNHTSPDVDLGDISGINASVVNIQKEIDRLNEVAKNLNESLIDLQELGKYEQYIKGGGGSDIDPYKEFGSSYQLLNFLPLDFFPDLNALVDTATALYEEELTGREHCSPHHTAIRQALVCWDELTKLIAWMSSNITSEQVRTIIVNHVNDTWGLKVRQSLWFHLSCLTFGQHTVQEFLVSFGVWIRTPAPYRPPNAPILSTLPEHTVIC

SEQ ID NO: 7032 - protein, 1365 aa, Artificial Sequence
  SARS-CoV-2/Congo/158/2020__EPI_ISL_417950 spike protein (1-1211)(I712C_T1077C) WhcAg construct
MFVFLVLLPLVSSQCVNLTTRTQLPPAYTNSFTRGVYYPDKVFRSSVLHSTQDLFLPFFSNVTWFHAIHVSGTNGTKRFDNPVLPFNDGVYFASTEKSNIIRGWIFGTTLDSKTQSLLIVNNATNVVIKVCEFQFCNDPFLGVYYHKNNKSWMESEFRVYSSANNCTFEYVSQPFLMDLEGKQGNFKNLREFVFKNIDGYFKIYSKHTPINLVRDLPQGFSALEPLVDLPIGINITRFQTLLALHRSYLTPGDSSSGWTAGAAAYYVGYLQPRTFLLKYNENGTITDAVDCALDPLSETKCTLKSFTVEKGIYQTSNFRVQPTESIVRFPNITNLCPFGEVFNATRFASVYAWNRKRISNCVADYSVLYNSASFSTFKCYGVSPTKLNDLCFTNVYADSFVIRGDEVRQIAPGQTGKIADYNYKLPDDFTGCVIAWNSNNLDSKVGGNYNYLYRLFRKSNLKPFERDISTEIYQAGSTPCNGVEGFNCYFPLQSYGFQPTNGVGYQPYRVVVLSFELLHAPATVCGPKKSTNLVKNKCVNFNFNGLTGTGVLTESNKKFLPFQQFGRDIADTTDAVRDPQTLEILDITPCSFGGVSVITPGTNTSNQVAVLYQDVNCTEVPVAIHADQLTPTWRVYSTGSNVFQTRAGCLIGAEHVNNSYECDIPIGAGICASYQTQTNSPRRARSVASQSIIAYTMSLGAENSVAYSNNSCAIPTNFTISVTTEILPVSMTKTSVDCTMYICGDSTECSNLLLQYGSFCTQLNRALTGIAVEQDKNTQEVFAQVKQIYKTPPIKDFGGFNFSQILPDPSKPSKRSFIEDLLFNKVTLADAGFIKQYGDCLGDIAARDLICAQKFNGLTVLPPLLTDEMIAQYTSALLAGTITSGWTFGAGAALQIPFAMQMAYRFNGIGVTQNVLYENQKLIANQFNSAIGKIQDSLSSTASALGKLQDVVNQNAQALNTLVKQLSSNFGAISSVLNDILSRLDKVEAEVQIDRLITGRLQSLQTYVTQQLIRAAEIRASANLAATKMSECVLGQSKRVDFCGKGYHLMSFPQSAPHGVVFLHVTYVPAQEKNFTCAPAICHDGKAHFPREGVFVSNGTHWFVTQRNFYEPQIITTDNTFLSGNCDVVIGIVNNTVYDPLQPELDSFKEELDKYFKNHTSPDVDLGDISGINASVVNIQKEIDRLNEVAKNLNESLIDLQELGKYEQYIKGGGGSDIDPYKEFGSSYQLLNFLPLDFFPDLNALVDTATALYEEELTGREHCSPHHTAIRQALVCWDELTKLIAWMSSNITSEQVRTIIVNHVNDTWGLKVRQSLWFHLSCLTFGQHTVQEFLVSFGVWIRTPAPYRPPNAPILSTLPEHTVIC

SEQ ID NO: 7033 - protein, 1365 aa, Artificial Sequence
  SARS-CoV-2/USA/UT-00034/2020__EPI_ISL_417977 spike protein (1-1211)(I712C_T1077C) WhcAg construct
MFVFLVLLPLVSSQCVNLTTRTQLPPAYTNSFTRGVYYPDKVFRSSVLHSTQDLFLPFFSNVTWFHAIHVSGTNGTKRFDNPVLPFNDGVYFASTEKSNIIRGWIFGTTLDSKTQSLLIVNNATNVVIKVCEFQFCNDPFLGVYYYKNNKSWMESEFRVYSSANNCTFEYVSQPFLMDLEGKQGNFKNLREFVFKNIDGYFKIYSKHTPINLVRDLPQGFSALEPLVDLPIGINITRFQTLLALHRSYLTPGDSSSGWTAGAAAYYVGYLQPRTFLLKYNENGTITDAVDCALDPLSETKCTLKSFTVEKGIYQTSNFRVQPTESIVRFPNITNLCPFGEVFNATRFASVYAWNRKRISNCVADYSVLYNSASFSTFKCYGVSPTKLNDLCFTNVYADSFVIRGDEVRQIAPGQTGKIADYNYKLPDDFTGCVIAWNSNNLDSKVGGNYNYLYRLFRKSNLKPFERDISTEIYQAGSTPCNGVEGFNCYFPLQSYGFQPTNGVGYQPYRVVVLSFELLHAPATVCGPKKSTNLVKNKCVNFNFNGLTGTGVLTESNKKFLPFQQFGRDIADTTDAVRDPQTLEILDITPCSFGGVSVITPGTNTSNQVAVLYQGVNCTEVPVAIHADQLTPTWRVYSTGSNVFQTRAGCLIGAEHVNNSYECDIPIGAGICASYQTQTNSPRRARSVASQSIIAYTMSLGAENSVAYSNNSCAIPTNFTISVTTEILPVSMTKTSVDCTMYICGDSTECSNLLLQYGSFCTQLNRALTGIAVEQDKNTQEVFAQVKQIYKTPPIKDFGGFNFSQILPDPSKPSKRSFIEDLLFNKVTLADAGFIKQYGDCLGDIAARDLICAQKFNGLTVLPPLLTDEMIAQYTSALLAGTITSGWTFGAGAALQIPFAMQMAYRFNGIGVTQNVLYENQKLIANQFNSAIGKIQDSLSSTASALGKLQDVVNQNAQALNTLVKQLSSNFGAISSVLNDILSRLDKVEAEVQIDRLITGRLQSLQTYVTQQLIRAAEIRASANLAATKMSECVLGQSKRVDFCGKGYHLMSFPQSAPHGVVFLHVTYVPAQEKNFTCAPAICHDGKAHFPREGVFVSNGTHWFVTQRNFYEPQIITTDNTFVSGNCDVVIGIVNNTVYDPLQPELDSFKEELDKYFKNHTSPDVDLGDISGINASVVNIQKEIDRLNEVAKNLNESLIDLQELGKYEQYIKGGGGSDIDPYKEFGSSYQLLNFLPLDFFPDLNALVDTATALYEEELTGREHCSPHHTAIRQALVCWDELTKLIAWMSSNITSEQVRTIIVNHVNDTWGLKVRQSLWFHLSCLTFGQHTVQEFLVSFGVWIRTPAPYRPPNAPILSTLPEHTVIC

SEQ ID NO: 7034 - protein, 1365 aa, Artificial Sequence
  SARS-CoV-2/USA/UT-00033/2020__EPI_ISL_417976 spike protein (1-1211)(I712C_T1077C) WhcAg construct
MFVFLVLLPLVSSQCVNLTTRTQLPPAYTNSFTRGVYYPDKVFRSSVLHSTQDLFLPFFSNVTWFHAIHVSGTNGTKRFDNPVLPFNDGVYFASTEKSNIIRGWIFGTTLDSKTQSLLIVNNATNVVIKVCEFQFCNDPFLGVYYHKNNKSWMESEFRVYSSANNCTFEYVSQPFLMDLEGKQGNFKNLREFVFKNIDGYFKIYSKHTPINLVRDLPQGFSALEPLVDLPIGINITRFQTLLALHRSYLTPGDSSSGLTAGAAAYYVGYLQPRTFLLKYNENGTITDAVDCALDPLSETKCTLKSFTVEKGIYQTSNFRVQPTESIVRFPNITNLCPFGEVFNATRFASVYAWNRKRISNCVADYSVLYNSASFSTFKCYGVSPTKLNDLCFTNVYADSFVIRGDEVRQIAPGQTGKIADYNYKLPDDFTGCVIAWNSNNLDSKVGGNYNYLYRLFRKSNLKPFERDISTEIYQAGSTPCNGVEGFNCYFPLQSYGFQPTNGVGYQPYRVVVLSFELLHAPATVCGPKKSTNLVKNKCVNFNFNGLTGTGVLTESNKKFLPFQQFGRDIADTTDAVRDPQTLEILDITPCSFGGVSVITPGTNTSNQVAVLYQGVNCTEVPVAIHADQLTPTWRVYSTGSNVFQTRAGCLIGAEHVNNSYECDIPIGAGICASYQTQTNSPRRARSVASQSIIAYTMSLGAENSVAYSNNSCAIPTNFTISVTTEILPVSMTKTSVDCTMYICGDSTECSNLLLQYGSFCTQLNRALTGIAVEQDKNTQEVFAQVKQIYKTPPIKDFGGFNFSQILPDPSKPSKRSFIEDLLFNKVTLADAGFIKQYGDCLGDIAARDLICAQKFNGLTVLPPLLTDEMIAQYTSALLAGTITSGWTFGAGAALQIPFAMQMAYRFNGIGVTQNVLYENQKLIANQFNSAIGKIQDSLSSTASALGKLQDVVNQNAQALNTLVKQLSSNFGAISSVLNDILSRLDKVEAEVQIDRLITGRLQSLQTYVTQQLIRAAEIRASANLAATKMSECVLGQSKRVDFCGKGYHLMSFPQSAPHGVVFLHVTYVPAQEKNFTCAPAICHDGKAHFPREGVFVSNGTHWFVTQRNFYEPQIITTDNTFVSGNCDVVIGIVNNTVYDPLQPELDSFKEELDKYFKNHTSPDVDLGDISGINASVVNIQKEIDRLNEVAKNLNESLIDLQELGKYEQYIKGGGGSDIDPYKEFGSSYQLLNFLPLDFFPDLNALVDTATALYEEELTGREHCSPHHTAIRQALVCWDELTKLIAWMSSNITSEQVRTIIVNHVNDTWGLKVRQSLWFHLSCLTFGQHTVQEFLVSFGVWIRTPAPYRPPNAPILSTLPEHTVIC

SEQ ID NO: 7035 - protein, 1365 aa, Artificial Sequence
  SARS-CoV-2/USA/WI-13/2020__EPI_ISL_417516 spike protein (1-1211)(I712C_T1077C) WhcAg construct
MFVFLVLLPLVSSQCVNLTTRTQLPPAYTNSFTRGVYYPDKVFRSSVLHSTQDLFLPFFSNVTWFHAIHVSGTNGTKRFDNPVLPFNDGVYFASTEKSNIIRGWIFGTTLDSKTQSLLIVNNATNVVIKVCEFQFCNDPFLGVYYHKNNKSWMESEFRVYSSANNCTFEYVSQPFLMDLEGKQGNFKNLREFVFKNIDGYFKIYSKHTPINLVRDLPQGFSALEPLVDLPIGINITRFQTLLALHRSYLTPGDSSSGWTAGAAAYYVGYLQPRTFLLKYNENGTITDAVDCALDPLSETKCTLKSFTVEKGIYQTSNFRVLPTESIVRFPNITNLCPFGEVFNATRFASVYAWNRKRISNCVADYSVLYNSASFSTFKCYGVSPTKLNDLCFTNVYADSFVIRGDEVRQIAPGQTGKIADYNYKLPDDFTGCVIAWNSNNLDSKVGGNYNYLYRLFRKSNLKPFERDISTEIYQAGSTPCNGVEGFNCYFPLQSYGFQPTNGVGYQPYRVVVLSFELLHAPATVCGPKKSTNLVKNKCVNFNFNGLTGTGVLTESNKKFLPFQQFGRDIADTTDAVRDPQTLEILDITPCSFGGVSVITPGTNTSNQVAVLYQGVNCTEVPVAIHADQLTPTWRVYSTGSNVFQTRAGCLIGAEHVNNSYECDIPIGAGICASYQTQTNSPRRARSVASQSIIAYTMSLGAENSVAYSNNSCAIPTNFTISVTTEILPVSMTKTSVDCTMYICGDSTECSNLLLQYGSFCTQLNRALTGIAVEQDKNTQEVFAQVKQIYKTPPIKDFGGFNFSQILPDPSKPSKRSFIEDLLFNKVTLADAGFIKQYGDCLGDIAARDLICAQKFNGLTVLPPLLTDEMIAQYTSALLAGTITSGWTFGAGAALQIPFAMQMAYRFNGIGVTQNVLYENQKLIANQFNSAIGKIQDSLSSTASALGKLQDVVNQNAQALNTLVKQLSSNFGAISSVLNDILSRLDKVEAEVQIDRLITGRLQSLQTYVTQQLIRAAEIRASANLAATKMSECVLGQSKRVDFCGKGYHLMSFPQSAPHGVVFLHVTYVPAQEKNFTCAPAICHDGKAHFPREGVFVSNGTHWFVTQRNFYEPQIITTDNTFVSGNCDVVIGIVNNTVYDPLQPELDSFKEELDKYFKNHTSPDVDLGDISGINASVVNIQKEIDRLNEVAKNLNESLIDLQELGKYEQYIKGGGGSDIDPYKEFGSSYQLLNFLPLDFFPDLNALVDTATALYEEELTGREHCSPHHTAIRQALVCWDELTKLIAWMSSNITSEQVRTIIVNHVNDTWGLKVRQSLWFHLSCLTFGQHTVQEFLVSFGVWIRTPAPYRPPNAPILSTLPEHTVIC

SEQ ID NO: 7036 - protein, 1364 aa, Artificial Sequence
  SARS-CoV-2/India/1-27/2020__EPI_ISL_413522 spike protein (1-1210)(I711C_T1076C) WhcAg construct
MFVFLVLLPLVSSQCVNLTTRTQLPPAYTNSFTRGVYYPDKVFRSSVLHSTQDLFLPFFSNVTWFHAIHVSGTNGTKRFDNPVLPFNDGVYFASTEKSNIIRGWIFGTTLDSKTQSLLIVNNATNVVIKVCEFQFCNDPFLGVYHKNNKSWMESEFRVYSSANNCTFEYVSQPFLMDLEGKQGNFKNLREFVFKNIDGYFKIYSKHTPINLVRDLPQGFSALEPLVDLPIGINITRFQTLLALHRSYLTPGDSSSGWTAGAAAYYVGYLQPRTFLLKYNENGTITDAVDCALDPLSETKCTLKSFTVEKGIYQTSNFRVQPTESIVRFPNITNLCPFGEVFNATRFASVYAWNRKRISNCVADYSVLYNSASFSTFKCYGVSPTKLNDLCFTNVYADSFVIRGDEVIQIAPGQTGKIADYNYKLPDDFTGCVIAWNSNNLDSKVGGNYNYLYRLFRKSNLKPFERDISTEIYQAGSTPCNGVEGFNCYFPLQSYGFQPTNGVGYQPYRVVVLSFELLHAPATVCGPKKSTNLVKNKCVNFNFNGLTGTGVLTESNKKFLPFQQFGRDIADTTDAVRDPQTLEILDITPCSFGGVSVITPGTNTSNQVAVLYQDVNCTEVPVAIHADQLTPTWRVYSTGSNVFQTRAGCLIGAEHVNNSYECDIPIGAGICASYQTQTNSPRRARSVASQSIIAYTMSLGAENSVAYSNNSCAIPTNFTISVTTEILPVSMTKTSVDCTMYICGDSTECSNLLLQYGSFCTQLNRALTGIAVEQDKNTQEVFAQVKQIYKTPPIKDFGGFNFSQILPDPSKPSKRSFIEDLLFNKVTLADAGFIKQYGDCLGDIAARDLICAQKFNGLTVLPPLLTDEMIAQYTSALLAGTITSGWTFGAGAALQIPFAMQMAYRFNGIGVTQNVLYENQKLIANQFNSAIGKIQDSLSSTASALGKLQDVVNQNAQALNTLVKQLSSNFGAISSVLNDILSRLDKVEAEVQIDRLITGRLQSLQTYVTQQLIRAAEIRASANLAATKMSECVLGQSKRVDFCGKGYHLMSFPQSAPHGVVFLHVTYVPAQEKNFTCAPAICHDGKAHFPREGVFVSNGTHWFVTQRNFYEPQIITTDNTFVSGNCDVVIGIVNNTVYDPLQPELDSFKEELDKYFKNHTSPDVDLGDISGINASVVNIQKEIDRLNEVAKNLNESLIDLQELGKYEQYIKGGGGSDIDPYKEFGSSYQLLNFLPLDFFPDLNALVDTATALYEEELTGREHCSPHHTAIRQALVCWDELTKLIAWMSSNITSEQVRTIIVNHVNDTWGLKVRQSLWFHLSCLTFGQHTVQEFLVSFGVWIRTPAPYRPPNAPILSTLPEHTVIC

SEQ ID NO: 7037 - protein, 1359 aa, Artificial Sequence
  SARS-CoV-2/pangolin/Guangxi/P4L/2017__EPI_ISL_410538 spike protein (1-1205)(I706C_T1071C) WhcAg construct
MFVFLFVLPLVSSQCVNLTTRTGIPPGYTNSSTRGVYYPDKVFRSSILHLTQDLFLPFFSNVTWFNTINYQGGFKKFDNPVLPFNDGVYFASTEKSNIIRGWIFGTTLDARTQSLLIVNNATNVVIKVCEFQFCTDPFLGVYYHNNNKTWVENEFRVYSSANNCTFEYISQPFLMDLEGKQGNFKNLREFVFKNVDGYFKIYSKHTPIDLVRDLPRGFAALEPLVDLPIGINITRFQTLLALHRSYLTPGNLESGWTTGAAAYYVGYLQQRTFLLSYNQNGTITDAVDCSLDPLSETKCTLKSLTVEKGIYQTSNFRVQPTISIVRFPNITNLCPFGEVFNASKFASVYAWNRKRISNCVADYSVLYNSTSFSTFKCYGVSPTKLNDLCFTNVYADSFVVKGDEVRQIAPGQTGVIADYNYKLPDDFTGCVIAWNSVKQDALTGGNYGYLYRLFRKSKLKPFERDISTEIYQAGSTPCNGQVGLNCYYPLERYGFHPTTGVNYQPFRVVVLSFELLNGPATVCGPKLSTTLVKDKCVNFNFNGLTGTGVLTTSKKQFLPFQQFGRDISDTTDAVRDPQTLEILDITPCSFGGVSVITPGTNTSNQVAVLYQDVNCTEVPMAIHAEQLTPAWRVYSAGANVFQTRAGCLVGAEHVNNSYECDIPVGAGICASYHSMSSLRSVNQRSIIAYTMSLGAENSVAYSNNSCAIPTNFTISVTTEILPVSMTKTSVDCTMYICGDSIECSNLLLQYGSFCTQLNRALTGIAVEQDKNTQEVFAQVKQIYKTPPIKDFGGFNFSQILPDPSKPSKRSFIEDLLFNKVTLADAGFIKQYGDCLGDIAARDLICAQKFNGLTVLPPLLTDEMIAQYTSALLAGTITSGWTFGAGAALQIPFAMQMAYRFNGIGVTQNVLYENQKLIANQFNSAIGKIQDSLSSTASALGKLQDVVNQNAQALNTLVKQLSSNFGAISSVLNDILSRLDKVEAEVQIDRLITGRLQSLQTYVTQQLIRAAEIRASANLAATKMSECVLGQSKRVDFCGKGYHLMSFPQSAPHGVVFLHVTYVPAQEKNFTCAPAICHEGKAHFPREGVFVSNGTHWFITQRNFYEPQIITTDNTFVSGSCDVVIGIVNNTVYDPLQPELDSFKEELDKYFKNHTSPDVDLGDISGINASVVNIQKEIDRLNEVAKNLNESPIDLQELGKYEQYIKGGGGSDIDPYKEFGSSYQLLNFLPLDFFPDLNALVDTATALYEEELTGREHCSPHHTAIRQALVCWDELTKLIAWMSSNITSEQVRTIIVNHVNDTWGLKVRQSLWFHLSCLTFGQHTVQEFLVSFGVWIRTPAPYRPPNAPILSTLPEHTVIC

SEQ ID NO: 7038 - protein, 1359 aa, Artificial Sequence
  SARS-CoV-2/pangolin/Guangxi/P5L/2017__EPI_ISL_410540 spike protein (1-1205)(I706C_T1071C) WhcAg construct
MFVFLFVLPLVSSQCVNLTTRTGIPPGYTNSSTRGVYYPDKVFRSSILHLTQDLFLPFFSNVTWFNTINYQGGFKKFDNPVLPFNDGVYFASTEKSNIIRGWIFGTTLDARTQSLLIVNNATNVVIKVCEFQFCTDPFLGVYYHNNNKTWVENEFRVYSSANNCTFEYISQPFLMDLEGKQGNFKNLREFVFKNVDGYFKIYSKHTPIDLVRDLPRGFAALEPLVDLPIGINITRFQTLLALHRSYLTPGKLESGWTTGAAAYYVGYLQQRTFLLSYNQNGTITDAVDCSLDPLSETKCTLKSLTVEKGIYQTSNFRVQPTISIVRFPNITNLCPFGEVFNASKFASVYAWNRKRISNCVADYSVLYNSTSFSTFKCYGVSPTKLNDLCFTNVYADSFVVKGDEVRQIAPGQTGVIADYNYKLPDDFTGCVIAWNSVKQDALTGGNYGYLYRLFRKSKLKPFERDISTEIYQAGSTPCNGQVGLNCYYPLERYGFHPTTGVNYQPFRVVVLSFELLNGPATVCGPKLSTTLVKDKCVNFNFNGLTGTGVLTTSKKQFLPFQQFGRDISDTTDAVRDPQTLEILDITPCSFGGVSVITPGTNTSNQVAVLYQDVNCTEVPMAIHAEQLTPAWRVYSAGANVFQTRAGCLVGAEHVNNSYECDIPVGAGICASYHSMSSFRSVNQRSIIAYTMSLGAENSVAYSNNSCAIPTNFTISVTTEILPVSMTKTSVDCTMYICGDSIECSNLLLQYGSFCTQLNRALTGIAVEQDKNTQEVFAQVKQIYKTPPIKDFGGFNFSQILPDPSKPSKRSFIEDLLFNKVTLADAGFIKQYGDCLGDIAARDLICAQKFNGLTVLPPLLTDEMIAQYTSALLAGTITSGWTFGAGAALQIPFAMQMAYRFNGIGVTQNVLYENQKLIANQFNSAIGKIQDSLSSTASALGKLQDVVNQNAQALNTLVKQLSSNFGAISSVLNDILSRLDKVEAEVQIDRLITGRLQSLQTYVTQQLIRAAEIRASANLAATKMSECVLGQSKRVDFCGKGYHLMSFPQSAPHGVVFLHVTYVPAQEKNFTCAPAICHEGKAHFPREGVFVSNGTHWFITQRNFYEPQIITTDNTFVSGSCDVVIGIVNNTVYDPLQPELDSFKEELDKYFKNHTSPDVDLGDISGINASVVNIQKEIDRLNEVAKNLNESLIDLQELGKYEQYIKGGGGSDIDPYKEFGSSYQLLNFLPLDFFPDLNALVDTATALYEEELTGREHCSPHHTAIRQALVCWDELTKLIAWMSSNITSEQVRTIIVNHVNDTWGLKVRQSLWFHLSCLTFGQHTVQEFLVSFGVWIRTPAPYRPPNAPILSTLPEHTVIC

SEQ ID NO: 7039 - protein, 1359 aa, Artificial Sequence
  SARS-CoV-2/pangolin/Guangxi/P5E/2017__EPI_ISL_410541 spike protein (1-1205)(I706C_T1071C) WhcAg construct
MFVFLFVLPLVSSQCVNLTTRTGIPPGYTNSSTRGVYYPDKVFRSSILHLTQDLFLPFFSNVTWFNTITYQGGSKKFDNPVLPFNDGVYFASTEKSNIIRGWIFGTTLDARTQSLLIVNNATNVVIKVCEFQFCTDPFLGVYYHNNNKTWVENEFRVYSSANNCTFEYISQPFLMDLEGKQGNFKNLREFVFKNVDGYFKIYSKHTPIDLVRDLPRGFAALEPLVDLPIGINITRFQTLLALHRSYLTPGKLESGWTTGAAAYYVGYLQQRTFLLSYNQNGTITDAVDCSLDPLSETKCTLKSLTVEKGIYQTSNFRVQPTISIVRFPNITNLCPFGEVFNASKFASVYAWNRKRISNCVADYSVLYNSTSFSTFKCYGVSPTKLNDLCFTNVYADSFVVKGDEVRQIAPGQTGVIADYNYKLPDDFTGCVIAWNSVKQDALTGDNYGYLYRLFRKSKLKPFERDISTEIYQAGSTPCNGQVGLNCYYPLERYGFHPTTGVNYQPFRVVVLSFELLNGPATVCGPKLSTTLVKDKCVNFNFNGLTGTGVLTTSKKQFLPFQQFGRDISDTTDAVRDPQTLEILDITPCSFGGVSVITPGTNTSNQVAVLYQDVNCTEVPMAIHAEQLTPAWRVYSAGANVFQTRAGCLVGAEHVNNSYECDIPVGAGICASYHSMSSFRSVNQRSIIAYTMSLGAENSVAYSNNSCAIPTNFTISVTTEILPVSMTKTSVDCTMYICGDSIECSNLLLQYGSFCTQLNRALTGIAVEQDKNTQEVFAQVKQIYKTPPIKDFGGFNFSQILPDPSKPSKRSFIEDLLFNKVTLADAGFIKQYGDCLGDIAARDLICAQKFNGLTVLPPLLTDEMIAQYTSALLAGTITSGWTFGAGAALQIPFAMQMAYRFNGIGVTQNVLYENQKLIANQFNSAIGKIQDSLSSTASALGKLQDVVNQNAQALNTLVKQLSSNFGAISSVLNDILSRLDKVEAEVQIDRLITGRLQSLQTYVTQQLIRAAEIRASANLAATKMSECVLGQSKRVDFCGKGYHLMSFPQSAPHGVVFLHVTYVPAQEKNFTCAPAICHEGKAHFPREGVFVSNGTHWFITQRNFYEPQIITTDNTFVSGSCDVVIGIVNNTVYDPLQPELDSFKEELDKYFKNHTSPDVDLGDISGINASVVNIQKEIDRLNEVAKNLNESLIDLQELGKYEQYIKGGGGSDIDPYKEFGSSYQLLNFLPLDFFPDLNALVDTATALYEEELTGREHCSPHHTAIRQALVCWDELTKLIAWMSSNITSEQVRTIIVNHVNDTWGLKVRQSLWFHLSCLTFGQHTVQEFLVSFGVWIRTPAPYRPPNAPILSTLPEHTVIC

SEQ ID NO: 7040 - protein, 1357 aa, Artificial Sequence
  SARS-CoV-2/pangolin/Guangxi/P1E/2017__EPI_ISL_410539 spike protein (1-1203)(I704C_T1069C) WhcAg construct
MFVFLFVLPLVSSQCVNLTTRTGIQPGYTNSSTRGVYYPDKVFRSSILHLTQDLFLPFFSNVTWFNTINYQGGFKKFDNPVLPFNDGVYFASTEKSNIIRGWIFGTTLDARTQSLLIVNNATNVVIKVCEFQFCTDPFLGVYYHNNNKTWVENEFRVYSSANNCTFEYISQPFLMDLEGKQGNFKNLREFVFKNVDGYFKIYSKHTPIDLVRDLPRGFAALEPLVDLPIGINITRFQTLLALHRSYLTPGKLESGWTTGAAAYYVGYLQQRTFLLSYNQNGTITDAVDCSLDPLSETKCTLKSLTVEKGIYQTSNFRVQPTISIVRFPNITNLCPFGEVFNASKFASVYAWNRKRISNCVADYSVLYNSTSFSTFKCYGVSPTKLNDLCFTNVYADSFVVKGDEVRQIAPGQTGVIADYNYKLPDDFTGCVIAWNSVKQDALTGGNYLYRLFRKSKLKPFERDISTEIYQAGSTPCNGQVGLNCYYPLERYGFHPTTGVNYQPFRVVVLSFELLNGPATVCGPKLSTTLVKDKCVNFNFNGLTGTGVLTTSKKQFLPFQQFGRDISDTTDAVRDPQTLEILDITPCSFGGVSVITPGTNTSNQVAVLYQDVNCTEVPMAIHAEQLTPAWRVYSAGANVFQTRAGCLVGAEHVNNSYECDIPVGAGICASYHSMSSLRSVNQRSIIAYTMSLGAENSVAYSNNSCAIPTNFTISVTTEILPVSMTKTSVDCTMYICGDSIECSNLLLQYGSFCTQLNRALTGIAVEQDKNTQEVFAQVKQIYKTPPIKDFGGFNFSQILPDPSKPSKRSFIEDLLFNKVTLADAGFIKQYGDCLGDIAARDLICAQKFNGLTVLPPLLTDEMIAQYTSALLAGTITSGWTFGAGAALQIPFAMQMAYRFNGIGVTQNVLYENQKLIANQFNSAIGKIQDSLSSTASALGKLQDVVNQNAQALNTLVKQLSSNFGAISSVLNDILSRLDKVEAEVQIDRLITGRLQSLQTYVTQQLIRAAEIRASANLAATKMSECVLGQSKRVDFCGKGYHLMSFPQSAPHGVVFLHVTYVPAQEKNFTCAPAICHEGKAHFPREGVFVSNGTHWFITQRNFYEPQIITTDNTFVSGSCDVVIGIVNNTVYDPLQPELDSFKEELDKYFKNHTSPDVDLGDISGINASVVNIQKEIDRLNEVAKNLNESLIDLQELGKYEQYIKGGGGSDIDPYKEFGSSYQLLNFLPLDFFPDLNALVDTATALYEEELTGREHCSPHHTAIRQALVCWDELTKLIAWMSSNITSEQVRTIIVNHVNDTWGLKVRQSLWFHLSCLTFGQHTVQEFLVSFGVWIRTPAPYRPPNAPILSTLPEHTVIC

SEQ ID NO: 7041 - protein, 1365 aa, Artificial Sequence
  SARS-CoV-2/Wuhan/WIV05/2019__EPI_ISL_402128 spike protein (1-1211)(I714C_Y1110C) WhcAg construct
MFVFLVLLPLVSSQCVNLTTRTQLPPAYTNSFTRGVYYPDKVFRSSVLHSTQDLFLPFFSNVTWFHAIHVSGTNGTKRFDNPVLPFNDGVYFASTEKSNIIRGWIFGTTLDSKTQSLLIVNNATNVVIKVCEFQFCNDPFLGVYYHKNNKSWMESEFRVYSSANNCTFEYVSQPFLMDLEGKQGNFKNLREFVFKNIDGYFKIYSKHTPINLVRDLPQGFSALEPLVDLPIGINITRFQTLLALHRSYLTPGDSSSGWTAGAAAYYVGYLQPRTFLLKYNENGTITDAVDCALDPLSETKCTLKSFTVEKGIYQTSNFRVQPTESIVRFPNITNLCPFGEVFNATRFASVYAWNRKRISNCVADYSVLYNSASFSTFKCYGVSPTKLNDLCFTNVYADSFVIRGDEVRQIAPGQTGKIADYNYKLPDDFTGCVIAWNSNNLDSKVGGNYNYLYRLFRKSNLKPFERDISTEIYQAGSTPCNGVEGFNCYFPLQSYGFQPTNGVGYQPYRVVVLSFELLHAPATVCGPKKSTNLVKNKCVNFNFNGLTGTGVLTESNKKFLPFQQFGRDIADTTDAVRDPQTLEILDITPCSFGGVSVITPGTNTSNQVAVLYQDVNCTEVPVAIHADQLTPTWRVYSTGSNVFQTRAGCLIGAEHVNNSYECDIPIGAGICASYQTQTNSPRRARSVASQSIIAYTMSLGAENSVAYSNNSIACPTNFTISVTTEILPVSMTKTSVDCTMYICGDSTECSNLLLQYGSFCTQLNRALTGIAVEQDKNTQEVFAQVKQIYKTPPIKDFGGFNFSQILPDPSKPSKRSFIEDLLFNKVTLADAGFIKQYGDCLGDIAARDLICAQKFNGLTVLPPLLTDEMIAQYTSALLAGTITSGWTFGAGAALQIPFAMQMAYRFNGIGVTQNVLYENQKLIANQFNSAIGKIQDSLSSTASALGKLQDVVNQNAQALNTLVKQLSSNFGAISSVLNDILSRLDKVEAEVQIDRLITGRLQSLQTYVTQQLIRAAEIRASANLAATKMSECVLGQSKRVDFCGKGYHLMSFPQSAPHGVVFLHVTYVPAQEKNFTTAPAICHDGKAHFPREGVFVSNGTHWFVTQRNFCEPQIITTDNTFVSGNCDVVIGIVNNTVYDPLQPELDSFKEELDKYFKNHTSPDVDLGDISGINASVVNIQKEIDRLNEVAKNLNESLIDLQELGKYEQYIKGGGGSDIDPYKEFGSSYQLLNFLPLDFFPDLNALVDTATALYEEELTGREHCSPHHTAIRQALVCWDELTKLIAWMSSNITSEQVRTIIVNHVNDTWGLKVRQSLWFHLSCLTFGQHTVQEFLVSFGVWIRTPAPYRPPNAPILSTLPEHTVIC

SEQ ID NO: 7042 - protein, 1361 aa, Artificial Sequence
  SARS-CoV-2/bat/Yunnan/RaTG13/2013__EPI_ISL_402131 spike protein (1-1207)(I710C_Y1106C) WhcAg construct
MFVFLVLLPLVSSQCVNLTTRTQLPPAYTNSSTRGVYYPDKVFRSSVLHLTQDLFLPFFSNVTWFHAIHVSGTNGIKRFDNPVLPFNDGVYFASTEKSNIIRGWIFGTTLDSKTQSLLIVNNATNVVIKVCEFQFCNDPFLGVYYHKNNKSWMESEFRVYSSANNCTFEYVSQPFLMDLEGKQGNFKNLREFVFKNIDGYFKIYSKHTPINLVRDLPPGFSALEPLVDLPIGINITRFQTLLALHRSYLTPGDSSSGWTAGAAAYYVGYLQPRTFLLKYNENGTITDAVDCALDPLSETKCTLKSFTVEKGIYQTSNFRVQPTDSIVRFPNITNLCPFGEVFNATTFASVYAWNRKRISNCVADYSVLYNSTSFSTFKCYGVSPTKLNDLCFTNVYADSFVITGDEVRQIAPGQTGKIADYNYKLPDDFTGCVIAWNSKHIDAKEGGNFNYLYRLFRKANLKPFERDISTEIYQAGSKPCNGQTGLNCYYPLYRYGFYPTDGVGHQPYRVVVLSFELLNAPATVCGPKKSTNLVKNKCVNFNFNGLTGTGVLTESNKKFLPFQQFGRDIADTTDAVRDPQTLEILDITPCSFGGVSVITPGTNASNQVAVLYQDVNCTEVPVAIHADQLTPTWRVYSTGSNVFQTRAGCLIGAEHVNNSYECDIPIGAGICASYQTQTNSRSVASQSIIAYTMSLGAENSVAYSNNSIACPTNFTISVTTEILPVSMTKTSVDCTMYICGDSTECSNLLLQYGSFCTQLNRALTGIAVEQDKNTQEVFAQVKQIYKTPPIKDFGGFNFSQILPDPSKPSKRSFIEDLLFNKVTLADAGFIKQYGDCLGDIAARDLICAQKFNGLTVLPPLLTDEMIAQYTSALLAGTITSGWTFGAGAALQIPFAMQMAYRFNGIGVTQNVLYENQKLIANQFNSAIGKIQDSLSSTASALGKLQDVVNQNAQALNTLVKQLSSNFGAISSVLNDILSRLDKVEAEVQIDRLITGRLQSLQTYVTQQLIRAAEIRASANLAATKMSECVLGQSKRVDFCGKGYHLMSFPQSAPHGVVFLHVTYVPAQEKNFTTAPAICHDGKAHFPREGVFVSNGTHWFVTQRNFCEPQIITTDNTFVSGSCDVVIGIVNNTVYDPLQPELDSFKEELDKYFKNHTSPDVDLGDISGINASVVNIQKEIDRLNEVAKNLNESLIDLQELGKYEQYIKGGGGSDIDPYKEFGSSYQLLNFLPLDFFPDLNALVDTATALYEEELTGREHCSPHHTAIRQALVCWDELTKLIAWMSSNITSEQVRTIIVNHVNDTWGLKVRQSLWFHLSCLTFGQHTVQEFLVSFGVWIRTPAPYRPPNAPILSTLPEHTVIC

SEQ ID NO: 7043 - protein, 1365 aa, Artificial Sequence
  SARS-CoV-2/Wuhan/HBCDC-HB-01/2019__EPI_ISL_402132 spike protein (1-1211)(I714C_Y1110C) WhcAg construct
MFVFLVLLPLVSSQCVNLTTRTQLPPAYTNSITRGVYYPDKVFRSSVLHSTQDLFLPFFSNVTWFHAIHVSGTNGTKRFDNPVLPFNDGVYFASTEKSNIIRGWIFGTTLDSKTQSLLIVNNATNVVIKVCEFQFCNDPFLGVYYHKNNKSWMESEFRVYSSANNCTFEYVSQPFLMDLEGKQGNFKNLREFVFKNIDGYFKIYSKHTPINLVRDLPQGFSALEPLVDLPIGINITRFQTLLALHRSYLTPGDSSSGWTAGAAAYYVGYLQPRTFLLKYNENGTITDAVDCALDPLSETKCTLKSFTVEKGIYQTSNFRVQPTESIVRFPNITNLCPFGEVFNATRFASVYAWNRKRISNCVADYSVLYNSASFSTFKCYGVSPTKLNDLCFTNVYADSFVIRGDEVRQIAPGQTGKIADYNYKLPDDFTGCVIAWNSNNLDSKVGGNYNYLYRLFRKSNLKPFERDISTEIYQAGSTPCNGVEGFNCYFPLQSYGFQPTNGVGYQPYRVVVLSFELLHAPATVCGPKKSTNLVKNKCVNFNFNGLTGTGVLTESNKKFLPFQQFGRDIADTTDAVRDPQTLEILDITPCSFGGVSVITPGTNTSNQVAVLYQDVNCTEVPVAIHADQLTPTWRVYSTGSNVFQTRAGCLIGAEHVNNSYECDIPIGAGICASYQTQTNSPRRARSVASQSIIAYTMSLGAENSVAYSNNSIACPTNFTISVTTEILPVSMTKTSVDCTMYICGDSTECSNLLLQYGSFCTQLNRALTGIAVEQDKNTQEVFAQVKQIYKTPPIKDFGGFNFSQILPDPSKPSKRSFIEDLLFNKVTLADAGFIKQYGDCLGDIAARDLICAQKFNGLTVLPPLLTDEMIAQYTSALLAGTITSGWTFGAGAALQIPFAMQMAYRFNGIGVTQNVLYENQKLIANQFNSAIGKIQDSLSSTASALGKLQDVVNQNAQALNTLVKQLSSNFGAISSVLNDILSRLDKVEAEVQIDRLITGRLQSLQTYVTQQLIRAAEIRASANLAATKMSECVLGQSKRVDFCGKGYHLMSFPQSAPHGVVFLHVTYVPAQEKNFTTAPAICHDGKAHFPREGVFVSNGTHWFVTQRNFCEPQIITTDNTFVSGNCDVVIGIVNNTVYDPLQPELDSFKEELDKYFKNHTSPDVDLGDISGINASVVNIQKEIDRLNEVAKNLNESLIDLQELGKYEQYIKGGGGSDIDPYKEFGSSYQLLNFLPLDFFPDLNALVDTATALYEEELTGREHCSPHHTAIRQALVCWDELTKLIAWMSSNITSEQVRTIIVNHVNDTWGLKVRQSLWFHLSCLTFGQHTVQEFLVSFGVWIRTPAPYRPPNAPILSTLPEHTVIC

SEQ ID NO: 7044 - protein, 1365 aa, Artificial Sequence
  SARS-CoV-2/Guangdong/20SF028/2020__EPI_ISL_403936 spike protein (1-1211)(I714C_Y1110C) WhcAg construct
MFVFLVLLPLVSSQCVNLTTRTQLPPAYTNSFTRGVYYPDKVFRSSVLYSTQDLFLPFFSNVTWFHAIHVSGTNGTKRFDNPVLPFNDGVYFASTEKSNIIRGWIFGTTLDSKTQSLLIVNNATNVVIKVCEFQFCNDPFLGVYYHKNNKSWMESEFRVYSSANNCTFEYVSQPFLMDLEGKQGNFKNLREFVFKNIDGYFKIYSKHTPINLVRDLPQGFSALEPLVDLPIGINITRFQTLLALHRSYLTPGDSSSGWTAGAAAYYVGYLQPRTFLLKYNENGTITDAVDCALDPLSETKCTLKSFTVEKGIYQTSNFRVQPTESIVRFPNITNLCPFGEVFNATRFASVYAWNRKRISNCVADYSVLYNSASFSTFKCYGVSPTKLNDLCFTNVYADSFVIRGDEVRQIAPGQTGKIADYNYKLPDDFTGCVIAWNSNNLDSKVGGNYNYLYRLFRKSNLKPFERDISTEIYQAGSTPCNGVEGFNCYFPLQSYGFQPTNGVGYQPYRVVVLSFELLHAPATVCGPKKSTNLVKNKCVNFNFNGLTGTGVLTESNKKFLPFQQFGRDIADTTDAVRDPQTLEILDITPCSFGGVSVITPGTNTSNQVAVLYQDVNCTEVPVAIHADQLTPTWRVYSTGSNVFQTRAGCLIGAEHVNNSYECDIPIGAGICASYQTQTNSPRRARSVASQSIIAYTMSLGAENSVAYSNNSIACPTNFTISVTTEILPVSMTKTSVDCTMYICGDSTECSNLLLQYGSFCTQLNRALTGIAVEQDKNTQEVFAQVKQIYKTPPIKDFGGFNFSQILPDPSKPSKRSFIEDLLFNKVTLADAGFIKQYGDCLGDIAARDLICAQKFNGLTVLPPLLTDEMIAQYTSALLAGTITSGWTFGAGAALQIPFAMQMAYRFNGIGVTQNVLYENQKLIANQFNSAIGKIQDSLSSTASALGKLQDVVNQNAQALNTLVKQLSSNFGAISSVLNDILSRLDKVEAEVQIDRLITGRLQSLQTYVTQQLIRAAEIRASANLAATKMSECVLGQSKRVDFCGKGYHLMSFPQSAPHGVVFLHVTYVPAQEKNFTTAPAICHDGKAHFPREGVFVSNGTHWFVTQRNFCEPQIITTDNTFVSGNCDVVIGIVNNTVYDPLQPELDSFKEELDKYFKNHTSPDVDLGDISGINASVVNIQKEIDRLNEVAKNLNESLIDLQELGKYEQYIKGGGGSDIDPYKEFGSSYQLLNFLPLDFFPDLNALVDTATALYEEELTGREHCSPHHTAIRQALVCWDELTKLIAWMSSNITSEQVRTIIVNHVNDTWGLKVRQSLWFHLSCLTFGQHTVQEFLVSFGVWIRTPAPYRPPNAPILSTLPEHTVIC

SEQ ID NO: 7045 - protein, 1365 aa, Artificial Sequence
  SARS-CoV-2/Shenzhen/SZTH-001/2020__EPI_ISL_406592 spike protein (1-1211)(I714C_Y1110C) WhcAg construct
MFVFLVLLPLVSSQCVNLTTRTQLPPAYTNSFTRGVYYPDKVFRSSVLHSTQDLFLPFFSNVTWFHAIHVSGTNGTKRFDNPVLPFNDGVYFASTEKSNIIRGWIFGTTLDSKTQSLLIVNNATNVVIKVCEFQFCNDPFLGVYYHKNNKSWMESEFRVYSSANNCTFEYVSQPFLMDLEGKQGNFKNLREFVFKNIDGYFKIYSKHTPINLVRDLPQGFSALEPLVDLPIGINITRFQTLLALHRSYLTPGDSSSGWTAGAAAYYVGYLQPRTFLLKYNENGTITDAVDCALDPLSETKCTLKSFTVEKGIYQTSNFRVQPTESIVRFPNITNLCPFGEVFNATRFASVYAWNRKRISNCVADYSVLYNSASFSTFKCYGVSPTKLNDLCFTNVYADSFVIRGDEVRQIAPGQTGKIADYNYKLPDDFTGCVIAWNSNNLDSKVGGNYNYLYRLFRKSNLKPFERDISTEIYQAGSTPCNGVEGFNCYFPLQSYGFQPTNGVGYQPYRVVVLSFELLHAPATVCGPKKSTNLVKNKCVNFNFNGLTGTGVLTESNKKFLPFQQFGRDIADTTDAVRDPQTLEILDITPCSFGGVSVITPGTNTSNQVAVLYQDVNCTEVPVAIHADQLTPTWRVYSTGSNVFQTRAGCLIGAEHVNNSYECDIPIGAGICASYQTQTNSPRRARSVASQSIIAYTMSLGAENSVAYSNNSIACPTNFTISVTTEILPVSMTKTSVDCTMYICGDSTECSNLLLQYGSFCTQLNRALTGIAVEQDKNTQEVFAQVKQIYKTPPIKDFGGFNFSQILPDPSKPSKRSFIEDLLFNKVTLADAGFIKQYGDCLGDIAARDLICAQKFNGLTVLPPLLTDEMIAQYTSALLAGTITSGWTFGAGAALQIPFAMQMAYRFNGIGVTQNVLYENQKLIANQFNSAIGKIQDSLSSTASALGKLQDVVNQNAQALNTLVKQLSSNFGAISSVLNDILSRLDKVEAEVQIDRLITGRLQSLQTYVTQQLIRAAEIRASANLAATKMSECVLGQSKRVDFCGKGYHLMSFPQSAPHGVVFLHVTYVPAQEKNFTTAPAICHDGKAHFPREGVFVSNGTHWFVTQRNFCEPQIITTDNTFVSGNCDVLIGIVNNTVYDPLQPELDSFKEELDKYFKNHTSPDVDLGDISGINASVVNIQKEIDRLNEVAKNLNESLIDLQELGKYEQYIKGGGGSDIDPYKEFGSSYQLLNFLPLDFFPDLNALVDTATALYEEELTGREHCSPHHTAIRQALVCWDELTKLIAWMSSNITSEQVRTIIVNHVNDTWGLKVRQSLWFHLSCLTFGQHTVQEFLVSFGVWIRTPAPYRPPNAPILSTLPEHTVIC

SEQ ID NO: 7046 - protein, 1365 aa, Artificial Sequence
  SARS-CoV-2/Shenzhen/SZTH-004/2020__EPI_ISL_406595 spike protein (1-1211)(I714C_Y1110C) WhcAg construct
MFVFLVLLPLVSSQCVNLTTRTQLPPAYTNSFTRGVYYPDKVFRSSVLHSTQDLFLPFFSNVTWFHAIHVSGTNGTKRFDNPVLPFNDGVYFASTEKSNIIRGWIFGTTLDSKTQSLLIVNNATNVVIKVCEFQFCNDPFLGVYYHKNNKSWMESEFRVYSSANNCTFEYVSQPFLMDLEGKQGNFKNLREFVFKNIDGYFKIYSKHTPINLVRDLPQGFSALEPLVDLPIGINITRFQTLLALHRSYLTPGDSSSGWTAGAAAYYVGYLQPRTFLLKYNENGTITDAVDCALDPLSETKCTLKSFTVEKGIYQTSNFRVQPTESIVRFPNITNLCPFGEVFNATRFASVYAWDRKRISNCVAYYSVLYNSASFSTFKCYGVSPTKLNDLCFTNVYADSFVIRGDEVRQIAPGQTGKIADYNYKLPDDFTGCVIAWNSNNLDSKVGGNYNYLYRLFRKSNLKPFERDISTEIYQAGSTPCNGVEGFNCYFPLQSYGFQPTNGVGYQPYRVVVLSFELLHAPATVCGPKKSTNLVKNKCVNFNFNGLTGTGVLTESNKKFLPFQQFGRDIADTTDAVRDPQTLEILDITPCSFGGVSVITPGTNTSNQVAVLYQDVNCTEVPVAIHADQLTPTWRVYSTGSNVFQTRAGCLIGAEHVNNSYECDIPIGAGICASYQTQTNSPRRARSVASQSIIAYTMSLGAENSVAYSNNSIACPTNFTISVTTEILPVSMTKTSVDCTMYICGDSTECSNLLLQYGSFCTQLNRALTGIAVEQDKNTQEVFAQVKQIYKTPPIKDFGGFNFSQILPDPSKPSKRSFIEDLLFNKVTLADAGFIKQYGDCLGDIAARDLICAQKFNGLTVLPPLLTDEMIAQYTSALLAGTITSGWTFGAGAALQIPFAMQMAYRFNGIGVTQNVLYENQKLIANQFNSAIGKIQDSLSSTASALGKLQDVVNQNAQALNTLVKQLSSNFGAISSVLNDILSRLDKVEAEVQIDRLITGRLQSLQTYVTQQLIRAAEIRASANLAATKMSECVLGQSKRVDFCGKGYHLMSFPQSAPHGVVFLHVTYVPAQEKNFTTAPAICHDGKAHFPREGVFVSNGTHWFVTQRNFCEPQIITTDNTFVSGNCDVVIGIVNNTVYDPLQPELDSFKEELDKYFKNHTSPDVDLGDISGINASVVNIQKEIDRLNEVAKNLNESLIDLQELGKYEQYIKGGGGSDIDPYKEFGSSYQLLNFLPLDFFPDLNALVDTATALYEEELTGREHCSPHHTAIRQALVCWDELTKLIAWMSSNITSEQVRTIIVNHVNDTWGLKVRQSLWFHLSCLTFGQHTVQEFLVSFGVWIRTPAPYRPPNAPILSTLPEHTVIC

SEQ ID NO: 7047 - protein, 1365 aa, Artificial Sequence
  SARS-CoV-2/France/IDF0372/2020__EPI_ISL_406596 spike protein (1-1211)(I714C_Y1110C) WhcAg construct
MFVFLVLLPLVSSQCVNLTTRTQLPPAYTNSFTRGVYYPDKVFRSSVLHSTQDLFLPFFSNVTWFHAIHVSGTNGTKRFDNPVLPFNDGVYFASTEKSNIIRGWIFGTTLDSKTQSLLIVNNATNVVIKVCEFQFCNDPFLGVYYHKNNKSWMESEFRVYSSANNCTFEYVSQPFLMDLEGKQGNFKNLREFVFKNIDGYFKIYSKHTPINLVRDLPQGFSALEPLVDLPIGINITRFQTLLALHRSYLTPGDSSSGWTAGAAAYYVGYLQPRTFLLKYNENGTITDAVDCALDPLSETKCTLKSFTVEKGIYQTSNFRVQPTESIVRFPNITNLCPFGEVFNATRFASVYAWNRKRISNCVADYSFLYNSASFSTFKCYGVSPTKLNDLCFTNVYADSFVIRGDEVRQIAPGQTGKIADYNYKLPDDFTGCVIAWNSNNLDSKVGGNYNYLYRLFRKSNLKPFERDISTEIYQAGSTPCNGVEGFNCYFPLQSYGFQPTNGVGYQPYRVVVLSFELLHAPATVCGPKKSTNLVKNKCVNFNFNGLTGTGVLTESNKKFLPFQQFGRDIADTTDAVRDPQTLEILDITPCSFGGVSVITPGTNTSNQVAVLYQDVNCTEVPVAIHADQLTPTWRVYSTGSNVFQTRAGCLIGAEHVNNSYECDIPIGAGICASYQTQTNSPRRARSVASQSIIAYTMSLGAENSVAYSNNSIACPTNFTISVTTEILPVSMTKTSVDCTMYICGDSTECSNLLLQYGSFCTQLNRALTGIAVEQDKNTQEVFAQVKQIYKTPPIKDFGGFNFSQILPDPSKPSKRSFIEDLLFNKVTLADAGFIKQYGDCLGDIAARDLICAQKFNGLTVLPPLLTDEMIAQYTSALLAGTITSGWTFGAGAALQIPFAMQMAYRFNGIGVTQNVLYENQKLIANQFNSAIGKIQDSLSSTASALGKLQDVVNQNAQALNTLVKQLSSNFGAISSVLNDILSRLDKVEAEVQIDRLITGRLQSLQTYVTQQLIRAAEIRASANLAATKMSECVLGQSKRVDFCGKGYHLMSFPQSAPHGVVFLHVTYVPAQEKNFTTAPAICHDGKAHFPREGVFVSNGTHWFVTQRNFCEPQIITTDNTFVSGNCDVVIGIVNNTVYDPLQPELDSFKEELDKYFKNHTSPDVDLGDISGINASVVNIQKEIDRLNEVAKNLNESLIDLQELGKYEQYIKGGGGSDIDPYKEFGSSYQLLNFLPLDFFPDLNALVDTATALYEEELTGREHCSPHHTAIRQALVCWDELTKLIAWMSSNITSEQVRTIIVNHVNDTWGLKVRQSLWFHLSCLTFGQHTVQEFLVSFGVWIRTPAPYRPPNAPILSTLPEHTVIC

SEQ ID NO: 7048 - protein, 1365 aa, Artificial Sequence
  SARS-CoV-2/Australia/VIC01/2020__EPI_ISL_406844 spike protein (1-1211)(I714C_Y1110C) WhcAg construct
MFVFLVLLPLVSSQCVNLTTRTQLPPAYTNSFTRGVYYPDKVFRSSVLHSTQDLFLPFFSNVTWFHAIHVSGTNGTKRFDNPVLPFNDGVYFASTEKSNIIRGWIFGTTLDSKTQSLLIVNNATNVVIKVCEFQFCNDPFLGVYYHKNNKSWMESEFRVYSSANNCTFEYVSQPFLMDLEGKQGNFKNLREFVFKNIDGYFKIYSKHTPINLVRDLPQGFSALEPLVDLPIGINITRFQTLLALHRRYLTPGDSSSGWTAGAAAYYVGYLQPRTFLLKYNENGTITDAVDCALDPLSETKCTLKSFTVEKGIYQTSNFRVQPTESIVRFPNITNLCPFGEVFNATRFASVYAWNRKRISNCVADYSVLYNSASFSTFKCYGVSPTKLNDLCFTNVYADSFVIRGDEVRQIAPGQTGKIADYNYKLPDDFTGCVIAWNSNNLDSKVGGNYNYLYRLFRKSNLKPFERDISTEIYQAGSTPCNGVEGFNCYFPLQSYGFQPTNGVGYQPYRVVVLSFELLHAPATVCGPKKSTNLVKNKCVNFNFNGLTGTGVLTESNKKFLPFQQFGRDIADTTDAVRDPQTLEILDITPCSFGGVSVITPGTNTSNQVAVLYQDVNCTEVPVAIHADQLTPTWRVYSTGSNVFQTRAGCLIGAEHVNNSYECDIPIGAGICASYQTQTNSPRRARSVASQSIIAYTMSLGAENSVAYSNNSIACPTNFTISVTTEILPVSMTKTSVDCTMYICGDSTECSNLLLQYGSFCTQLNRALTGIAVEQDKNTQEVFAQVKQIYKTPPIKDFGGFNFSQILPDPSKPSKRSFIEDLLFNKVTLADAGFIKQYGDCLGDIAARDLICAQKFNGLTVLPPLLTDEMIAQYTSALLAGTITSGWTFGAGAALQIPFAMQMAYRFNGIGVTQNVLYENQKLIANQFNSAIGKIQDSLSSTASALGKLQDVVNQNAQALNTLVKQLSSNFGAISSVLNDILSRLDKVEAEVQIDRLITGRLQSLQTYVTQQLIRAAEIRASANLAATKMSECVLGQSKRVDFCGKGYHLMSFPQSAPHGVVFLHVTYVPAQEKNFTTAPAICHDGKAHFPREGVFVSNGTHWFVTQRNFCEPQIITTDNTFVSGNCDVVIGIVNNTVYDPLQPELDSFKEELDKYFKNHTSPDVDLGDISGINASVVNIQKEIDRLNEVAKNLNESLIDLQELGKYEQYIKGGGGSDIDPYKEFGSSYQLLNFLPLDFFPDLNALVDTATALYEEELTGREHCSPHHTAIRQALVCWDELTKLIAWMSSNITSEQVRTIIVNHVNDTWGLKVRQSLWFHLSCLTFGQHTVQEFLVSFGVWIRTPAPYRPPNAPILSTLPEHTVIC

SEQ ID NO: 7049 - protein, 1365 aa, Artificial Sequence
  SARS-CoV-2/Germany/BavPat1/2020__EPI_ISL_406862 spike protein (1-1211)(I714C_Y1110C) WhcAg construct
MFVFLVLLPLVSSQCVNLTTRTQLPPAYTNSFTRGVYYPDKVFRSSVLHSTQDLFLPFFSNVTWFHAIHVSGTNGTKRFDNPVLPFNDGVYFASTEKSNIIRGWIFGTTLDSKTQSLLIVNNATNVVIKVCEFQFCNDPFLGVYYHKNNKSWMESEFRVYSSANNCTFEYVSQPFLMDLEGKQGNFKNLREFVFKNIDGYFKIYSKHTPINLVRDLPQGFSALEPLVDLPIGINITRFQTLLALHRSYLTPGDSSSGWTAGAAAYYVGYLQPRTFLLKYNENGTITDAVDCALDPLSETKCTLKSFTVEKGIYQTSNFRVQPTESIVRFPNITNLCPFGEVFNATRFASVYAWNRKRISNCVADYSVLYNSASFSTFKCYGVSPTKLNDLCFTNVYADSFVIRGDEVRQIAPGQTGKIADYNYKLPDDFTGCVIAWNSNNLDSKVGGNYNYLYRLFRKSNLKPFERDISTEIYQAGSTPCNGVEGFNCYFPLQSYGFQPTNGVGYQPYRVVVLSFELLHAPATVCGPKKSTNLVKNKCVNFNFNGLTGTGVLTESNKKFLPFQQFGRDIADTTDAVRDPQTLEILDITPCSFGGVSVITPGTNTSNQVAVLYQGVNCTEVPVAIHADQLTPTWRVYSTGSNVFQTRAGCLIGAEHVNNSYECDIPIGAGICASYQTQTNSPRRARSVASQSIIAYTMSLGAENSVAYSNNSIACPTNFTISVTTEILPVSMTKTSVDCTMYICGDSTECSNLLLQYGSFCTQLNRALTGIAVEQDKNTQEVFAQVKQIYKTPPIKDFGGFNFSQILPDPSKPSKRSFIEDLLFNKVTLADAGFIKQYGDCLGDIAARDLICAQKFNGLTVLPPLLTDEMIAQYTSALLAGTITSGWTFGAGAALQIPFAMQMAYRFNGIGVTQNVLYENQKLIANQFNSAIGKIQDSLSSTASALGKLQDVVNQNAQALNTLVKQLSSNFGAISSVLNDILSRLDKVEAEVQIDRLITGRLQSLQTYVTQQLIRAAEIRASANLAATKMSECVLGQSKRVDFCGKGYHLMSFPQSAPHGVVFLHVTYVPAQEKNFTTAPAICHDGKAHFPREGVFVSNGTHWFVTQRNFCEPQIITTDNTFVSGNCDVVIGIVNNTVYDPLQPELDSFKEELDKYFKNHTSPDVDLGDISGINASVVNIQKEIDRLNEVAKNLNESLIDLQELGKYEQYIKGGGGSDIDPYKEFGSSYQLLNFLPLDFFPDLNALVDTATALYEEELTGREHCSPHHTAIRQALVCWDELTKLIAWMSSNITSEQVRTIIVNHVNDTWGLKVRQSLWFHLSCLTFGQHTVQEFLVSFGVWIRTPAPYRPPNAPILSTLPEHTVIC

SEQ ID NO: 7050 - protein, 1365 aa, Artificial Sequence
  SARS-CoV-2/Wuhan/HBCDC-HB-02/2020__EPI_ISL_412978 spike protein (1-1211)(I714C_Y1110C) WhcAg construct
MFVFLVLLPLVSSQCVNLTTRTQLPPAYTNSFTRGVYYPDKVFRSSVLHSTQDLFLPFFSNVTWFHAIHVSGTNGTKRFDNPVLPFNDGVYFASTEKSNIIRGWIFGTTLDSKTQSLLIVNNATNVVIKVCEFQFCNDPFLGVYYHKNNKSWMESEFRVYSSANNCTFEYVSQPFLMDLEGKQGNFKNLREFVFKNIDGYFKIYSKHTPINLVRDLPQGFSALEPLVDLPIGINITRFQTLLALHRSYLTPGDSSSGWTAGAAAYYVGYLQPRTFLLKYNENGTITDAVDCALDPLSETKCTLKSFTVEKGIYQTSNFRVQPTESIVRFPNITNLCPFGEVFNATRFASVYAWNRKRISNCVADYSVLYNSASFSTFKCYGVSPTKLNDLCFTNVYADSFVIRGDEVRQIAPGQTGKIADYNYKLPDDFTGCVIAWNSNNLDSKVGGNYNYLYRLFRKSNLKPFERDISTEIYQAGSTPCNGVEGFNCYFPLQSYGFQPTNGVGYQPYRVVVLSFELLHAPATVCGPKKSTNLVKNKCVNFNFNGLTGTGVLTESNKKFLPFQQFGRDIADTTDAVRDPQTLEILDITPCSFGGVSVITPGTNTSNQVAVLYQDVNCTEVPVAIHADQLTPTWRVYSTGSNVFQTRAGCLIGAEHVNNSYECDIPIGAGICASYQTQTNSPRRARSVASQSIIAYTMSLGAENSVAYSNNSIACPTNFTISVTTEILPVSMTKTSVDCTMYICGDSTECSNFLLQYGSFCTQLNRALTGIAVEQDKNTQEVFAQVKQIYKTPPIKDFGGFNFSQILPDPSKPSKRSFIEDLLFNKVTLADAGFIKQYGDCLGDIAARDLICAQKFNGLTVLPPLLTDEMIAQYTSALLAGTITSGWTFGAGAALQIPFAMQMAYRFNGIGVTQNVLYENQKLIANQFNSAIGKIQDSLSSTASALGKLQDVVNQNAQALNTLVKQLSSNFGAISSVLNDILSRLDKVEAEVQIDRLITGRLQSLQTYVTQQLIRAAEIRASANLAATKMSECVLGQSKRVDFCGKGYHLMSFPQSAPHGVVFLHVTYVPAQEKNFTTAPAICHDGKAHFPREGVFVSNGTHWFVTQRNFCEPQIITTDNTFVSGNCDVVIGIVNNTVYDPLQPELDSFKEELDKYFKNHTSPDVDLGDISGINASVVNIQKEIDRLNEVAKNLNESLIDLQELGKYEQYIKGGGGSDIDPYKEFGSSYQLLNFLPLDFFPDLNALVDTATALYEEELTGREHCSPHHTAIRQALVCWDELTKLIAWMSSNITSEQVRTIIVNHVNDTWGLKVRQSLWFHLSCLTFGQHTVQEFLVSFGVWIRTPAPYRPPNAPILSTLPEHTVIC

SEQ ID NO: 7051 - protein, 1365 aa, Artificial Sequence
  SARS-CoV-2/Australia/QLD02/2020__EPI_ISL_407896 spike protein (1-1211)(I714C_Y1110C) WhcAg construct
MFVFLVLLPLVSSQCVNLTTRTQLPPAYTNSFTRGVYYPDKVFRSSVLHSTQDLFLPFFSNVTWFHAIHVSGTNGTKRFDNPVLPFNDGVYFASTEKSNIIRGWIFGTTLDSKTQSLLIVNNATNVVIKVCEFQFCNDPFLGVYYHKNNKSWMESEFRVYSSANNCTFEYVSQPFLMDLEGKQGNFKNLREFVFKNIDGYFKIYSKHTPINLVRDLPQGFSALEPLVDLPIGINITRFQTLLALHRSYLTPGDSSSGWTAGAAAYYVGYLQPRTFLLKYNENGTITDAVDCALDPLSETKCTLKSFTVEKGIYQTSNFRVQPTESIVRFPNITNLCPFGEVFNATRFASVYAWNRKRISNCVADYSVLYNSASFSTFKCYGVSPTKLNDLCFTNVYADSFVIRGDEVRQIAPGQTGKIADYNYKLPDDFTGCVIAWNSNNLDSKVGGNYNYLYRLFRKSNLKPFERDISTEIYQAGSTPCNGVEGFNCYFPLQSYGFQPTNGVGYQPYRVVVLSFELLHAPATVCGPKKSTNLVKNKCVNFNFNGLTGTGVLTESNKKFLPFQQFGRDIADTTDAVRDPQTLEILDITPCSFGGVSVITPGTNTSNQVAVLYQDVNCTEVPVAIHADQLTPTWRVYSTGSNVFQTRAGCLIGAEHVNNSYECDIPIGAGICASYQTQTNSPRRARSVASQSIIAYTMSLGAENSVAYSNNSIACPTNFTISVTTEILPVSMTKTSVDCTMYICGDSTECSNLLLQYGSFCTQLNRALTGIAVEQDKNTQEVFAQVKQIYKTPPIKDFGGFNFSQILPDPSKPSKRSFIEDLLFNKVTLADAGFIKQYGDCLGDIAARDLICAQKFNGLTVLPPLLTDEMIAQYTSALLAGTITSGWTFGAGAALQIPFAMQMAYRFNGIGVTQNVLYENQKLIANQFNSAIGKIQDSLSSTASALGKLQDVVNQNAQALNTLVKQLSSNFGAISSVLNDILSRLDKVEAEVQIDRLITGRLQSLQTYVTQQLIRAAEIRASANLAATKMSECVLGQSKRVDFCGKGYHLMSFPQSAPHGVVFLHVTYVPAQEKNFTTAPAICHDGKAHFPREGVFVSNGTHWFVTQRNFCEPQIITTDNTFVSGNCDVVIGIVNNTVYDPLQLELDSFKEELDKYFKNHTSPDVDLGDISGINASVVNIQKEIDRLNEVAKNLNESLIDLQELGKYEQYIKGGGGSDIDPYKEFGSSYQLLNFLPLDFFPDLNALVDTATALYEEELTGREHCSPHHTAIRQALVCWDELTKLIAWMSSNITSEQVRTIIVNHVNDTWGLKVRQSLWFHLSCLTFGQHTVQEFLVSFGVWIRTPAPYRPPNAPILSTLPEHTVIC

SEQ ID NO: 7052 - protein, 1365 aa, Artificial Sequence
  SARS-CoV-2/India/1-31/2020__EPI_ISL_413523 spike protein (1-1211)(I714C_Y1110C) WhcAg construct
MFVFLVLLPLVSSQCVNLTTRTQLPPAYTNSFTRGVYYPDKVFRSSVLHSTQDLFLPFFSNVTWFHAIHVSGTNGTKRFDNPVLPFNDGVYFASTEKSNIIRGWIFGTTLDSKTQSLLIVNNATNVVIKVCEFQFCNDPFLGVYYHKNNKSWMESEFRVYSSANNCTFEYVSQPFLMDLEGKQGNFKNLREFVFKNIDGYFKIYSKHTPINLVRDLPQGFSALEPLVDLPIGINITRFQTLLALHRSYLTPGDSSSGWTAGAAAYYVGYLQPRTFLLKYNENGTITDAVDCALDPLSETKCTLKSFTVEKGIYQTSNFRVQPTESIVRFPNITNLCPFGEVFNATRFASVYAWNRKRISNCVADYSVLYNSASFSTFKCYGVSPTKLNDLCFTNVYADSFVIRGDEVRQIAPGQTGKIADYNYKLPDDFTGCVIAWNSNNLDSKVGGNYNYLYRLFRKSNLKPFERDISTEIYQAGSTPCNGVEGFNCYFPLQSYGFQPTNGVGYQPYRVVVLSFELLHAPATVCGPKKSTNLVKNKCVNFNFNGLTGTGVLTESNKKFLPFQQFGRDIADTTDAVRDPQTLEILDITPCSFGGVSVITPGTNTSNQVAVLYQDVNCTEVPVAIHADQLTPTWRVYSTGSNVFQTRAGCLIGAEHVNNSYECDIPIGAGICASYQTQTNSPRRARSVASQSIIAYTMSLGAENSVAYSNNSIACPTNFTISVTTEILPVSMTKTSVDCTMYICGDSTECSNLLLQYGSFCTQLNRALTGIAVEQDKNTQEVFAQVKQIYKTPPIKDFGGFNFSQILPDPSKPSKRSFIEDLLFNKVTLADAGFIKQYGDCLGDIAARDLICAQKFNGLTVLPPLLTDEMIAQYTSALLAGTITSGWTFGAGAALQIPFAMQMAYRFNGIGVTQNVLYENQKLIANQFNSVIGKIQDSLSSTASALGKLQDVVNQNAQALNTLVKQLSSNFGAISSVLNDILSRLDKVEAEVQIDRLITGRLQSLQTYVTQQLIRAAEIRASANLAATKMSECVLGQSKRVDFCGKGYHLMSFPQSAPHGVVFLHVTYVPAQEKNFTTAPAICHDGKAHFPREGVFVSNGTHWFVTQRNFCEPQIITTDNTFVSGNCDVVIGIVNNTVYDPLQPELDSFKEELDKYFKNHTSPDVDLGDISGINASVVNIQKEIDRLNEVAKNLNESLIDLQELGKYEQYIKGGGGSDIDPYKEFGSSYQLLNFLPLDFFPDLNALVDTATALYEEELTGREHCSPHHTAIRQALVCWDELTKLIAWMSSNITSEQVRTIIVNHVNDTWGLKVRQSLWFHLSCLTFGQHTVQEFLVSFGVWIRTPAPYRPPNAPILSTLPEHTVIC

SEQ ID NO: 7053 - protein, 1365 aa, Artificial Sequence
  SARS-CoV-2/Guangdong/GD2020087-P0008/2020__EPI_ISL_413863 spike protein (1-1211)(I714C_Y1110C) WhcAg construct
MFVFLVLLPLVSSQCVNLTTRTQLPPAYTNSFTRGVYYPDKVFRSSVLHSTQDLFLPFFSNVTWFHAIHVSGTNGTKRFDNPVLPFNDGVYFASTEKSNIIRGWIFGTTLDSKTQSLLIVNNATNVVIKVCEFQFCNDPFLGVYYHKNNKSWMESEFRVYSSANNCTFEYVSQPFLMDLEGKQGNFKNLREFVFKNIDGYFKIYSKHTPINLVRDLPQGFSALEPLVDLPIGINITRFQTLLALHRSYLTPGDSSSGWTAGAAAYYVGYLQPRTFLLKYNENGTITDAVDCALDPLSETKCTLKSFTVEKGIYQTSNFRVQPTESIVRFPNITNLCPFGEVFNATRFASVYAWNRKRISNCVADYSVLYNSASFSTFKCYGVSPTKLNDLCFTNVYADSFVIRGDEVREIAPGQTGKIADYNYKLPDDFTGCVIAWNSNNLDSKVGGNYNYLYRLFRKSNLKPFERDISTEIYQAGSTPCNGVEGFNCYFPLQSYGFQPTNGVGYQPYRVVVLSFELLHAPATVCGPKKSTNLVKNKCVNFNFNGLTGTGVLTESNKKFLPFQQFGRDIADTTDAVRDPQTLEILDITPCSFGGVSVITPGTNTSNQVAVLYQDVNCTEVPVAIHADQLTPTWRVYSTGSNVFQTRAGCLIGAEHVNNSYECDIPIGAGICASYQTQTNSPRRARSVASQSIIAYTMSLGAENSVAYSNNSIACPTNFTISVTTEILPVSMTKTSVDCTMYICGDSTECSNLLLQYGSFCTQLNRALTGIAVEQDKNTQEVFAQVKQIYKTPPIKDFGGFNFSQILPDPSKPSKRSFIEDLLFNKVTLADAGFIKQYGDCLGDIAARDLICAQKFNGLTVLPPLLTDEMIAQYTSALLAGTITSGWTFGAGAALQIPFAMQMAYRFNGIGVTQNVLYENQKLIANQFNSAIGKIQDSLSSTASALGKLQDVVNQNAQALNTLVKQLSSNFGAISSVLNDILSRLDKVEAEVQIDRLITGRLQSLQTYVTQQLIRAAEIRASANLAATKMSECVLGQSKRVDFCGKGYHLMSFPQSAPHGVVFLHVTYVPAQEKNFTTAPAICHDGKAHFPREGVFVSNGTHWFVTQRNFCEPQIITTDNTFVSGNCDVVIGIVNNTVYDPLQPELDSFKEELDKYFKNHTSPDVDLGDISGINASVVNIQKEIDRLNEVAKNLNESLIDLQELGKYEQYIKGGGGSDIDPYKEFGSSYQLLNFLPLDFFPDLNALVDTATALYEEELTGREHCSPHHTAIRQALVCWDELTKLIAWMSSNITSEQVRTIIVNHVNDTWGLKVRQSLWFHLSCLTFGQHTVQEFLVSFGVWIRTPAPYRPPNAPILSTLPEHTVIC

SEQ ID NO: 7054 - protein, 1365 aa, Artificial Sequence
  SARS-CoV-2/Sweden/01/2020__EPI_ISL_411951 spike protein (1-1211)(I714C_Y1110C) WhcAg construct
MFVFLVLLPLVSSQCVNLTTRTQLPPAYTNSFTRGVYYPDKVFRSSVLHSTQDLFLPFFSNVTWFHAIHVSGTNGTKRFDNPVLPFNDGVYFASTEKSNIIRGWIFGTTLDSKTQSLLIVNNATNVVIKVCEFQFCNDPFLGVYYHKNNKSWMESEFRVYSSANNCTFEYVSQPFLMDLEGKQGNFKNLREFVFKNIDGYFKIYSKHTPINLVRDLPQGFSALEPLVDLPIGINITRFQTLLALHRSYLTPGDSSSGWTAGAAAYYVGYLQPRTFLLKYNENGTITDAVDCALDPLSETKCTLKSFTVEKGIYQTSNFRVQPTESIVRFPNITNLCPFGEVFNATRFASVYAWNRKRISNCVADYSVLYNSASFSTFKCYGVSPTKLNDLCFTNVYADSFVIRGDEVRQIAPGQTGKIADYNYKLPDDFTGCVIAWNSNNLDSKVGGNYNYLYRLFRKSNLKPFERDISTEIYQAGSTPCNGVEGFNCYFPLQSYGFQPTNGVGYQPYRVVVLSFELLHAPATVCGPKKSTNLVKNKCVNFNFNGLTGTGVLTESNKKFLPFQQFGRDIADTTDAVRDPQTLEILDITPCSFGGVSVITPGTNTSNQVAVLYQDVNCTEVPVAIHADQLTPTWRVYSTGSNVFQTRAGCLIGAEHVNNSYECDIPIGAGICASYQTQTNSPRRARSVASQSIIAYTMSLGAENSVAYSNNSIACPTNFTISVTTEILPVSMTKTSVDCTMYICGDSTECSNLLLQYGSFCTQLNRALTGIAVEQDKNTQEVFAQVKQIYKTPPIKDCGGFNFSQILPDPSKPSKRSFIEDLLFNKVTLADAGFIKQYGDCLGDIAARDLICAQKFNGLTVLPPLLTDEMIAQYTSALLAGTITSGWTFGAGAALQIPFAMQMAYRFNGIGVTQNVLYENQKLIANQFNSAIGKIQDSLSSTASALGKLQDVVNQNAQALNTLVKQLSSNFGAISSVLNDILSRLDKVEAEVQIDRLITGRLQSLQTYVTQQLIRAAEIRASANLAATKMSECVLGQSKRVDFCGKGYHLMSFPQSAPHGVVFLHVTYVPAQEKNFTTAPAICHDGKAHFPREGVFVSNGTHWFVTQRNFCEPQIITTDNTFVSGNCDVVIGIVNNTVYDPLQPELDSFKEELDKYFKNHTSPDVDLGDISGINASVVNIQKEIDRLNEVAKNLNESLIDLQELGKYEQYIKGGGGSDIDPYKEFGSSYQLLNFLPLDFFPDLNALVDTATALYEEELTGREHCSPHHTAIRQALVCWDELTKLIAWMSSNITSEQVRTIIVNHVNDTWGLKVRQSLWFHLSCLTFGQHTVQEFLVSFGVWIRTPAPYRPPNAPILSTLPEHTVIC

SEQ ID NO: 7055 - protein, 1365 aa, Artificial Sequence
  SARS-CoV-2/Tianmen/HBCDC-HB-07/2020__EPI_ISL_412983 spike protein (1-1211)(I714C_Y1110C) WhcAg construct
MFVFLVLLPLVSSQCVNLTTRTQLPPAYTNSFTRGVYYPDKVFRSSVLHSTQDLFLPFFSNVTWFHAIHVSGTNGTKRFDNPVLPFNDGVYFASTEKSNIIRGWIFGTTLDSKTQSLLIVNNATNVVIKVCEFQFCNDPFLGVYYHKNNKSWMESEFRVYSSANNCTFEYVSQPFLMDLEGKQGNFKNLREFVFKNIDGYFKIYSKHTPINLVRDLPQGFSALEPLVDLPIGINITRFQTLLALHRSYLTPGDSSSGWTAGAAAYYVGYLQPRTFLLKYNENGTITDAVDCALDPLSETKCTLKSFTVEKGIYQTSNFRVQPTESIVRFPNITNLCPFGEVFNATRFASVYAWNRKRISNCVADYSVLYNSASFSTFKCYGVSPTKLNDLCFTNVYADSFVIRGDEVRQIAPGQTGKIADYNYKLPDDFTGCVIAWNSNNLDSKVGGNYNYLYRLFRKSNLKPFERDISTEIYQAGSTPCNGVEGFNCYFPLQSYGFQPTNGVGYQPYRVVVLSFELLHAPATVCGPKKSTNLVKNKCVNFNFNGLTGTGVLTESNKKFLPFQQFGRDIADTTDAVRDPQTLEILDITPCSFGGVSVITPGTNTSNQVAVLYQDLNCTEVPVAIHADQLTPTWRVYSTGSNVFQTRAGCLIGAEHVNNSYECDIPIGAGICASYQTQTNSPRRARSVASQSIIAYTMSLGAENSVAYSNNSIACPTNFTISVTTEILPVSMTKTSVDCTMYICGDSTECSNLLLQYGSFCTQLNRALTGIAVEQDKNTQEVFAQVKQIYKTPPIKDFGGFNFSQILPDPSKPSKRSFIEDLLFNKVTLADAGFIKQYGDCLGDIAARDLICAQKFNGLTVLPPLLTDEMIAQYTSALLAGTITSGWTFGAGAALQIPFAMQMAYRFNGIGVTQNVLYENQKLIANQFNSAIGKIQDSLSSTASALGKLQDVVNQNAQALNTLVKQLSSNFGAISSVLNDILSRLDKVEAEVQIDRLITGRLQSLQTYVTQQLIRAAEIRASANLAATKMSECVLGQSKRVDFCGKGYHLMSFPQSAPHGVVFLHVTYVPAQEKNFTTAPAICHDGKAHFPREGVFVSNGTHWFVTQRNFCEPQIITTDNTFVSGNCDVVIGIVNNTVYDPLQPELDSFKEELDKYFKNHTSPDVDLGDISGINASVVNIQKEIDRLNEVAKNLNESLIDLQELGKYEQYIKGGGGSDIDPYKEFGSSYQLLNFLPLDFFPDLNALVDTATALYEEELTGREHCSPHHTAIRQALVCWDELTKLIAWMSSNITSEQVRTIIVNHVNDTWGLKVRQSLWFHLSCLTFGQHTVQEFLVSFGVWIRTPAPYRPPNAPILSTLPEHTVIC

SEQ ID NO: 7056 - protein, 1365 aa, Artificial Sequence
  SARS-CoV-2/Hong Kong/case42_VM20002493/2020__EPI_ISL_414527 spike protein (1-1211)(I714C_Y1110C) WhcAg construct
MFVFLVLLPLVSSQCVNLTTRTQLPPAYTNSFTRGVYYPDKVFRSSVLHSTQDLFLPFFSNVTWFHAIHVSGTNGTKRFDNPVLPFNDGVYFASTEKSNIIRGWIFGTTLDSKTQSLLIVNNATNVVIKVCEFQFCNDPFLGVYYHKNNKSWMESEFRVYSSANNCTFEYVSQPFLMDLEGKQGNFKNLREFVFKNIDGYFKIYSKHTPINLVRDLPQGFSALEPLVDLPIGINITRFQTLLALHRSYLTPGDSSSGWTAGAAAYYVGYLQPRTFLLKYNENGTITDAVDCALDPLSETKCTLKSFTVEKGIYQTSNFRVQPTESIVRFPNITNLCPFGEVFNATRFASVYAWNRKRISNCVADYSVLYNSASFSTFKCYGVSPTKLNDLCFTNVYADSFVIRGDEVRQIAPGQTGKIADYNYKLPDDFTGCVIAWNSNNLDSKVGGNYNYLYRLFRKSNLKPFERDISTEIYQAGSTPCNGVEGFNCYFPLQSYGFQPTNGVGYQPYRVVVLSFELLHAPATVCGPKKSTNLVKNKCVNFNFNGLTGTGVLTESNKKFLPFQQFGRDIADTTDAVRDPQTLEILDITPCSFGGVSVITPGTNTSNQVAVLYQDVNCTEVPVAIHADQLTPTWRVYSTGSNVFQTRAGCLIGAEHVNNSYECDIPIGAGICASYQTQTNSPRRARSVASQSIIAYTMSLGAENSVAYSNNSIACPTNFAISVTTEILPVSMTKTSVDCTMYICGDSTECSNLLLQYGSFCTQLNRALTGIAVEQDKNTQEVFAQVKQIYKTPPIKDFGGFNFSQILPDPSKPSKRSFIEDLLFNKVTLADAGFIKQYGDCLGDIAARDLICAQKFNGLTVLPPLLTDEMIAQYTSALLAGTITSGWTFGAGAALQIPFAMQMAYRFNGIGVTQNVLYENQKLIANQFNSAIGKIQDSLSSTASALGKLQDVVNQNAQALNTLVKQLSSNFGAISSVLNDILSRLDKVEAEVQIDRLITGRLQSLQTYVTQQLIRAAEIRASANLAATKMSECVLGQSKRVDFCGKGYHLMSFPQSAPHGVVFLHVTYVPAQEKNFTTAPAICHDGKAHFPREGVFVSNGTHWFVTQRNFCEPQIITTDNTFVSGNCDVVIGIVNNTVYDPLQPELDSFKEELDKYFKNHTSPDVDLGDISGINASVVNIQKEIDRLNEVAKNLNESLIDLQELGKYEQYIKGGGGSDIDPYKEFGSSYQLLNFLPLDFFPDLNALVDTATALYEEELTGREHCSPHHTAIRQALVCWDELTKLIAWMSSNITSEQVRTIIVNHVNDTWGLKVRQSLWFHLSCLTFGQHTVQEFLVSFGVWIRTPAPYRPPNAPILSTLPEHTVIC

SEQ ID NO: 7057 - protein, 1365 aa, Artificial Sequence
  SARS-CoV-2/USA/CruiseA-23/2020__EPI_ISL_414482 spike protein (1-1211)(I714C_Y1110C) WhcAg construct
MFVFLVLLPLVSSQCVNLTTRTQLPPAYTNSFTRGVYYPDKVFRSSVLHSTQDLFLPFFSNVTWFHAIHVSGTNGTKRFDNPVLPFNDGVYFASTEKSNIIRGWIFGTTLDSKTQSLLIVNNATNVVIKVCEFQFCNDPFLGVYYHKNNKSWMESEFRVYSSANNCTFEYVSQPFLMDLEVKQGNFKNLREFVFKNIDGYFKIYSKHTPINLVRDLPQGFSALEPLVDLPIGINITRFQTLLALHRSYLTPGDSSSGWTAGAAAYYVGYLQPRTFLLKYNENGTITDAVDCALDPLSETKCTLKSFTVEKGIYQTSNFRVQPTESIVRFPNITNLCPFGEVFNATRFASVYAWNRKRISNCVADYSVLYNSASFSTFKCYGVSPTKLNDLCFTNVYADSFVIRGDEVRQIAPGQTGKIADYNYKLPDDFTGCVIAWNSNNLDSKVGGNYNYLYRLFRKSNLKPFERDISTEIYQAGSTPCNGVEGFNCYFPLQSYGFQPTNGVGYQPYRVVVLSFELLHAPATVCGPKKSTNLVKNKCVNFNFNGLTGTGVLTESNKKFLPFQQFGRDIADTTDAVRDPQTLEILDITPCSFGGVSVITPGTNTSNQVAVLYQDVNCTEVPVAIHADQLTPTWRVYSTGSNVFQTRAGCLIGAEHVNNSYECDIPIGAGICASYQTQTNSPRRARSVASQSIIAYTMSLGAENSVAYSNNSIACPTNFTISVTTEILPVSMTKTSVDCTMYICGDSTECSNLLLQYGSFCTQLNRALTGIAVEQDKNTQEVFAQVKQIYKTPPIKDFGGFNFSQILPDPSKPSKRSFIEDLLFNKVTLADAGFIKQYGDCLGDIAARDLICAQKFNGLTVLPPLLTDEMIAQYTSALLAGTITSGWTFGAGAALQIPFAMQMAYRFNGIGVTQNVLYENQKLIANQFNSAIGKIQDSLSSTASALGKLQDVVNQNAQALNTLVKQLSSNFGAISSVLNDILSRLDKVEAEVQIDRLITGRLQSLQTYVTQQLIRAAEIRASANLAATKMSECVLGQSKRVDFCGKGYHLMSFPQSAPHGVVFLHVTYVPAQEKNFTTAPAICHDGKAHFPREGVFVSNGTHWFVTQRNFCEPQIITTDNTFVSGNCDVVIGIVNNTVYDPLQPELDSFKEELDKYFKNHTSPDVDLGDISGINASVVNIQKEIDRLNEVAKNLNESLIDLQELGKYEQYIKGGGGSDIDPYKEFGSSYQLLNFLPLDFFPDLNALVDTATALYEEELTGREHCSPHHTAIRQALVCWDELTKLIAWMSSNITSEQVRTIIVNHVNDTWGLKVRQSLWFHLSCLTFGQHTVQEFLVSFGVWIRTPAPYRPPNAPILSTLPEHTVIC

SEQ ID NO: 7058 - protein, 1365 aa, Artificial Sequence
  SARS-CoV-2/Hong Kong/case85_VM20002868/2020__EPI_ISL_414519 spike protein (1-1211)(I714C_Y1110C) WhcAg construct
MFVFLVLVPLVSSQCVNLTTRTQLPPAYTNSFTRGVYYPDKVFRSSVLHSTQDLFLPFFSNVTWFHAIHVSGTNGTKRFDNPVLPFNDGVYFASTEKSNIIRGWIFGTTLDSKTQSLLIVNNATNVVIKVCEFQFCNDPFLGVYYHKNNKSWMESEFRVYSSANNCTFEYVSQPFLMDLEGKQGNFKNLREFVFKNIDGYFKIYSKHTPINLVRDLPQGFSALEPLVDLPIGINITRFQTLLALHRSYLTPGDSSSGWTAGAAAYYVGYLQPRTFLLKYNENGTITDAVDCALDPLSETKCTLKSFTVEKGIYQTSNFRVQPTESIVRFPNITNLCPFGEVFNATRFASVYAWNRKRISNCVADYSVLYNSASFSTFKCYGVSPTKLNDLCFTNVYADSFVIRGDEVRQIAPGQTGKIADYNYKLPDDFTGCVIAWNSNNLDSKVGGNYNYLYRLFRKSNLKPFERDISTEIYQAGSTPCNGVEGFNCYFPLQSYGFQPTNGVGYQPYRVVVLSFELLHAPATVCGPKKSTNLVKNKCVNFNFNGLTGTGVLTESNKKFLPFQQFGRDIADTTDAVRDPQTLEILDITPCSFGGVSVITPGTNTSNQVAVLYQDVNCTEVPVAIHADQLTPTWRVYSTGSNVFQTRAGCLIGAEHVNNSYECDIPIGAGICASYQTQTNSPRRARSVASQSIIAYTMSLGAENSVAYSNNSIACPTNFTISVTTEILPVSMTKTSVDCTMYICGDSTECSNLLLQYGSFCTQLNRALTGIAVEQDKNTQEVFAQVKQIYKTPPIKDFGGFNFSQILPDPSKPSKRSFIEDLLFNKVTLADAGFIKQYGDCLGDIAARDLICAQKFNGLTVLPPLLTDEMIAQYTSALLAGTITSGWTFGAGAALQIPFAMQMAYRFNGIGVTQNVLYENQKLIANQFNSAIGKIQDSLSSTASALGKLQDVVNQNAQALNTLVKQLSSNFGAISSVLNDILSRLDKVEAEVQIDRLITGRLQSLQTYVTQQLIRAAEIRASANLAATKMSECVLGQSKRVDFCGKGYHLMSFPQSAPHGVVFLHVTYVPAQEKNFTTAPAICHDGKAHFPREGVFVSNGTHWFVTQRNFCEPQIITTDNTFVSGNCDVVIGIVNNTVYDPLQPELDSFKEELDKYFKNHTSPDVDLGDISGINASVVNIQKEIDRLNEVAKNLNESLIDLQELGKYEQYIKGGGGSDIDPYKEFGSSYQLLNFLPLDFFPDLNALVDTATALYEEELTGREHCSPHHTAIRQALVCWDELTKLIAWMSSNITSEQVRTIIVNHVNDTWGLKVRQSLWFHLSCLTFGQHTVQEFLVSFGVWIRTPAPYRPPNAPILSTLPEHTVIC

SEQ ID NO: 7059 - protein, 1365 aa, Artificial Sequence; identical to SEQ ID NO: 7049
  SARS-CoV-2/England/200990660/2020__EPI_ISL_414523 spike protein (1-1211)(I714C_Y1110C) WhcAg construct

SEQ ID NO: 7060 - protein, 1365 aa, Artificial Sequence
  SARS-CoV-2/Australia/NSW09/2020__EPI_ISL_413595 spike protein (1-1211)(I714C_Y1110C) WhcAg construct
MFVFLVLLPLVSSQCVNLTTRTQLPPAYTNSFTRGVYYPDKVFRSSVLHSTQDLFLPFFSNVTWFHAIHVSGTNGTKRFDNPVLPFNDGVYFASTEKSNIIRGWIFGTTLDSKTQSLLIVNNATNVVIKVCEFQFCNDPFLGVYYHKNNKSWMESEFRVYSSANNCTFEYVSQPFLMDLEGKQGNFKNLREFVFKNIDGYFKIYSKHTPINLVRDLPQGFSALEPLVDLPIGINITRFQTLLALHRSYLTPGDSSSGWTAGAAAYYVGYLQPRTFLLKYNENGTITDAVDCALDPLSETKCTLKSFTVEKGIYQTSNFRVQPTESIVRFPNITNLCPFGEVFNATRFASVYAWNRKRISNCVADYSVLYNSASFSTFKCYGVSPTKLNDLCFTNVYADSFVIRGDEVRQIAPGQTGKIADYNYKLPDDFTGCVIAWNSNNLDSKVGGNYNYLYRLFRKSNLKPFERDISTEIYQAGSTPCNGVEGFNCYFPLQSYGFQPTNGVGYQPYRVVVLSFELLHAPATVCGPKKSTNLVKNKCVNFNFNGLTGTGVLTESNKKFLPFQQFGRDIADTTDAVRDPQTLEILDITPCSFGGVSVITPGTNTSNQVAVLYQDVNCTEVPVAIHADQLTPTWRVYSTGSNVFQTRAGCLIGAEHVNNSYECDIPIGAGICASYQTQTNSPRRARSVASQSIIAYTMSLGAENSVAYSNNSIACPTNFTISVTTEILPVSMTKTSVDCTMYICGDSTECSNLLLQYGSFCTQLNRALTGIAVEQDKNTQEVFAQVKQIYKTPPIKDFGGFNFSQILPDPSKPSKRSFIEDLLFNKVTLADAGFIKQYGDCLGDIAARDLICAQKFNGLTVLPPLLTDEMIAQYTSALLAGTITSGWTFGAGAALQIPFAMQMAYRFNGIGVTQNVLYENQKLIANQFNSAIGKIQDSLSFTASALGKLQDVVNQNAQALNTLVKQLSSNFGAISSVLNDILSRLDKVEAEVQIDRLITGRLQSLQTYVTQQLIRAAEIRASANLAATKMSECVLGQSKRVDFCGKGYHLMSFPQSAPHGVVFLHVTYVPAQEKNFTTAPAICHDGKAHFPREGVFVSNGTHWFVTQRNFCEPQIITTDNTFVSGNCDVVIGIVNNTVYDPLQPELDSFKEELDKYFKNHTSPDVDLGDISGINASVVNIQKEIDRLNEVAKNLNESLIDLQELGKYEQYIKGGGGSDIDPYKEFGSSYQLLNFLPLDFFPDLNALVDTATALYEEELTGREHCSPHHTAIRQALVCWDELTKLIAWMSSNITSEQVRTIIVNHVNDTWGLKVRQSLWFHLSCLTFGQHTVQEFLVSFGVWIRTPAPYRPPNAPILSTLPEHTVIC

SEQ ID NO: 7061 - protein, 1365 aa, Artificial Sequence; identical to SEQ ID NO: 7041
  SARS-CoV-2/Australia/NSW10/2020__EPI_ISL_413596 spike protein (1-1211)(I714C_Y1110C) WhcAg construct

SEQ ID NO: 7062 - protein, 1365 aa, Artificial Sequence
  SARS-CoV-2/Switzerland/1000477797/2020__EPI_ISL_413023 spike protein (1-1211)(I714C_Y1110C) WhcAg construct
MFVFLVLLPLVSSQCVNLTTRTQLPPAYTNSFTRGVYYPDKVFRSSVLHSTQDLFLPFFSNVTWFHAIHVSGTNGTKRFDNPVLPFNDGVYFASTEKSNIIRGWIFGTTLDSKTQSLLIVNNATNVVIKVCEFQFCNDPFLGVYYHKNNKSWMESEFRVYSSANNCTFEYVSQPFLMDLEGKQGNFKNLREFVFKNIDGYFNIYSKHTPINLVRDLPQGFSALEPLVDLPIGINITRFQTLLALHRSYLTPGDSSSGWTAGAAAYYVGYLQPRTFLLKYNENGTITDAVDCALDPLSETKCTLKSFTVEKGIYQTSNFRVQPTESIVRFPNITNLCPFGEVFNATRFASVYAWNRKRISNCVADYSVLYNSASFSTFKCYGVSPTKLNDLCFTNVYADSFVIRGDEVRQIAPGQTGKIADYNYKLPDDFTGCVIAWNSNNLDSKVGGNYNYLYRLFRKSNLKPFERDISTEIYQAGSTPCNGVEGFNCYFPLQSYGFQPTNGVGYQPYRVVVLSFELLHAPATVCGPKKSTNLVKNKCVNFNFNGLTGTGVLTESNKKFLPFQQFGRDIADTTDAVRDPQTLEILDITPCSFGGVSVITPGTNTSNQVAVLYQGVNCTEVPVAIHADQLTPTWRVYSTGSNVFQTRAGCLIGAEHVNNSYECDIPIGAGICASYQTQTNSPRRARSVASQSIIAYTMSLGAENSVAYSNNSIACPTNFTISVTTEILPVSMTKTSVDCTMYICGDSTECSNLLLQYGSFCTQLNRALTGIAVEQDKNTQEVFAQVKQIYKTPPIKDFGGFNFSQILPDPSKPSKRSFIEDLLFNKVTLADAGFIKQYGDCLGDIAARDLICAQKFNGLTVLPPLLTDEMIAQYTSALLAGTITSGWTFGAGAALQIPFAMQMAYRFNGIGVTQNVLYENQKLIANQFNSAIGKIQDSLSSTASALGKLQDVVNQNAQALNTLVKQLSSNFGAISSVLNDILSRLDKVEAEVQIDRLITGRLQSLQTYVTQQLIRAAEIRASANLAATKMSECVLGQSKRVDFCGKGYHLMSFPQSAPHGVVFLHVTYVPAQEKNFTTAPAICHDGKAHFPREGVFVSNGTHWFVTQRNFCEPQIITTDNTFVSGNCDVVIGIVNNTVYDPLQPELDSFKEELDKYFKNHTSPDVDLGDISGINASVVNIQKEIDRLNEVAKNLNESLIDLQELGKYEQYIKGGGGSDIDPYKEFGSSYQLLNFLPLDFFPDLNALVDTATALYEEELTGREHCSPHHTAIRQALVCWDELTKLIAWMSSNITSEQVRTIIVNHVNDTWGLKVRQSLWFHLSCLTFGQHTVQEFLVSFGVWIRTPAPYRPPNAPILSTLPEHTVIC

SEQ ID NO: 7063 - protein, 1365 aa, Artificial Sequence
  SARS-CoV-2/Belgium/BA-02291/2020__EPI_ISL_415159 spike protein (1-1211)(I714C_Y1110C) WhcAg construct
MFVFLVLLPLVSSQCVNLTTRTQLPPAYTNSFTRGVYYPDKVFRSSVLHSTQDLFLPFFSNVTWFHAIHVSGTNGTKRFDNPVLPFNDGVYFASTEKSNIIRGWIFGTTLDSKTQSLLIVNNATNVVIKVCEFQFCNDPFLGVYYHKNNKSWMESEFRVYSSANNCTFEYVSQPFLMDLEGKQGNFKNLREFVFKNIDGYFKIYSKHTPINLVRDLPQGFSALEPLVDLPIGINITRFQTLLALHRSYLTPGDSSSGWTAGAAAYYVGYLQPRTFLLKYNENGTITDAVDCALDPLSETKCTLKSFTVEKGIYQTSNFRVQPTESIVRFPNITNLCPFGEVFNATRFASVYAWNRKRISNCVADYSVLYNSASFSTFKCYGVSPTKLNDLCFTNVYADSFVIRGDEVRQIAPGQTGKIADYNYKLPDDFTGCVIAWNSNNLDSKVGGNYNYLYRLFRRSNLKPFERDISTEIYQAGSTPCNGVEGFNCYFPLQSYGFQPTNGVGYQPYRVVVLSFELLPAPATVCGPKKSTNLVKNKCVNFNFNGLTGTGVLTESNKKFLPFQQFGRDIADTTDAVRDPQTLEILDITPCSFGGVSVITPGTNTSNQVAVLYQGVNCTEVPVAIHADQLTPTWRVYSTGSNVFQTRAGCLIGAEHVNNSYECDIPIGAGICASYQTQTNSPRRARSVASQSIIAYTMSLGAENSVAYSNNSIACPTNFTISVTTEILPVSMTKTSVDCTMYICGDSTECSNLLLQYGSFCTQLNRALTGIAVEQDKNTQEVFAQVKQIYKTPPIKDFGGFNFSQILPDPSKPSKRSFIEDLLFNKVTLADAGFIKQYGDCLGDIAARDLICAQKFNGLTVLPPLLTDEMIAQYTSALLAGTITSGWTFGAGAALQIPFAMQMAYRFNGIGVTQNVLYENQKLIANQFNSAIGKIQDSLSSAAPALGKLQDVVNQNAQALNTLVKQLSSNFGAISSVLNDILSRLDKVEAEVQIDRLITGRLQSLQTYVTQQLIRAAEIRASANLAATKMSECVLGQSKRVDFCGKGYHLMSFPQSAPHGVVFLHVTYVPAQEKNFTTAPAICHDGKAHFPREGVFVSNGTHWFVTQRNFCEPQIITTDNTFVSGNCDVVIGIVNNTVYDPLQPELDSFKEELDKYFKNHTSPDVDLGDISGINASVVNIQKEIDRLNEVAKNLNESLIDLQELGKYEQYIKGGGGSDIDPYKEFGSSYQLLNFLPLDFFPDLNALVDTATALYEEELTGREHCSPHHTAIRQALVCWDELTKLIAWMSSNITSEQVRTIIVNHVNDTWGLKVRQSLWFHLSCLTFGQHTVQEFLVSFGVWIRTPAPYRPPNAPILSTLPEHTVIC

SEQ ID NO: 7064 - protein, 1365 aa, Artificial Sequence
  SARS-CoV-2/USA/WA8-UW5/2020__EPI_ISL_413486 spike protein (1-1211)(I714C_Y1110C) WhcAg construct
MFVFLVLLPLVSSQCVNLTTRTQLPPAYTNSFTRGVYYPDKVFRSSVLHSTQDLFLPFFSNVTWFHAIHVSGTNGTKRFDNPVLPFNDGVYFASTEKSNIIRGWIFGTTLDSKTQSLLIVNNATNVVIKVCEFQFCNDPFLGVYYHKNNKSWMESEFRVYSSANNCTFEYVSQPFLMDLEGKQGNFKNLREFVFKNIDGYFKIYSKHTPINLVRDLPQGFSALEPLVDLPIGINITRFQTLLALHRSYLTPGDSSSGWTAGAAAYYVGYLQPRTFLLKYNENGTITDAVDCALDPLSETKCTLKSFTVEKGIYQTSNFRVQPTESIVRFPNITNLCPFGEVFNATRFASVYAWNRKRISNCVADYSVLYNSASFSTFKCYGVSPTKLNDLCFTNVYADSFVIRGDEVRQIAPGQTGKIADYNYKLPDDFTGCVIAWNSNNLDSKVGGNYNYLYRLFRKSNLKPFERDISTEIYQAGSTPCNGVEGFNCYFPLQSYGFQPTNGVGYQPYRVVVLSFELLHAPATVCGPKKSTNLVKNKCVNFNFNGLTGTGVLTESNKKFLPFQQFGRDIADTTDAVRDPQTLEILDITPCSFGGVSVITPGTNTSNQVAVLYQDVNCTEVPVAIHADQLTPTWRVYSTGSNVFQTRAGCLIGAEYVNNSYECDIPIGAGICASYQTQTNSPRRARSVASQSIIAYTMSLGAENSVAYSNNSIACPTNFTISVTTEILPVSMTKTSVDCTMYICGDSTECSNLLLQYGSFCTQLNRALTGIAVEQDKNTQEVFAQVKQIYKTPPIKDFGGFNFSQILPDPSKPSKRSFIEDLLFNKVTLADAGFIKQYGDCLGDIAARDLICAQKFNGLTVLPPLLTDEMIAQYTSALLAGTITSGWTFGAGAALQIPFAMQMAYRFNGIGVTQNVLYENQKLIANQFNSAIGKIQDSLSSTASALGKLQDVVNQNAQALNTLVKQLSSNFGAISSVLNDILSRLDKVEAEVQIDRLITGRLQSLQTYVTQQLIRAAEIRASANLAATKMSECVLGQSKRVDFCGKGYHLMSFPQSAPHGVVFLHVTYVPAQEKNFTTAPAICHDGKAHFPREGVFVSNGTHWFVTQRNFCEPQIITTDNTFVSGNCDVVIGIVNNTVYDPLQPELDSFKEELDKYFKNHTSPDVDLGDISGINASVVNIQKEIDRLNEVAKNLNESLIDLQELGKYEQYIKGGGGSDIDPYKEFGSSYQLLNFLPLDFFPDLNALVDTATALYEEELTGREHCSPHHTAIRQALVCWDELTKLIAWMSSNITSEQVRTIIVNHVNDTWGLKVRQSLWFHLSCLTFGQHTVQEFLVSFGVWIRTPAPYRPPNAPILSTLPEHTVIC

SEQ ID NO: 7065 - protein, 1365 aa, Artificial Sequence
  SARS-CoV-2/England/20102000506/2020__EPI_ISL_415147 spike protein (1-1211)(I714C_Y1110C) WhcAg construct
MFVFLVLLPLVSSQCVNLTTRTQLPPAYTNSFTRGVYYPDKVFRSSVLHSTQDLFLPFFSNVTWFHAIHVSGTNGTKRFDNPVLPFNDGVYFASTEKSNIIRGWIFGTTLDSKTQSLLIVNNATNVVIKVCEFQFCNDPFLGVYYHKNNKSWMESEFRVYSSANNCTFEYVSQPFLMDLEGKQGNFKNLREFVFKNIDGYFKIYSKHTPINLVRDLPQGFSALEPLVDLPIGINITRFQTLLALHRSYLTPGDSSSGWTAGAAAYYVGYLQPRTFLLKYNENGTITDAVDCALDPLSETKCTLKSFTVEKGIYQTSNFRVQPTESIVRFPNITNLCPFGEVFNATRFASVYAWNRKRISNCVADYSVLYNSASFSTFKCYGVSPTKLNDLCFTNVYADSFVIRGDEVRQIAPGQTGKIADYNYKLPDDFTGCVIAWNSNNLDSKVGGNYNYLYRLFRKSNLKPFERDISTEIYQAGSTPCNGVEGFNCYFPLQSYGFQPTNGVGYQPYRVVVLSFELLHAPATVCGPKKSTNLVKNKCVNFNFNGLTGTGVLTESNKKFLPFQQFGRDIADTTDAVRDPQTLEILDITPCSFGGVSVITPGTNTSNQVAVLYQGVNCTEVPVAIHADQLTPTWRVYSTGSNVFQTRAGCLIGAEHVNNSYECDIPIGAGICASYQTQTNSPRRARSVASQSIIAYTMSLGAENSVAYSNNSIACPTNFTISVTTEILPVSMTKTSVDCTMYICGDSTECSNLLLQYGSFCTQLNRALTGIAVEQDKNTQEVFAQVKQIYKTPPIKDFGGFNFSQILPDPSKPSKRSFIEDLLFNKVTLADAGFIKQYGYCLGDIAARDLICAQKFNGLTVLPPLLTDEMIAQYTSALLAGTITSGWTFGAGAALQIPFAMQMAYRFNGIGVTQNVLYENQKLIANQFNSAIGKIQDSLSSTASALGKLQDVVNQNAQALNTLVKQLSSNFGAISSVLNDILSRLDKVEAEVQIDRLITGRLQSLQTYVTQQLIRAAEIRASANLAATKMSECVLGQSKRVDFCGKGYHLMSFPQSAPHGVVFLHVTYVPAQEKNFTTAPAICHDGKAHFPREGVFVSNGTHWFVTQRNFCEPQIITTDNTFVSGNCDVVIGIVNNTVYDPLQPELDSFKEELDKYFKNHTSPDVDLGDISGINASVVNIQKEIDRLNEVAKNLNESLIDLQELGKYEQYIKGGGGSDIDPYKEFGSSYQLLNFLPLDFFPDLNALVDTATALYEEELTGREHCSPHHTAIRQALVCWDELTKLIAWMSSNITSEQVRTIIVNHVNDTWGLKVRQSLWFHLSCLTFGQHTVQEFLVSFGVWIRTPAPYRPPNAPILSTLPEHTVIC

SEQ ID NO: 7066 - protein, 1365 aa, Artificial Sequence
  SARS-CoV-2/Belgium/VAG-03013/2020__EPI_ISL_415155 spike protein (1-1211)(I714C_Y1110C) WhcAg construct
MFVFLVLLPLVSSQCVNLTTRTQLPPAYTNSFTRGVYYPDKVFRSSVLHSTQDLFLPFFSNVTWFHAIHVSGTNGTKRFDNPVLPFNDGVYFASTEKSNIIRGWIFGTTLDSKTQSLLIVNNATNVVIKVCEFQFCNDPFLGVYYHKNNKSWMESEFRVYSSANNCTFEYVSQPFLMDLEGKQGNFKNLREFVFKNIDGYFKIYSKHTPINLVRDLPQGFSALEPLVDLPIGINITRFQTLLALHRSYLTPGDSSSGWTAGAAAYYVGYLQPRTFLLKYNENGTITDAVDCALDPLSETKCTLKSFTVEKGIYQTSNFRVQPTESIVRFPNITNLCPFGEVFNATRFASVYAWNRKRISNCVADYSVLYNSASFSTFKCYGVSPTKLNDLCFTNVYADSFVIRGDEVRQIAPGQTGKIADYNYKLPDDFTGCVIAWNSNNLDSKVGGNYNYLYRLFRKSNLKPFERDISTEIYQAGSTPCNGVEGFNCYFPLQSYGFQPTNGVGYQPYRVVVLSFELLHAPATVCGPKKSTNLVKNKCVNFNFNGLTGTGVLTESNKKFLPFQQFGRDIADTTDAVRDPQTLEILDITPCSFGGVSVITPGTNTSNQVAVLYQGVNCTEVPVAIHADQLTPTWRVYSTGSNVFQTRAGCLIGAEHVNNSYECDIPIGAGICASYQTQTNSPRRARSVASQSIIAYTMSLGAENSVAYSNNSIACPTNFTISVTTEILPVSMTKTSVDCTMYICGDSTECSNLLLQYGSFCTQLNRALTGIAVEQDKNTQEVFAQVKQIYKTPPIKDFGGFNFSQILPDPSKPSKRSFIEDLLFNKVTLADAGFIKQYGDCLGDIAARDLICAQKFNGLTVLPPLLTDEMIAQYTSALLAGTITSGWTFGAGAALQIPFAMQMAYRFNGIGVTQNVLYENQKLIANQFNSAIGKIQDSLSSTATALGKLQDVVNQNAQALNTLVKQLSSNFGAISSVLNDILSRLDKVEAEVQIDRLITGRLQSLQTYVTQQLIRAAEIRASANLAATKMSECVLGQSKRVDFCGKGYHLMSFPQSAPHGVVFLHVTYVPAQEKNFTTAPAICHDGKAHFPREGVFVSNGTHWFVTQRNFCEPQIITTDNTFVSGNCDVVIGIVNNTVYDPLQPELDSFKEELDKYFKNHTSPDVDLGDISGINASVVNIQKEIDRLNEVAKNLNESLIDLQELGKYEQYIKGGGGSDIDPYKEFGSSYQLLNFLPLDFFPDLNALVDTATALYEEELTGREHCSPHHTAIRQALVCWDELTKLIAWMSSNITSEQVRTIIVNHVNDTWGLKVRQSLWFHLSCLTFGQHTVQEFLVSFGVWIRTPAPYRPPNAPILSTLPEHTVIC

SEQ ID NO: 7067 - protein, 1365 aa, Artificial Sequence
  SARS-CoV-2/Belgium/BC-03016/2020__EPI_ISL_415157 spike protein (1-1211)(I714C_Y1110C) WhcAg construct
MFVFLVLLPLVSSQCVNLTTRTQLPPAYTNSFTRGVYYPDKVFRSSVLHSTQDLFLPFFSNVTWFHAIHVSGTNGTKRFDNPVLPFNDGVYFASTEKSNIIRGWIFGTTLDSKTQSLLIVNNATNVVIKVCEFQFCNDPFLGVYYHKNNKSWMESEFRVYSSANNCTFEYVSQPFLMDLEGKQGNFKNLREFVFKNIDGYFKIYSKHTPINLVRDLPQGFSALEPLVDLPIGINITRFQTLLALHRSYLTPGDSSSGWTAGAAAYYVGYLQPRTFLLKYNENGTITDAVDCALDPLSETKCTLKSFTVEKGIYQTSNFRVQPTESIVRFPNITNLCPFGEVFNATRFASVYAWNRKRISNCVADYSVLYNSASFSTFKCYGVSPTKLNDLCFTNVYADSFVIRGDEVRQIAPGQTGKIADYNYKLPDDFTGCVIAWNSNNLDSKVGGNYNYLYRLFRKSNLKPFERDISTEIYQAGSTPCNGVEGFNCYFPLQSYGFQPTNGVGYQPYRVVVLSFELLHAPATVCGPKKSTNLVKNKCVNFNFNGLTGTGVLTESNKKFLPFQQFGRDIADTTDAVRDPQTLEILDITPCSFGGVSVITPGTNTSNQVAVLYQGVNCTEVPVAIHADQLTPTWRVYSTGSNVFQTRAGCLIGAEHVNNSYECDIPIGAGICASYQTQTNSPRRARSVASQSIIAYTMSLGAENSVAYSNNSIACPTNFTISVTTEILPVSMTKTSVDCTMYICGDSTECSNLLLQYGSFCTQLNRALTGIAVEQDKNTQEVFAQVKQIYKTPPIKDFGGFNFSQILPDPSKPSKRSFIEDLLFNKVTLADAGFIKQYGDCLGDIAARDLICAQKFNGLTVLPPLLTDEMIAQYTSALLAGTITSGWTFGAGAALQIPFAMQMAYRFNGIGVTQNVLYENQKLIANQFNSAIGKIQDSLSSTAPALGKLQDVVNQNAQALNTLVKQLSSNFGAISSVLNDILSRLDKVEAEVQIDRLITGRLQSLQTYVTQQLIRAAEIRASANLAATKMSECVLGQSKRVDFCGKGYHLMSFPQSAPHGVVFLHVTYVPAQEKNFTTAPAICHDGKAHFPREGVFVSNGTHWFVTQRNFCEPQIITTDNTFVSGNCDVVIGIVNNTVYDPLQPELDSFKEELDKYFKNHTSPDVDLGDISGINASVVNIQKEIDRLNEVAKNLNESLIDLQELGKYEQYIKGGGGSDIDPYKEFGSSYQLLNFLPLDFFPDLNALVDTATALYEEELTGREHCSPHHTAIRQALVCWDELTKLIAWMSSNITSEQVRTIIVNHVNDTWGLKVRQSLWFHLSCLTFGQHTVQEFLVSFGVWIRTPAPYRPPNAPILSTLPEHTVIC

SEQ ID NO: 7068 - protein, 1365 aa, Artificial Sequence
  SARS-CoV-2/Germany/BavPat3/2020__EPI_ISL_414521 spike protein (1-1211)(I714C_Y1110C) WhcAg construct
MFVFLVLLPLVSSQCVNLTTRTQLPPAYTNSFTRGVYYPDKVFRSSVLHSTQDLFLPFFSNVTWFHAIHVSGTNGTKRFDNPVLPFNDGVYFASTEKSNIIRGWIFGTTLDSKTQSLLIVNNATNVVIKVCEFQFCNDPFLGVYYHKNNKSWMESEFRVYSSANNCTFEYVSQPFLMDLEGKQGNFKNLREFVFKNIDGYFKIYSKHTPINLVRDLPQGFSALEPLVDLPIGINITRFQTLLALHRSYLTPGDSSSGWTAGAAAYYVGYLQPRTFLLKYNENGTITDAVDCALDPLSETKCTLKSFTVEKGIYQTSNFRVQPTESIVRFPNITNLCPFGEVFNATRFASVYAWNRKRISNCVADYSVLYNSASFSTFKCYGVSPTKLNDLCFTNVYADSFVIRGDEVRQIAPGQTGKIADYNYKLPDDFTGCVIAWNSNNLDSKVGGNYNYLYRLFRKSNLKPFERDISTEIYQAGSTPCNGVEGFNCYFPLQSYGFQPTNGVGYQPYRVVVLSFELLHAPATVCGPKKSTNLVKNKCVNFNFNGLTGTGVLTESNKKFLPFQQFGRDIADTTDAVRDPQTLEILDITPCSFGGVSVITPGTNTSNQVAVLYQDVNCTEVPVAIHADQLTPTWRVYSTGSNVFQTRAGCLIGAEHVNNSYECDIPIGAGICASYQTQTNSPRRARSVASQSIIAYTMSLGAENSVAYSNNSIACPTNFTISVTTEILPVSMTKTSVDCTMYICGDSTECSNLLLQYGSFCTQLNRALTGIAVEQDKNTQQVFAQVKQIYKTPPIKDFGGFNFSQILPDPSKPSKRSFIEDLLFNKVTLADAGFIKQYGDCLGDIAARDLICAQKFNGLTVLPPLLTDEMIAQYTSALLAGTITSGWTFGAGAALQIPFAMQMAYRFNGIGVTQNVLYENQKLIANQFNSAIGKIQDSLSSTASALGKLQDVVNQNAQALNTLVKQLSSNFGAISSVLNDILSRLDKVEAEVQIDRLITGRLQSLQTYVTQQLIRAAEIRASANLAATKMSECVLGQSKRVDFCGKGYHLMSFPQSAPHGVVFLHVTYVPAQEKNFTTAPAICHDGKAHFPREGVFVSNGTHWFVTQRNFCEPQIITTDNTFVSGNCDVVIGIVNNTVYDPLQPELDSFKEELDKYFKNHTSPDVDLGDISGINASVVNIQKEIDRLNEVAKNLNESLIDLQELGKYEQYIKGGGGSDIDPYKEFGSSYQLLNFLPLDFFPDLNALVDTATALYEEELTGREHCSPHHTAIRQALVCWDELTKLIAWMSSNITSEQVRTIIVNHVNDTWGLKVRQSLWFHLSCLTFGQHTVQEFLVSFGVWIRTPAPYRPPNAPILSTLPEHTVIC

SEQ ID NO: 7069 - protein, 1365 aa, Artificial Sequence
  SARS-CoV-2/France/HF1805/2020__EPI_ISL_414628 spike protein (1-1211)(I714C_Y1110C) WhcAg construct
MFVFLVLLPLVSSQCVNLTTRTQLPPAYTNSFTRGVYYPDKVFRSSVLHSTQDLFLPFFSNVTWFHAIHVSGTNGTKRFDNPVLPFNDGVYFASTEKSNIIRGWIFGTTLDSKTQSLLIVNNATNVVIKVCEFQFCNDPFLGVYYHKNNKSWMESEFRVYSSANNCTFEYVSQPFLMDLEGKQGNFKNLREFVFKNIDGYFKIYSKHTPINLVRDLPQGFSALEPLVDLPIGINITRFQTLLALHRSYLTPGDSSSGWTAGAAAYYVGYLQPRTFLLKYNENGTITDAVDCALDPLSETKCTLKSFTVEKGIYQTSNFRVQPTESIVRFPNITNLCPFGEVFNATRFASVYAWNRKRISNCVADYSVLYNSASFSTFKCYGVSPTKLNDLCFTNVYADSFVIRGDEVRQIAPGQTGKIADYNYKLPDDFTGCVIAWNSNNLDSKVGGNYNYLYRLFRKSNLKPFERDISTEIYQAGSTPCNGVEGFNCYFPLQSYGFQPTNGVGYQPYRVVVLSFELLHAPATVCGPKKSTNLVKNKCVNFNFNGLTGTGVLTESNKKFLPFQQFGRDIADTTDAVRDPQTLEILDITPCSFGGVSVITPGTNTSNQVAVLYQGVNCTEVPVAIHADQLTPTWRVYSTGSNVFQTRAGCLIGAEHVNNSYECDIPIGAGICASYQTQTNSPRRARSVASQSIIAYTMSLGAENSVAYSNNSIACPTNFTISVTTEILPVSMTKTSVDCTMYICGDSTECSNLLLQYGSFCTQLNRALTGIAVEQDKNTQEVFAQVKQIYKTPPIKDFGGFNFSQILPDPSKPSKRSFIEDLLFNKVTLADAGFIKQYGDCLGDIAARDLICAQKFNGLTVLPPLLTDEMIAQYTSALLAGTITSGWTFGAGAALQIPFAMQMAYRFNGIGVTQNVLYENQKLIANQFNSAIGKIQDSLSSTASALGKLQDVVNQNAQALNTLVKQLSSNFGAISSVLNDILSRLDKVEAEVQIDRLITGRLQSLQTYVTQQLIRAAEIRASANLAATKMSECVLGQSKRVDFCGKGYHLMSFPQSAPHGVVFLHVTYVPAQEKNFTTAPAICHDGKAHFPREGVFVSNGTHWFVTQRNFCEPQIITTDNTFVSGNCDVVIGVVNNTVYDPLQPELDSFKEELDKYFKNHTSPDVDLGDISGINASVVNIQKEIDRLNEVAKNLNESLIDLQELGKYEQYIKGGGGSDIDPYKEFGSSYQLLNFLPLDFFPDLNALVDTATALYEEELTGREHCSPHHTAIRQALVCWDELTKLIAWMSSNITSEQVRTIIVNHVNDTWGLKVRQSLWFHLSCLTFGQHTVQEFLVSFGVWIRTPAPYRPPNAPILSTLPEHTVIC

SEQ ID NO: 7070 - protein, 1365 aa, Artificial Sequence
  SARS-CoV-2/Netherlands/ZuidHolland_9/2020__EPI_ISL_414445 spike protein (1-1211)(I714C_Y1110C) WhcAg construct
MFVFLVLLPLVSSQCVNLTTRTQLPPAYTNSFTRGVYYPDKVFRSSVLHSTQDLFLPFFSNVTWFHAIHVSGTNGTKRFDNPVLPFNDGVYFASTEKSNIIRGWIFGTTLDSKTQSLLIVNNATNVVIKVCEFQFCNDPFLGVYYHKNNKSWMESEFRVYSSANNCTFEYVSQPFLMDLEGKQGNFKNLREFVFKNIDGYFKIYSKHTPINLVRDLPQGFSALEPLVDLPIGINITRFQTLLALHRSYLTPGDSSSGWTAGAAAYYVGYLQPRTFLLKYNENGTITDAVDCALDPLSETKCTLKSFTVEKGIYQTSNFRVQPTESIVRFPNITNLCPFGEVFNATRFASVYAWNRKRISNCVADYSVLYNSASFSTFKCYGVSPTKLNDLCFTNVYADSFVIRGDEVRQIAPGQTGKIADYNYKLPDDFTGCVIAWNSNNLDSKVGGNYNYLYRLFRKSNLKPFERDISTEIYQAGSTPCNGVEGFNCYFPLQSYGFQPTNGVGYQPYRVVVLSFELLHAPATVCGPKKSTNLVKNKCVNFNFNGLTGTGVLTESNKKFLPFQQFGRDIADTTDAVRDPQTLEILDITPCSFGGVSVITPGTNTSNQVAVLYQGVNCTEVPVAIHADQLTPTWRVYSTGSNVFQTRAGCLIGAEHVNNSYECDIPIGAGICASYQTQTNSPRRARSVASQSIIAYTMSLGAENSVAYSNNSIACPTNFTISVTTEILPVSMTKTSVDCTMYICGDSTECSNLLLQYGSFCTQLNRALTGIAVEQDKNTQEVFAQVKQIYKTPPIKDFGGFNFSQILPDPSKPSKRSFIEDLLFNKVTLADAGFIKQYGDCLGDIAARDLICVQKFNGLTVLPPLLTDEMIAQYTSALLAGTITSGWTFGAGAALQIPFAMQMAYRFNGIGVTQNVLYENQKLIANQFNSAIGKIQDSLSSTASALGKLQDVVNQNAQALNTLVKQLSSNFGAISSVLNDILSRLDKVEAEVQIDRLITGRLQSLQTYVTQQLIRAAEIRASANLAATKMSECVLGQSKRVDFCGKGYHLMSFPQSAPHGVVFLHVTYVPAQEKNFTTAPAICHDGKAHFPREGVFVSNGTHWFVTQRNFCEPQIITTDNTFVSGNCDVVIGIVNNTVYDPLQPELDSFKEELDKYFKNHTSPDVDLGDISGINASVVNIQKEIDRLNEVAKNLNESLIDLQELGKYEQYIKGGGGSDIDPYKEFGSSYQLLNFLPLDFFPDLNALVDTATALYEEELTGREHCSPHHTAIRQALVCWDELTKLIAWMSSNITSEQVRTIIVNHVNDTWGLKVRQSLWFHLSCLTFGQHTVQEFLVSFGVWIRTPAPYRPPNAPILSTLPEHTVIC

SEQ ID NO: 7071 - protein, 1365 aa, Artificial Sequence
  SARS-CoV-2/Finland/FIN03032020A/2020__EPI_ISL_413602 spike protein (1-1211)(I714C_Y1110C) WhcAg construct
MFVFLVLLPLVSSQCVNLTTRTQLPPAYTNSFTRGVYYPDKVFRSSVLHSTQDLFLPFFSNVTWFHAIHVSGTNGTKRFDNPVLPFNDGVYFASTEKSNIIRGWIFGTTLDSKTQSLLIVNNATNVVIKVCEFQFCNDPFLGVYYHKNNKSWMESEFRVYSSANNCTFEYVSQPFLMDLEGKQGNFKNLREFVFKNIDGYFKIYSKHTPINLVRDLPQGFSALEPLVDLPIGINITRFQTLLALHRSYLTPGDSSSGWTAGAAAYYVGYLQPRTFLLKYNENGTITDAVDCALDPLSETKCTLKSFTVEKGIYQTSNFRVQPTESIVRFPNITNLCPFGEVFNATRFASVYAWNRKRISNCVADYSVLYNSASFSTFKCYGVSPTKLNDLCFTNVYADSFVIRGDEVRQIAPGQTGKIADYNYKLPDDFTGCVISWNSNNLDSKVGGNYNYLYRLFRKSNLKPFERDISTEIYQAGSTPCNGVEGFNCYFPLQSYGFQPTNGVGYQPYRVVVLSFELLHAPATVCGPKKSTNLVKNKCVNFNFNGLTGTGVLTESNKKFLPFQQFGRDIADTTDAVRDPQTLEILDITPCSFGGVSVITPGTNTSNQVAVLYQGVNCTEVPVAIHADQLTPTWRVYSTGSNVFQTRAGCLIGAEHVNNSYECDIPIGAGICASYQTQTNSPRRARSVASQSIIAYTMSLGAENSVAYSNNSIACPTNFTISVTTEILPVSMTKTSVDCTMYICGDSTECSNLLLQYGSFCTQLNRALTGIAVEQDKNTQEVFAQVKQIYKTPPIKDFGGFNFSQILPDPSKPSKRSFIEDLLFNKVTLADAGFIKQYGDCLGDIAARDLICAQKFNGLTVLPPLLTDEMIAQYTSALLAGTITSGWTFGAGAALQIPFAMQMAYRFNGIGVTQNVLYENQKLIANQFNSAIGKIQDSLSSTASALGKLQDVVNQNAQALNTLVKQLSSNFGAISSVLNDILSRLDKVEAEVQIDRLITGRLQSLQTYVTQQLIRAAEIRASANLAATKMSECVLGQSKRVDFCGKGYHLMSFPQSAPHGVVFLHVTYVPAQEKNFTTAPAICHDGKAHFPREGVFVSNGTHWFVTQRNFCEPQIITTDNTFVSGNCDVVIGIVNNTVYDPLQPELDSFKEELDKYFKNHTSPDVDLGDISGINASVVNIQKEIDRLNEVAKNLNESLIDLQELGKYEQYIKGGGGSDIDPYKEFGSSYQLLNFLPLDFFPDLNALVDTATALYEEELTGREHCSPHHTAIRQALVCWDELTKLIAWMSSNITSEQVRTIIVNHVNDTWGLKVRQSLWFHLSCLTFGQHTVQEFLVSFGVWIRTPAPYRPPNAPILSTLPEHTVIC

SEQ ID NO: 7072 - protein, 1365 aa, Artificial Sequence
  SARS-CoV-2/France/GE1977/2020__EPI_ISL_414632 spike protein (1-1211)(I714C_Y1110C) WhcAg construct
MFVFLVLLPLVSSQCVNLTTRTQLPPAYTNSFTRGVYYPDKVFRSSVLHSTQDLFLPFFSNVTWFHAIHVSGTNGTKRFDNPVLPFNDGVYFASTEKSNIIRGWIFGTTLDSKTQSLLIVNNATNVVIKVCEFQFCNDPFLGVYYHKNNKSWMESEFRVYSSANNCTFEYVSQPFLMDLEGKQGNFKNLREFVFKNIDGYFKIYSKHTPINLVRDLPQGFSALEPLVDLPIGINITRFQTLLALHRSYLTPGDSSSGWTAGAAAYYVGYLQPRTFLLKYNENGTITDAVDCALDPLSETKCTLKSFTVEKGIYQTSNFRVQPTESIVRFPNITNLCPFGEVFNATRFASVYAWNRKRISNCVADYSVLYNSASFSTFKCYGVSPTKLNDLCFTNVYADSFVIRGDEVRQIAPGQTGKIADYNYKLPDDFTGCVIAWNSNNLDSKVGGNYNYLYRLFRKSNLKPFERDISTEIYQAGSTPCNGVEGFNCYFPLQSYGFQPTNGVGYQPYRVVVLSFELLHAPATVCGPKKSTNLVKNKCVNFNFNGLTGTGVLTESNKKFLPFQQFGRDIADTTDAVRDPQTLEILDITPCSFGGVSVITPGTNTSNQVAVLYQGVNCTEVPVAIHADQLTPTWRVYSTGSNVFQTRAGCLIGAEHVNNSYECDIPIGAGICASYQTQTNSPRRARSVASQSIIAYTMSLGAENSVAYSNNSIACPTNFTISVTTEILPVSMTKTSVDCTMYICGDSTECSNLLLQYGSFCTQLNRALTGIAVEQDKNTQEVFAQVKQIYKTPPIKDFGGFNFSQILPDPSKPSKRSFIEDLLFNKVTLADAGFIKQYGDCLGDIAARDLICAQKFNGLTVLPPLLTDEMIAQYTSALLAGTITSGWTFGAGAALQIPFAMQMAYRFNGIGVTQNVLYENQKLIANQFNSAIGKIQDSLFSTASALGKLQDVVNQNAQALNTLVKQLSSNFGAISSVLNDILSRLDKVEAEVQIDRLITGRLQSLQTYVTQQLIRAAEIRASANLAATKMSECVLGQSKRVDFCGKGYHLMSFPQSAPHGVVFLHVTYVPAQEKNFTTAPAICHDGKAHFPREGVFVSNGTHWFVTQRNFCEPQIITTDNTFVSGNCDVVIGIVNNTVYDPLQPELDSFKEELDKYFKNHTSPDVDLGDISGINASVVNIQKEIDRLNEVAKNLNESLIDLQELGKYEQYIKGGGGSDIDPYKEFGSSYQLLNFLPLDFFPDLNALVDTATALYEEELTGREHCSPHHTAIRQALVCWDELTKLIAWMSSNITSEQVRTIIVNHVNDTWGLKVRQSLWFHLSCLTFGQHTVQEFLVSFGVWIRTPAPYRPPNAPILSTLPEHTVIC

SEQ ID NO: 7073 - protein, 1365 aa, Artificial Sequence
  SARS-CoV-2/Finland/FIN-313/2020__EPI_ISL_414641 spike protein (1-1211)(I714C_Y1110C) WhcAg construct
MFVFLVLLPLVSSQCVNLTTRTQLPPAYTNSFTRGVYYPDKVFRSSVLHSTQDLFLPFFSNVTWFHAIHVSGTNGTKRFDNPVLPFNDGVYFASTEKSNIIRGWIFGTTLDSKTQSLLIVNNATNVVIKVCEFQFCNDPFLGVYYHKNNKSWMESEFRVYSSANNCTFEYVSQPFLMDLEGKQGNFKNLREFVFKNIDGYFKIYSKHTPINLVRDLPQGFSALEPLVDLPIGINITRFKTLLALHRSYLTPGDSSSGWTAGAAAYYVGYLQPRTFLLKYNENGTITDAVDCALDPLSETKCTLKSFTVEKGIYQTSNFRVQPTESIVRFPNITNLCPFGEVFNATRFASVYAWNRKRISNCVADYSVLYNSASFSTFKCYGVSPTKLNDLCFTNVYADSFVIRGDEVRQIAPGQTGKIADYNYKLPDDFTGCVIAWNSNNLDSKVGGNYNYLYRLFRKSNLKPFERDISTEIYQAGSTPCNGVEGFNCYFPLQSYGFQPTNGVGYQPYRVVVLSFELLHAPATVCGPKKSTNLVKNKCVNFNFNGLTGTGVLTESNKKFLPFQQFGRDIADTTDAVRDPQTLEILDITPCSFGGVSVITPGTNTSNQVAVLYQGVNCTEVPVAIHADQLTPTWRVYSTGSNVFQTRAGCLIGAEHVNNSYECDIPIGAGICASYQTQTNSPRRARSVASQSIIAYTMSLGAENSVAYSNNSIACPTNFTISVTTEILPVSMTKTSVDCTMYICGDSTECSNLLLQYGSFCTQLNRALTGIAVEQDKNTQEVFAQVKQIYKTPPIKDFGGFNFSQILPDPSKPSKRSFIEDLLFNKVTLADAGFIKQYGDCLGDIAARDLICAQKFNGLTVLPPLLTDEMIAQYTSALLAGTITSGWTFGAGAALQIPFAMQMAYRFNGIGVTQNVLYENQKLIANQFNSAIGKIQDSLSSTASALGKLQDVVNQNAQALNTLVKQLSSNFGAISSVLNDILSRLDKVEAEVQIDRLITGRLQSLQTYVTQQLIRAAEIRASANLAATKMSECVLGQSKRVDFCGKGYHLMSFPQSAPHGVVFLHVTYVPAQEKNFTTAPAICHDGKAHFPREGVFVSNGTHWFVTQRNFCEPQIITTDNTFVSGNCDVVIGIVNNTVYDPLQPELDSFKEELDKYFKNHTSPDVDLGDISGINASVVNIQKEIDRLNEVAKNLNESLIDLQELGKYEQYIKGGGGSDIDPYKEFGSSYQLLNFLPLDFFPDLNALVDTATALYEEELTGREHCSPHHTAIRQALVCWDELTKLIAWMSSNITSEQVRTIIVNHVNDTWGLKVRQSLWFHLSCLTFGQHTVQEFLVSFGVWIRTPAPYRPPNAPILSTLPEHTVIC

SEQ ID NO: 7074 - protein, 1365 aa, Artificial Sequence
  SARS-CoV-2/Netherlands/ZuidHolland_2/2020__EPI_ISL_414556 spike protein (1-1211)(I714C_Y1110C) WhcAg construct
MFVFLVLLPLVSSQCVNLTTRTQLPPAYTNSFTRGVYYPDKVFRSSVLHSTQDLFLPFFSNVTWFHAIHVSGTNGTKRFDNPVLPFNDGVYFASTEKSNIIRGWIFGTTLDSKTQSLLIVNNATNVVIKVCEFQFCNDPFLGVYYHKNNKSWMESEFRVYSSANNCTFEYVSQPFLMDLEGKQGNFKNLREFVFKNIDGYFKIYSKHTPINLVRDLPQGFSALEPLVDLPIGINITRFQTLLALHRSYLTPGDSSSGWTAGAAAYYVGYLQPRTFLLKYNENGTITDAVDCALDPLSETKCTLKSFTVEKGIYQTSNFRVQPTESIVRFPNITNLCPFGEVFNATRFASVYAWNRKRISNCVADYSVLYNSASFSTFKCYGVSPTKLNDLCFTNVYADSFVIRGDEVRQIAPGQTGKIADYNYKLPDDFTGCVIAWNSNNLDSKVGGNYNYLYRLFRKSNLKPFERDISTEIYQAGSTPCNGVEGFNCYFPLQSYGFQPTNGVGYQPYRVVVLSFELLHAPATVCGPKKSTNLVKNKCVNFNFNGLTGTGVLTESNKKFLPFQQFGRDIADTTDAVRDPQTLEILDITPCSFGGVSVITPGTNTSNQVAVLYQGVNCTEVPVAIHADQLTPTWRVYSTGSNVFQTRAGCLIGAEHVNNSYECDIPIGAGICASYQTQTNSPRRARSVASQSIIAYTMSLGAENSVAYSNNSIACPTNFTISVTTEILPVSMTKTSVDCTMYICGDSTECSNLLLQYGSFCTQLNRALTGIALEQDKNTQEVFAQVKQIYKTPPIKDFGGFNFSQILPDPSKPSKRSFIEDLLFNKVTLADAGFIKQYGDCLGDIAARDLICAQKFNGLTVLPPLLTDEMIAQYTSALLAGTITSGWTFGAGAALQIPFAMQMAYRFNGIGVTQNVLYENQKLIANQFNSAIGKIQDSLSSTASALGKLQDVVNQNAQALNTLVKQLSSNFGAISSVLNDILSRLDKVEAEVQIDRLITGRLQSLQTYVTQQLIRAAEIRASANLAATKMSECVLGQSKRVDFCGKGYHLMSFPQSAPHGVVFLHVTYVPAQEKNFTTAPAICHDGKAHFPREGVFVSNGTHWFVTQRNFCEPQIITTDNTFVSGNCDVVIGIVNNTVYDPLQPELDSFKEELDKYFKNHTSPDVDLGDISGINASVVNIQKEIDRLNEVAKNLNESLIDLQELGKYEQYIKGGGGSDIDPYKEFGSSYQLLNFLPLDFFPDLNALVDTATALYEEELTGREHCSPHHTAIRQALVCWDELTKLIAWMSSNITSEQVRTIIVNHVNDTWGLKVRQSLWFHLSCLTFGQHTVQEFLVSFGVWIRTPAPYRPPNAPILSTLPEHTVIC

SEQ ID NO: 7075 - protein, 1365 aa, Artificial Sequence
  SARS-CoV-2/USA/WA-UW31/2020__EPI_ISL_414618 spike protein (1-1211)(I714C_Y1110C) WhcAg construct
MFVFLVLLPLVSSQCVNLTTRTQLPPAYTNSFTRGVYYPDKVFRSSVLHSTQDLFLPFFSNVTWFHAIHVSGTNGTKRFDNPVLPFNDGVYFASTEKSNIIRGWIFGTTLDSKTQSLLIVNNATNVVIKVCEFQFCNDPFLGVYYHKNNKSWMESEFRVYSSANNCTFEYVSQPFLMDLEGKQGNFKNLREFVFKNIDGYFKIYSKHTPINLVRDLPQGFSALEPLVDLPIGINITRFQTLLALHRSYLTPGDSSSGWTAGAAAYYVGYLQPRTFLLKYNENGTITDAVDCALDPLSETKCTLKSFTVEKGIYQTSNFRVQPTESIVRFPNITNLCPFGEVFNATRFASVYAWNRKRISNCVADYSVLYNSASFSTFKCYGVSPTKLNDLCFTNVYADSFVIRGDEVRQIAPGQTGKIADYNYKLPDDFTGCVIAWNSNNLDSKVGGNYNYLYRLFRKSNLKPFERDISTEIYQAGSTPCNGAEGFNCYFPLQSYGFQPTNGVGYQPYRVVVLSFELLHAPATVCGPKKSTNLVKNKCVNFNFNGLTGTGVLTESNKKFLPFQQFGRDIADTTDAVRDPQTLEILDITPCSFGGVSVITPGTNTSNQVAVLYQDVNCTEVPVAIHADQLTPTWRVYSTGSNVFQTRAGCLIGAEHVNNSYECDIPIGAGICASYQTQTNSPRRARSVASQSIIAYTMSLGAENSVAYSNNSIACPTNFTISVTTEILPVSMTKTSVDCTMYICGDSTECSNLLLQYGSFCTQLNRALTGIAVEQDKNTQEVFAQVKQIYKTPPIKDFGGFNFSQILPDPSKPSKRSFIEDLLFNKVTLADAGFIKQYGDCLGDIAARDLICAQKFNGLTVLPPLLTDEMIAQYTSALLAGTITSGWTFGAGAALQIPFAMQMAYRFNGIGVTQNVLYENQKLIANQFNSAIGKIQDSLSSTASALGKLQDVVNQNAQALNTLVKQLSSNFGAISSVLNDILSRLDKVEAEVQIDRLITGRLQSLQTYVTQQLIRAAEIRASANLAATKMSECVLGQSKRVDFCGKGYHLMSFPQSAPHGVVFLHVTYVPAQEKNFTTAPAICHDGKAHFPREGVFVSNGTHWFVTQRNFCEPQIITTDNTFVSGNCDVVIGIVNNTVYDPLQPELDSFKEELDKYFKNHTSPDVDLGDISGINASVVNIQKEIDRLNEVAKNLNESLIDLQELGKYEQYIKGGGGSDIDPYKEFGSSYQLLNFLPLDFFPDLNALVDTATALYEEELTGREHCSPHHTAIRQALVCWDELTKLIAWMSSNITSEQVRTIIVNHVNDTWGLKVRQSLWFHLSCLTFGQHTVQEFLVSFGVWIRTPAPYRPPNAPILSTLPEHTVIC

SEQ ID NO: 7076 - protein, 1365 aa, Artificial Sequence
  SARS-CoV-2/South Korea/SNU01/2020__EPI_ISL_411929 spike protein (1-1211)(I714C_Y1110C) WhcAg construct
MFVFLVLLPLVSSQCVNLTTRTQLPPAYTNSFTRGVYYPDKVFRSSVLHSTQDLFLPFFSNVTWFHAIHVSGTNGTKRFDNPVLPFNDGVYFASTEKSNIIRGWIFGTTLDSKTQSLLIVNNATNVVIKVCEFQFCNDPFLGVYYHKNNKSWMESEFRVYSSANNCTFEYVSQPFLMDLEGKQGNFKNLREFVFKNIDGYFKIYSKHTPINLVRDLPQGFWALEPLVDLPIGINITRFQTLLALHRSYLTPGDSSSGWTAGAAAYYVGYLQPRTFLLKYNENGTITDAVDCALDPLSETKCTLKSFTVEKGIYQTSNFRVQPTESIVRFPNITNLCPFGEVFNATRFASVYAWNRKRISNCVADYSVLYNSASFSTFKCYGVSPTKLNDLCFTNVYADSFVIRGDEVRQIAPGQTGKIADYNYKLPDDFTGCVIAWNSNNLDSKVGGNYNYLYRLFRKSNLKPFERDISTEIYQAGSTPCNGVEGFNCYFPLQSYGFQPTNGVGYQPYRVVVLSFELLHAPATVCGPKKSTNLVKNKCVNFNFNGLTGTGVLTESNKKFLPFQQFGRDIADTTDAVRDPQTLEILDITPCSFGGVSVITPGTNTSNQVAVLYQDVNCTEVPVAIHADQLTPTWRVYSTGSNVFQTRAGCLIGAEHVNNSYECDIPIGAGICASYQTQTNSPRRARSVASQSIIAYTMSLGAENSVAYSNNSIACPTNFTISVTTEILPVSMTKTSVDCTMYICGDSTECSNLLLQYGSFCTQLNRALTGIAVEQDKNTQEVFAQVKQIYKTPPIKDFGGFNFSQILPDPSKPSKRSFIEDLLFNKVTLADAGFIKQYGDCLGDIAARDLICAQKFNGLTVLPPLLTDEMIAQYTSALLAGTITSGWTFGAGAALQIPFAMQMAYRFNGIGVTQNVLYENQKLIANQFNSAIGKIQDSLSSTASALGKLQDVVNQNAQALNTLVKQLSSNFGAISSVLNDILSRLDKVEAEVQIDRLITGRLQSLQTYVTQQLIRAAEIRASANLAATKMSECVLGQSKRVDFCGKGYHLMSFPQSAPHGVVFLHVTYVPAQEKNFTTAPAICHDGKAHFPREGVFVSNGTHWFVTQRNFCEPQIITTDNTFVSGNCDVVIGIVNNTVYDPLQPELDSFKEELDKYFKNHTSPDVDLGDISGINASVVNIQKEIDRLNEVAKNLNESLIDLQELGKYEQYIKGGGGSDIDPYKEFGSSYQLLNFLPLDFFPDLNALVDTATALYEEELTGREHCSPHHTAIRQALVCWDELTKLIAWMSSNITSEQVRTIIVNHVNDTWGLKVRQSLWFHLSCLTFGQHTVQEFLVSFGVWIRTPAPYRPPNAPILSTLPEHTVIC

SEQ ID NO: 7077 - protein, 1365 aa, Artificial Sequence
  SARS-CoV-2/China/WF0004/2020__EPI_ISL_413694 spike protein (1-1211)(I714C_Y1110C) WhcAg construct
MFVFLVLLPLVSSQCVNLTTRTQLPPAYTNSFTRGVYYPDKVFRSSVLHSTQDLFLPFFSNVTWFHAIHVSGTNGTKRFDNPVLPFNDGVYFASTEKSNIIRGWIFGTTLDSKTQSLLIVNNATNVVIKVCEFQFCNDPFLGVYYHKNNKSWTESEFRVYSSANNCTFEYVSQPFLMDLEGKQGNFKNLREFVFKNIDGYFKIYSKHTPINLVRDLPQGFSALEPLVDLPIGINITRFQTLLALHRSYLTPGDSSSGWTAGAAAYYVGYLQPRTFLLKYNENGTITDAVDCALDPLSETKCTLKSFTVEKGIYQTSNFRVQPTESIVRFPNITNLCPFGEVFNATRFASVYAWNRKRISNCVADYSVLYNSASFSTFKCYGVSPTKLNDLCFTNVYADSFVIRGDEVRQIAPGQTGKIADYNYKLPDDFTGCVIAWNSNNLDSKVGGNYNYLYRLFRKSNLKPFERDISTEIYQAGSTPCNGVEGFNCYFPLQSYGFQPTNGVGYQPYRVVVLSFELLHAPATVCGPKKSTNLVKNKCVNFNFNGLTGTGVLTESNKKFLPFQQFGRDIADTTDAVRDPQTLEILDITPCSFGGVSVITPGTNTSNQVAVLYQDVNCTEVPVAIHADQLTPTWRVYSTGSNVFQTRAGCLIGAEHVNNSYECDIPIGAGICASYQTQTNSPRRARSVASQSIIAYTMSLGAENSVAYSNNSIACPTNFTISVTTEILPVSMTKTSVDCTMYICGDSTECSNLLLQYGSFCTQLNRALTGIAVEQDKNTQEVFAQVKQIYKTPPIKDFGGFNFSQILPDPSKPSKRSFIEDLLFNKVTLADAGFIKQYGDCLGDIAARDLICAQKFNGLTVLPPLLTDEMIAQYTSALLAGTITSGWTFGAGAALQIPFAMQMAYRFNGIGVTQNVLYENQKLIANQFNSAIGKIQDSLSSTASALGKLQDVVNQNAQALNTLVKQLSSNFGAISSVLNDILSRLDKVEAEVQIDRLITGRLQSLQTYVTQQLIRAAEIRASANLAATKMSECVLGQSKRFDFCGKGYHLMSFPQSAPHGVVFLHVTYVPAQEKNFTTAPAICHDGKAHFPREGVFVSNGTHWFVTQRNFCEPQIITTDNTFVSGNCDVVIGIVNNTVYDPLQPELDSFKEELDKYFKNHTSPDVDLGDISGINASVVNIQKEIDRLNEVAKNLNESLIDLQELGKYEQYIKGGGGSDIDPYKEFGSSYQLLNFLPLDFFPDLNALVDTATALYEEELTGREHCSPHHTAIRQALVCWDELTKLIAWMSSNITSEQVRTIIVNHVNDTWGLKVRQSLWFHLSCLTFGQHTVQEFLVSFGVWIRTPAPYRPPNAPILSTLPEHTVIC

SEQ ID NO: 7078 - protein, 1365 aa, Artificial Sequence
  SARS-CoV-2/China/WF0028/2020__EPI_ISL_413791 spike protein (1-1211)(I714C_Y1110C) WhcAg construct
MFVFLVLLPLVSSQCVNLTTRTQLPPAYTNSFTRGVYYPDKVFRSSVLHSTQDLFLPFFSNVTWFHAIHVSGTNGTKRFDNPVLPFNDGVYFASTEKSNIIRGWIFGTTLDSKTQSLLIVNNATNVVIKVCEFQFCNDPFLGVYYHKNNKSWMESEFRVYSSANNCTFEYVSQPFLMDLEGKQGNFKNLREFVFKNIDGYFKIYSKHTPINLVRDLPQGFSALEPLVDLPIGINITRFQTLLALHRSYLTPGDSSSGWTAGAAAYYVGYLQPRTFLLKYNENGTITDAVDCALDPLSETKCTLKSFTVEKGIYQTSNFRVQPTESIVRFPNITNLCPFGEVFNATRFASVYAWNRKRISNCVADYSVLYNSASFSTFKCYGVSPTKLNDLCFTNVYADSFVIRGDEVRQIAPGQTGKIADYNYKLPDDFTGCVIAWNSNNLDSKVGGNYNYLYRLFRKSNLKPFERDISTEIYQAGSTPCNGVEGFNCYFPLQSYGFQPTNGVGYQPYRVVVLSFELLHAPATVCGPKKSTNLVKNKCVNFNFNGLTGTGVLTESNKKFLPFQQFGRDIADTTDAVRDPQTLEILDITPCSFGGVSVITPGTNTSNQVAVLYQDVNCTEVPVAIHADQLTPTWRVYSTGSNVFQTRAGCLIGAEHVNNSYECDIPIGAGICASYQTQTNSPRRARSVASQSIIAYTMSLGAENSVAYSNNSIACPTNFTISVTTEILPVSMTKTSVDCTMYICGDSTECSNLLLQYGSFCTQLNRALTGIAVEQDKNTQEVFAQVKQIYKTPPIKDFGGFNFSQILPDPSKPSKRSFIEDLLFNKVTLADAGFIKQYGDCLGDIAARDLICAQKFNGLTVLPPLLTDEMIAQYTSALLAGTITSGWTFGAGAALQIPFAMQMAYRFNGIGVTQNVLYENQKLIANQFNSAIGKIQDSLSSTASALGKLQDVVNQNAQALNTLVKQLSSNFGAISSVLNDILSRLDKVEAEVQIDRLITGRLQSLQTYVTQQLIRAAEIRASANLAATKMSECVLGQSKRVDFCGKGYHLMSFPQSAPHGVVFLHVTYVPAQEKNFTTAPAICHDGKAHFPREGVFVSNGTHWFVTQRNFCEPQIITTDNTFVSGNCDVVIGIVNNTVYDPLQPELESFKEELDKYFKNHTSPDVDLGDISGINASVVNIQKEIDRLNEVAKNLNESLIDLQELGKYEQYIKGGGGSDIDPYKEFGSSYQLLNFLPLDFFPDLNALVDTATALYEEELTGREHCSPHHTAIRQALVCWDELTKLIAWMSSNITSEQVRTIIVNHVNDTWGLKVRQSLWFHLSCLTFGQHTVQEFLVSFGVWIRTPAPYRPPNAPILSTLPEHTVIC

SEQ ID NO: 7079 - protein, 1365 aa, Artificial Sequence
  SARS-CoV-2/2019-nCoV/USA-CruiseA-18/2020__MT159716.1 spike protein (1-1211)(I714C_Y1110C) WhcAg construct
MFVFLVLLPLVSSQCVNLTTRTQLPPAYTNSFTRGVYYPDKVFRSSVLHSTQDLFLPFFSNVTWFHAIHVSGTNGTKRFDNPVLPFNDGVYFASTEKSNIIRGWIFGTTLDSKTQSLLIVNNATNVVIKVCEFQFCNDPFLGVYYHKNNKSWMESELRVYSSANNCTFEYVSQPFLMDLEGKQGNFKNLREFVFKNIDGYFKIYSKHTPINLVRDLPQGFSALEPLVDLPIGINITRFQTLLALHRSYLTPGDSSSGWTAGAAAYYVGYLQPRTFLLKYNENGTITDAVDCALDPLSETKCTLKSFTVEKGIYQTSNFRVQPTESIVRFPNITNLCPFGEVFNATRFASVYAWNRKRISNCVADYSVLYNSASFSTFKCYGVSPTKLNDLCFTNVYADSFVIRGDEVRQIAPGQTGKIADYNYKLPDDFTGCVIAWNSNNLDSKVGGNYNYLYRLFRKSNLKPFERDISTEIYQAGSTPCNGVEGFNCYFPLQSYGFQPTNGVGYQPYRVVVLSFELLHAPATVCGPKKSTNLVKNKCVNFNFNGLTGTGVLTESNKKFLPFQQFGRDIADTTDAVRDPQTLEILDITPCSFGGVSVITPGTNTSNQVAVLYQDVNCTEVPVAIHADQLTPTWRVYSTGSNVFQTRAGCLIGAEHVNNSYECDIPIGAGICASYQTQTNSPRRARSVASQSIIAYTMSLGAENSVAYSNNSIACPTNFTISVTTEILPVSMTKTSVDCTMYICGDSTECSNLLLQYGSFCTQLNRALTGIAVEQDKNTQEVFAQVKQIYKTPPIKDFGGFNFSQILPDPSKPSKRSFIEDLLFNKVTLADAGFIKQYGDCLGDIAARDLICAQKFNGLTVLPPLLTDEMIAQYTSALLAGTITSGWTFGAGAALQIPFAMQMAYRFNGIGVTQNVLYENQKLIANQFNSAIGKIQDSLSSTASALGKLQDVVNQNAQALNTLVKQLSSNFGAISSVLNDILSRLDKVEAEVQIDRLITGRLQSLQTYVTQQLIRAAEIRASANLAATKMSECVLGQSKRVDFCGKGYHLMSFPQSAPHGVVFLHVTYVPAQEKNFTTAPAICHDGKAHFPREGVFVSNGTHWFVTQRNFCEPQIITTDNTFVSGNCDVVIGIVNNTVYDPLQPELDSFKEELDKYFKNHTSPDVDLGDISGINASVVNIQKEIDRLNEVAKNLNESLIDLQELGKYEQYIKGGGGSDIDPYKEFGSSYQLLNFLPLDFFPDLNALVDTATALYEEELTGREHCSPHHTAIRQALVCWDELTKLIAWMSSNITSEQVRTIIVNHVNDTWGLKVRQSLWFHLSCLTFGQHTVQEFLVSFGVWIRTPAPYRPPNAPILSTLPEHTVIC

SEQ ID NO: 7080 - protein, 1365 aa, Artificial Sequence
  SARS-CoV-2/SARS-CoV-2/Yunnan-01/human/2020/CHN__MT049951.1 spike protein (1-1211)(I714C_Y1110C) WhcAg construct
MFVFLVLLPLVSSQCVNLTTRTQLPPANTNSFTRGVYYPDKVFRSSVLHSTQDLFLPFFSNVTWFHAIHVSGTNGTKRFDNPVLPFNDGVYFASTEKSNIIRGWIFGTTLDSKTQSLLIVNNATNVVIKVCEFQFCNDPFLGVYYHKNNKSWMESEFRVYSSANNCTFEYVSQPFLMDLEGKQGNFKNLREFVFKNIDGYFKIYSKHTPINLVRDLPQGFSALEPLVDLPIGINITRFQTLLALHRSYLTPGDSSSGWTAGAAAYYVGYLQPRTFLLKYNENGTITDAVDCALDPLSETKCTLKSFTVEKGIYQTSNFRVQPTESIVRFPNITNLCPFGEVFNATRFASVYAWNRKRISNCVADYSVLYNSASFSTFKCYGVSPTKLNDLCFTNVYADSFVIRGDEVRQIAPGQTGKIADYNYKLPDDFTGCVIAWNSNNLDSKVGGNYNYLYRLFRKSNLKPFERDISTEIYQAGSTPCNGVEGFNCYFPLQSYGFQPTNGVGYQPYRVVVLSFELLHAPATVCGPKKSTNLVKNKCVNFNFNGLTGTGVLTESNKKFLPFQQFGRDIADTTDAVRDPQTLEILDITPCSFGGVSVITPGTNTSNQVAVLYQDVNCTEVPVAIHADQLTPTWRVYSTGSNVFQTRAGCLIGAEHVNNSYECDIPIGAGICASYQTQTNSPRRARSVASQSIIAYTMSLGAENSVAYSNNSIACPTNFTISVTTEILPVSMTKTSVDCTMYICGDSTECSNLLLQYGSFCTQLNRALTGIAVEQDKNTQEVFAQVKQIYKTPPIKDFGGFNFSQILPDPSKPSKRSFIEDLLFNKVTLADAGFIKQYGDCLGDIAARDLICAQKFNGLTVLPPLLTDEMIAQYTSALLAGTITSGWTFGAGAALQIPFAMQMAYRFNGIGVTQNVLYENQKLIANQFNSAIGKIQDSLSSTASALGKLQDVVNQNAQALNTLVKQLSSNFGAISSVLNDILSRLDKVEAEVQIDRLITGRLQSLQTYVTQQLIRAAEIRASANLAATKMSECVLGQSKRVDFCGKGYHLMSFPQSAPHGVVFLHVTYVPAQEKNFTTAPAICHDGKAHFPREGVFVSNGTHWFVTQRNFCEPQIITTDNTFVSGNCDVVIGIVNNTVYDPLQPELDSFKEELDKYFKNHTSPDVDLGDISGINASVVNIQKEIDRLNEVAKNLNESLIDLQELGKYEQYIKGGGGSDIDPYKEFGSSYQLLNFLPLDFFPDLNALVDTATALYEEELTGREHCSPHHTAIRQALVCWDELTKLIAWMSSNITSEQVRTIIVNHVNDTWGLKVRQSLWFHLSCLTFGQHTVQEFLVSFGVWIRTPAPYRPPNAPILSTLPEHTVIC

SEQ ID NO: 7081 - protein, 1365 aa, Artificial Sequence
  SARS-CoV-2/USA/WA-UW292/2020__EPI_ISL_418077 spike protein (1-1211)(I714C_Y1110C) WhcAg construct
MFVFLVLLPLVSSQCVNLTTRTQLPPAYTNSFTRGVYYPDKVFRSSVLHSTQDLFLPFFSNVTWFHAIHVSGTNGTKRFDNPVLPFNDGVYFASTEKSNIIRGWIFGTTLDSKTQSLLIVNNATNVVIKVCEFQFCNDPFLGVYYHKNNKSWMESEFRVYSSANNCTFEYVSQPFLMDLEGKQGNFKNLREFVFKNIDGYFKIYSKHTPINLVRDLPQGFSALEPLVDLPIGINITRFQTLLALHRSYLTPGDSSSGWTAGAAAYYVGYLQPRTFLLKYNENGTITDAVDCALDPLSETKCTLKSFTVEKGIYQTSNFRVQPTESIVRFPNITNLCPFGEVFNATRFASVYAWNRKRISNCVADYSVLYNSASFSTFKCYGVSPTKLNDLCFTNVYADSFVIRGDEVRQIAPGQTGKIADYNYKLPDDFTGCVIAWNSNNLDSKVGGNYNYLYRLFRKSNLKPFERDISTEIYQASSTPCNGVEGFNCYFPLQSYGFQPTNGVGYQPYRVVVLSFELLHAPATVCGPKKSTNLVKNKCVNFNFNGLTGTGVLTESNKKFLPFQQFGRDIADTTDAVRDPQTLEILDITPCSFGGVSVITPGTNTSNQVAVLYQDVNCTEVPVAIHADQLTPTWRVYSTGSNVFQTRAGCLIGAEHVNNSYECDIPIGAGICASYQTQTNSPRRARSVASQSIIAYTMSLGAENSVAYSNNSIACPTNFTISVTTEILPVSMTKTSVDCTMYICGDSTECSNLLLQYGSFCTQLNRALTGIAVEQDKNTQEVFAQVKQIYKTPPIKDFGGFNFSQILPDPSKPSKRSFIEDLLFNKVTLADAGFIKQYGDCLGDIAARDLICAQKFNGLTVLPPLLTDEMIAQYTSALLAGTITSGWTFGAGAALQIPFAMQMAYRFNGIGVTQNVLYENQKLIANQFNSAIGKIQDSLSSTASALGKLQDVVNQNAQALNTLVKQLSSNFGAISSVLNDILSRLDKVEAEVQIDRLITGRLQSLQTYVTQQLIRAAEIRASANLAATKMSECVLGQSKRVDFCGKGYHLMSFPQSAPHGVVFLHVTYVPAQEKNFTTAPAICHDGKAHFPREGVFVSNGTHWFVTQRNFCEPQIITTDNTFVSGNCDVVIGIVNNTVYDPLQPELDSFKEELDKYFKNHTSPDVDLGDISGINASVVNIQKEIDRLNEVAKNLNESLIDLQELGKYEQYIKGGGGSDIDPYKEFGSSYQLLNFLPLDFFPDLNALVDTATALYEEELTGREHCSPHHTAIRQALVCWDELTKLIAWMSSNITSEQVRTIIVNHVNDTWGLKVRQSLWFHLSCLTFGQHTVQEFLVSFGVWIRTPAPYRPPNAPILSTLPEHTVIC

SEQ ID NO: 7082 - protein, 1365 aa, Artificial Sequence
  SARS-CoV-2/Iceland/192/2020__EPI_ISL_417819 spike protein (1-1211)(I714C_Y1110C) WhcAg construct
MFVFFVLLPLVSSQCVNLTTRTQLPPAYTNSFTRGVYYPDKVFRSSVLHSTQDLFLPFFSNVTWFHAIHVSGTNGTKRFDNPVLPFNDGVYFASTEKSNIIRGWIFGTTLDSKTQSLLIVNNATNVVIKVCEFQFCNDPFLGVYYHKNNKSWMESEFRVYSSANNCTFEYVSQPFLMDLEGKQGNFKNLREFVFKNIDGYFKIYSKHTPINLVRDLPQGFSALEPLVDLPIGINITRFQTLLALHRSYLTPGDSSSGWTAGAAAYYVGYLQPRTFLLKYNENGTITDAVDCALDPLSETKCTLKSFTVEKGIYQTSNFRVQPTESIVRFPNITNLCPFGEVFNATRFASVYAWNRKRISNCVADYSVLYNSASFSTFKCYGVSPTKLNDLCFTNVYADSFVIRGDEVRQIAPGQTGKIADYNYKLPDDFTGCVIAWNSNNLDSKVGGNYNYLYRLFRKSNLKPFERDISTEIYQAGSTPCNGVEGFNCYFPLQSYGFQPTNGVGYQPYRVVVLSFELLHAPATVCGPKKSTNLVKNKCVNFNFNGLTGTGVLTESNKKFLPFQQFGRDIADTTDAVRDPQTLEILDITPCSFGGVSVITPGTNTSNQVAVLYQGVNCTEVPVAIHADQLTPTWRVYSTGSNVFQTRAGCLIGAEHVNNSYECDIPIGAGICASYQTQTNSPRRARSVASQSIIAYTMSLGAENSVAYSNNSIACPTNFTISVTTEILPVSMTKTSVDCTMYICGDSTECSNLLLQYGSFCTQLNRALTGIAVEQDKNTQEVFAQVKQIYKTPPIKDFGGFNFSQILPDPSKPSKRSFIEDLLFNKVTLADAGFIKQYGDCLGDIAARDLICAQKFNGLTVLPPLLTDEMIAQYTSALLAGTITSGWTFGAGAALQIPFAMQMAYRFNGIGVTQNVLYENQKLIANQFNSAIGKIQDSLSSTASALGKLQDVVNQNAQALNTLVKQLSSNFGAISSVLNDILSRLDKVEAEVQIDRLITGRLQSLQTYVTQQLIRAAEIRASANLAATKMSECVLGQSKRVDFCGKGYHLMSFPQSAPHGVVFLHVTYVPAQEKNFTTAPAICHDGKAHFPREGVFVSNGTHWFVTQRNFCEPQIITTDNTFVSGNCDVVIGIVNNTVYDPLQPELDSFKEELDKYFKNHTSPDVDLGDISGINASVVNIQKEIDRLNEVAKNLNESLIDLQELGKYEQYIKGGGGSDIDPYKEFGSSYQLLNFLPLDFFPDLNALVDTATALYEEELTGREHCSPHHTAIRQALVCWDELTKLIAWMSSNITSEQVRTIIVNHVNDTWGLKVRQSLWFHLSCLTFGQHTVQEFLVSFGVWIRTPAPYRPPNAPILSTLPEHTVIC

SEQ ID NO: 7083 - protein, 1365 aa, Artificial Sequence
  SARS-CoV-2/Belgium/ULG-6939/2020__EPI_ISL_417020 spike protein (1-1211)(I714C_Y1110C) WhcAg construct
MFVFLVLLPLVSSQCVNLTTRTQLPPAYTNSFTRGVYYPDKVFRSSVLHSTQDLFLPFFSNVTWFHAIHVSGTNGTKRFDNPVLPFNDGVYFASTEKSNIIRGWIFGTTLDSKTQSLLIVNNATNVVIKVCEFQFCNDPFLGVYYHKNNKSWMESEFRVYSSANNCTFEYVSQPFLMDLEGKQGNFKNLREFVFKNIDGYFKIYSKHTPINLVRDLPQGFSALEPLVDLPIGINITRFQTLLALHRSYLTPGDSSSGWTAGAAAYYVGYLQPRTFLLKYNENGTITDAVDCALDPLSETKCTLKSFTVEKGIYQTSNFRVQPTESIVRFPNITNLCPFGEVFNATRFASVYAWNRKRISNCVADYSVLYNSASFSTFKCYGVSPTKLNDLCFTNVYADSFVIRGDEVRQIAPGQTGKIADYNYKLPDDFTGCVIAWNSNNLDSKVGGNYNYLYRLFRKSNLKPFERDISTEIYQAGSTPCNGVEGFNCYFPLQSYGFQPTNGVGYQPYRVVVLSFELLHAPATVCGPKKSTNLVKNKCVNFNFNGLTGTGVLTESNKKFLPFQQFGRDIADTTDAVRDPQTLEILDITPCSFGGVSVITPGTNTSNQVAVLYQGVNCTEVPVAIHADQLTPTWRVYSTGSNVFQTRAGCLIGAEHVNNSYECDIPIGAGICASYQTQTNSPRRARSVASQSIIAYTMSLGAENSVVYSNNSIACPTNFTISVTTEILPVSMTKTSVDCTMYICGDSTECSNLLLQYGSFCTQLNRALTGIAVEQDKNTQEVFAQVKQIYKTPPIKDFGGFNFSQILPDPSKPSKRSFIEDLLFNKVTLADAGFIKQYGDCLGDIAARDLICAQKFNGLTVLPPLLTDEMIAQYTSALLAGTITSGWTFGAGAALQIPFAMQMAYRFNGIGVTQNVLYENQKLIANQFNSAIGKIQDSLSSTASALGKLQDVVNQNAQALNTLVKQLSSNFGAISSVLNDILSRLDKVEAEVQIDRLITGRLQSLQTYVTQQLIRAAEIRASANLAATKMSECVLGQSKRVDFCGKGYHLMSFPQSAPHGVVFLHVTYVPAQEKNFTTAPAICHDGKAHFPREGVFVSNGTHWFVTQRNFCEPQIITTDNTFVSGNCDVVIGIVNNTVYDPLQPELDSFKEELDKYFKNHTSPDVDLGDISGINASVVNIQKEIDRLNEVAKNLNESLIDLQELGKYEQYIKGGGGSDIDPYKEFGSSYQLLNFLPLDFFPDLNALVDTATALYEEELTGREHCSPHHTAIRQALVCWDELTKLIAWMSSNITSEQVRTIIVNHVNDTWGLKVRQSLWFHLSCLTFGQHTVQEFLVSFGVWIRTPAPYRPPNAPILSTLPEHTVIC

SEQ ID NO: 7084 - protein, 1365 aa, Artificial Sequence
  SARS-CoV-2/France/HF2496/2020__EPI_ISL_418231 spike protein (1-1211)(I714C_Y1110C) WhcAg construct
MFVFLVLLPLVSSQCVNLTTRTQLPPAYTNSFTRGVYYPDKVFRSSVLHSTQDLFLPFFSNVTWFHAIHVSGTNGTKRFDNPVLPFNDGVYFASTEKSNIIRGWIFGTTLDSKTQSLLIVNNATNVVIKVCEFQFCNDPFLGVYYHKNNKSWMESEFRVYSSANNCTFEYVSQPFLMDLEGKQGNFKNLREFVFKNIDGYFKIYSKHTPINLVRDLPQGFSALEPLVDLPIGINITRFQTLLALHRSYLTPGDSSSGWTAGAAAYYVGYLQPRTFLLKYNENGTITDAVDCALDPLSETKCTLKSFTVEKGIYQTSNFRVQPTESIVRFPNITNLCPFGEVFNATRFASVYAWNRKRISNCVADYSVLYNSASFSTFKCYGVSPTKLNDLCFTNVYADSFVIRGDEVRQIAPGQTGKIADYNYKLPDDFTGCVIAWNSNNLDSKVGGNYNYLYRLFRKSNLKPFERDISTEIYQAGSTPCNGVEGFNCYFPLQSYGFQPTNGVGYQPYRVVVLSFELLHAPATVCGPKKSTNLVKNKCVNFNFNGLTGTGVLTESNKKFLPFQQFGRDIADTTDAVRDPQTLEILDITPCSFGGVSVITPGTNTSNQVAVLYQGVNCTEVPVAIHADQLTPTWRVYSTGSNVFQTRAGCLIGAEHVNNSYECDIPIGAGICASYQTQTNSPRRARSVASQSIIAYTMSLGAENSVAYSNNSIACPTNFTISVTTEILPVSMTKTSVDCTMYICGDSTECSNLLLQYGSFCTQLNRALTGIAVEQDKNTQEVFAQVKQIYKTPPIKDFGGFNFSQILPDPSKPSKRSFIEDLLFNKVTLADAGFIKQYGDCLGDIVARDLICAQKFNGLTVLPPLLTDEMIAQYTSALLAGTITSGWTFGAGAALQIPFAMQMAYRFNGIGVTQNVLYENQKLIANQFNSAIGKIQDSLSSTASALGKLQDVVNQNAQALNTLVKQLSSNFGAISSVLNDILSRLDKVEAEVQIDRLITGRLQSLQTYVTQQLIRAAEIRASANLAATKMSECVLGQSKRVDFCGKGYHLMSFPQSAPHGVVFLHVTYVPAQEKNFTTAPAICHDGKAHFPREGVFVSNGTHWFVTQRNFCEPQIITTDNTFVSGNCDVVIGIVNNTVYDPLQPELDSFKEELDKYFKNHTSPDVDLGDISGINASVVNIQKEIDRLNEVAKNLNESLIDLQELGKYEQYIKGGGGSDIDPYKEFGSSYQLLNFLPLDFFPDLNALVDTATALYEEELTGREHCSPHHTAIRQALVCWDELTKLIAWMSSNITSEQVRTIIVNHVNDTWGLKVRQSLWFHLSCLTFGQHTVQEFLVSFGVWIRTPAPYRPPNAPILSTLPEHTVIC

SEQ ID NO: 7085 - protein, 1365 aa, Artificial Sequence
  SARS-CoV-2/USA/WA-UW291/2020__EPI_ISL_418076 spike protein (1-1211)(I714C_Y1110C) WhcAg construct
MFVFLVLLPLVSSQCVNLTTRTQLPPAYTNSFTRGVYYPDKVFRSSVLHSTQDLFLPFFSNVTWFHAIHVSGTNGTKRFDNPVLPFNDGVYFASTEKSNIIRGWIFGTTLDSKTQSLLIVNNATNVVIKVCEFQFCNDPFLGVYYHKNNKSWMESEFRVYSSANNCTFEYVSQPFLMDLEGKQGNFKNLREFVFKNIDGYFKIYSKHTPINLVRDLPQGFSALEPLVDLPIGINITRFQTLLALHRSYLTPGDSSSGWTAGAAAYYVGYLQPRTFLLKYNENGTITDAVDCALDPLSETKCTLKSFTVEKGIYQTSNFRVQPTESIVRFPNITNLCPFGEVFNATRFASVYAWNRKRISNCVADYSVLYNSASFSTFKCYGVSPTKLNDLCFTNVYADSFVIRGDEVRQIAPGQTGKIADYNYKLPDDFTGCVIAWNSNNLDSKVGGNYNYLYRLFRKSNLKPFERDISTEIYQAGSTPCNGVEGFNCYFPLQSYGFQPTNGVGYQPYRVVVLSFELLHAPATVCGPKKSTNLVKNKCVNFNFNGLTGTGVLTESNKKFLPFQQFGRDIADTTDAVRDPQTLEILDITPCSFGGVSVITPGTNTSNQVAVLYQGVNCTEVPVAIHADQLTPTWRVYSTGSNVFQTRAGCLIGAEHVNNSYECDIPIGAGICASYQTQTNSPRRARSVASQSIIAYTMSLGAENSVAYSNNSIACPTNFTISVTTEILPVSMTKTSVDCTMYICGDSTECSNLLLQYGSFCTQLNRALTGIAVEQDKNTQEVFAQVKQIYKTPPIKDFGGFNFSQILPDPSKPSKRSFIEDLLFNKVTLADAGFIKQYGDCLGDIAARDLICAQKFNGLTVLPPLLTDEMIAQYTSALLAGTITSGWTFGAGAALQIPFAMQMAYRFNGIGVTQNVLYENQKLIANQFNSAIGKIQYSLSSTASALGKLQDVVNQNAQALNTLVKQLSSNFGAISSVLNDILSRLDKVEAEVQIDRLITGRLQSLQTYVTQQLIRAAEIRASANLAATKMSECVLGQSKRVDFCGKGYHLMSFPQSAPHGVVFLHVTYVPAQEKNFTTAPAICHDGKAHFPREGVFVSNGTHWFVTQRNFCEPQIITTDNTFVSGNCDVVIGIVNNTVYDPLQPELDSFKEELDKYFKNHTSPDVDLGDISGINASVVNIQKEIDRLNEVAKNLNESLIDLQELGKYEQYIKGGGGSDIDPYKEFGSSYQLLNFLPLDFFPDLNALVDTATALYEEELTGREHCSPHHTAIRQALVCWDELTKLIAWMSSNITSEQVRTIIVNHVNDTWGLKVRQSLWFHLSCLTFGQHTVQEFLVSFGVWIRTPAPYRPPNAPILSTLPEHTVIC

SEQ ID NO: 7086 - protein, 1365 aa, Artificial Sequence; identical to SEQ ID NO: 7049
  SARS-CoV-2/Portugal/PT0034/2020__EPI_ISL_418019 spike protein (1-1211)(I714C_Y1110C) WhcAg construct

SEQ ID NO: 7087 - protein, 1365 aa, Artificial Sequence
  SARS-CoV-2/Iceland/202/2020__EPI_ISL_417750 spike protein (1-1211)(I714C_Y1110C) WhcAg construct
MFVFLVLLPLVSSQCVNLTTRTQLPPAYTNSFTRGVYYPDKVFRSSVLHSTQDLFLPFFSNVTWFHAIHVSGTNGTKRFDNPVLPFNDGVYFASTEKSNIIRGWIFGTTLDSKTQSLLIVNNATNVVIKVCEFQFCNDPFLGVYYHKNNKSWMESEFRVYSSANNCTFEYVSQPFLMDLEGKQGNFKNLREFVFKNIDGYFKIYSKHTPINLVRDLPQGFSALEPLVDLPIGINITRFQTLLALHRSYLTPGDSSSGWTAGAAAYYVGYLQPRTFLLKYNENGTITDAVDCALDPLSETKCTLKSFTVEKGIYQTSNFRVQPTESIVRFPNITNLCPFGEVFNATRFASVYAWNRKRISNCVADYSVLYNSASFSTFKCYGVSPTKLNDLCFTNVYADSFVIRGDEVRQIAPGQTGKIADYNYKLPDDFTGCVIAWNSNNLDSKVGGNYNYLYRLFRKSNLKPFERDISTEIYQAGSTPCNGVEGFNCYFPLQSYGFQPTNGVGYQPYRVVVLSFELLHAPATVCGPKKSTNLVKNKCVNFNFNGLTGTGVLTESNKKFLPFQQFGRDIADTTDAVRDPQTLEILDITPCSFGGVSVITPGTNTSNQVAVLYQDVNCTEVPVAIHADQLTPTWRVYSTGSNVFQTRAGCLIGAEHVNNSYECDIPIGAGICASYQTQTNSPRRARSVASQSIIAYTMSLGAENSVAYSNNSIACPTNFTISVTTEILPVSMTKTSVDCTMYICGDSTECSNLLLQYGSFCTQLNRALTGIAVEQDKNTQEVFAQVKQIYKTPPIKDFGGFNFSQILPDPSKPSKRSFIEDLLFNKVTLADAGFIKQYGDCLGDIAARDLICAQKFNGLTVLPPLLTDEMIAQYTSALLAGTITSGWTFGAGAALQIPFAMQMAYRFNGIGVTQNVLYENQKLIANQFNSAIGKIQDSLSSTASALGKLQDVVNQNAQALNTLVKQLSSNFGAISSVLNDILSRLDKVEAEVQIDRLITGRLQSLQTYVTQQLIRAAEIRASANLAATKMSECVLGQSKRVDFCGKGYHLMSFPQSAPHGVVFLHVTYVPAQEKNFTTAPAICHDGKAHFPREGVFVSNGTHWFVTQRNFCEPQIITTDNTFVSGNCDVVIGIVNNTVYDPLQPELDSFKEELDKYFKNHTSPDVDLGDIPGINASVVNIQKEIDRLNEVAKNLNESLIDLQELGKYEQYIKGGGGSDIDPYKEFGSSYQLLNFLPLDFFPDLNALVDTATALYEEELTGREHCSPHHTAIRQALVCWDELTKLIAWMSSNITSEQVRTIIVNHVNDTWGLKVRQSLWFHLSCLTFGQHTVQEFLVSFGVWIRTPAPYRPPNAPILSTLPEHTVIC

SEQ ID NO: 7088 - protein, 1365 aa, Artificial Sequence
  SARS-CoV-2/USA/WA-UW261/2020__EPI_ISL_418046 spike protein (1-1211)(I714C_Y1110C) WhcAg construct
MFVFLVLLPLVSSQCVNLTTRTQLPPAYTNSFTRGVYYPDKVFRSSVLHSTQDLFLPFFSNVTWFHAIHVSGTNGTKRFDNPVLPFNDGVYFASTEKSNIIRGWIFGTTLDSKTQSLLIVNNATNVVIKVCEFQFCNDPFLGVYYHKNNKSWMESEFRVYSSANNCTFEYVSQPFLMDLEGKQGNFKNLREFVFKNIDGYFKIYSKHTPINLVRDLPQGFSALEPLVDLPIGINITRFQTLLALHRSYLTPGDSSSGWTAGAAAYYVGYLQPRTFLLKYNENGTITDAVDCALDPLSETKCTLKSFTVEKGIYQTSNFRVQPTESIVRFPNITNLCPFGEVFNATRFTSVYAWNRKRISNCVADYSVLYNSASFSTFKCYGVSPTKLNDLCFTNVYADSFVIRGDEVRQIAPGQTGKIADYNYKLPDDFTGCVIAWNSNNLDSKVGGNYNYLYRLFRKSNLKPFERDISTEIYQAGSTPCNGVEGFNCYFPLQSYGFQPTNGVGYQPYRVVVLSFELLHAPATVCGPKKSTNLVKNKCVNFNFNGLTGTGVLTESNKKFLPFQQFGRDIADTTDAVRDPQTLEILDITPCSFGGVSVITPGTNTSNQVAVLYQDVNCTEVPVAIHADQLTPTWRVYSTGSNVFQTRAGCLIGAEHVNNSYECDIPIGAGICASYQTQTNSPRRARSVASQSIIAYTMSLGAENSVAYSNNSIACPTNFTISVTTEILPVSMTKTSVDCTMYICGDSTECSNLLLQYGSFCTQLNRALTGIAVEQDKNTQEVFAQVKQIYKTPPIKDFGGFNFSQILPDPSKPSKRSFIEDLLFNKVTLADAGFIKQYGDCLGDIAARDLICAQKFNGLTVLPPLLTDEMIAQYTSALLAGTITSGWTFGAGAALQIPFAMQMAYRFNGIGVTQNVLYENQKLIANQFNSAIGKIQDSLSSTASALGKLQDVVNQNAQALNTLVKQLSSNFGAISSVLNDILSRLDKVEAEVQIDRLITGRLQSLQTYVTQQLIRAAEIRASANLAATKMSECVLGQSKRVDFCGKGYHLMSFPQSAPHGVVFLHVTYVPAQEKNFTTAPAICHDGKAHFPREGVFVSNGTHWFVTQRNFCEPQIITTDNTFVSGNCDVVIGIVNNTVYDPLQPELDSFKEELDKYFKNHTSPDVDLGDISGINASVVNIQKEIDRLNEVAKNLNESLIDLQELGKYEQYIKGGGGSDIDPYKEFGSSYQLLNFLPLDFFPDLNALVDTATALYEEELTGREHCSPHHTAIRQALVCWDELTKLIAWMSSNITSEQVRTIIVNHVNDTWGLKVRQSLWFHLSCLTFGQHTVQEFLVSFGVWIRTPAPYRPPNAPILSTLPEHTVIC

SEQ ID NO: 7089 - protein, 1365 aa, Artificial Sequence
  SARS-CoV-2/Portugal/PT0035/2020__EPI_ISL_418020 spike protein (1-1211)(I714C_Y1110C) WhcAg construct
MFVFLVLLPLVSSQCVNLTTRTQLPPAYTNSFTRGVYYPDKVFRSSVLHSTQDLFLPFFSNVTWFHAIHVSGTNGTKRFDNPVLPFNDGVYFASTEKSNIIRGWIFGTTLDSKTQSLLIVNNATNVVIKVCEFQFCNDPFLGVYYHKNNKSWMESEFRVYSSANNCTFEYVSQPFLMDLEGKQGNFKNLREFVFKNIDGYFKIYSKHTPINLVRDLPQGFSALEPLVDLPIGINITRFQTLLALHRSYLTPGDSSSGWTAGAAAYYVGYLQPRTFLLKYNENGTITDAVDCALDPLSETKCTLKSFTVEKGIYQTSNFRVQPTESIVRFPNITNLCPFGEVFNATRFASVYAWNRKRISNCVADYSVLYNSASFSTFKCYGVSPTKLNDLCFTNVYADSFVIRGDEVRQIAPGQTGKIADYNYKLPDDFTGCVIAWNSNNLDSKVGGNYNYLYRLFRKSNLKPFERDISTEIYQAGSTPCNGVEGFNCYFPLQSYGFQPTNGVGYQPYRVVVLSFELLHAPATVCGPKKSTNLVKNKCVNFNFNGLTGTGVLTESNKKFLPFQQFGRDIADTTDAVRDPQTLEILDITPCSFGGVSVITPGTNTSNQVAVLYQDVNCTEVPVAIHADQLTPTWRVYSTGSNVFQTRAGCLIGAEHVNNSYECDIPIGAGICASYQTQTNSPRRARSVASQSIIAYTMSLGAENSVAYSNNSIACPTNFTISVTTEILPVSMTKTSVDCTMYICGDSTECSNLLLQYGSFCTQLNRALTGIAVEQDKNTQEVFAQVKQIYKTPPIKDFGGFNFSQILPDPSKPSKRSFIEDLLFNKVTLADAGFIKQYGDCLGDISARDLICAQKFNGLTVLPPLLTDEMIAQYTSALLAGTITSGWTFGAGAALQIPFAMQMAYRFNGIGVTQNVLYENQKLIANQFNSAIGKIQDSLSSTASALGKLQDVVNQNAQALNTLVKQLSSNFGAISSVLNDILSRLDKVEAEVQIDRLITGRLQSLQTYVTQQLIRAAEIRASANLAATKMSECVLGQSKRVDFCGKGYHLMSFPQSAPHGVVFLHVTYVPAQEKNFTTAPAICHDGKAHFPREGVFVSNGTHWFVTQRNFCEPQIITTDNTFVSGNCDVVIGIVNNTVYDPLQPELDSFKEELDKYFKNHTSPDVDLGDISGINASVVNIQKEIDRLNEVAKNLNESLIDLQELGKYEQYIKGGGGSDIDPYKEFGSSYQLLNFLPLDFFPDLNALVDTATALYEEELTGREHCSPHHTAIRQALVCWDELTKLIAWMSSNITSEQVRTIIVNHVNDTWGLKVRQSLWFHLSCLTFGQHTVQEFLVSFGVWIRTPAPYRPPNAPILSTLPEHTVIC

SEQ ID NO: 7090 - protein, 1365 aa, Artificial Sequence
  SARS-CoV-2/USA/NY-NYUMC7/2020__EPI_ISL_418192 spike protein (1-1211)(I714C_Y1110C) WhcAg construct
MFVFLVLLPLVSSQCVNLTTRTQLPPAYTNSFTRGVYYPDKVFRSSVLHSTQDLFLPFFSNVTWFHAIHVSGTNGTKRFDNPVLPFNDGVYFASTEKSNIIRGWIFGTTLDSKTQSLLIVNNATNVVIKVCEFQFCNDPFLGVYHHKNNKSWMESEFRVYSSANNCTFEYVSQPFLMDLEGKQGNFKNLREFVFKNIDGYFKIYSKHTPINLVRDLPQGFSALEPLVDLPIGINITRFQTLLALHRSYLTPGDSSSGWTAGAAAYYVGYLQPRTFLLKYNENGTITDAVDCALDPLSETKCTLKSFTVEKGIYQTSNFRVQPTESIVRFPNITNLCPFGEVFNATRFASVYAWNRKRISNCVADYSVLYNSASFSTFKCYGVSPTKLNDLCFTNVYADSFVIRGDEVRQIAPGQTGKIADYNYKLPDDFTGCVIAWNSNNLDSKVGGNYNYLYRLFRKSNLKPFERDISTEIYQAGSTPCNGVEGFNCYFPLQSYGFQPTNGVGYQPYRVVVLSFELLHAPATVCGPKKSTNLVKNKCVNFNFNGLTGTGVLTESNKKFLPFQQFGRDIADTTDAVRDPQTLEILDITPCSFGGVSVITPGTNTSNQVAVLYQGVNCTEVPVAIHADQLTPTWRVYSTGSNVFQTRAGCLIGAEHVNNSYECDIPIGAGICASYQTQTNSPRRARSVASQSIIAYTMSLGAENSVAYSNNSIACPTNFTISVTTEILPVSMTKTSVDCTMYICGDSTECSNLLLQYGSFCTQLNRALTGIAVEQDKNTQEVFAQVKQIYKTPPIKDFGGFNFSQILPDPSKPSKRSFIEDLLFNKVTLADAGFIKQYGDCLGDIAARDLICAQKFNGLTVLPPLLTDEMIAQYTSALLAGTITSGWTFGAGAALQIPFAMQMAYRFNGIGVTQNVLYENQKLIANQFNSAIGKIQDSLSSTASALGKLQDVVNQNAQALNTLVKQLSSNFGAISSVLNDILSRLDKVEAEVQIDRLITGRLQSLQTYVTQQLIRAAEIRASANLAATKMSECVLGQSKRVDFCGKGYHLMSFPQSAPHGVVFLHVTYVPAQEKNFTTAPAICHDGKAHFPREGVFVSNGTHWFVTQRNFCEPQIITTDNTFVSGNCDVVIGIVNNTVYDPLQPELDSFKEELDKYFKNHTSPDVDLGDISGINASVVNIQKEIDRLNEVAKNLNESLIDLQELGKYEQYIKGGGGSDIDPYKEFGSSYQLLNFLPLDFFPDLNALVDTATALYEEELTGREHCSPHHTAIRQALVCWDELTKLIAWMSSNITSEQVRTIIVNHVNDTWGLKVRQSLWFHLSCLTFGQHTVQEFLVSFGVWIRTPAPYRPPNAPILSTLPEHTVIC

SEQ ID NO: 7091 - protein, 1365 aa, Artificial Sequence
  SARS-CoV-2/Iceland/189/2020__EPI_ISL_417709 spike protein (1-1211)(I714C_Y1110C) WhcAg construct
MFVFLVLLPLVSSQCVNLTTRTQLPPAYTNSFTRGVYYPDKVFRSSVLHSTQDLFLPFFSNVTWFHAIHVSGTNGTKRFDNPVLPFNDGVYFASTEKSNIIRGWIFGTTLDSKTQSLLIVNNATNVVIKVCEFQFCNDPFLGVYYHKNNKSWMESEFRVYSSANNCTFEYVSQPFLMDLEGKQGNFKNLREFVFKNIDGYFKIYSKHTPINLVRDLPQGFSALEPLVDLPIGINITRFQTLLALHRSYLTPGDSSSGWTAGAAAYYVGYLQPRTFLLKYNENGTITDAVDCALDPLSETKCTLKSFTVEKGIYQTSNFRVQPTESIVRFPNITNLCPFGEVFNATRFASVYAWNRKRISNCVADYSVLYNSASFSTFKCYGVSPTKLNDLCFTNVYADSFVIRGDEVRQIAPGQTGKIADYNYKLPDDFTGCVIAWNSNNLDSKVGGNYNYLYRLFRKSNLKPFERDISTEIYQAGSTPCNGVEGFNCYFPLQSYGFQPTNGVGYQPYRVVVLSFELLHAPATVCGPKKSTNLVKNKCVNFNFNGLTGTGVLTESNKKFLPFQQFGRDIADTTDAVRDPQTLEILDITPCSFGGVSVITPGTNTSNQVAVLYQGVNCTEVPVAIHADQLTPTWRVYSTGSNVFQTRAGCLIGAEHVNNSYECDIPIGAGICASYQTQTNSPRRARSVASQSIIAYTMSLGAENSVAYSNNSIACPTNFTISVTTEILPVSMTKTSVDCTMYICGDSTECSNLLLQYGSFCTQLNRALTGIAVEQDKNTQEVFAQVKQIYKTPPIKDFGGFNFSQILPDPSKPSKRSFIEDLLFNKVTLADAGFTKQYGDCLGDIAARDLICAQKFNGLTVLPPLLTDEMIAQYTSALLAGTITSGWTFGAGAALQIPFAMQMAYRFNGIGVTQNVLYENQKLIANQFNSAIGKIQDSLSSTASALGKLQDVVNQNAQALNTLVKQLSSNFGAISSVLNDILSRLDKVEAEVQIDRLITGRLQSLQTYVTQQLIRAAEIRASANLAATKMSECVLGQSKRVDFCGKGYHLMSFPQSAPHGVVFLHVTYVPAQEKNFTTAPAICHDGKAHFPREGVFVSNGTHWFVTQRNFCEPQIITTDNTFVSGNCDVVIGIVNNTVYDPLQPELDSFKEELDKYFKNHTSPDVDLGDISGINASVVNIQKEIDRLNEVAKNLNESLIDLQELGKYEQYIKGGGGSDIDPYKEFGSSYQLLNFLPLDFFPDLNALVDTATALYEEELTGREHCSPHHTAIRQALVCWDELTKLIAWMSSNITSEQVRTIIVNHVNDTWGLKVRQSLWFHLSCLTFGQHTVQEFLVSFGVWIRTPAPYRPPNAPILSTLPEHTVIC

SEQ ID NO: 7092 - protein, 1365 aa, Artificial Sequence
  SARS-CoV-2/Australia/NSW56/2020__EPI_ISL_417408 spike protein (1-1211)(I714C_Y1110C) WhcAg construct
MFVFLVLLPLVSSQCVNLTTRTQLPPAYTNSFTRGVYYPDKVFRSSVLHSTQDLFLPFFSNVTWFHAIHVSGTNGTKRFDNPVLPFNDGVYFASTEKSNIIRGWIFGTTLDSKTQSLLIVNNATNVVIKVCEFQFCNDPFLGVYYHKNNKSWMESEFRVYSSANNCTFEYVSQPFLMDLEGKQGNFKNLREFVFKNIDGYFKIYSKHTPINLVRDLPQGFSALEPLVDLPIGINITRFQTLLALHRSYLTPGDSSSGWTAGAAAYYVGYLQPRTFLLKYNENGTITDAVDCALDPLSETKCTLKSFTVEKGIYQTSNFRVQPTESIVRFPNITNLCPFGEVFNATRFASVYAWNRKRISNCVADYSVLYNSASFSTFKCYGVSPTKLNDLCFTNVYADSFVIRGDEVRQIAPGQTGKIADYNYKLPDDFTGCVIAWNSNNLDSKVGGNYNYLYRLFRKSNLKPFERDISTEIYQAGSTPCNGVEGFNCYFPLQSYGFQPTNGVGYQPYRVVVLSFELLHAPATVCGPKKSTNLVKNKCVNFNFNGLTGTGVLTESNKKFLPFQQFGRDIADTTDAVRDPQTLEILDITPCSFGGVSVITPGTNTSNQVAVLYQDVNCTEVPVAIHADQLTPTWRVYSTGSNVFQTRAGCLIGAEHVNNSYECDIPIGAGICASYQTQTNSPRRARSVASQSIIAYTMSLGAENSVAYSNNSIACPTNFTISVTTEILPVSMTKTSVDCTMYICGDSTECSNLLLQYGSFCTQLNRALTGIAVEQDKNTQEVFAQVKQIYKTPPIKDFGGFNFSQILPDSSKPSKRSFIEDLLFNKVTLADAGFIKQYGDCLGDIAARDLICAQKFNGLTVLPPLLTDEMIAQYTSALLAGTITSGWTFGAGAALQIPFAMQMAYRFNGIGVTQNVLYENQKLIANQFNSAIGKIQDSLSSTASALGKLQDVVNQNAQALNTLVKQLSSNFGAISSVLNDILSRLDKVEAEVQIDRLITGRLQSLQTYVTQQLIRAAEIRASANLAATKMSECVLGQSKRVDFCGKGYHLMSFPQSAPHGVVFLHVTYVPAQEKNFTTAPAICHDGKAHFPREGVFVSNGTHWFVTQRNFCEPQIITTDNTFVSGNCDVVIGIVNNTVYDPLQPELDSFKEELDKYFKNHTSPDVDLGDISGINASVVNIQKEIDRLNEVAKNLNESLIDLQELGKYEQYIKGGGGSDIDPYKEFGSSYQLLNFLPLDFFPDLNALVDTATALYEEELTGREHCSPHHTAIRQALVCWDELTKLIAWMSSNITSEQVRTIIVNHVNDTWGLKVRQSLWFHLSCLTFGQHTVQEFLVSFGVWIRTPAPYRPPNAPILSTLPEHTVIC

SEQ ID NO: 7093 - protein, 1365 aa, Artificial Sequence
  SARS-CoV-2/Iceland/280/2020__EPI_ISL_417608 spike protein (1-1211)(I714C_Y1110C) WhcAg construct
MFVFLVLLPLVSSQCVNLTTRTQLPPAYTNSFTRGVYYPDKVFRSSVLHSTQDLFLPFFSNVTWFHAIHVSGTNGTKRFDNPVLPFNDGVYFASTEKSNIIRGWIFGTTLDSKTQSLLIVNNATNVVIKVCEFQFCNDPFLGVYYHKNNKSWMESEFRVYSSANNCTFEYVSQPFLMDLEGKQGNFKNLREFVFKNIDGYFKIYSKHTPINLVRDLPQGFSALEPLVDLPIGINITRFQTLLALHRSYLTPGDSSSGWTAGAAAYYVGYLQPRTFLLKYNENGTITDAVDCALDPLSETKCTLKSFTVEKGIYQTSNFRVQPTESIVRFPNITNLCPFGEVFNATRFASVYAWNRKRISNCVADYSVLYNSASFSTFKCYGVSPTKLNDLCFTNVYADSFVIRGDEVRQIAPGQTGKIADYNYKLPDDFTGCVIAWNSNNLDSKVGGNYNYLYRLFRKSNLKPFERDISTEIYQAGSTPCNGVEGFNCYFPLQSYGFQPTNGVGYQPYRVVVLSFELLHAPATVCGPKKSTNLVKNKCVNFNFNGLTGTGVLTESNKKFLPFQQFGRDIADTTDAVRDPQTLEILDITPCSFGGVSVITPGTNTSNQVAVLYQGVNCTEVPVAIHADQLTPTWRVYSTGSNVFQTRAGCLIGAEHVNNSYECDIPIGAGICASYHTQTNSPRRARSVASQSIIAYTMSLGAENSVAYSNNSIACPTNFTISVTTEILPVSMTKTSVDCTMYICGDSTECSNLLLQYGSFCTQLNRALTGIAVEQDKNTQEVFAQVKQIYKTPPIKDFGGFNFSQILPDPSKPSKRSFIEDLLFNKVTLADAGFIKQYGDCLGDIAARDLICAQKFNGLTVLPPLLTDEMIAQYTSALLAGTITSGWTFGAGAALQIPFAMQMAYRFNGIGVTQNVLYENQKLIANQFNSAIGKIQDSLSSTASALGKLQDVVNQNAQALNTLVKQLSSNFGAISSVLNDILSRLDKVEAEVQIDRLITGRLQSLQTYVTQQLIRAAEIRASANLAATKMSECVLGQSKRVDFCGKGYHLMSFPQSAPHGVVFLHVTYVPAQEKNFTTAPAICHDGKAHFPREGVFVSNGTHWFVTQRNFCEPQIITTDNTFVSGNCDVVIGIVNNTVYDPLQPELDSFKEELDKYFKNHTSPDVDLGDISGINASVVNIQKEIDRLNEVAKNLNESLIDLQELGKYEQYIKGGGGSDIDPYKEFGSSYQLLNFLPLDFFPDLNALVDTATALYEEELTGREHCSPHHTAIRQALVCWDELTKLIAWMSSNITSEQVRTIIVNHVNDTWGLKVRQSLWFHLSCLTFGQHTVQEFLVSFGVWIRTPAPYRPPNAPILSTLPEHTVIC

SEQ ID NO: 7094 - protein, 1365 aa, Artificial Sequence; identical to SEQ ID NO: 7049
  SARS-CoV-2/Iceland/247/2020__EPI_ISL_417575 spike protein (1-1211)(I714C_Y1110C) WhcAg construct

SEQ ID NO: 7095 - protein, 1365 aa, Artificial Sequence
  SARS-CoV-2/Iceland/238/2020__EPI_ISL_417566 spike protein (1-1211)(I714C_Y1110C) WhcAg construct
MFVFLVLLPLVSSQCVNLTTRTQLPPAYTNSFTRGVYYPDKVFRSSVLHSTQDLFLPFFSNVTWFHAIHVSGTNGTKRFDNPVLPFNDGVYFASTEKSNIIRGWIFGTTLDSKTQSLLIVNNATNVVIKVCEFQFCNDPFLGVYYHKNNKSWMESEFRVYSSANNCTFEYVSQPFLMDLEGKQGNFKNLREFVFKNIDGYFKIYSKHTPINLVRDLPQGFSALEPLVDLPIGINITRFQTLLALHRSYLTPGDSSSGWTAGAAAYYVGYLQPRTFLLKYNENGTITDAVDCALDPLSETKCTLKSFTVEKGIYQTSNFRVQPTESIVRFPNITNLCPFGEVFNATRFASVYAWNRKRISNCVADYSVLYNSASFSTFKCYGVSPTKLNDLCFTNVYADSFVIRGDEVRQIAPGQTGKIADYNYKLPDDFTGCVIAWNSNNLDSKVGGNYNYLYRLFRKSNLKPFERDISTEIYQAGSTPCNGVEGFNCYFPLQSYGFQPTNGVGYQPYRVVVLSFELLHAPATVCGPKKSTNLVKNKCVNFNFNGLTGTGVLTESNKKFLPFQQFGRDIADTTDAVRDPQTLEILDITPCSFGGVSVITPGTNTSNQVAVLYQGVNCTEVPVAIHADQLTPTWRVYSTGSNVFQTRAGCLIGAEHVNNSYECDIPIGAGICASYQTQTNSPRRARSVASQSIIAYTMSLGAENSVAYSNNSIACPTNFTISVTTEILPVSMTKTSVDCTMYICGDSTECSNLLLQYGSFCTQLNRALTGIAVEQDKNTQEVFAQVKQIYKTPPIKDFGGFNFSQILPDPSKPSKRSFIEDLLFNKVTLADVGFIKQYGDCLGDIAARDLICAQKFNGLTVLPPLLTDEMIAQYTSALLAGTITSGWTFGAGAALQIPFAMQMAYRFNGIGVTQNVLYENQKLIANQFNSAIGKIQDSLSSTASALGKLQDVVNQNAQALNTLVKQLSSNFGAISSVLNDILSRLDKVEAEVQIDRLITGRLQSLQTYVTQQLIRAAEIRASANLAATKMSECVLGQSKRVDFCGKGYHLMSFPQSAPHGVVFLHVTYVPAQEKNFTTAPAICHDGKAHFPREGVFVSNGTHWFVTQRNFCEPQIITTDNTFVSGNCDVVIGIVNNTVYDPLQPELDSFKEELDKYFKNHTSPDVDLGDISGINASVVNIQKEIDRLNEVAKNLNESLIDLQELGKYEQYIKGGGGSDIDPYKEFGSSYQLLNFLPLDFFPDLNALVDTATALYEEELTGREHCSPHHTAIRQALVCWDELTKLIAWMSSNITSEQVRTIIVNHVNDTWGLKVRQSLWFHLSCLTFGQHTVQEFLVSFGVWIRTPAPYRPPNAPILSTLPEHTVIC

SEQ ID NO: 7096 - protein, 1365 aa, Artificial Sequence
  SARS-CoV-2/Greece/16/2020__EPI_ISL_418265 spike protein (1-1211)(I714C_Y1110C) WhcAg construct
MFVFLVLLPLVSSQCVNLTTRTQLPPAYTNSFTRGVYYPDKVFRSSVLHSTQDLFLPFFSNVTWFHAIHVSGTNGTKRFDNPVLPFNDGVYFASTEKSNIIRGWIFGTTLDSKTQSLLIVNNATNVVIKVCEFQFCNDPFLGVYYHKNNKSWMESEFRVYSSANNCTFEYVSQPFLMDLEGKQGNFKNLREFVFKNVDGYFKIYSKHTPINLVRDLPQGFSALEPLVDLPIGINITRFQTLLALHRSYLTPGDSSSGWTAGAAAYYVGYLQPRTFLLKYNENGTITDAVDCALDPLSETKCTLKSFTVEKGIYQTSNFRVQPTESIVRFPNITNLCPFGEVFNATRFASVYAWNRKRISNCVADYSVLYNSASFSTFKCYGVSPTKLNDLCFTNVYADSFVIRGDEVRQIAPGQTGKIADYNYKLPDDFTGCVIAWNSNNLDSKVGGNYNYLYRLFRKSNLKPFERDISTEIYQAGSTPCNGVEGFNCYFPLQSYGFQPTNGVGYQPYRVVVLSFELLHAPATVCGPKKSTNLVKNKCVNFNFNGLTGTGVLTESNKKFLPFQQFGRDIADTTDAVRDPQTLEILDITPCSFGGVSVITPGTNTSNQVAVLYQDVNCTEVPVAIHADQLTPTWRVYSTGSNVFQTRAGCLIGAEHVNNSYECDIPIGAGICASYQTQTNSPRRARSVASQSIIAYTMSLGAENSVAYSNNSIACPTNFTISVTTEILPVSMTKTSVDCTMYICGDSTECSNLLLQYGSFCTQLNRALTGIAVEQDKNTQEVFAQVKQIYKTPPIKDFGGFNFSQILPDPSKPSKRSFIEDLLFNKVTLADAGFIKQYGDCLGDIAARDLICAQKFNGLTVLPPLLTDEMIAQYTSALLAGTITSGWTFGAGAALQIPFAMQMAYRFNGIGVTQNVLYENQKLIANQFNSAIGKIQDSLSSTASALGKLQDVVNQNAQALNTLVKQLSSNFGAISSVLNDILSRLDKVEAEVQIDRLITGRLQSLQTYVTQQLIRAAEIRASANLAATKMSECVLGQSKRVDFCGKGYHLMSFPQSAPHGVVFLHVTYVPAQEKNFTTAPAICHDGKAHFPREGVFVSNGTHWFVTQRNFCEPQIITTDNTFVSGNCDVVIGIVNNTVYDPLQPELDSFKEELDKYFKNHTSPDVDLGDISGINASVVNIQKEIDRLNEVAKNLNESLIDLQELGKYEQYIKGGGGSDIDPYKEFGSSYQLLNFLPLDFFPDLNALVDTATALYEEELTGREHCSPHHTAIRQALVCWDELTKLIAWMSSNITSEQVRTIIVNHVNDTWGLKVRQSLWFHLSCLTFGQHTVQEFLVSFGVWIRTPAPYRPPNAPILSTLPEHTVIC

SEQ ID NO: 7097 - protein, 1365 aa, Artificial Sequence
  SARS-CoV-2/Iceland/319/2020__EPI_ISL_417648 spike protein (1-1211)(I714C_Y1110C) WhcAg construct
MFVFLVLLPLVSSQCVNLTTRTQLPPAYTNSFTRGVYYPDKVFRSSVLHSTQDLFLPFFSNVTWFHAIHVSGTNGTKRFDNPVLPFNDGVYFASTEKSNIIRGWIFGTTLDSKTQSLLIVNNATNVVIKVCEFQFCNDPFLGVYYHKNNKSWMESEFRVYSSANNCTFEYVSQPFLIDLEGKQGNFKNLREFVFKNIDGYFKIYSKHTPINLVRDLPQGFSALEPLVDLPIGINITRFQTLLALHRSYLTPGDSSSGWTAGAAAYYVGYLQPRTFLLKYNENGTITDAVDCALDPLSETKCTLKSFTVEKGIYQTSNFRVQPTESIVRFPNITNLCPFGEVFNATRFASVYAWNRKRISNCVADYSVLYNSASFSTFKCYGVSPTKLNDLCFTNVYADSFVIRGDEVRQIAPGQTGKIADYNYKLPDDFTGCVIAWNSNNLDSKVGGNYNYLYRLFRKSNLKPFERDISTEIYQAGSTPCNGVEGFNCYFPLQSYGFQPTNGVGYQPYRVVVLSFELLHAPATVCGPKKSTNLVKNKCVNFNFNGLTGTGVLTESNKKFLPFQQFGRDIADTTDAVRDPQTLEILDITPCSFGGVSVITPGTNTSNQVAVLYQGVNCTEVPVAIHADQLTPTWRVYSTGSNVFQTRAGCLIGAEHVNNSYECDIPIGAGICASYQTQTNSPRRARSVASQSIIAYTMSLGAENSVAYSNNSIACPTNFTISVTTEILPVSMTKTSVDCTMYICGDSTECSNLLLQYGSFCTQLNRALTGIAVEQDKNTQEVFAQVKQIYKTPPIKDFGGFNFSQILPDPSKPSKRSFIEDLLFNKVTLADAGFIKQYGDCLGDIAARDLICAQKFNGLTVLPPLLTDEMIAQYTSALLAGTITSGWTFGAGAALQIPFAMQMAYRFNGIGVTQNVLYENQKLIANQFNSAIGKIQDSLSSTASALGKLQDVVNQNAQALNTLVKQLSSNFGAISSVLNDILSRLDKVEAEVQIDRLITGRLQSLQTYVTQQLIRAAEIRASANLAATKMSECVLGQSKRVDFCGKGYHLMSFPQSAPHGVVFLHVTYVPAQEKNFTTAPAICHDGKAHFPREGVFVSNGTHWFVTQRNFCEPQIITTDNTFVSGNCDVVIGIVNNTVYDPLQPELDSFKEELDKYFKNHTSPDVDLGDISGINASVVNIQKEIDRLNEVAKNLNESLIDLQELGKYEQYIKGGGGSDIDPYKEFGSSYQLLNFLPLDFFPDLNALVDTATALYEEELTGREHCSPHHTAIRQALVCWDELTKLIAWMSSNITSEQVRTIIVNHVNDTWGLKVRQSLWFHLSCLTFGQHTVQEFLVSFGVWIRTPAPYRPPNAPILSTLPEHTVIC

SEQ ID NO: 7098 - protein, 1365 aa, Artificial Sequence
  SARS-CoV-2/Congo/94/2020__EPI_ISL_417947 spike protein (1-1211)(I714C_Y1110C) WhcAg construct
MFVFLVLLPLVSSQCVNLTTRTQLPPAYTNSFTRGVYYPDKVFRSSVLHSTQDLFLPFFSNVTWFHAIHVSGTNGTKRFDNPVLPFNDGVYFASTEKSNIIRGWIFGTTLDSKTQSLLIVNNATNVVIKVCEFQFCNDPFLGVYYHKNNKSWMESEFRVYSSANNCTFEYVSQPFLMDLEGKQGNFKNLREFVFKNIDGYFKIYSKHTPINLVRDLPQGFSALEPLVDLPIGINITRFQTLLALHRSYLTPGDSSSGWTAGAAAYYVGYLQPRTFLLKYNENGTITDAVDCALDPLSETKCTLKSFTVEKGIYQTSNFRVQPTESIVRFPNITNLCPFGEVFNATRFASVYAWNRKRISNCVADYSVLYNSASFSTFKCYGVSPTKLNDLCFTNVYADSFVIRGDEVRQIAPGQTGKIADYNYKLPDDFTGCVIAWNSNNLDSKVGGNYNYLYRLFRKSNLKPFERDISTEIYQAGSTPCNGVEGFNCYFPLQSYGFQPTNGVGYQPYRVVVLSFELLHAPATVCGPKKSTNLVKNKCVNFNFNGLTGTGVLTESNKKFLPFQQFGRDIADTTDAVRDPQTLEILDITPCSFGGVSVITPGTNTSNQVAVLYQGVNCTEVPVAIHADQLTPTWRVYSTGSNVFQTRAGCLIGAEHVNNSYECDIPIGAGICASYQTQTNSPRRARSVASQSIIAYTMSLGAENSVAYSNNSIACPTNFTISVTTEILPVSMTKTSVDCTMYICGDSTECSNLLLQYGSFCTQLNRALTGIAVEQDKNTQEVFAQVKQIYKTPPIKDFGGFNFSQILPDPSKPSKRSFIEDILFNKVTLADAGFIKQYGDCLGDIAARDLICAQKFNGLTVLPPLLTDEMIAQYTSALLAGTITSGWTFGAGAALQIPFAMQMAYRFNGIGVTQNVLYENQKLIANQFNSAIGKIQDSLSSTASALGKLQDVVNQNAQALNTLVKQLSSNFGAISSVLNDILSRLDKVEAEVQIDRLITGRLQSLQTYVTQQLIRAAEIRASANLAATKMSECVLGQSKRVDFCGKGYHLMSFPQSAPHGVVFLHVTYVPAQEKNFTTAPAICHDGKAHFPREGVFVSNGTHWFVTQRNFCEPQIITTDNTFVSGNCDVVIGIVNNTVYDPLQPELDSFKEELDKYFKNHTSPDVDLGDISGINASVVNIQKEIDRLNEVAKNLNESLIDLQELGKYEQYIKGGGGSDIDPYKEFGSSYQLLNFLPLDFFPDLNALVDTATALYEEELTGREHCSPHHTAIRQALVCWDELTKLIAWMSSNITSEQVRTIIVNHVNDTWGLKVRQSLWFHLSCLTFGQHTVQEFLVSFGVWIRTPAPYRPPNAPILSTLPEHTVIC

SEQ ID NO: 7099 - protein, 1365 aa, Artificial Sequence
  SARS-CoV-2/Congo/158/2020__EPI_ISL_417950 spike protein (1-1211)(I714C_Y1110C) WhcAg construct
MFVFLVLLPLVSSQCVNLTTRTQLPPAYTNSFTRGVYYPDKVFRSSVLHSTQDLFLPFFSNVTWFHAIHVSGTNGTKRFDNPVLPFNDGVYFASTEKSNIIRGWIFGTTLDSKTQSLLIVNNATNVVIKVCEFQFCNDPFLGVYYHKNNKSWMESEFRVYSSANNCTFEYVSQPFLMDLEGKQGNFKNLREFVFKNIDGYFKIYSKHTPINLVRDLPQGFSALEPLVDLPIGINITRFQTLLALHRSYLTPGDSSSGWTAGAAAYYVGYLQPRTFLLKYNENGTITDAVDCALDPLSETKCTLKSFTVEKGIYQTSNFRVQPTESIVRFPNITNLCPFGEVFNATRFASVYAWNRKRISNCVADYSVLYNSASFSTFKCYGVSPTKLNDLCFTNVYADSFVIRGDEVRQIAPGQTGKIADYNYKLPDDFTGCVIAWNSNNLDSKVGGNYNYLYRLFRKSNLKPFERDISTEIYQAGSTPCNGVEGFNCYFPLQSYGFQPTNGVGYQPYRVVVLSFELLHAPATVCGPKKSTNLVKNKCVNFNFNGLTGTGVLTESNKKFLPFQQFGRDIADTTDAVRDPQTLEILDITPCSFGGVSVITPGTNTSNQVAVLYQDVNCTEVPVAIHADQLTPTWRVYSTGSNVFQTRAGCLIGAEHVNNSYECDIPIGAGICASYQTQTNSPRRARSVASQSIIAYTMSLGAENSVAYSNNSIACPTNFTISVTTEILPVSMTKTSVDCTMYICGDSTECSNLLLQYGSFCTQLNRALTGIAVEQDKNTQEVFAQVKQIYKTPPIKDFGGFNFSQILPDPSKPSKRSFIEDLLFNKVTLADAGFIKQYGDCLGDIAARDLICAQKFNGLTVLPPLLTDEMIAQYTSALLAGTITSGWTFGAGAALQIPFAMQMAYRFNGIGVTQNVLYENQKLIANQFNSAIGKIQDSLSSTASALGKLQDVVNQNAQALNTLVKQLSSNFGAISSVLNDILSRLDKVEAEVQIDRLITGRLQSLQTYVTQQLIRAAEIRASANLAATKMSECVLGQSKRVDFCGKGYHLMSFPQSAPHGVVFLHVTYVPAQEKNFTTAPAICHDGKAHFPREGVFVSNGTHWFVTQRNFCEPQIITTDNTFLSGNCDVVIGIVNNTVYDPLQPELDSFKEELDKYFKNHTSPDVDLGDISGINASVVNIQKEIDRLNEVAKNLNESLIDLQELGKYEQYIKGGGGSDIDPYKEFGSSYQLLNFLPLDFFPDLNALVDTATALYEEELTGREHCSPHHTAIRQALVCWDELTKLIAWMSSNITSEQVRTIIVNHVNDTWGLKVRQSLWFHLSCLTFGQHTVQEFLVSFGVWIRTPAPYRPPNAPILSTLPEHTVIC

SEQ ID NO: 7100 - protein, 1365 aa, Artificial Sequence
  SARS-CoV-2/USA/UT-00034/2020__EPI_ISL_417977 spike protein (1-1211)(I714C_Y1110C) WhcAg construct
MFVFLVLLPLVSSQCVNLTTRTQLPPAYTNSFTRGVYYPDKVFRSSVLHSTQDLFLPFFSNVTWFHAIHVSGTNGTKRFDNPVLPFNDGVYFASTEKSNIIRGWIFGTTLDSKTQSLLIVNNATNVVIKVCEFQFCNDPFLGVYYYKNNKSWMESEFRVYSSANNCTFEYVSQPFLMDLEGKQGNFKNLREFVFKNIDGYFKIYSKHTPINLVRDLPQGFSALEPLVDLPIGINITRFQTLLALHRSYLTPGDSSSGWTAGAAAYYVGYLQPRTFLLKYNENGTITDAVDCALDPLSETKCTLKSFTVEKGIYQTSNFRVQPTESIVRFPNITNLCPFGEVFNATRFASVYAWNRKRISNCVADYSVLYNSASFSTFKCYGVSPTKLNDLCFTNVYADSFVIRGDEVRQIAPGQTGKIADYNYKLPDDFTGCVIAWNSNNLDSKVGGNYNYLYRLFRKSNLKPFERDISTEIYQAGSTPCNGVEGFNCYFPLQSYGFQPTNGVGYQPYRVVVLSFELLHAPATVCGPKKSTNLVKNKCVNFNFNGLTGTGVLTESNKKFLPFQQFGRDIADTTDAVRDPQTLEILDITPCSFGGVSVITPGTNTSNQVAVLYQGVNCTEVPVAIHADQLTPTWRVYSTGSNVFQTRAGCLIGAEHVNNSYECDIPIGAGICASYQTQTNSPRRARSVASQSIIAYTMSLGAENSVAYSNNSIACPTNFTISVTTEILPVSMTKTSVDCTMYICGDSTECSNLLLQYGSFCTQLNRALTGIAVEQDKNTQEVFAQVKQIYKTPPIKDFGGFNFSQILPDPSKPSKRSFIEDLLFNKVTLADAGFIKQYGDCLGDIAARDLICAQKFNGLTVLPPLLTDEMIAQYTSALLAGTITSGWTFGAGAALQIPFAMQMAYRFNGIGVTQNVLYENQKLIANQFNSAIGKIQDSLSSTASALGKLQDVVNQNAQALNTLVKQLSSNFGAISSVLNDILSRLDKVEAEVQIDRLITGRLQSLQTYVTQQLIRAAEIRASANLAATKMSECVLGQSKRVDFCGKGYHLMSFPQSAPHGVVFLHVTYVPAQEKNFTTAPAICHDGKAHFPREGVFVSNGTHWFVTQRNFCEPQIITTDNTFVSGNCDVVIGIVNNTVYDPLQPELDSFKEELDKYFKNHTSPDVDLGDISGINASVVNIQKEIDRLNEVAKNLNESLIDLQELGKYEQYIKGGGGSDIDPYKEFGSSYQLLNFLPLDFFPDLNALVDTATALYEEELTGREHCSPHHTAIRQALVCWDELTKLIAWMSSNITSEQVRTIIVNHVNDTWGLKVRQSLWFHLSCLTFGQHTVQEFLVSFGVWIRTPAPYRPPNAPILSTLPEHTVIC

SEQ ID NO: 7101 - protein, 1365 aa, Artificial Sequence
  SARS-CoV-2/USA/UT-00033/2020__EPI_ISL_417976 spike protein (1-1211)(I714C_Y1110C) WhcAg construct
MFVFLVLLPLVSSQCVNLTTRTQLPPAYTNSFTRGVYYPDKVFRSSVLHSTQDLFLPFFSNVTWFHAIHVSGTNGTKRFDNPVLPFNDGVYFASTEKSNIIRGWIFGTTLDSKTQSLLIVNNATNVVIKVCEFQFCNDPFLGVYYHKNNKSWMESEFRVYSSANNCTFEYVSQPFLMDLEGKQGNFKNLREFVFKNIDGYFKIYSKHTPINLVRDLPQGFSALEPLVDLPIGINITRFQTLLALHRSYLTPGDSSSGLTAGAAAYYVGYLQPRTFLLKYNENGTITDAVDCALDPLSETKCTLKSFTVEKGIYQTSNFRVQPTESIVRFPNITNLCPFGEVFNATRFASVYAWNRKRISNCVADYSVLYNSASFSTFKCYGVSPTKLNDLCFTNVYADSFVIRGDEVRQIAPGQTGKIADYNYKLPDDFTGCVIAWNSNNLDSKVGGNYNYLYRLFRKSNLKPFERDISTEIYQAGSTPCNGVEGFNCYFPLQSYGFQPTNGVGYQPYRVVVLSFELLHAPATVCGPKKSTNLVKNKCVNFNFNGLTGTGVLTESNKKFLPFQQFGRDIADTTDAVRDPQTLEILDITPCSFGGVSVITPGTNTSNQVAVLYQGVNCTEVPVAIHADQLTPTWRVYSTGSNVFQTRAGCLIGAEHVNNSYECDIPIGAGICASYQTQTNSPRRARSVASQSIIAYTMSLGAENSVAYSNNSIACPTNFTISVTTEILPVSMTKTSVDCTMYICGDSTECSNLLLQYGSFCTQLNRALTGIAVEQDKNTQEVFAQVKQIYKTPPIKDFGGFNFSQILPDPSKPSKRSFIEDLLFNKVTLADAGFIKQYGDCLGDIAARDLICAQKFNGLTVLPPLLTDEMIAQYTSALLAGTITSGWTFGAGAALQIPFAMQMAYRFNGIGVTQNVLYENQKLIANQFNSAIGKIQDSLSSTASALGKLQDVVNQNAQALNTLVKQLSSNFGAISSVLNDILSRLDKVEAEVQIDRLITGRLQSLQTYVTQQLIRAAEIRASANLAATKMSECVLGQSKRVDFCGKGYHLMSFPQSAPHGVVFLHVTYVPAQEKNFTTAPAICHDGKAHFPREGVFVSNGTHWFVTQRNFCEPQIITTDNTFVSGNCDVVIGIVNNTVYDPLQPELDSFKEELDKYFKNHTSPDVDLGDISGINASVVNIQKEIDRLNEVAKNLNESLIDLQELGKYEQYIKGGGGSDIDPYKEFGSSYQLLNFLPLDFFPDLNALVDTATALYEEELTGREHCSPHHTAIRQALVCWDELTKLIAWMSSNITSEQVRTIIVNHVNDTWGLKVRQSLWFHLSCLTFGQHTVQEFLVSFGVWIRTPAPYRPPNAPILSTLPEHTVIC

SEQ ID NO: 7102 - protein, 1365 aa, Artificial Sequence
  SARS-CoV-2/USA/WI-13/2020__EPI_ISL_417516 spike protein (1-1211)(I714C_Y1110C) WhcAg construct
MFVFLVLLPLVSSQCVNLTTRTQLPPAYTNSFTRGVYYPDKVFRSSVLHSTQDLFLPFFSNVTWFHAIHVSGTNGTKRFDNPVLPFNDGVYFASTEKSNIIRGWIFGTTLDSKTQSLLIVNNATNVVIKVCEFQFCNDPFLGVYYHKNNKSWMESEFRVYSSANNCTFEYVSQPFLMDLEGKQGNFKNLREFVFKNIDGYFKIYSKHTPINLVRDLPQGFSALEPLVDLPIGINITRFQTLLALHRSYLTPGDSSSGWTAGAAAYYVGYLQPRTFLLKYNENGTITDAVDCALDPLSETKCTLKSFTVEKGIYQTSNFRVLPTESIVRFPNITNLCPFGEVFNATRFASVYAWNRKRISNCVADYSVLYNSASFSTFKCYGVSPTKLNDLCFTNVYADSFVIRGDEVRQIAPGQTGKIADYNYKLPDDFTGCVIAWNSNNLDSKVGGNYNYLYRLFRKSNLKPFERDISTEIYQAGSTPCNGVEGFNCYFPLQSYGFQPTNGVGYQPYRVVVLSFELLHAPATVCGPKKSTNLVKNKCVNFNFNGLTGTGVLTESNKKFLPFQQFGRDIADTTDAVRDPQTLEILDITPCSFGGVSVITPGTNTSNQVAVLYQGVNCTEVPVAIHADQLTPTWRVYSTGSNVFQTRAGCLIGAEHVNNSYECDIPIGAGICASYQTQTNSPRRARSVASQSIIAYTMSLGAENSVAYSNNSIACPTNFTISVTTEILPVSMTKTSVDCTMYICGDSTECSNLLLQYGSFCTQLNRALTGIAVEQDKNTQEVFAQVKQIYKTPPIKDFGGFNFSQILPDPSKPSKRSFIEDLLFNKVTLADAGFIKQYGDCLGDIAARDLICAQKFNGLTVLPPLLTDEMIAQYTSALLAGTITSGWTFGAGAALQIPFAMQMAYRFNGIGVTQNVLYENQKLIANQFNSAIGKIQDSLSSTASALGKLQDVVNQNAQALNTLVKQLSSNFGAISSVLNDILSRLDKVEAEVQIDRLITGRLQSLQTYVTQQLIRAAEIRASANLAATKMSECVLGQSKRVDFCGKGYHLMSFPQSAPHGVVFLHVTYVPAQEKNFTTAPAICHDGKAHFPREGVFVSNGTHWFVTQRNFCEPQIITTDNTFVSGNCDVVIGIVNNTVYDPLQPELDSFKEELDKYFKNHTSPDVDLGDISGINASVVNIQKEIDRLNEVAKNLNESLIDLQELGKYEQYIKGGGGSDIDPYKEFGSSYQLLNFLPLDFFPDLNALVDTATALYEEELTGREHCSPHHTAIRQALVCWDELTKLIAWMSSNITSEQVRTIIVNHVNDTWGLKVRQSLWFHLSCLTFGQHTVQEFLVSFGVWIRTPAPYRPPNAPILSTLPEHTVIC

SEQ ID NO: 7103 - protein, 1364 aa, Artificial Sequence
  SARS-CoV-2/India/1-27/2020__EPI_ISL_413522 spike protein (1-1210)(I713C_Y1109C) WhcAg construct
MFVFLVLLPLVSSQCVNLTTRTQLPPAYTNSFTRGVYYPDKVFRSSVLHSTQDLFLPFFSNVTWFHAIHVSGTNGTKRFDNPVLPFNDGVYFASTEKSNIIRGWIFGTTLDSKTQSLLIVNNATNVVIKVCEFQFCNDPFLGVYHKNNKSWMESEFRVYSSANNCTFEYVSQPFLMDLEGKQGNFKNLREFVFKNIDGYFKIYSKHTPINLVRDLPQGFSALEPLVDLPIGINITRFQTLLALHRSYLTPGDSSSGWTAGAAAYYVGYLQPRTFLLKYNENGTITDAVDCALDPLSETKCTLKSFTVEKGIYQTSNFRVQPTESIVRFPNITNLCPFGEVFNATRFASVYAWNRKRISNCVADYSVLYNSASFSTFKCYGVSPTKLNDLCFTNVYADSFVIRGDEVIQIAPGQTGKIADYNYKLPDDFTGCVIAWNSNNLDSKVGGNYNYLYRLFRKSNLKPFERDISTEIYQAGSTPCNGVEGFNCYFPLQSYGFQPTNGVGYQPYRVVVLSFELLHAPATVCGPKKSTNLVKNKCVNFNFNGLTGTGVLTESNKKFLPFQQFGRDIADTTDAVRDPQTLEILDITPCSFGGVSVITPGTNTSNQVAVLYQDVNCTEVPVAIHADQLTPTWRVYSTGSNVFQTRAGCLIGAEHVNNSYECDIPIGAGICASYQTQTNSPRRARSVASQSIIAYTMSLGAENSVAYSNNSIACPTNFTISVTTEILPVSMTKTSVDCTMYICGDSTECSNLLLQYGSFCTQLNRALTGIAVEQDKNTQEVFAQVKQIYKTPPIKDFGGFNFSQILPDPSKPSKRSFIEDLLFNKVTLADAGFIKQYGDCLGDIAARDLICAQKFNGLTVLPPLLTDEMIAQYTSALLAGTITSGWTFGAGAALQIPFAMQMAYRFNGIGVTQNVLYENQKLIANQFNSAIGKIQDSLSSTASALGKLQDVVNQNAQALNTLVKQLSSNFGAISSVLNDILSRLDKVEAEVQIDRLITGRLQSLQTYVTQQLIRAAEIRASANLAATKMSECVLGQSKRVDFCGKGYHLMSFPQSAPHGVVFLHVTYVPAQEKNFTTAPAICHDGKAHFPREGVFVSNGTHWFVTQRNFCEPQIITTDNTFVSGNCDVVIGIVNNTVYDPLQPELDSFKEELDKYFKNHTSPDVDLGDISGINASVVNIQKEIDRLNEVAKNLNESLIDLQELGKYEQYIKGGGGSDIDPYKEFGSSYQLLNFLPLDFFPDLNALVDTATALYEEELTGREHCSPHHTAIRQALVCWDELTKLIAWMSSNITSEQVRTIIVNHVNDTWGLKVRQSLWFHLSCLTFGQHTVQEFLVSFGVWIRTPAPYRPPNAPILSTLPEHTVIC

SEQ ID NO: 7104 - protein, 1359 aa, Artificial Sequence
  SARS-CoV-2/pangolin/Guangxi/P4L/2017__EPI_ISL_410538 spike protein (1-1205)(I708C_Y1104C) WhcAg construct
MFVFLFVLPLVSSQCVNLTTRTGIPPGYTNSSTRGVYYPDKVFRSSILHLTQDLFLPFFSNVTWFNTINYQGGFKKFDNPVLPFNDGVYFASTEKSNIIRGWIFGTTLDARTQSLLIVNNATNVVIKVCEFQFCTDPFLGVYYHNNNKTWVENEFRVYSSANNCTFEYISQPFLMDLEGKQGNFKNLREFVFKNVDGYFKIYSKHTPIDLVRDLPRGFAALEPLVDLPIGINITRFQTLLALHRSYLTPGNLESGWTTGAAAYYVGYLQQRTFLLSYNQNGTITDAVDCSLDPLSETKCTLKSLTVEKGIYQTSNFRVQPTISIVRFPNITNLCPFGEVFNASKFASVYAWNRKRISNCVADYSVLYNSTSFSTFKCYGVSPTKLNDLCFTNVYADSFVVKGDEVRQIAPGQTGVIADYNYKLPDDFTGCVIAWNSVKQDALTGGNYGYLYRLFRKSKLKPFERDISTEIYQAGSTPCNGQVGLNCYYPLERYGFHPTTGVNYQPFRVVVLSFELLNGPATVCGPKLSTTLVKDKCVNFNFNGLTGTGVLTTSKKQFLPFQQFGRDISDTTDAVRDPQTLEILDITPCSFGGVSVITPGTNTSNQVAVLYQDVNCTEVPMAIHAEQLTPAWRVYSAGANVFQTRAGCLVGAEHVNNSYECDIPVGAGICASYHSMSSLRSVNQRSIIAYTMSLGAENSVAYSNNSIACPTNFTISVTTEILPVSMTKTSVDCTMYICGDSIECSNLLLQYGSFCTQLNRALTGIAVEQDKNTQEVFAQVKQIYKTPPIKDFGGFNFSQILPDPSKPSKRSFIEDLLFNKVTLADAGFIKQYGDCLGDIAARDLICAQKFNGLTVLPPLLTDEMIAQYTSALLAGTITSGWTFGAGAALQIPFAMQMAYRFNGIGVTQNVLYENQKLIANQFNSAIGKIQDSLSSTASALGKLQDVVNQNAQALNTLVKQLSSNFGAISSVLNDILSRLDKVEAEVQIDRLITGRLQSLQTYVTQQLIRAAEIRASANLAATKMSECVLGQSKRVDFCGKGYHLMSFPQSAPHGVVFLHVTYVPAQEKNFTTAPAICHEGKAHFPREGVFVSNGTHWFITQRNFCEPQIITTDNTFVSGSCDVVIGIVNNTVYDPLQPELDSFKEELDKYFKNHTSPDVDLGDISGINASVVNIQKEIDRLNEVAKNLNESPIDLQELGKYEQYIKGGGGSDIDPYKEFGSSYQLLNFLPLDFFPDLNALVDTATALYEEELTGREHCSPHHTAIRQALVCWDELTKLIAWMSSNITSEQVRTIIVNHVNDTWGLKVRQSLWFHLSCLTFGQHTVQEFLVSFGVWIRTPAPYRPPNAPILSTLPEHTVIC

SEQ ID NO: 7105 - protein, 1359 aa, Artificial Sequence
  SARS-CoV-2/pangolin/Guangxi/P5L/2017__EPI_ISL_410540 spike protein (1-1205)(I708C_Y1104C) WhcAg construct
MFVFLFVLPLVSSQCVNLTTRTGIPPGYTNSSTRGVYYPDKVFRSSILHLTQDLFLPFFSNVTWFNTINYQGGFKKFDNPVLPFNDGVYFASTEKSNIIRGWIFGTTLDARTQSLLIVNNATNVVIKVCEFQFCTDPFLGVYYHNNNKTWVENEFRVYSSANNCTFEYISQPFLMDLEGKQGNFKNLREFVFKNVDGYFKIYSKHTPIDLVRDLPRGFAALEPLVDLPIGINITRFQTLLALHRSYLTPGKLESGWTTGAAAYYVGYLQQRTFLLSYNQNGTITDAVDCSLDPLSETKCTLKSLTVEKGIYQTSNFRVQPTISIVRFPNITNLCPFGEVFNASKFASVYAWNRKRISNCVADYSVLYNSTSFSTFKCYGVSPTKLNDLCFTNVYADSFVVKGDEVRQIAPGQTGVIADYNYKLPDDFTGCVIAWNSVKQDALTGGNYGYLYRLFRKSKLKPFERDISTEIYQAGSTPCNGQVGLNCYYPLERYGFHPTTGVNYQPFRVVVLSFELLNGPATVCGPKLSTTLVKDKCVNFNFNGLTGTGVLTTSKKQFLPFQQFGRDISDTTDAVRDPQTLEILDITPCSFGGVSVITPGTNTSNQVAVLYQDVNCTEVPMAIHAEQLTPAWRVYSAGANVFQTRAGCLVGAEHVNNSYECDIPVGAGICASYHSMSSFRSVNQRSIIAYTMSLGAENSVAYSNNSIACPTNFTISVTTEILPVSMTKTSVDCTMYICGDSIECSNLLLQYGSFCTQLNRALTGIAVEQDKNTQEVFAQVKQIYKTPPIKDFGGFNFSQILPDPSKPSKRSFIEDLLFNKVTLADAGFIKQYGDCLGDIAARDLICAQKFNGLTVLPPLLTDEMIAQYTSALLAGTITSGWTFGAGAALQIPFAMQMAYRFNGIGVTQNVLYENQKLIANQFNSAIGKIQDSLSSTASALGKLQDVVNQNAQALNTLVKQLSSNFGAISSVLNDILSRLDKVEAEVQIDRLITGRLQSLQTYVTQQLIRAAEIRASANLAATKMSECVLGQSKRVDFCGKGYHLMSFPQSAPHGVVFLHVTYVPAQEKNFTTAPAICHEGKAHFPREGVFVSNGTHWFITQRNFCEPQIITTDNTFVSGSCDVVIGIVNNTVYDPLQPELDSFKEELDKYFKNHTSPDVDLGDISGINASVVNIQKEIDRLNEVAKNLNESLIDLQELGKYEQYIKGGGGSDIDPYKEFGSSYQLLNFLPLDFFPDLNALVDTATALYEEELTGREHCSPHHTAIRQALVCWDELTKLIAWMSSNITSEQVRTIIVNHVNDTWGLKVRQSLWFHLSCLTFGQHTVQEFLVSFGVWIRTPAPYRPPNAPILSTLPEHTVIC

SEQ ID NO: 7106 - protein, 1359 aa, Artificial Sequence
  SARS-CoV-2/pangolin/Guangxi/P5E/2017__EPI_ISL_410541 spike protein (1-1205)(I708C_Y1104C) WhcAg construct
MFVFLFVLPLVSSQCVNLTTRTGIPPGYTNSSTRGVYYPDKVFRSSILHLTQDLFLPFFSNVTWFNTITYQGGSKKFDNPVLPFNDGVYFASTEKSNIIRGWIFGTTLDARTQSLLIVNNATNVVIKVCEFQFCTDPFLGVYYHNNNKTWVENEFRVYSSANNCTFEYISQPFLMDLEGKQGNFKNLREFVFKNVDGYFKIYSKHTPIDLVRDLPRGFAALEPLVDLPIGINITRFQTLLALHRSYLTPGKLESGWTTGAAAYYVGYLQQRTFLLSYNQNGTITDAVDCSLDPLSETKCTLKSLTVEKGIYQTSNFRVQPTISIVRFPNITNLCPFGEVFNASKFASVYAWNRKRISNCVADYSVLYNSTSFSTFKCYGVSPTKLNDLCFTNVYADSFVVKGDEVRQIAPGQTGVIADYNYKLPDDFTGCVIAWNSVKQDALTGDNYGYLYRLFRKSKLKPFERDISTEIYQAGSTPCNGQVGLNCYYPLERYGFHPTTGVNYQPFRVVVLSFELLNGPATVCGPKLSTTLVKDKCVNFNFNGLTGTGVLTTSKKQFLPFQQFGRDISDTTDAVRDPQTLEILDITPCSFGGVSVITPGTNTSNQVAVLYQDVNCTEVPMAIHAEQLTPAWRVYSAGANVFQTRAGCLVGAEHVNNSYECDIPVGAGICASYHSMSSFRSVNQRSIIAYTMSLGAENSVAYSNNSIACPTNFTISVTTEILPVSMTKTSVDCTMYICGDSIECSNLLLQYGSFCTQLNRALTGIAVEQDKNTQEVFAQVKQIYKTPPIKDFGGFNFSQILPDPSKPSKRSFIEDLLFNKVTLADAGFIKQYGDCLGDIAARDLICAQKFNGLTVLPPLLTDEMIAQYTSALLAGTITSGWTFGAGAALQIPFAMQMAYRFNGIGVTQNVLYENQKLIANQFNSAIGKIQDSLSSTASALGKLQDVVNQNAQALNTLVKQLSSNFGAISSVLNDILSRLDKVEAEVQIDRLITGRLQSLQTYVTQQLIRAAEIRASANLAATKMSECVLGQSKRVDFCGKGYHLMSFPQSAPHGVVFLHVTYVPAQEKNFTTAPAICHEGKAHFPREGVFVSNGTHWFITQRNFCEPQIITTDNTFVSGSCDVVIGIVNNTVYDPLQPELDSFKEELDKYFKNHTSPDVDLGDISGINASVVNIQKEIDRLNEVAKNLNESLIDLQELGKYEQYIKGGGGSDIDPYKEFGSSYQLLNFLPLDFFPDLNALVDTATALYEEELTGREHCSPHHTAIRQALVCWDELTKLIAWMSSNITSEQVRTIIVNHVNDTWGLKVRQSLWFHLSCLTFGQHTVQEFLVSFGVWIRTPAPYRPPNAPILSTLPEHTVIC

SEQ ID NO: 7107 - protein, 1357 aa, Artificial Sequence
  SARS-CoV-2/pangolin/Guangxi/P1E/2017__EPI_ISL_410539 spike protein (1-1203)(I706C_Y1102C) WhcAg construct
MFVFLFVLPLVSSQCVNLTTRTGIQPGYTNSSTRGVYYPDKVFRSSILHLTQDLFLPFFSNVTWFNTINYQGGFKKFDNPVLPFNDGVYFASTEKSNIIRGWIFGTTLDARTQSLLIVNNATNVVIKVCEFQFCTDPFLGVYYHNNNKTWVENEFRVYSSANNCTFEYISQPFLMDLEGKQGNFKNLREFVFKNVDGYFKIYSKHTPIDLVRDLPRGFAALEPLVDLPIGINITRFQTLLALHRSYLTPGKLESGWTTGAAAYYVGYLQQRTFLLSYNQNGTITDAVDCSLDPLSETKCTLKSLTVEKGIYQTSNFRVQPTISIVRFPNITNLCPFGEVFNASKFASVYAWNRKRISNCVADYSVLYNSTSFSTFKCYGVSPTKLNDLCFTNVYADSFVVKGDEVRQIAPGQTGVIADYNYKLPDDFTGCVIAWNSVKQDALTGGNYLYRLFRKSKLKPFERDISTEIYQAGSTPCNGQVGLNCYYPLERYGFHPTTGVNYQPFRVVVLSFELLNGPATVCGPKLSTTLVKDKCVNFNFNGLTGTGVLTTSKKQFLPFQQFGRDISDTTDAVRDPQTLEILDITPCSFGGVSVITPGTNTSNQVAVLYQDVNCTEVPMAIHAEQLTPAWRVYSAGANVFQTRAGCLVGAEHVNNSYECDIPVGAGICASYHSMSSLRSVNQRSIIAYTMSLGAENSVAYSNNSIACPTNFTISVTTEILPVSMTKTSVDCTMYICGDSIECSNLLLQYGSFCTQLNRALTGIAVEQDKNTQEVFAQVKQIYKTPPIKDFGGFNFSQILPDPSKPSKRSFIEDLLFNKVTLADAGFIKQYGDCLGDIAARDLICAQKFNGLTVLPPLLTDEMIAQYTSALLAGTITSGWTFGAGAALQIPFAMQMAYRFNGIGVTQNVLYENQKLIANQFNSAIGKIQDSLSSTASALGKLQDVVNQNAQALNTLVKQLSSNFGAISSVLNDILSRLDKVEAEVQIDRLITGRLQSLQTYVTQQLIRAAEIRASANLAATKMSECVLGQSKRVDFCGKGYHLMSFPQSAPHGVVFLHVTYVPAQEKNFTTAPAICHEGKAHFPREGVFVSNGTHWFITQRNFCEPQIITTDNTFVSGSCDVVIGIVNNTVYDPLQPELDSFKEELDKYFKNHTSPDVDLGDISGINASVVNIQKEIDRLNEVAKNLNESLIDLQELGKYEQYIKGGGGSDIDPYKEFGSSYQLLNFLPLDFFPDLNALVDTATALYEEELTGREHCSPHHTAIRQALVCWDELTKLIAWMSSNITSEQVRTIIVNHVNDTWGLKVRQSLWFHLSCLTFGQHTVQEFLVSFGVWIRTPAPYRPPNAPILSTLPEHTVIC

SEQ ID NO: 7108 - protein, 1365 aa, Artificial Sequence
  SARS-CoV-2/Wuhan/WIV05/2019__EPI_ISL_402128 spike protein (1-1211)(P715C_P1069C) WhcAg construct
MFVFLVLLPLVSSQCVNLTTRTQLPPAYTNSFTRGVYYPDKVFRSSVLHSTQDLFLPFFSNVTWFHAIHVSGTNGTKRFDNPVLPFNDGVYFASTEKSNIIRGWIFGTTLDSKTQSLLIVNNATNVVIKVCEFQFCNDPFLGVYYHKNNKSWMESEFRVYSSANNCTFEYVSQPFLMDLEGKQGNFKNLREFVFKNIDGYFKIYSKHTPINLVRDLPQGFSALEPLVDLPIGINITRFQTLLALHRSYLTPGDSSSGWTAGAAAYYVGYLQPRTFLLKYNENGTITDAVDCALDPLSETKCTLKSFTVEKGIYQTSNFRVQPTESIVRFPNITNLCPFGEVFNATRFASVYAWNRKRISNCVADYSVLYNSASFSTFKCYGVSPTKLNDLCFTNVYADSFVIRGDEVRQIAPGQTGKIADYNYKLPDDFTGCVIAWNSNNLDSKVGGNYNYLYRLFRKSNLKPFERDISTEIYQAGSTPCNGVEGFNCYFPLQSYGFQPTNGVGYQPYRVVVLSFELLHAPATVCGPKKSTNLVKNKCVNFNFNGLTGTGVLTESNKKFLPFQQFGRDIADTTDAVRDPQTLEILDITPCSFGGVSVITPGTNTSNQVAVLYQDVNCTEVPVAIHADQLTPTWRVYSTGSNVFQTRAGCLIGAEHVNNSYECDIPIGAGICASYQTQTNSPRRARSVASQSIIAYTMSLGAENSVAYSNNSIAICTNFTISVTTEILPVSMTKTSVDCTMYICGDSTECSNLLLQYGSFCTQLNRALTGIAVEQDKNTQEVFAQVKQIYKTPPIKDFGGFNFSQILPDPSKPSKRSFIEDLLFNKVTLADAGFIKQYGDCLGDIAARDLICAQKFNGLTVLPPLLTDEMIAQYTSALLAGTITSGWTFGAGAALQIPFAMQMAYRFNGIGVTQNVLYENQKLIANQFNSAIGKIQDSLSSTASALGKLQDVVNQNAQALNTLVKQLSSNFGAISSVLNDILSRLDKVEAEVQIDRLITGRLQSLQTYVTQQLIRAAEIRASANLAATKMSECVLGQSKRVDFCGKGYHLMSFPQSAPHGVVFLHVTYVCAQEKNFTTAPAICHDGKAHFPREGVFVSNGTHWFVTQRNFYEPQIITTDNTFVSGNCDVVIGIVNNTVYDPLQPELDSFKEELDKYFKNHTSPDVDLGDISGINASVVNIQKEIDRLNEVAKNLNESLIDLQELGKYEQYIKGGGGSDIDPYKEFGSSYQLLNFLPLDFFPDLNALVDTATALYEEELTGREHCSPHHTAIRQALVCWDELTKLIAWMSSNITSEQVRTIIVNHVNDTWGLKVRQSLWFHLSCLTFGQHTVQEFLVSFGVWIRTPAPYRPPNAPILSTLPEHTVIC

SEQ ID NO: 7109 - protein, 1361 aa, Artificial Sequence
  SARS-CoV-2/bat/Yunnan/RaTG13/2013__EPI_ISL_402131 spike protein (1-1207)(P711C_P1065C) WhcAg construct
MFVFLVLLPLVSSQCVNLTTRTQLPPAYTNSSTRGVYYPDKVFRSSVLHLTQDLFLPFFSNVTWFHAIHVSGTNGIKRFDNPVLPFNDGVYFASTEKSNIIRGWIFGTTLDSKTQSLLIVNNATNVVIKVCEFQFCNDPFLGVYYHKNNKSWMESEFRVYSSANNCTFEYVSQPFLMDLEGKQGNFKNLREFVFKNIDGYFKIYSKHTPINLVRDLPPGFSALEPLVDLPIGINITRFQTLLALHRSYLTPGDSSSGWTAGAAAYYVGYLQPRTFLLKYNENGTITDAVDCALDPLSETKCTLKSFTVEKGIYQTSNFRVQPTDSIVRFPNITNLCPFGEVFNATTFASVYAWNRKRISNCVADYSVLYNSTSFSTFKCYGVSPTKLNDLCFTNVYADSFVITGDEVRQIAPGQTGKIADYNYKLPDDFTGCVIAWNSKHIDAKEGGNFNYLYRLFRKANLKPFERDISTEIYQAGSKPCNGQTGLNCYYPLYRYGFYPTDGVGHQPYRVVVLSFELLNAPATVCGPKKSTNLVKNKCVNFNFNGLTGTGVLTESNKKFLPFQQFGRDIADTTDAVRDPQTLEILDITPCSFGGVSVITPGTNASNQVAVLYQDVNCTEVPVAIHADQLTPTWRVYSTGSNVFQTRAGCLIGAEHVNNSYECDIPIGAGICASYQTQTNSRSVASQSIIAYTMSLGAENSVAYSNNSIAICTNFTISVTTEILPVSMTKTSVDCTMYICGDSTECSNLLLQYGSFCTQLNRALTGIAVEQDKNTQEVFAQVKQIYKTPPIKDFGGFNFSQILPDPSKPSKRSFIEDLLFNKVTLADAGFIKQYGDCLGDIAARDLICAQKFNGLTVLPPLLTDEMIAQYTSALLAGTITSGWTFGAGAALQIPFAMQMAYRFNGIGVTQNVLYENQKLIANQFNSAIGKIQDSLSSTASALGKLQDVVNQNAQALNTLVKQLSSNFGAISSVLNDILSRLDKVEAEVQIDRLITGRLQSLQTYVTQQLIRAAEIRASANLAATKMSECVLGQSKRVDFCGKGYHLMSFPQSAPHGVVFLHVTYVCAQEKNFTTAPAICHDGKAHFPREGVFVSNGTHWFVTQRNFYEPQIITTDNTFVSGSCDVVIGIVNNTVYDPLQPELDSFKEELDKYFKNHTSPDVDLGDISGINASVVNIQKEIDRLNEVAKNLNESLIDLQELGKYEQYIKGGGGSDIDPYKEFGSSYQLLNFLPLDFFPDLNALVDTATALYEEELTGREHCSPHHTAIRQALVCWDELTKLIAWMSSNITSEQVRTIIVNHVNDTWGLKVRQSLWFHLSCLTFGQHTVQEFLVSFGVWIRTPAPYRPPNAPILSTLPEHTVIC

SEQ ID NO: 7110 - protein, 1365 aa, Artificial Sequence
  SARS-CoV-2/Wuhan/HBCDC-HB-01/2019__EPI_ISL_402132 spike protein (1-1211)(P715C_P1069C) WhcAg construct
MFVFLVLLPLVSSQCVNLTTRTQLPPAYTNSITRGVYYPDKVFRSSVLHSTQDLFLPFFSNVTWFHAIHVSGTNGTKRFDNPVLPFNDGVYFASTEKSNIIRGWIFGTTLDSKTQSLLIVNNATNVVIKVCEFQFCNDPFLGVYYHKNNKSWMESEFRVYSSANNCTFEYVSQPFLMDLEGKQGNFKNLREFVFKNIDGYFKIYSKHTPINLVRDLPQGFSALEPLVDLPIGINITRFQTLLALHRSYLTPGDSSSGWTAGAAAYYVGYLQPRTFLLKYNENGTITDAVDCALDPLSETKCTLKSFTVEKGIYQTSNFRVQPTESIVRFPNITNLCPFGEVFNATRFASVYAWNRKRISNCVADYSVLYNSASFSTFKCYGVSPTKLNDLCFTNVYADSFVIRGDEVRQIAPGQTGKIADYNYKLPDDFTGCVIAWNSNNLDSKVGGNYNYLYRLFRKSNLKPFERDISTEIYQAGSTPCNGVEGFNCYFPLQSYGFQPTNGVGYQPYRVVVLSFELLHAPATVCGPKKSTNLVKNKCVNFNFNGLTGTGVLTESNKKFLPFQQFGRDIADTTDAVRDPQTLEILDITPCSFGGVSVITPGTNTSNQVAVLYQDVNCTEVPVAIHADQLTPTWRVYSTGSNVFQTRAGCLIGAEHVNNSYECDIPIGAGICASYQTQTNSPRRARSVASQSIIAYTMSLGAENSVAYSNNSIAICTNFTISVTTEILPVSMTKTSVDCTMYICGDSTECSNLLLQYGSFCTQLNRALTGIAVEQDKNTQEVFAQVKQIYKTPPIKDFGGFNFSQILPDPSKPSKRSFIEDLLFNKVTLADAGFIKQYGDCLGDIAARDLICAQKFNGLTVLPPLLTDEMIAQYTSALLAGTITSGWTFGAGAALQIPFAMQMAYRFNGIGVTQNVLYENQKLIANQFNSAIGKIQDSLSSTASALGKLQDVVNQNAQALNTLVKQLSSNFGAISSVLNDILSRLDKVEAEVQIDRLITGRLQSLQTYVTQQLIRAAEIRASANLAATKMSECVLGQSKRVDFCGKGYHLMSFPQSAPHGVVFLHVTYVCAQEKNFTTAPAICHDGKAHFPREGVFVSNGTHWFVTQRNFYEPQIITTDNTFVSGNCDVVIGIVNNTVYDPLQPELDSFKEELDKYFKNHTSPDVDLGDISGINASVVNIQKEIDRLNEVAKNLNESLIDLQELGKYEQYIKGGGGSDIDPYKEFGSSYQLLNFLPLDFFPDLNALVDTATALYEEELTGREHCSPHHTAIRQALVCWDELTKLIAWMSSNITSEQVRTIIVNHVNDTWGLKVRQSLWFHLSCLTFGQHTVQEFLVSFGVWIRTPAPYRPPNAPILSTLPEHTVIC

SEQ ID NO: 7111 - protein, 1365 aa, Artificial Sequence
  SARS-CoV-2/Guangdong/20SF028/2020__EPI_ISL_403936 spike protein (1-1211)(P715C_P1069C) WhcAg construct
MFVFLVLLPLVSSQCVNLTTRTQLPPAYTNSFTRGVYYPDKVFRSSVLYSTQDLFLPFFSNVTWFHAIHVSGTNGTKRFDNPVLPFNDGVYFASTEKSNIIRGWIFGTTLDSKTQSLLIVNNATNVVIKVCEFQFCNDPFLGVYYHKNNKSWMESEFRVYSSANNCTFEYVSQPFLMDLEGKQGNFKNLREFVFKNIDGYFKIYSKHTPINLVRDLPQGFSALEPLVDLPIGINITRFQTLLALHRSYLTPGDSSSGWTAGAAAYYVGYLQPRTFLLKYNENGTITDAVDCALDPLSETKCTLKSFTVEKGIYQTSNFRVQPTESIVRFPNITNLCPFGEVFNATRFASVYAWNRKRISNCVADYSVLYNSASFSTFKCYGVSPTKLNDLCFTNVYADSFVIRGDEVRQIAPGQTGKIADYNYKLPDDFTGCVIAWNSNNLDSKVGGNYNYLYRLFRKSNLKPFERDISTEIYQAGSTPCNGVEGFNCYFPLQSYGFQPTNGVGYQPYRVVVLSFELLHAPATVCGPKKSTNLVKNKCVNFNFNGLTGTGVLTESNKKFLPFQQFGRDIADTTDAVRDPQTLEILDITPCSFGGVSVITPGTNTSNQVAVLYQDVNCTEVPVAIHADQLTPTWRVYSTGSNVFQTRAGCLIGAEHVNNSYECDIPIGAGICASYQTQTNSPRRARSVASQSIIAYTMSLGAENSVAYSNNSIAICTNFTISVTTEILPVSMTKTSVDCTMYICGDSTECSNLLLQYGSFCTQLNRALTGIAVEQDKNTQEVFAQVKQIYKTPPIKDFGGFNFSQILPDPSKPSKRSFIEDLLFNKVTLADAGFIKQYGDCLGDIAARDLICAQKFNGLTVLPPLLTDEMIAQYTSALLAGTITSGWTFGAGAALQIPFAMQMAYRFNGIGVTQNVLYENQKLIANQFNSAIGKIQDSLSSTASALGKLQDVVNQNAQALNTLVKQLSSNFGAISSVLNDILSRLDKVEAEVQIDRLITGRLQSLQTYVTQQLIRAAEIRASANLAATKMSECVLGQSKRVDFCGKGYHLMSFPQSAPHGVVFLHVTYVCAQEKNFTTAPAICHDGKAHFPREGVFVSNGTHWFVTQRNFYEPQIITTDNTFVSGNCDVVIGIVNNTVYDPLQPELDSFKEELDKYFKNHTSPDVDLGDISGINASVVNIQKEIDRLNEVAKNLNESLIDLQELGKYEQYIKGGGGSDIDPYKEFGSSYQLLNFLPLDFFPDLNALVDTATALYEEELTGREHCSPHHTAIRQALVCWDELTKLIAWMSSNITSEQVRTIIVNHVNDTWGLKVRQSLWFHLSCLTFGQHTVQEFLVSFGVWIRTPAPYRPPNAPILSTLPEHTVIC

SEQ ID NO: 7112 - protein, 1365 aa, Artificial Sequence
  SARS-CoV-2/Shenzhen/SZTH-001/2020__EPI_ISL_406592 spike protein (1-1211)(P715C_P1069C) WhcAg construct
MFVFLVLLPLVSSQCVNLTTRTQLPPAYTNSFTRGVYYPDKVFRSSVLHSTQDLFLPFFSNVTWFHAIHVSGTNGTKRFDNPVLPFNDGVYFASTEKSNIIRGWIFGTTLDSKTQSLLIVNNATNVVIKVCEFQFCNDPFLGVYYHKNNKSWMESEFRVYSSANNCTFEYVSQPFLMDLEGKQGNFKNLREFVFKNIDGYFKIYSKHTPINLVRDLPQGFSALEPLVDLPIGINITRFQTLLALHRSYLTPGDSSSGWTAGAAAYYVGYLQPRTFLLKYNENGTITDAVDCALDPLSETKCTLKSFTVEKGIYQTSNFRVQPTESIVRFPNITNLCPFGEVFNATRFASVYAWNRKRISNCVADYSVLYNSASFSTFKCYGVSPTKLNDLCFTNVYADSFVIRGDEVRQIAPGQTGKIADYNYKLPDDFTGCVIAWNSNNLDSKVGGNYNYLYRLFRKSNLKPFERDISTEIYQAGSTPCNGVEGFNCYFPLQSYGFQPTNGVGYQPYRVVVLSFELLHAPATVCGPKKSTNLVKNKCVNFNFNGLTGTGVLTESNKKFLPFQQFGRDIADTTDAVRDPQTLEILDITPCSFGGVSVITPGTNTSNQVAVLYQDVNCTEVPVAIHADQLTPTWRVYSTGSNVFQTRAGCLIGAEHVNNSYECDIPIGAGICASYQTQTNSPRRARSVASQSIIAYTMSLGAENSVAYSNNSIAICTNFTISVTTEILPVSMTKTSVDCTMYICGDSTECSNLLLQYGSFCTQLNRALTGIAVEQDKNTQEVFAQVKQIYKTPPIKDFGGFNFSQILPDPSKPSKRSFIEDLLFNKVTLADAGFIKQYGDCLGDIAARDLICAQKFNGLTVLPPLLTDEMIAQYTSALLAGTITSGWTFGAGAALQIPFAMQMAYRFNGIGVTQNVLYENQKLIANQFNSAIGKIQDSLSSTASALGKLQDVVNQNAQALNTLVKQLSSNFGAISSVLNDILSRLDKVEAEVQIDRLITGRLQSLQTYVTQQLIRAAEIRASANLAATKMSECVLGQSKRVDFCGKGYHLMSFPQSAPHGVVFLHVTYVCAQEKNFTTAPAICHDGKAHFPREGVFVSNGTHWFVTQRNFYEPQIITTDNTFVSGNCDVLIGIVNNTVYDPLQPELDSFKEELDKYFKNHTSPDVDLGDISGINASVVNIQKEIDRLNEVAKNLNESLIDLQELGKYEQYIKGGGGSDIDPYKEFGSSYQLLNFLPLDFFPDLNALVDTATALYEEELTGREHCSPHHTAIRQALVCWDELTKLIAWMSSNITSEQVRTIIVNHVNDTWGLKVRQSLWFHLSCLTFGQHTVQEFLVSFGVWIRTPAPYRPPNAPILSTLPEHTVIC

SEQ ID NO: 7113 - protein, 1365 aa, Artificial Sequence
  SARS-CoV-2/Shenzhen/SZTH-004/2020__EPI_ISL_406595 spike protein (1-1211)(P715C_P1069C) WhcAg construct
MFVFLVLLPLVSSQCVNLTTRTQLPPAYTNSFTRGVYYPDKVFRSSVLHSTQDLFLPFFSNVTWFHAIHVSGTNGTKRFDNPVLPFNDGVYFASTEKSNIIRGWIFGTTLDSKTQSLLIVNNATNVVIKVCEFQFCNDPFLGVYYHKNNKSWMESEFRVYSSANNCTFEYVSQPFLMDLEGKQGNFKNLREFVFKNIDGYFKIYSKHTPINLVRDLPQGFSALEPLVDLPIGINITRFQTLLALHRSYLTPGDSSSGWTAGAAAYYVGYLQPRTFLLKYNENGTITDAVDCALDPLSETKCTLKSFTVEKGIYQTSNFRVQPTESIVRFPNITNLCPFGEVFNATRFASVYAWDRKRISNCVAYYSVLYNSASFSTFKCYGVSPTKLNDLCFTNVYADSFVIRGDEVRQIAPGQTGKIADYNYKLPDDFTGCVIAWNSNNLDSKVGGNYNYLYRLFRKSNLKPFERDISTEIYQAGSTPCNGVEGFNCYFPLQSYGFQPTNGVGYQPYRVVVLSFELLHAPATVCGPKKSTNLVKNKCVNFNFNGLTGTGVLTESNKKFLPFQQFGRDIADTTDAVRDPQTLEILDITPCSFGGVSVITPGTNTSNQVAVLYQDVNCTEVPVAIHADQLTPTWRVYSTGSNVFQTRAGCLIGAEHVNNSYECDIPIGAGICASYQTQTNSPRRARSVASQSIIAYTMSLGAENSVAYSNNSIAICTNFTISVTTEILPVSMTKTSVDCTMYICGDSTECSNLLLQYGSFCTQLNRALTGIAVEQDKNTQEVFAQVKQIYKTPPIKDFGGFNFSQILPDPSKPSKRSFIEDLLFNKVTLADAGFIKQYGDCLGDIAARDLICAQKFNGLTVLPPLLTDEMIAQYTSALLAGTITSGWTFGAGAALQIPFAMQMAYRFNGIGVTQNVLYENQKLIANQFNSAIGKIQDSLSSTASALGKLQDVVNQNAQALNTLVKQLSSNFGAISSVLNDILSRLDKVEAEVQIDRLITGRLQSLQTYVTQQLIRAAEIRASANLAATKMSECVLGQSKRVDFCGKGYHLMSFPQSAPHGVVFLHVTYVCAQEKNFTTAPAICHDGKAHFPREGVFVSNGTHWFVTQRNFYEPQIITTDNTFVSGNCDVVIGIVNNTVYDPLQPELDSFKEELDKYFKNHTSPDVDLGDISGINASVVNIQKEIDRLNEVAKNLNESLIDLQELGKYEQYIKGGGGSDIDPYKEFGSSYQLLNFLPLDFFPDLNALVDTATALYEEELTGREHCSPHHTAIRQALVCWDELTKLIAWMSSNITSEQVRTIIVNHVNDTWGLKVRQSLWFHLSCLTFGQHTVQEFLVSFGVWIRTPAPYRPPNAPILSTLPEHTVIC

SEQ ID NO: 7114 - protein, 1365 aa, Artificial Sequence
  SARS-CoV-2/France/IDF0372/2020__EPI_ISL_406596 spike protein (1-1211)(P715C_P1069C) WhcAg construct
MFVFLVLLPLVSSQCVNLTTRTQLPPAYTNSFTRGVYYPDKVFRSSVLHSTQDLFLPFFSNVTWFHAIHVSGTNGTKRFDNPVLPFNDGVYFASTEKSNIIRGWIFGTTLDSKTQSLLIVNNATNVVIKVCEFQFCNDPFLGVYYHKNNKSWMESEFRVYSSANNCTFEYVSQPFLMDLEGKQGNFKNLREFVFKNIDGYFKIYSKHTPINLVRDLPQGFSALEPLVDLPIGINITRFQTLLALHRSYLTPGDSSSGWTAGAAAYYVGYLQPRTFLLKYNENGTITDAVDCALDPLSETKCTLKSFTVEKGIYQTSNFRVQPTESIVRFPNITNLCPFGEVFNATRFASVYAWNRKRISNCVADYSFLYNSASFSTFKCYGVSPTKLNDLCFTNVYADSFVIRGDEVRQIAPGQTGKIADYNYKLPDDFTGCVIAWNSNNLDSKVGGNYNYLYRLFRKSNLKPFERDISTEIYQAGSTPCNGVEGFNCYFPLQSYGFQPTNGVGYQPYRVVVLSFELLHAPATVCGPKKSTNLVKNKCVNFNFNGLTGTGVLTESNKKFLPFQQFGRDIADTTDAVRDPQTLEILDITPCSFGGVSVITPGTNTSNQVAVLYQDVNCTEVPVAIHADQLTPTWRVYSTGSNVFQTRAGCLIGAEHVNNSYECDIPIGAGICASYQTQTNSPRRARSVASQSIIAYTMSLGAENSVAYSNNSIAICTNFTISVTTEILPVSMTKTSVDCTMYICGDSTECSNLLLQYGSFCTQLNRALTGIAVEQDKNTQEVFAQVKQIYKTPPIKDFGGFNFSQILPDPSKPSKRSFIEDLLFNKVTLADAGFIKQYGDCLGDIAARDLICAQKFNGLTVLPPLLTDEMIAQYTSALLAGTITSGWTFGAGAALQIPFAMQMAYRFNGIGVTQNVLYENQKLIANQFNSAIGKIQDSLSSTASALGKLQDVVNQNAQALNTLVKQLSSNFGAISSVLNDILSRLDKVEAEVQIDRLITGRLQSLQTYVTQQLIRAAEIRASANLAATKMSECVLGQSKRVDFCGKGYHLMSFPQSAPHGVVFLHVTYVCAQEKNFTTAPAICHDGKAHFPREGVFVSNGTHWFVTQRNFYEPQIITTDNTFVSGNCDVVIGIVNNTVYDPLQPELDSFKEELDKYFKNHTSPDVDLGDISGINASVVNIQKEIDRLNEVAKNLNESLIDLQELGKYEQYIKGGGGSDIDPYKEFGSSYQLLNFLPLDFFPDLNALVDTATALYEEELTGREHCSPHHTAIRQALVCWDELTKLIAWMSSNITSEQVRTIIVNHVNDTWGLKVRQSLWFHLSCLTFGQHTVQEFLVSFGVWIRTPAPYRPPNAPILSTLPEHTVIC

SEQ ID NO: 7115 - protein, 1365 aa, Artificial Sequence
  SARS-CoV-2/Australia/VIC01/2020__EPI_ISL_406844 spike protein (1-1211)(P715C_P1069C) WhcAg construct
MFVFLVLLPLVSSQCVNLTTRTQLPPAYTNSFTRGVYYPDKVFRSSVLHSTQDLFLPFFSNVTWFHAIHVSGTNGTKRFDNPVLPFNDGVYFASTEKSNIIRGWIFGTTLDSKTQSLLIVNNATNVVIKVCEFQFCNDPFLGVYYHKNNKSWMESEFRVYSSANNCTFEYVSQPFLMDLEGKQGNFKNLREFVFKNIDGYFKIYSKHTPINLVRDLPQGFSALEPLVDLPIGINITRFQTLLALHRRYLTPGDSSSGWTAGAAAYYVGYLQPRTFLLKYNENGTITDAVDCALDPLSETKCTLKSFTVEKGIYQTSNFRVQPTESIVRFPNITNLCPFGEVFNATRFASVYAWNRKRISNCVADYSVLYNSASFSTFKCYGVSPTKLNDLCFTNVYADSFVIRGDEVRQIAPGQTGKIADYNYKLPDDFTGCVIAWNSNNLDSKVGGNYNYLYRLFRKSNLKPFERDISTEIYQAGSTPCNGVEGFNCYFPLQSYGFQPTNGVGYQPYRVVVLSFELLHAPATVCGPKKSTNLVKNKCVNFNFNGLTGTGVLTESNKKFLPFQQFGRDIADTTDAVRDPQTLEILDITPCSFGGVSVITPGTNTSNQVAVLYQDVNCTEVPVAIHADQLTPTWRVYSTGSNVFQTRAGCLIGAEHVNNSYECDIPIGAGICASYQTQTNSPRRARSVASQSIIAYTMSLGAENSVAYSNNSIAICTNFTISVTTEILPVSMTKTSVDCTMYICGDSTECSNLLLQYGSFCTQLNRALTGIAVEQDKNTQEVFAQVKQIYKTPPIKDFGGFNFSQILPDPSKPSKRSFIEDLLFNKVTLADAGFIKQYGDCLGDIAARDLICAQKFNGLTVLPPLLTDEMIAQYTSALLAGTITSGWTFGAGAALQIPFAMQMAYRFNGIGVTQNVLYENQKLIANQFNSAIGKIQDSLSSTASALGKLQDVVNQNAQALNTLVKQLSSNFGAISSVLNDILSRLDKVEAEVQIDRLITGRLQSLQTYVTQQLIRAAEIRASANLAATKMSECVLGQSKRVDFCGKGYHLMSFPQSAPHGVVFLHVTYVCAQEKNFTTAPAICHDGKAHFPREGVFVSNGTHWFVTQRNFYEPQIITTDNTFVSGNCDVVIGIVNNTVYDPLQPELDSFKEELDKYFKNHTSPDVDLGDISGINASVVNIQKEIDRLNEVAKNLNESLIDLQELGKYEQYIKGGGGSDIDPYKEFGSSYQLLNFLPLDFFPDLNALVDTATALYEEELTGREHCSPHHTAIRQALVCWDELTKLIAWMSSNITSEQVRTIIVNHVNDTWGLKVRQSLWFHLSCLTFGQHTVQEFLVSFGVWIRTPAPYRPPNAPILSTLPEHTVIC

SEQ ID NO: 7116 - protein, 1365 aa, Artificial Sequence
  SARS-CoV-2/Germany/BavPat1/2020__EPI_ISL_406862 spike protein (1-1211)(P715C_P1069C) WhcAg construct
MFVFLVLLPLVSSQCVNLTTRTQLPPAYTNSFTRGVYYPDKVFRSSVLHSTQDLFLPFFSNVTWFHAIHVSGTNGTKRFDNPVLPFNDGVYFASTEKSNIIRGWIFGTTLDSKTQSLLIVNNATNVVIKVCEFQFCNDPFLGVYYHKNNKSWMESEFRVYSSANNCTFEYVSQPFLMDLEGKQGNFKNLREFVFKNIDGYFKIYSKHTPINLVRDLPQGFSALEPLVDLPIGINITRFQTLLALHRSYLTPGDSSSGWTAGAAAYYVGYLQPRTFLLKYNENGTITDAVDCALDPLSETKCTLKSFTVEKGIYQTSNFRVQPTESIVRFPNITNLCPFGEVFNATRFASVYAWNRKRISNCVADYSVLYNSASFSTFKCYGVSPTKLNDLCFTNVYADSFVIRGDEVRQIAPGQTGKIADYNYKLPDDFTGCVIAWNSNNLDSKVGGNYNYLYRLFRKSNLKPFERDISTEIYQAGSTPCNGVEGFNCYFPLQSYGFQPTNGVGYQPYRVVVLSFELLHAPATVCGPKKSTNLVKNKCVNFNFNGLTGTGVLTESNKKFLPFQQFGRDIADTTDAVRDPQTLEILDITPCSFGGVSVITPGTNTSNQVAVLYQGVNCTEVPVAIHADQLTPTWRVYSTGSNVFQTRAGCLIGAEHVNNSYECDIPIGAGICASYQTQTNSPRRARSVASQSIIAYTMSLGAENSVAYSNNSIAICTNFTISVTTEILPVSMTKTSVDCTMYICGDSTECSNLLLQYGSFCTQLNRALTGIAVEQDKNTQEVFAQVKQIYKTPPIKDFGGFNFSQILPDPSKPSKRSFIEDLLFNKVTLADAGFIKQYGDCLGDIAARDLICAQKFNGLTVLPPLLTDEMIAQYTSALLAGTITSGWTFGAGAALQIPFAMQMAYRFNGIGVTQNVLYENQKLIANQFNSAIGKIQDSLSSTASALGKLQDVVNQNAQALNTLVKQLSSNFGAISSVLNDILSRLDKVEAEVQIDRLITGRLQSLQTYVTQQLIRAAEIRASANLAATKMSECVLGQSKRVDFCGKGYHLMSFPQSAPHGVVFLHVTYVCAQEKNFTTAPAICHDGKAHFPREGVFVSNGTHWFVTQRNFYEPQIITTDNTFVSGNCDVVIGIVNNTVYDPLQPELDSFKEELDKYFKNHTSPDVDLGDISGINASVVNIQKEIDRLNEVAKNLNESLIDLQELGKYEQYIKGGGGSDIDPYKEFGSSYQLLNFLPLDFFPDLNALVDTATALYEEELTGREHCSPHHTAIRQALVCWDELTKLIAWMSSNITSEQVRTIIVNHVNDTWGLKVRQSLWFHLSCLTFGQHTVQEFLVSFGVWIRTPAPYRPPNAPILSTLPEHTVIC

SEQ ID NO: 7117 - protein, 1365 aa, Artificial Sequence
  SARS-CoV-2/Wuhan/HBCDC-HB-02/2020__EPI_ISL_412978 spike protein (1-1211)(P715C_P1069C) WhcAg construct
MFVFLVLLPLVSSQCVNLTTRTQLPPAYTNSFTRGVYYPDKVFRSSVLHSTQDLFLPFFSNVTWFHAIHVSGTNGTKRFDNPVLPFNDGVYFASTEKSNIIRGWIFGTTLDSKTQSLLIVNNATNVVIKVCEFQFCNDPFLGVYYHKNNKSWMESEFRVYSSANNCTFEYVSQPFLMDLEGKQGNFKNLREFVFKNIDGYFKIYSKHTPINLVRDLPQGFSALEPLVDLPIGINITRFQTLLALHRSYLTPGDSSSGWTAGAAAYYVGYLQPRTFLLKYNENGTITDAVDCALDPLSETKCTLKSFTVEKGIYQTSNFRVQPTESIVRFPNITNLCPFGEVFNATRFASVYAWNRKRISNCVADYSVLYNSASFSTFKCYGVSPTKLNDLCFTNVYADSFVIRGDEVRQIAPGQTGKIADYNYKLPDDFTGCVIAWNSNNLDSKVGGNYNYLYRLFRKSNLKPFERDISTEIYQAGSTPCNGVEGFNCYFPLQSYGFQPTNGVGYQPYRVVVLSFELLHAPATVCGPKKSTNLVKNKCVNFNFNGLTGTGVLTESNKKFLPFQQFGRDIADTTDAVRDPQTLEILDITPCSFGGVSVITPGTNTSNQVAVLYQDVNCTEVPVAIHADQLTPTWRVYSTGSNVFQTRAGCLIGAEHVNNSYECDIPIGAGICASYQTQTNSPRRARSVASQSIIAYTMSLGAENSVAYSNNSIAICTNFTISVTTEILPVSMTKTSVDCTMYICGDSTECSNFLLQYGSFCTQLNRALTGIAVEQDKNTQEVFAQVKQIYKTPPIKDFGGFNFSQILPDPSKPSKRSFIEDLLFNKVTLADAGFIKQYGDCLGDIAARDLICAQKFNGLTVLPPLLTDEMIAQYTSALLAGTITSGWTFGAGAALQIPFAMQMAYRFNGIGVTQNVLYENQKLIANQFNSAIGKIQDSLSSTASALGKLQDVVNQNAQALNTLVKQLSSNFGAISSVLNDILSRLDKVEAEVQIDRLITGRLQSLQTYVTQQLIRAAEIRASANLAATKMSECVLGQSKRVDFCGKGYHLMSFPQSAPHGVVFLHVTYVCAQEKNFTTAPAICHDGKAHFPREGVFVSNGTHWFVTQRNFYEPQIITTDNTFVSGNCDVVIGIVNNTVYDPLQPELDSFKEELDKYFKNHTSPDVDLGDISGINASVVNIQKEIDRLNEVAKNLNESLIDLQELGKYEQYIKGGGGSDIDPYKEFGSSYQLLNFLPLDFFPDLNALVDTATALYEEELTGREHCSPHHTAIRQALVCWDELTKLIAWMSSNITSEQVRTIIVNHVNDTWGLKVRQSLWFHLSCLTFGQHTVQEFLVSFGVWIRTPAPYRPPNAPILSTLPEHTVIC

SEQ ID NO: 7118 - protein, 1365 aa, Artificial Sequence
  SARS-CoV-2/Australia/QLD02/2020__EPI_ISL_407896 spike protein (1-1211)(P715C_P1069C) WhcAg construct
MFVFLVLLPLVSSQCVNLTTRTQLPPAYTNSFTRGVYYPDKVFRSSVLHSTQDLFLPFFSNVTWFHAIHVSGTNGTKRFDNPVLPFNDGVYFASTEKSNIIRGWIFGTTLDSKTQSLLIVNNATNVVIKVCEFQFCNDPFLGVYYHKNNKSWMESEFRVYSSANNCTFEYVSQPFLMDLEGKQGNFKNLREFVFKNIDGYFKIYSKHTPINLVRDLPQGFSALEPLVDLPIGINITRFQTLLALHRSYLTPGDSSSGWTAGAAAYYVGYLQPRTFLLKYNENGTITDAVDCALDPLSETKCTLKSFTVEKGIYQTSNFRVQPTESIVRFPNITNLCPFGEVFNATRFASVYAWNRKRISNCVADYSVLYNSASFSTFKCYGVSPTKLNDLCFTNVYADSFVIRGDEVRQIAPGQTGKIADYNYKLPDDFTGCVIAWNSNNLDSKVGGNYNYLYRLFRKSNLKPFERDISTEIYQAGSTPCNGVEGFNCYFPLQSYGFQPTNGVGYQPYRVVVLSFELLHAPATVCGPKKSTNLVKNKCVNFNFNGLTGTGVLTESNKKFLPFQQFGRDIADTTDAVRDPQTLEILDITPCSFGGVSVITPGTNTSNQVAVLYQDVNCTEVPVAIHADQLTPTWRVYSTGSNVFQTRAGCLIGAEHVNNSYECDIPIGAGICASYQTQTNSPRRARSVASQSIIAYTMSLGAENSVAYSNNSIAICTNFTISVTTEILPVSMTKTSVDCTMYICGDSTECSNLLLQYGSFCTQLNRALTGIAVEQDKNTQEVFAQVKQIYKTPPIKDFGGFNFSQILPDPSKPSKRSFIEDLLFNKVTLADAGFIKQYGDCLGDIAARDLICAQKFNGLTVLPPLLTDEMIAQYTSALLAGTITSGWTFGAGAALQIPFAMQMAYRFNGIGVTQNVLYENQKLIANQFNSAIGKIQDSLSSTASALGKLQDVVNQNAQALNTLVKQLSSNFGAISSVLNDILSRLDKVEAEVQIDRLITGRLQSLQTYVTQQLIRAAEIRASANLAATKMSECVLGQSKRVDFCGKGYHLMSFPQSAPHGVVFLHVTYVCAQEKNFTTAPAICHDGKAHFPREGVFVSNGTHWFVTQRNFYEPQIITTDNTFVSGNCDVVIGIVNNTVYDPLQLELDSFKEELDKYFKNHTSPDVDLGDISGINASVVNIQKEIDRLNEVAKNLNESLIDLQELGKYEQYIKGGGGSDIDPYKEFGSSYQLLNFLPLDFFPDLNALVDTATALYEEELTGREHCSPHHTAIRQALVCWDELTKLIAWMSSNITSEQVRTIIVNHVNDTWGLKVRQSLWFHLSCLTFGQHTVQEFLVSFGVWIRTPAPYRPPNAPILSTLPEHTVIC

SEQ ID NO: 7119 - protein, 1365 aa, Artificial Sequence
  SARS-CoV-2/India/1-31/2020__EPI_ISL_413523 spike protein (1-1211)(P715C_P1069C) WhcAg construct
MFVFLVLLPLVSSQCVNLTTRTQLPPAYTNSFTRGVYYPDKVFRSSVLHSTQDLFLPFFSNVTWFHAIHVSGTNGTKRFDNPVLPFNDGVYFASTEKSNIIRGWIFGTTLDSKTQSLLIVNNATNVVIKVCEFQFCNDPFLGVYYHKNNKSWMESEFRVYSSANNCTFEYVSQPFLMDLEGKQGNFKNLREFVFKNIDGYFKIYSKHTPINLVRDLPQGFSALEPLVDLPIGINITRFQTLLALHRSYLTPGDSSSGWTAGAAAYYVGYLQPRTFLLKYNENGTITDAVDCALDPLSETKCTLKSFTVEKGIYQTSNFRVQPTESIVRFPNITNLCPFGEVFNATRFASVYAWNRKRISNCVADYSVLYNSASFSTFKCYGVSPTKLNDLCFTNVYADSFVIRGDEVRQIAPGQTGKIADYNYKLPDDFTGCVIAWNSNNLDSKVGGNYNYLYRLFRKSNLKPFERDISTEIYQAGSTPCNGVEGFNCYFPLQSYGFQPTNGVGYQPYRVVVLSFELLHAPATVCGPKKSTNLVKNKCVNFNFNGLTGTGVLTESNKKFLPFQQFGRDIADTTDAVRDPQTLEILDITPCSFGGVSVITPGTNTSNQVAVLYQDVNCTEVPVAIHADQLTPTWRVYSTGSNVFQTRAGCLIGAEHVNNSYECDIPIGAGICASYQTQTNSPRRARSVASQSIIAYTMSLGAENSVAYSNNSIAICTNFTISVTTEILPVSMTKTSVDCTMYICGDSTECSNLLLQYGSFCTQLNRALTGIAVEQDKNTQEVFAQVKQIYKTPPIKDFGGFNFSQILPDPSKPSKRSFIEDLLFNKVTLADAGFIKQYGDCLGDIAARDLICAQKFNGLTVLPPLLTDEMIAQYTSALLAGTITSGWTFGAGAALQIPFAMQMAYRFNGIGVTQNVLYENQKLIANQFNSVIGKIQDSLSSTASALGKLQDVVNQNAQALNTLVKQLSSNFGAISSVLNDILSRLDKVEAEVQIDRLITGRLQSLQTYVTQQLIRAAEIRASANLAATKMSECVLGQSKRVDFCGKGYHLMSFPQSAPHGVVFLHVTYVCAQEKNFTTAPAICHDGKAHFPREGVFVSNGTHWFVTQRNFYEPQIITTDNTFVSGNCDVVIGIVNNTVYDPLQPELDSFKEELDKYFKNHTSPDVDLGDISGINASVVNIQKEIDRLNEVAKNLNESLIDLQELGKYEQYIKGGGGSDIDPYKEFGSSYQLLNFLPLDFFPDLNALVDTATALYEEELTGREHCSPHHTAIRQALVCWDELTKLIAWMSSNITSEQVRTIIVNHVNDTWGLKVRQSLWFHLSCLTFGQHTVQEFLVSFGVWIRTPAPYRPPNAPILSTLPEHTVIC

SEQ ID NO: 7120 - protein, 1365 aa, Artificial Sequence
  SARS-CoV-2/Guangdong/GD2020087-P0008/2020__EPI_ISL_413863 spike protein (1-1211)(P715C_P1069C) WhcAg construct
MFVFLVLLPLVSSQCVNLTTRTQLPPAYTNSFTRGVYYPDKVFRSSVLHSTQDLFLPFFSNVTWFHAIHVSGTNGTKRFDNPVLPFNDGVYFASTEKSNIIRGWIFGTTLDSKTQSLLIVNNATNVVIKVCEFQFCNDPFLGVYYHKNNKSWMESEFRVYSSANNCTFEYVSQPFLMDLEGKQGNFKNLREFVFKNIDGYFKIYSKHTPINLVRDLPQGFSALEPLVDLPIGINITRFQTLLALHRSYLTPGDSSSGWTAGAAAYYVGYLQPRTFLLKYNENGTITDAVDCALDPLSETKCTLKSFTVEKGIYQTSNFRVQPTESIVRFPNITNLCPFGEVFNATRFASVYAWNRKRISNCVADYSVLYNSASFSTFKCYGVSPTKLNDLCFTNVYADSFVIRGDEVREIAPGQTGKIADYNYKLPDDFTGCVIAWNSNNLDSKVGGNYNYLYRLFRKSNLKPFERDISTEIYQAGSTPCNGVEGFNCYFPLQSYGFQPTNGVGYQPYRVVVLSFELLHAPATVCGPKKSTNLVKNKCVNFNFNGLTGTGVLTESNKKFLPFQQFGRDIADTTDAVRDPQTLEILDITPCSFGGVSVITPGTNTSNQVAVLYQDVNCTEVPVAIHADQLTPTWRVYSTGSNVFQTRAGCLIGAEHVNNSYECDIPIGAGICASYQTQTNSPRRARSVASQSIIAYTMSLGAENSVAYSNNSIAICTNFTISVTTEILPVSMTKTSVDCTMYICGDSTECSNLLLQYGSFCTQLNRALTGIAVEQDKNTQEVFAQVKQIYKTPPIKDFGGFNFSQILPDPSKPSKRSFIEDLLFNKVTLADAGFIKQYGDCLGDIAARDLICAQKFNGLTVLPPLLTDEMIAQYTSALLAGTITSGWTFGAGAALQIPFAMQMAYRFNGIGVTQNVLYENQKLIANQFNSAIGKIQDSLSSTASALGKLQDVVNQNAQALNTLVKQLSSNFGAISSVLNDILSRLDKVEAEVQIDRLITGRLQSLQTYVTQQLIRAAEIRASANLAATKMSECVLGQSKRVDFCGKGYHLMSFPQSAPHGVVFLHVTYVCAQEKNFTTAPAICHDGKAHFPREGVFVSNGTHWFVTQRNFYEPQIITTDNTFVSGNCDVVIGIVNNTVYDPLQPELDSFKEELDKYFKNHTSPDVDLGDISGINASVVNIQKEIDRLNEVAKNLNESLIDLQELGKYEQYIKGGGGSDIDPYKEFGSSYQLLNFLPLDFFPDLNALVDTATALYEEELTGREHCSPHHTAIRQALVCWDELTKLIAWMSSNITSEQVRTIIVNHVNDTWGLKVRQSLWFHLSCLTFGQHTVQEFLVSFGVWIRTPAPYRPPNAPILSTLPEHTVIC

SEQ ID NO: 7121 - protein, 1365 aa, Artificial Sequence
  SARS-CoV-2/Sweden/01/2020__EPI_ISL_411951 spike protein (1-1211)(P715C_P1069C) WhcAg construct
MFVFLVLLPLVSSQCVNLTTRTQLPPAYTNSFTRGVYYPDKVFRSSVLHSTQDLFLPFFSNVTWFHAIHVSGTNGTKRFDNPVLPFNDGVYFASTEKSNIIRGWIFGTTLDSKTQSLLIVNNATNVVIKVCEFQFCNDPFLGVYYHKNNKSWMESEFRVYSSANNCTFEYVSQPFLMDLEGKQGNFKNLREFVFKNIDGYFKIYSKHTPINLVRDLPQGFSALEPLVDLPIGINITRFQTLLALHRSYLTPGDSSSGWTAGAAAYYVGYLQPRTFLLKYNENGTITDAVDCALDPLSETKCTLKSFTVEKGIYQTSNFRVQPTESIVRFPNITNLCPFGEVFNATRFASVYAWNRKRISNCVADYSVLYNSASFSTFKCYGVSPTKLNDLCFTNVYADSFVIRGDEVRQIAPGQTGKIADYNYKLPDDFTGCVIAWNSNNLDSKVGGNYNYLYRLFRKSNLKPFERDISTEIYQAGSTPCNGVEGFNCYFPLQSYGFQPTNGVGYQPYRVVVLSFELLHAPATVCGPKKSTNLVKNKCVNFNFNGLTGTGVLTESNKKFLPFQQFGRDIADTTDAVRDPQTLEILDITPCSFGGVSVITPGTNTSNQVAVLYQDVNCTEVPVAIHADQLTPTWRVYSTGSNVFQTRAGCLIGAEHVNNSYECDIPIGAGICASYQTQTNSPRRARSVASQSIIAYTMSLGAENSVAYSNNSIAICTNFTISVTTEILPVSMTKTSVDCTMYICGDSTECSNLLLQYGSFCTQLNRALTGIAVEQDKNTQEVFAQVKQIYKTPPIKDCGGFNFSQILPDPSKPSKRSFIEDLLFNKVTLADAGFIKQYGDCLGDIAARDLICAQKFNGLTVLPPLLTDEMIAQYTSALLAGTITSGWTFGAGAALQIPFAMQMAYRFNGIGVTQNVLYENQKLIANQFNSAIGKIQDSLSSTASALGKLQDVVNQNAQALNTLVKQLSSNFGAISSVLNDILSRLDKVEAEVQIDRLITGRLQSLQTYVTQQLIRAAEIRASANLAATKMSECVLGQSKRVDFCGKGYHLMSFPQSAPHGVVFLHVTYVCAQEKNFTTAPAICHDGKAHFPREGVFVSNGTHWFVTQRNFYEPQIITTDNTFVSGNCDVVIGIVNNTVYDPLQPELDSFKEELDKYFKNHTSPDVDLGDISGINASVVNIQKEIDRLNEVAKNLNESLIDLQELGKYEQYIKGGGGSDIDPYKEFGSSYQLLNFLPLDFFPDLNALVDTATALYEEELTGREHCSPHHTAIRQALVCWDELTKLIAWMSSNITSEQVRTIIVNHVNDTWGLKVRQSLWFHLSCLTFGQHTVQEFLVSFGVWIRTPAPYRPPNAPILSTLPEHTVIC

SEQ ID NO: 7122 - protein, 1365 aa, Artificial Sequence
  SARS-CoV-2/Tianmen/HBCDC-HB-07/2020__EPI_ISL_412983 spike protein (1-1211)(P715C_P1069C) WhcAg construct
MFVFLVLLPLVSSQCVNLTTRTQLPPAYTNSFTRGVYYPDKVFRSSVLHSTQDLFLPFFSNVTWFHAIHVSGTNGTKRFDNPVLPFNDGVYFASTEKSNIIRGWIFGTTLDSKTQSLLIVNNATNVVIKVCEFQFCNDPFLGVYYHKNNKSWMESEFRVYSSANNCTFEYVSQPFLMDLEGKQGNFKNLREFVFKNIDGYFKIYSKHTPINLVRDLPQGFSALEPLVDLPIGINITRFQTLLALHRSYLTPGDSSSGWTAGAAAYYVGYLQPRTFLLKYNENGTITDAVDCALDPLSETKCTLKSFTVEKGIYQTSNFRVQPTESIVRFPNITNLCPFGEVFNATRFASVYAWNRKRISNCVADYSVLYNSASFSTFKCYGVSPTKLNDLCFTNVYADSFVIRGDEVRQIAPGQTGKIADYNYKLPDDFTGCVIAWNSNNLDSKVGGNYNYLYRLFRKSNLKPFERDISTEIYQAGSTPCNGVEGFNCYFPLQSYGFQPTNGVGYQPYRVVVLSFELLHAPATVCGPKKSTNLVKNKCVNFNFNGLTGTGVLTESNKKFLPFQQFGRDIADTTDAVRDPQTLEILDITPCSFGGVSVITPGTNTSNQVAVLYQDLNCTEVPVAIHADQLTPTWRVYSTGSNVFQTRAGCLIGAEHVNNSYECDIPIGAGICASYQTQTNSPRRARSVASQSIIAYTMSLGAENSVAYSNNSIAICTNFTISVTTEILPVSMTKTSVDCTMYICGDSTECSNLLLQYGSFCTQLNRALTGIAVEQDKNTQEVFAQVKQIYKTPPIKDFGGFNFSQILPDPSKPSKRSFIEDLLFNKVTLADAGFIKQYGDCLGDIAARDLICAQKFNGLTVLPPLLTDEMIAQYTSALLAGTITSGWTFGAGAALQIPFAMQMAYRFNGIGVTQNVLYENQKLIANQFNSAIGKIQDSLSSTASALGKLQDVVNQNAQALNTLVKQLSSNFGAISSVLNDILSRLDKVEAEVQIDRLITGRLQSLQTYVTQQLIRAAEIRASANLAATKMSECVLGQSKRVDFCGKGYHLMSFPQSAPHGVVFLHVTYVCAQEKNFTTAPAICHDGKAHFPREGVFVSNGTHWFVTQRNFYEPQIITTDNTFVSGNCDVVIGIVNNTVYDPLQPELDSFKEELDKYFKNHTSPDVDLGDISGINASVVNIQKEIDRLNEVAKNLNESLIDLQELGKYEQYIKGGGGSDIDPYKEFGSSYQLLNFLPLDFFPDLNALVDTATALYEEELTGREHCSPHHTAIRQALVCWDELTKLIAWMSSNITSEQVRTIIVNHVNDTWGLKVRQSLWFHLSCLTFGQHTVQEFLVSFGVWIRTPAPYRPPNAPILSTLPEHTVIC

SEQ ID NO: 7123 - protein, 1365 aa, Artificial Sequence
  SARS-CoV-2/Hong Kong/case42_VM20002493/2020__EPI_ISL_414527 spike protein (1-1211)(P715C_P1069C) WhcAg construct
MFVFLVLLPLVSSQCVNLTTRTQLPPAYTNSFTRGVYYPDKVFRSSVLHSTQDLFLPFFSNVTWFHAIHVSGTNGTKRFDNPVLPFNDGVYFASTEKSNIIRGWIFGTTLDSKTQSLLIVNNATNVVIKVCEFQFCNDPFLGVYYHKNNKSWMESEFRVYSSANNCTFEYVSQPFLMDLEGKQGNFKNLREFVFKNIDGYFKIYSKHTPINLVRDLPQGFSALEPLVDLPIGINITRFQTLLALHRSYLTPGDSSSGWTAGAAAYYVGYLQPRTFLLKYNENGTITDAVDCALDPLSETKCTLKSFTVEKGIYQTSNFRVQPTESIVRFPNITNLCPFGEVFNATRFASVYAWNRKRISNCVADYSVLYNSASFSTFKCYGVSPTKLNDLCFTNVYADSFVIRGDEVRQIAPGQTGKIADYNYKLPDDFTGCVIAWNSNNLDSKVGGNYNYLYRLFRKSNLKPFERDISTEIYQAGSTPCNGVEGFNCYFPLQSYGFQPTNGVGYQPYRVVVLSFELLHAPATVCGPKKSTNLVKNKCVNFNFNGLTGTGVLTESNKKFLPFQQFGRDIADTTDAVRDPQTLEILDITPCSFGGVSVITPGTNTSNQVAVLYQDVNCTEVPVAIHADQLTPTWRVYSTGSNVFQTRAGCLIGAEHVNNSYECDIPIGAGICASYQTQTNSPRRARSVASQSIIAYTMSLGAENSVAYSNNSIAICTNFAISVTTEILPVSMTKTSVDCTMYICGDSTECSNLLLQYGSFCTQLNRALTGIAVEQDKNTQEVFAQVKQIYKTPPIKDFGGFNFSQILPDPSKPSKRSFIEDLLFNKVTLADAGFIKQYGDCLGDIAARDLICAQKFNGLTVLPPLLTDEMIAQYTSALLAGTITSGWTFGAGAALQIPFAMQMAYRFNGIGVTQNVLYENQKLIANQFNSAIGKIQDSLSSTASALGKLQDVVNQNAQALNTLVKQLSSNFGAISSVLNDILSRLDKVEAEVQIDRLITGRLQSLQTYVTQQLIRAAEIRASANLAATKMSECVLGQSKRVDFCGKGYHLMSFPQSAPHGVVFLHVTYVCAQEKNFTTAPAICHDGKAHFPREGVFVSNGTHWFVTQRNFYEPQIITTDNTFVSGNCDVVIGIVNNTVYDPLQPELDSFKEELDKYFKNHTSPDVDLGDISGINASVVNIQKEIDRLNEVAKNLNESLIDLQELGKYEQYIKGGGGSDIDPYKEFGSSYQLLNFLPLDFFPDLNALVDTATALYEEELTGREHCSPHHTAIRQALVCWDELTKLIAWMSSNITSEQVRTIIVNHVNDTWGLKVRQSLWFHLSCLTFGQHTVQEFLVSFGVWIRTPAPYRPPNAPILSTLPEHTVIC

SEQ ID NO: 7124 - protein, 1365 aa, Artificial Sequence
  SARS-CoV-2/USA/CruiseA-23/2020__EPI_ISL_414482 spike protein (1-1211)(P715C_P1069C) WhcAg construct
MFVFLVLLPLVSSQCVNLTTRTQLPPAYTNSFTRGVYYPDKVFRSSVLHSTQDLFLPFFSNVTWFHAIHVSGTNGTKRFDNPVLPFNDGVYFASTEKSNIIRGWIFGTTLDSKTQSLLIVNNATNVVIKVCEFQFCNDPFLGVYYHKNNKSWMESEFRVYSSANNCTFEYVSQPFLMDLEVKQGNFKNLREFVFKNIDGYFKIYSKHTPINLVRDLPQGFSALEPLVDLPIGINITRFQTLLALHRSYLTPGDSSSGWTAGAAAYYVGYLQPRTFLLKYNENGTITDAVDCALDPLSETKCTLKSFTVEKGIYQTSNFRVQPTESIVRFPNITNLCPFGEVFNATRFASVYAWNRKRISNCVADYSVLYNSASFSTFKCYGVSPTKLNDLCFTNVYADSFVIRGDEVRQIAPGQTGKIADYNYKLPDDFTGCVIAWNSNNLDSKVGGNYNYLYRLFRKSNLKPFERDISTEIYQAGSTPCNGVEGFNCYFPLQSYGFQPTNGVGYQPYRVVVLSFELLHAPATVCGPKKSTNLVKNKCVNFNFNGLTGTGVLTESNKKFLPFQQFGRDIADTTDAVRDPQTLEILDITPCSFGGVSVITPGTNTSNQVAVLYQDVNCTEVPVAIHADQLTPTWRVYSTGSNVFQTRAGCLIGAEHVNNSYECDIPIGAGICASYQTQTNSPRRARSVASQSIIAYTMSLGAENSVAYSNNSIAICTNFTISVTTEILPVSMTKTSVDCTMYICGDSTECSNLLLQYGSFCTQLNRALTGIAVEQDKNTQEVFAQVKQIYKTPPIKDFGGFNFSQILPDPSKPSKRSFIEDLLFNKVTLADAGFIKQYGDCLGDIAARDLICAQKFNGLTVLPPLLTDEMIAQYTSALLAGTITSGWTFGAGAALQIPFAMQMAYRFNGIGVTQNVLYENQKLIANQFNSAIGKIQDSLSSTASALGKLQDVVNQNAQALNTLVKQLSSNFGAISSVLNDILSRLDKVEAEVQIDRLITGRLQSLQTYVTQQLIRAAEIRASANLAATKMSECVLGQSKRVDFCGKGYHLMSFPQSAPHGVVFLHVTYVCAQEKNFTTAPAICHDGKAHFPREGVFVSNGTHWFVTQRNFYEPQIITTDNTFVSGNCDVVIGIVNNTVYDPLQPELDSFKEELDKYFKNHTSPDVDLGDISGINASVVNIQKEIDRLNEVAKNLNESLIDLQELGKYEQYIKGGGGSDIDPYKEFGSSYQLLNFLPLDFFPDLNALVDTATALYEEELTGREHCSPHHTAIRQALVCWDELTKLIAWMSSNITSEQVRTIIVNHVNDTWGLKVRQSLWFHLSCLTFGQHTVQEFLVSFGVWIRTPAPYRPPNAPILSTLPEHTVIC

SEQ ID NO: 7125 - protein, 1365 aa, Artificial Sequence
  SARS-CoV-2/Hong Kong/case85_VM20002868/2020__EPI_ISL_414519 spike protein (1-1211)(P715C_P1069C) WhcAg construct
MFVFLVLVPLVSSQCVNLTTRTQLPPAYTNSFTRGVYYPDKVFRSSVLHSTQDLFLPFFSNVTWFHAIHVSGTNGTKRFDNPVLPFNDGVYFASTEKSNIIRGWIFGTTLDSKTQSLLIVNNATNVVIKVCEFQFCNDPFLGVYYHKNNKSWMESEFRVYSSANNCTFEYVSQPFLMDLEGKQGNFKNLREFVFKNIDGYFKIYSKHTPINLVRDLPQGFSALEPLVDLPIGINITRFQTLLALHRSYLTPGDSSSGWTAGAAAYYVGYLQPRTFLLKYNENGTITDAVDCALDPLSETKCTLKSFTVEKGIYQTSNFRVQPTESIVRFPNITNLCPFGEVFNATRFASVYAWNRKRISNCVADYSVLYNSASFSTFKCYGVSPTKLNDLCFTNVYADSFVIRGDEVRQIAPGQTGKIADYNYKLPDDFTGCVIAWNSNNLDSKVGGNYNYLYRLFRKSNLKPFERDISTEIYQAGSTPCNGVEGFNCYFPLQSYGFQPTNGVGYQPYRVVVLSFELLHAPATVCGPKKSTNLVKNKCVNFNFNGLTGTGVLTESNKKFLPFQQFGRDIADTTDAVRDPQTLEILDITPCSFGGVSVITPGTNTSNQVAVLYQDVNCTEVPVAIHADQLTPTWRVYSTGSNVFQTRAGCLIGAEHVNNSYECDIPIGAGICASYQTQTNSPRRARSVASQSIIAYTMSLGAENSVAYSNNSIAICTNFTISVTTEILPVSMTKTSVDCTMYICGDSTECSNLLLQYGSFCTQLNRALTGIAVEQDKNTQEVFAQVKQIYKTPPIKDFGGFNFSQILPDPSKPSKRSFIEDLLFNKVTLADAGFIKQYGDCLGDIAARDLICAQKFNGLTVLPPLLTDEMIAQYTSALLAGTITSGWTFGAGAALQIPFAMQMAYRFNGIGVTQNVLYENQKLIANQFNSAIGKIQDSLSSTASALGKLQDVVNQNAQALNTLVKQLSSNFGAISSVLNDILSRLDKVEAEVQIDRLITGRLQSLQTYVTQQLIRAAEIRASANLAATKMSECVLGQSKRVDFCGKGYHLMSFPQSAPHGVVFLHVTYVCAQEKNFTTAPAICHDGKAHFPREGVFVSNGTHWFVTQRNFYEPQIITTDNTFVSGNCDVVIGIVNNTVYDPLQPELDSFKEELDKYFKNHTSPDVDLGDISGINASVVNIQKEIDRLNEVAKNLNESLIDLQELGKYEQYIKGGGGSDIDPYKEFGSSYQLLNFLPLDFFPDLNALVDTATALYEEELTGREHCSPHHTAIRQALVCWDELTKLIAWMSSNITSEQVRTIIVNHVNDTWGLKVRQSLWFHLSCLTFGQHTVQEFLVSFGVWIRTPAPYRPPNAPILSTLPEHTVIC

SEQ ID NO: 7126 - protein, 1365 aa, Artificial Sequence; identical to SEQ ID NO: 7116
  SARS-CoV-2/England/200990660/2020__EPI_ISL_414523 spike protein (1-1211)(P715C_P1069C) WhcAg construct

SEQ ID NO: 7127 - protein, 1365 aa, Artificial Sequence
  SARS-CoV-2/Australia/NSW09/2020__EPI_ISL_413595 spike protein (1-1211)(P715C_P1069C) WhcAg construct
MFVFLVLLPLVSSQCVNLTTRTQLPPAYTNSFTRGVYYPDKVFRSSVLHSTQDLFLPFFSNVTWFHAIHVSGTNGTKRFDNPVLPFNDGVYFASTEKSNIIRGWIFGTTLDSKTQSLLIVNNATNVVIKVCEFQFCNDPFLGVYYHKNNKSWMESEFRVYSSANNCTFEYVSQPFLMDLEGKQGNFKNLREFVFKNIDGYFKIYSKHTPINLVRDLPQGFSALEPLVDLPIGINITRFQTLLALHRSYLTPGDSSSGWTAGAAAYYVGYLQPRTFLLKYNENGTITDAVDCALDPLSETKCTLKSFTVEKGIYQTSNFRVQPTESIVRFPNITNLCPFGEVFNATRFASVYAWNRKRISNCVADYSVLYNSASFSTFKCYGVSPTKLNDLCFTNVYADSFVIRGDEVRQIAPGQTGKIADYNYKLPDDFTGCVIAWNSNNLDSKVGGNYNYLYRLFRKSNLKPFERDISTEIYQAGSTPCNGVEGFNCYFPLQSYGFQPTNGVGYQPYRVVVLSFELLHAPATVCGPKKSTNLVKNKCVNFNFNGLTGTGVLTESNKKFLPFQQFGRDIADTTDAVRDPQTLEILDITPCSFGGVSVITPGTNTSNQVAVLYQDVNCTEVPVAIHADQLTPTWRVYSTGSNVFQTRAGCLIGAEHVNNSYECDIPIGAGICASYQTQTNSPRRARSVASQSIIAYTMSLGAENSVAYSNNSIAICTNFTISVTTEILPVSMTKTSVDCTMYICGDSTECSNLLLQYGSFCTQLNRALTGIAVEQDKNTQEVFAQVKQIYKTPPIKDFGGFNFSQILPDPSKPSKRSFIEDLLFNKVTLADAGFIKQYGDCLGDIAARDLICAQKFNGLTVLPPLLTDEMIAQYTSALLAGTITSGWTFGAGAALQIPFAMQMAYRFNGIGVTQNVLYENQKLIANQFNSAIGKIQDSLSFTASALGKLQDVVNQNAQALNTLVKQLSSNFGAISSVLNDILSRLDKVEAEVQIDRLITGRLQSLQTYVTQQLIRAAEIRASANLAATKMSECVLGQSKRVDFCGKGYHLMSFPQSAPHGVVFLHVTYVCAQEKNFTTAPAICHDGKAHFPREGVFVSNGTHWFVTQRNFYEPQIITTDNTFVSGNCDVVIGIVNNTVYDPLQPELDSFKEELDKYFKNHTSPDVDLGDISGINASVVNIQKEIDRLNEVAKNLNESLIDLQELGKYEQYIKGGGGSDIDPYKEFGSSYQLLNFLPLDFFPDLNALVDTATALYEEELTGREHCSPHHTAIRQALVCWDELTKLIAWMSSNITSEQVRTIIVNHVNDTWGLKVRQSLWFHLSCLTFGQHTVQEFLVSFGVWIRTPAPYRPPNAPILSTLPEHTVIC

SEQ ID NO: 7128 - protein, 1365 aa, Artificial Sequence; identical to SEQ ID NO: 7108
  SARS-CoV-2/Australia/NSW10/2020__EPI_ISL_413596 spike protein (1-1211)(P715C_P1069C) WhcAg construct

SEQ ID NO: 7129 - protein, 1365 aa, Artificial Sequence
  SARS-CoV-2/Switzerland/1000477797/2020__EPI_ISL_413023 spike protein (1-1211)(P715C_P1069C) WhcAg construct
MFVFLVLLPLVSSQCVNLTTRTQLPPAYTNSFTRGVYYPDKVFRSSVLHSTQDLFLPFFSNVTWFHAIHVSGTNGTKRFDNPVLPFNDGVYFASTEKSNIIRGWIFGTTLDSKTQSLLIVNNATNVVIKVCEFQFCNDPFLGVYYHKNNKSWMESEFRVYSSANNCTFEYVSQPFLMDLEGKQGNFKNLREFVFKNIDGYFNIYSKHTPINLVRDLPQGFSALEPLVDLPIGINITRFQTLLALHRSYLTPGDSSSGWTAGAAAYYVGYLQPRTFLLKYNENGTITDAVDCALDPLSETKCTLKSFTVEKGIYQTSNFRVQPTESIVRFPNITNLCPFGEVFNATRFASVYAWNRKRISNCVADYSVLYNSASFSTFKCYGVSPTKLNDLCFTNVYADSFVIRGDEVRQIAPGQTGKIADYNYKLPDDFTGCVIAWNSNNLDSKVGGNYNYLYRLFRKSNLKPFERDISTEIYQAGSTPCNGVEGFNCYFPLQSYGFQPTNGVGYQPYRVVVLSFELLHAPATVCGPKKSTNLVKNKCVNFNFNGLTGTGVLTESNKKFLPFQQFGRDIADTTDAVRDPQTLEILDITPCSFGGVSVITPGTNTSNQVAVLYQGVNCTEVPVAIHADQLTPTWRVYSTGSNVFQTRAGCLIGAEHVNNSYECDIPIGAGICASYQTQTNSPRRARSVASQSIIAYTMSLGAENSVAYSNNSIAICTNFTISVTTEILPVSMTKTSVDCTMYICGDSTECSNLLLQYGSFCTQLNRALTGIAVEQDKNTQEVFAQVKQIYKTPPIKDFGGFNFSQILPDPSKPSKRSFIEDLLFNKVTLADAGFIKQYGDCLGDIAARDLICAQKFNGLTVLPPLLTDEMIAQYTSALLAGTITSGWTFGAGAALQIPFAMQMAYRFNGIGVTQNVLYENQKLIANQFNSAIGKIQDSLSSTASALGKLQDVVNQNAQALNTLVKQLSSNFGAISSVLNDILSRLDKVEAEVQIDRLITGRLQSLQTYVTQQLIRAAEIRASANLAATKMSECVLGQSKRVDFCGKGYHLMSFPQSAPHGVVFLHVTYVCAQEKNFTTAPAICHDGKAHFPREGVFVSNGTHWFVTQRNFYEPQIITTDNTFVSGNCDVVIGIVNNTVYDPLQPELDSFKEELDKYFKNHTSPDVDLGDISGINASVVNIQKEIDRLNEVAKNLNESLIDLQELGKYEQYIKGGGGSDIDPYKEFGSSYQLLNFLPLDFFPDLNALVDTATALYEEELTGREHCSPHHTAIRQALVCWDELTKLIAWMSSNITSEQVRTIIVNHVNDTWGLKVRQSLWFHLSCLTFGQHTVQEFLVSFGVWIRTPAPYRPPNAPILSTLPEHTVIC

SEQ ID NO: 7130 - protein, 1365 aa, Artificial Sequence
  SARS-CoV-2/Belgium/BA-02291/2020__EPI_ISL_415159 spike protein (1-1211)(P715C_P1069C) WhcAg construct
MFVFLVLLPLVSSQCVNLTTRTQLPPAYTNSFTRGVYYPDKVFRSSVLHSTQDLFLPFFSNVTWFHAIHVSGTNGTKRFDNPVLPFNDGVYFASTEKSNIIRGWIFGTTLDSKTQSLLIVNNATNVVIKVCEFQFCNDPFLGVYYHKNNKSWMESEFRVYSSANNCTFEYVSQPFLMDLEGKQGNFKNLREFVFKNIDGYFKIYSKHTPINLVRDLPQGFSALEPLVDLPIGINITRFQTLLALHRSYLTPGDSSSGWTAGAAAYYVGYLQPRTFLLKYNENGTITDAVDCALDPLSETKCTLKSFTVEKGIYQTSNFRVQPTESIVRFPNITNLCPFGEVFNATRFASVYAWNRKRISNCVADYSVLYNSASFSTFKCYGVSPTKLNDLCFTNVYADSFVIRGDEVRQIAPGQTGKIADYNYKLPDDFTGCVIAWNSNNLDSKVGGNYNYLYRLFRRSNLKPFERDISTEIYQAGSTPCNGVEGFNCYFPLQSYGFQPTNGVGYQPYRVVVLSFELLPAPATVCGPKKSTNLVKNKCVNFNFNGLTGTGVLTESNKKFLPFQQFGRDIADTTDAVRDPQTLEILDITPCSFGGVSVITPGTNTSNQVAVLYQGVNCTEVPVAIHADQLTPTWRVYSTGSNVFQTRAGCLIGAEHVNNSYECDIPIGAGICASYQTQTNSPRRARSVASQSIIAYTMSLGAENSVAYSNNSIAICTNFTISVTTEILPVSMTKTSVDCTMYICGDSTECSNLLLQYGSFCTQLNRALTGIAVEQDKNTQEVFAQVKQIYKTPPIKDFGGFNFSQILPDPSKPSKRSFIEDLLFNKVTLADAGFIKQYGDCLGDIAARDLICAQKFNGLTVLPPLLTDEMIAQYTSALLAGTITSGWTFGAGAALQIPFAMQMAYRFNGIGVTQNVLYENQKLIANQFNSAIGKIQDSLSSAAPALGKLQDVVNQNAQALNTLVKQLSSNFGAISSVLNDILSRLDKVEAEVQIDRLITGRLQSLQTYVTQQLIRAAEIRASANLAATKMSECVLGQSKRVDFCGKGYHLMSFPQSAPHGVVFLHVTYVCAQEKNFTTAPAICHDGKAHFPREGVFVSNGTHWFVTQRNFYEPQIITTDNTFVSGNCDVVIGIVNNTVYDPLQPELDSFKEELDKYFKNHTSPDVDLGDISGINASVVNIQKEIDRLNEVAKNLNESLIDLQELGKYEQYIKGGGGSDIDPYKEFGSSYQLLNFLPLDFFPDLNALVDTATALYEEELTGREHCSPHHTAIRQALVCWDELTKLIAWMSSNITSEQVRTIIVNHVNDTWGLKVRQSLWFHLSCLTFGQHTVQEFLVSFGVWIRTPAPYRPPNAPILSTLPEHTVIC

SEQ ID NO: 7131 - protein, 1365 aa, Artificial Sequence
  SARS-CoV-2/USA/WA8-UW5/2020__EPI_ISL_413486 spike protein (1-1211)(P715C_P1069C) WhcAg construct
MFVFLVLLPLVSSQCVNLTTRTQLPPAYTNSFTRGVYYPDKVFRSSVLHSTQDLFLPFFSNVTWFHAIHVSGTNGTKRFDNPVLPFNDGVYFASTEKSNIIRGWIFGTTLDSKTQSLLIVNNATNVVIKVCEFQFCNDPFLGVYYHKNNKSWMESEFRVYSSANNCTFEYVSQPFLMDLEGKQGNFKNLREFVFKNIDGYFKIYSKHTPINLVRDLPQGFSALEPLVDLPIGINITRFQTLLALHRSYLTPGDSSSGWTAGAAAYYVGYLQPRTFLLKYNENGTITDAVDCALDPLSETKCTLKSFTVEKGIYQTSNFRVQPTESIVRFPNITNLCPFGEVFNATRFASVYAWNRKRISNCVADYSVLYNSASFSTFKCYGVSPTKLNDLCFTNVYADSFVIRGDEVRQIAPGQTGKIADYNYKLPDDFTGCVIAWNSNNLDSKVGGNYNYLYRLFRKSNLKPFERDISTEIYQAGSTPCNGVEGFNCYFPLQSYGFQPTNGVGYQPYRVVVLSFELLHAPATVCGPKKSTNLVKNKCVNFNFNGLTGTGVLTESNKKFLPFQQFGRDIADTTDAVRDPQTLEILDITPCSFGGVSVITPGTNTSNQVAVLYQDVNCTEVPVAIHADQLTPTWRVYSTGSNVFQTRAGCLIGAEYVNNSYECDIPIGAGICASYQTQTNSPRRARSVASQSIIAYTMSLGAENSVAYSNNSIAICTNFTISVTTEILPVSMTKTSVDCTMYICGDSTECSNLLLQYGSFCTQLNRALTGIAVEQDKNTQEVFAQVKQIYKTPPIKDFGGFNFSQILPDPSKPSKRSFIEDLLFNKVTLADAGFIKQYGDCLGDIAARDLICAQKFNGLTVLPPLLTDEMIAQYTSALLAGTITSGWTFGAGAALQIPFAMQMAYRFNGIGVTQNVLYENQKLIANQFNSAIGKIQDSLSSTASALGKLQDVVNQNAQALNTLVKQLSSNFGAISSVLNDILSRLDKVEAEVQIDRLITGRLQSLQTYVTQQLIRAAEIRASANLAATKMSECVLGQSKRVDFCGKGYHLMSFPQSAPHGVVFLHVTYVCAQEKNFTTAPAICHDGKAHFPREGVFVSNGTHWFVTQRNFYEPQIITTDNTFVSGNCDVVIGIVNNTVYDPLQPELDSFKEELDKYFKNHTSPDVDLGDISGINASVVNIQKEIDRLNEVAKNLNESLIDLQELGKYEQYIKGGGGSDIDPYKEFGSSYQLLNFLPLDFFPDLNALVDTATALYEEELTGREHCSPHHTAIRQALVCWDELTKLIAWMSSNITSEQVRTIIVNHVNDTWGLKVRQSLWFHLSCLTFGQHTVQEFLVSFGVWIRTPAPYRPPNAPILSTLPEHTVIC

SEQ ID NO: 7132 - protein, 1365 aa, Artificial Sequence
  SARS-CoV-2/England/20102000506/2020__EPI_ISL_415147 spike protein (1-1211)(P715C_P1069C) WhcAg construct
MFVFLVLLPLVSSQCVNLTTRTQLPPAYTNSFTRGVYYPDKVFRSSVLHSTQDLFLPFFSNVTWFHAIHVSGTNGTKRFDNPVLPFNDGVYFASTEKSNIIRGWIFGTTLDSKTQSLLIVNNATNVVIKVCEFQFCNDPFLGVYYHKNNKSWMESEFRVYSSANNCTFEYVSQPFLMDLEGKQGNFKNLREFVFKNIDGYFKIYSKHTPINLVRDLPQGFSALEPLVDLPIGINITRFQTLLALHRSYLTPGDSSSGWTAGAAAYYVGYLQPRTFLLKYNENGTITDAVDCALDPLSETKCTLKSFTVEKGIYQTSNFRVQPTESIVRFPNITNLCPFGEVFNATRFASVYAWNRKRISNCVADYSVLYNSASFSTFKCYGVSPTKLNDLCFTNVYADSFVIRGDEVRQIAPGQTGKIADYNYKLPDDFTGCVIAWNSNNLDSKVGGNYNYLYRLFRKSNLKPFERDISTEIYQAGSTPCNGVEGFNCYFPLQSYGFQPTNGVGYQPYRVVVLSFELLHAPATVCGPKKSTNLVKNKCVNFNFNGLTGTGVLTESNKKFLPFQQFGRDIADTTDAVRDPQTLEILDITPCSFGGVSVITPGTNTSNQVAVLYQGVNCTEVPVAIHADQLTPTWRVYSTGSNVFQTRAGCLIGAEHVNNSYECDIPIGAGICASYQTQTNSPRRARSVASQSIIAYTMSLGAENSVAYSNNSIAICTNFTISVTTEILPVSMTKTSVDCTMYICGDSTECSNLLLQYGSFCTQLNRALTGIAVEQDKNTQEVFAQVKQIYKTPPIKDFGGFNFSQILPDPSKPSKRSFIEDLLFNKVTLADAGFIKQYGYCLGDIAARDLICAQKFNGLTVLPPLLTDEMIAQYTSALLAGTITSGWTFGAGAALQIPFAMQMAYRFNGIGVTQNVLYENQKLIANQFNSAIGKIQDSLSSTASALGKLQDVVNQNAQALNTLVKQLSSNFGAISSVLNDILSRLDKVEAEVQIDRLITGRLQSLQTYVTQQLIRAAEIRASANLAATKMSECVLGQSKRVDFCGKGYHLMSFPQSAPHGVVFLHVTYVCAQEKNFTTAPAICHDGKAHFPREGVFVSNGTHWFVTQRNFYEPQIITTDNTFVSGNCDVVIGIVNNTVYDPLQPELDSFKEELDKYFKNHTSPDVDLGDISGINASVVNIQKEIDRLNEVAKNLNESLIDLQELGKYEQYIKGGGGSDIDPYKEFGSSYQLLNFLPLDFFPDLNALVDTATALYEEELTGREHCSPHHTAIRQALVCWDELTKLIAWMSSNITSEQVRTIIVNHVNDTWGLKVRQSLWFHLSCLTFGQHTVQEFLVSFGVWIRTPAPYRPPNAPILSTLPEHTVIC

SEQ ID NO: 7133 - protein, 1365 aa, Artificial Sequence
  SARS-CoV-2/Belgium/VAG-03013/2020__EPI_ISL_415155 spike protein (1-1211)(P715C_P1069C) WhcAg construct
MFVFLVLLPLVSSQCVNLTTRTQLPPAYTNSFTRGVYYPDKVFRSSVLHSTQDLFLPFFSNVTWFHAIHVSGTNGTKRFDNPVLPFNDGVYFASTEKSNIIRGWIFGTTLDSKTQSLLIVNNATNVVIKVCEFQFCNDPFLGVYYHKNNKSWMESEFRVYSSANNCTFEYVSQPFLMDLEGKQGNFKNLREFVFKNIDGYFKIYSKHTPINLVRDLPQGFSALEPLVDLPIGINITRFQTLLALHRSYLTPGDSSSGWTAGAAAYYVGYLQPRTFLLKYNENGTITDAVDCALDPLSETKCTLKSFTVEKGIYQTSNFRVQPTESIVRFPNITNLCPFGEVFNATRFASVYAWNRKRISNCVADYSVLYNSASFSTFKCYGVSPTKLNDLCFTNVYADSFVIRGDEVRQIAPGQTGKIADYNYKLPDDFTGCVIAWNSNNLDSKVGGNYNYLYRLFRKSNLKPFERDISTEIYQAGSTPCNGVEGFNCYFPLQSYGFQPTNGVGYQPYRVVVLSFELLHAPATVCGPKKSTNLVKNKCVNFNFNGLTGTGVLTESNKKFLPFQQFGRDIADTTDAVRDPQTLEILDITPCSFGGVSVITPGTNTSNQVAVLYQGVNCTEVPVAIHADQLTPTWRVYSTGSNVFQTRAGCLIGAEHVNNSYECDIPIGAGICASYQTQTNSPRRARSVASQSIIAYTMSLGAENSVAYSNNSIAICTNFTISVTTEILPVSMTKTSVDCTMYICGDSTECSNLLLQYGSFCTQLNRALTGIAVEQDKNTQEVFAQVKQIYKTPPIKDFGGFNFSQILPDPSKPSKRSFIEDLLFNKVTLADAGFIKQYGDCLGDIAARDLICAQKFNGLTVLPPLLTDEMIAQYTSALLAGTITSGWTFGAGAALQIPFAMQMAYRFNGIGVTQNVLYENQKLIANQFNSAIGKIQDSLSSTATALGKLQDVVNQNAQALNTLVKQLSSNFGAISSVLNDILSRLDKVEAEVQIDRLITGRLQSLQTYVTQQLIRAAEIRASANLAATKMSECVLGQSKRVDFCGKGYHLMSFPQSAPHGVVFLHVTYVCAQEKNFTTAPAICHDGKAHFPREGVFVSNGTHWFVTQRNFYEPQIITTDNTFVSGNCDVVIGIVNNTVYDPLQPELDSFKEELDKYFKNHTSPDVDLGDISGINASVVNIQKEIDRLNEVAKNLNESLIDLQELGKYEQYIKGGGGSDIDPYKEFGSSYQLLNFLPLDFFPDLNALVDTATALYEEELTGREHCSPHHTAIRQALVCWDELTKLIAWMSSNITSEQVRTIIVNHVNDTWGLKVRQSLWFHLSCLTFGQHTVQEFLVSFGVWIRTPAPYRPPNAPILSTLPEHTVIC

SEQ ID NO: 7134 - protein, 1365 aa, Artificial Sequence
  SARS-CoV-2/Belgium/BC-03016/2020__EPI_ISL_415157 spike protein (1-1211)(P715C_P1069C) WhcAg construct
MFVFLVLLPLVSSQCVNLTTRTQLPPAYTNSFTRGVYYPDKVFRSSVLHSTQDLFLPFFSNVTWFHAIHVSGTNGTKRFDNPVLPFNDGVYFASTEKSNIIRGWIFGTTLDSKTQSLLIVNNATNVVIKVCEFQFCNDPFLGVYYHKNNKSWMESEFRVYSSANNCTFEYVSQPFLMDLEGKQGNFKNLREFVFKNIDGYFKIYSKHTPINLVRDLPQGFSALEPLVDLPIGINITRFQTLLALHRSYLTPGDSSSGWTAGAAAYYVGYLQPRTFLLKYNENGTITDAVDCALDPLSETKCTLKSFTVEKGIYQTSNFRVQPTESIVRFPNITNLCPFGEVFNATRFASVYAWNRKRISNCVADYSVLYNSASFSTFKCYGVSPTKLNDLCFTNVYADSFVIRGDEVRQIAPGQTGKIADYNYKLPDDFTGCVIAWNSNNLDSKVGGNYNYLYRLFRKSNLKPFERDISTEIYQAGSTPCNGVEGFNCYFPLQSYGFQPTNGVGYQPYRVVVLSFELLHAPATVCGPKKSTNLVKNKCVNFNFNGLTGTGVLTESNKKFLPFQQFGRDIADTTDAVRDPQTLEILDITPCSFGGVSVITPGTNTSNQVAVLYQGVNCTEVPVAIHADQLTPTWRVYSTGSNVFQTRAGCLIGAEHVNNSYECDIPIGAGICASYQTQTNSPRRARSVASQSIIAYTMSLGAENSVAYSNNSIAICTNFTISVTTEILPVSMTKTSVDCTMYICGDSTECSNLLLQYGSFCTQLNRALTGIAVEQDKNTQEVFAQVKQIYKTPPIKDFGGFNFSQILPDPSKPSKRSFIEDLLFNKVTLADAGFIKQYGDCLGDIAARDLICAQKFNGLTVLPPLLTDEMIAQYTSALLAGTITSGWTFGAGAALQIPFAMQMAYRFNGIGVTQNVLYENQKLIANQFNSAIGKIQDSLSSTAPALGKLQDVVNQNAQALNTLVKQLSSNFGAISSVLNDILSRLDKVEAEVQIDRLITGRLQSLQTYVTQQLIRAAEIRASANLAATKMSECVLGQSKRVDFCGKGYHLMSFPQSAPHGVVFLHVTYVCAQEKNFTTAPAICHDGKAHFPREGVFVSNGTHWFVTQRNFYEPQIITTDNTFVSGNCDVVIGIVNNTVYDPLQPELDSFKEELDKYFKNHTSPDVDLGDISGINASVVNIQKEIDRLNEVAKNLNESLIDLQELGKYEQYIKGGGGSDIDPYKEFGSSYQLLNFLPLDFFPDLNALVDTATALYEEELTGREHCSPHHTAIRQALVCWDELTKLIAWMSSNITSEQVRTIIVNHVNDTWGLKVRQSLWFHLSCLTFGQHTVQEFLVSFGVWIRTPAPYRPPNAPILSTLPEHTVIC

SEQ ID NO: 7135 - protein, 1365 aa, Artificial Sequence
  SARS-CoV-2/Germany/BavPat3/2020__EPI_ISL_414521 spike protein (1-1211)(P715C_P1069C) WhcAg construct
MFVFLVLLPLVSSQCVNLTTRTQLPPAYTNSFTRGVYYPDKVFRSSVLHSTQDLFLPFFSNVTWFHAIHVSGTNGTKRFDNPVLPFNDGVYFASTEKSNIIRGWIFGTTLDSKTQSLLIVNNATNVVIKVCEFQFCNDPFLGVYYHKNNKSWMESEFRVYSSANNCTFEYVSQPFLMDLEGKQGNFKNLREFVFKNIDGYFKIYSKHTPINLVRDLPQGFSALEPLVDLPIGINITRFQTLLALHRSYLTPGDSSSGWTAGAAAYYVGYLQPRTFLLKYNENGTITDAVDCALDPLSETKCTLKSFTVEKGIYQTSNFRVQPTESIVRFPNITNLCPFGEVFNATRFASVYAWNRKRISNCVADYSVLYNSASFSTFKCYGVSPTKLNDLCFTNVYADSFVIRGDEVRQIAPGQTGKIADYNYKLPDDFTGCVIAWNSNNLDSKVGGNYNYLYRLFRKSNLKPFERDISTEIYQAGSTPCNGVEGFNCYFPLQSYGFQPTNGVGYQPYRVVVLSFELLHAPATVCGPKKSTNLVKNKCVNFNFNGLTGTGVLTESNKKFLPFQQFGRDIADTTDAVRDPQTLEILDITPCSFGGVSVITPGTNTSNQVAVLYQDVNCTEVPVAIHADQLTPTWRVYSTGSNVFQTRAGCLIGAEHVNNSYECDIPIGAGICASYQTQTNSPRRARSVASQSIIAYTMSLGAENSVAYSNNSIAICTNFTISVTTEILPVSMTKTSVDCTMYICGDSTECSNLLLQYGSFCTQLNRALTGIAVEQDKNTQQVFAQVKQIYKTPPIKDFGGFNFSQILPDPSKPSKRSFIEDLLFNKVTLADAGFIKQYGDCLGDIAARDLICAQKFNGLTVLPPLLTDEMIAQYTSALLAGTITSGWTFGAGAALQIPFAMQMAYRFNGIGVTQNVLYENQKLIANQFNSAIGKIQDSLSSTASALGKLQDVVNQNAQALNTLVKQLSSNFGAISSVLNDILSRLDKVEAEVQIDRLITGRLQSLQTYVTQQLIRAAEIRASANLAATKMSECVLGQSKRVDFCGKGYHLMSFPQSAPHGVVFLHVTYVCAQEKNFTTAPAICHDGKAHFPREGVFVSNGTHWFVTQRNFYEPQIITTDNTFVSGNCDVVIGIVNNTVYDPLQPELDSFKEELDKYFKNHTSPDVDLGDISGINASVVNIQKEIDRLNEVAKNLNESLIDLQELGKYEQYIKGGGGSDIDPYKEFGSSYQLLNFLPLDFFPDLNALVDTATALYEEELTGREHCSPHHTAIRQALVCWDELTKLIAWMSSNITSEQVRTIIVNHVNDTWGLKVRQSLWFHLSCLTFGQHTVQEFLVSFGVWIRTPAPYRPPNAPILSTLPEHTVIC

SEQ ID NO: 7136 - protein, 1365 aa, Artificial Sequence
  SARS-CoV-2/France/HF1805/2020__EPI_ISL_414628 spike protein (1-1211)(P715C_P1069C) WhcAg construct
MFVFLVLLPLVSSQCVNLTTRTQLPPAYTNSFTRGVYYPDKVFRSSVLHSTQDLFLPFFSNVTWFHAIHVSGTNGTKRFDNPVLPFNDGVYFASTEKSNIIRGWIFGTTLDSKTQSLLIVNNATNVVIKVCEFQFCNDPFLGVYYHKNNKSWMESEFRVYSSANNCTFEYVSQPFLMDLEGKQGNFKNLREFVFKNIDGYFKIYSKHTPINLVRDLPQGFSALEPLVDLPIGINITRFQTLLALHRSYLTPGDSSSGWTAGAAAYYVGYLQPRTFLLKYNENGTITDAVDCALDPLSETKCTLKSFTVEKGIYQTSNFRVQPTESIVRFPNITNLCPFGEVFNATRFASVYAWNRKRISNCVADYSVLYNSASFSTFKCYGVSPTKLNDLCFTNVYADSFVIRGDEVRQIAPGQTGKIADYNYKLPDDFTGCVIAWNSNNLDSKVGGNYNYLYRLFRKSNLKPFERDISTEIYQAGSTPCNGVEGFNCYFPLQSYGFQPTNGVGYQPYRVVVLSFELLHAPATVCGPKKSTNLVKNKCVNFNFNGLTGTGVLTESNKKFLPFQQFGRDIADTTDAVRDPQTLEILDITPCSFGGVSVITPGTNTSNQVAVLYQGVNCTEVPVAIHADQLTPTWRVYSTGSNVFQTRAGCLIGAEHVNNSYECDIPIGAGICASYQTQTNSPRRARSVASQSIIAYTMSLGAENSVAYSNNSIAICTNFTISVTTEILPVSMTKTSVDCTMYICGDSTECSNLLLQYGSFCTQLNRALTGIAVEQDKNTQEVFAQVKQIYKTPPIKDFGGFNFSQILPDPSKPSKRSFIEDLLFNKVTLADAGFIKQYGDCLGDIAARDLICAQKFNGLTVLPPLLTDEMIAQYTSALLAGTITSGWTFGAGAALQIPFAMQMAYRFNGIGVTQNVLYENQKLIANQFNSAIGKIQDSLSSTASALGKLQDVVNQNAQALNTLVKQLSSNFGAISSVLNDILSRLDKVEAEVQIDRLITGRLQSLQTYVTQQLIRAAEIRASANLAATKMSECVLGQSKRVDFCGKGYHLMSFPQSAPHGVVFLHVTYVCAQEKNFTTAPAICHDGKAHFPREGVFVSNGTHWFVTQRNFYEPQIITTDNTFVSGNCDVVIGVVNNTVYDPLQPELDSFKEELDKYFKNHTSPDVDLGDISGINASVVNIQKEIDRLNEVAKNLNESLIDLQELGKYEQYIKGGGGSDIDPYKEFGSSYQLLNFLPLDFFPDLNALVDTATALYEEELTGREHCSPHHTAIRQALVCWDELTKLIAWMSSNITSEQVRTIIVNHVNDTWGLKVRQSLWFHLSCLTFGQHTVQEFLVSFGVWIRTPAPYRPPNAPILSTLPEHTVIC

SEQ ID NO: 7137 - protein, 1365 aa, Artificial Sequence
  SARS-CoV-2/Netherlands/ZuidHolland_9/2020__EPI_ISL_414445 spike protein (1-1211)(P715C_P1069C) WhcAg construct
MFVFLVLLPLVSSQCVNLTTRTQLPPAYTNSFTRGVYYPDKVFRSSVLHSTQDLFLPFFSNVTWFHAIHVSGTNGTKRFDNPVLPFNDGVYFASTEKSNIIRGWIFGTTLDSKTQSLLIVNNATNVVIKVCEFQFCNDPFLGVYYHKNNKSWMESEFRVYSSANNCTFEYVSQPFLMDLEGKQGNFKNLREFVFKNIDGYFKIYSKHTPINLVRDLPQGFSALEPLVDLPIGINITRFQTLLALHRSYLTPGDSSSGWTAGAAAYYVGYLQPRTFLLKYNENGTITDAVDCALDPLSETKCTLKSFTVEKGIYQTSNFRVQPTESIVRFPNITNLCPFGEVFNATRFASVYAWNRKRISNCVADYSVLYNSASFSTFKCYGVSPTKLNDLCFTNVYADSFVIRGDEVRQIAPGQTGKIADYNYKLPDDFTGCVIAWNSNNLDSKVGGNYNYLYRLFRKSNLKPFERDISTEIYQAGSTPCNGVEGFNCYFPLQSYGFQPTNGVGYQPYRVVVLSFELLHAPATVCGPKKSTNLVKNKCVNFNFNGLTGTGVLTESNKKFLPFQQFGRDIADTTDAVRDPQTLEILDITPCSFGGVSVITPGTNTSNQVAVLYQGVNCTEVPVAIHADQLTPTWRVYSTGSNVFQTRAGCLIGAEHVNNSYECDIPIGAGICASYQTQTNSPRRARSVASQSIIAYTMSLGAENSVAYSNNSIAICTNFTISVTTEILPVSMTKTSVDCTMYICGDSTECSNLLLQYGSFCTQLNRALTGIAVEQDKNTQEVFAQVKQIYKTPPIKDFGGFNFSQILPDPSKPSKRSFIEDLLFNKVTLADAGFIKQYGDCLGDIAARDLICVQKFNGLTVLPPLLTDEMIAQYTSALLAGTITSGWTFGAGAALQIPFAMQMAYRFNGIGVTQNVLYENQKLIANQFNSAIGKIQDSLSSTASALGKLQDVVNQNAQALNTLVKQLSSNFGAISSVLNDILSRLDKVEAEVQIDRLITGRLQSLQTYVTQQLIRAAEIRASANLAATKMSECVLGQSKRVDFCGKGYHLMSFPQSAPHGVVFLHVTYVCAQEKNFTTAPAICHDGKAHFPREGVFVSNGTHWFVTQRNFYEPQIITTDNTFVSGNCDVVIGIVNNTVYDPLQPELDSFKEELDKYFKNHTSPDVDLGDISGINASVVNIQKEIDRLNEVAKNLNESLIDLQELGKYEQYIKGGGGSDIDPYKEFGSSYQLLNFLPLDFFPDLNALVDTATALYEEELTGREHCSPHHTAIRQALVCWDELTKLIAWMSSNITSEQVRTIIVNHVNDTWGLKVRQSLWFHLSCLTFGQHTVQEFLVSFGVWIRTPAPYRPPNAPILSTLPEHTVIC

SEQ ID NO: 7138 - protein, 1365 aa, Artificial Sequence
  SARS-CoV-2/Finland/FIN03032020A/2020__EPI_ISL_413602 spike protein (1-1211)(P715C_P1069C) WhcAg construct
MFVFLVLLPLVSSQCVNLTTRTQLPPAYTNSFTRGVYYPDKVFRSSVLHSTQDLFLPFFSNVTWFHAIHVSGTNGTKRFDNPVLPFNDGVYFASTEKSNIIRGWIFGTTLDSKTQSLLIVNNATNVVIKVCEFQFCNDPFLGVYYHKNNKSWMESEFRVYSSANNCTFEYVSQPFLMDLEGKQGNFKNLREFVFKNIDGYFKIYSKHTPINLVRDLPQGFSALEPLVDLPIGINITRFQTLLALHRSYLTPGDSSSGWTAGAAAYYVGYLQPRTFLLKYNENGTITDAVDCALDPLSETKCTLKSFTVEKGIYQTSNFRVQPTESIVRFPNITNLCPFGEVFNATRFASVYAWNRKRISNCVADYSVLYNSASFSTFKCYGVSPTKLNDLCFTNVYADSFVIRGDEVRQIAPGQTGKIADYNYKLPDDFTGCVISWNSNNLDSKVGGNYNYLYRLFRKSNLKPFERDISTEIYQAGSTPCNGVEGFNCYFPLQSYGFQPTNGVGYQPYRVVVLSFELLHAPATVCGPKKSTNLVKNKCVNFNFNGLTGTGVLTESNKKFLPFQQFGRDIADTTDAVRDPQTLEILDITPCSFGGVSVITPGTNTSNQVAVLYQGVNCTEVPVAIHADQLTPTWRVYSTGSNVFQTRAGCLIGAEHVNNSYECDIPIGAGICASYQTQTNSPRRARSVASQSIIAYTMSLGAENSVAYSNNSIAICTNFTISVTTEILPVSMTKTSVDCTMYICGDSTECSNLLLQYGSFCTQLNRALTGIAVEQDKNTQEVFAQVKQIYKTPPIKDFGGFNFSQILPDPSKPSKRSFIEDLLFNKVTLADAGFIKQYGDCLGDIAARDLICAQKFNGLTVLPPLLTDEMIAQYTSALLAGTITSGWTFGAGAALQIPFAMQMAYRFNGIGVTQNVLYENQKLIANQFNSAIGKIQDSLSSTASALGKLQDVVNQNAQALNTLVKQLSSNFGAISSVLNDILSRLDKVEAEVQIDRLITGRLQSLQTYVTQQLIRAAEIRASANLAATKMSECVLGQSKRVDFCGKGYHLMSFPQSAPHGVVFLHVTYVCAQEKNFTTAPAICHDGKAHFPREGVFVSNGTHWFVTQRNFYEPQIITTDNTFVSGNCDVVIGIVNNTVYDPLQPELDSFKEELDKYFKNHTSPDVDLGDISGINASVVNIQKEIDRLNEVAKNLNESLIDLQELGKYEQYIKGGGGSDIDPYKEFGSSYQLLNFLPLDFFPDLNALVDTATALYEEELTGREHCSPHHTAIRQALVCWDELTKLIAWMSSNITSEQVRTIIVNHVNDTWGLKVRQSLWFHLSCLTFGQHTVQEFLVSFGVWIRTPAPYRPPNAPILSTLPEHTVIC

SEQ ID NO: 7139 - protein, 1365 aa, Artificial Sequence
  SARS-CoV-2/France/GE1977/2020__EPI_ISL_414632 spike protein (1-1211)(P715C_P1069C) WhcAg construct
MFVFLVLLPLVSSQCVNLTTRTQLPPAYTNSFTRGVYYPDKVFRSSVLHSTQDLFLPFFSNVTWFHAIHVSGTNGTKRFDNPVLPFNDGVYFASTEKSNIIRGWIFGTTLDSKTQSLLIVNNATNVVIKVCEFQFCNDPFLGVYYHKNNKSWMESEFRVYSSANNCTFEYVSQPFLMDLEGKQGNFKNLREFVFKNIDGYFKIYSKHTPINLVRDLPQGFSALEPLVDLPIGINITRFQTLLALHRSYLTPGDSSSGWTAGAAAYYVGYLQPRTFLLKYNENGTITDAVDCALDPLSETKCTLKSFTVEKGIYQTSNFRVQPTESIVRFPNITNLCPFGEVFNATRFASVYAWNRKRISNCVADYSVLYNSASFSTFKCYGVSPTKLNDLCFTNVYADSFVIRGDEVRQIAPGQTGKIADYNYKLPDDFTGCVIAWNSNNLDSKVGGNYNYLYRLFRKSNLKPFERDISTEIYQAGSTPCNGVEGFNCYFPLQSYGFQPTNGVGYQPYRVVVLSFELLHAPATVCGPKKSTNLVKNKCVNFNFNGLTGTGVLTESNKKFLPFQQFGRDIADTTDAVRDPQTLEILDITPCSFGGVSVITPGTNTSNQVAVLYQGVNCTEVPVAIHADQLTPTWRVYSTGSNVFQTRAGCLIGAEHVNNSYECDIPIGAGICASYQTQTNSPRRARSVASQSIIAYTMSLGAENSVAYSNNSIAICTNFTISVTTEILPVSMTKTSVDCTMYICGDSTECSNLLLQYGSFCTQLNRALTGIAVEQDKNTQEVFAQVKQIYKTPPIKDFGGFNFSQILPDPSKPSKRSFIEDLLFNKVTLADAGFIKQYGDCLGDIAARDLICAQKFNGLTVLPPLLTDEMIAQYTSALLAGTITSGWTFGAGAALQIPFAMQMAYRFNGIGVTQNVLYENQKLIANQFNSAIGKIQDSLFSTASALGKLQDVVNQNAQALNTLVKQLSSNFGAISSVLNDILSRLDKVEAEVQIDRLITGRLQSLQTYVTQQLIRAAEIRASANLAATKMSECVLGQSKRVDFCGKGYHLMSFPQSAPHGVVFLHVTYVCAQEKNFTTAPAICHDGKAHFPREGVFVSNGTHWFVTQRNFYEPQIITTDNTFVSGNCDVVIGIVNNTVYDPLQPELDSFKEELDKYFKNHTSPDVDLGDISGINASVVNIQKEIDRLNEVAKNLNESLIDLQELGKYEQYIKGGGGSDIDPYKEFGSSYQLLNFLPLDFFPDLNALVDTATALYEEELTGREHCSPHHTAIRQALVCWDELTKLIAWMSSNITSEQVRTIIVNHVNDTWGLKVRQSLWFHLSCLTFGQHTVQEFLVSFGVWIRTPAPYRPPNAPILSTLPEHTVIC

SEQ ID NO: 7140 - protein, 1365 aa, Artificial Sequence
  SARS-CoV-2/Finland/FIN-313/2020__EPI_ISL_414641 spike protein (1-1211)(P715C_P1069C) WhcAg construct
MFVFLVLLPLVSSQCVNLTTRTQLPPAYTNSFTRGVYYPDKVFRSSVLHSTQDLFLPFFSNVTWFHAIHVSGTNGTKRFDNPVLPFNDGVYFASTEKSNIIRGWIFGTTLDSKTQSLLIVNNATNVVIKVCEFQFCNDPFLGVYYHKNNKSWMESEFRVYSSANNCTFEYVSQPFLMDLEGKQGNFKNLREFVFKNIDGYFKIYSKHTPINLVRDLPQGFSALEPLVDLPIGINITRFKTLLALHRSYLTPGDSSSGWTAGAAAYYVGYLQPRTFLLKYNENGTITDAVDCALDPLSETKCTLKSFTVEKGIYQTSNFRVQPTESIVRFPNITNLCPFGEVFNATRFASVYAWNRKRISNCVADYSVLYNSASFSTFKCYGVSPTKLNDLCFTNVYADSFVIRGDEVRQIAPGQTGKIADYNYKLPDDFTGCVIAWNSNNLDSKVGGNYNYLYRLFRKSNLKPFERDISTEIYQAGSTPCNGVEGFNCYFPLQSYGFQPTNGVGYQPYRVVVLSFELLHAPATVCGPKKSTNLVKNKCVNFNFNGLTGTGVLTESNKKFLPFQQFGRDIADTTDAVRDPQTLEILDITPCSFGGVSVITPGTNTSNQVAVLYQGVNCTEVPVAIHADQLTPTWRVYSTGSNVFQTRAGCLIGAEHVNNSYECDIPIGAGICASYQTQTNSPRRARSVASQSIIAYTMSLGAENSVAYSNNSIAICTNFTISVTTEILPVSMTKTSVDCTMYICGDSTECSNLLLQYGSFCTQLNRALTGIAVEQDKNTQEVFAQVKQIYKTPPIKDFGGFNFSQILPDPSKPSKRSFIEDLLFNKVTLADAGFIKQYGDCLGDIAARDLICAQKFNGLTVLPPLLTDEMIAQYTSALLAGTITSGWTFGAGAALQIPFAMQMAYRFNGIGVTQNVLYENQKLIANQFNSAIGKIQDSLSSTASALGKLQDVVNQNAQALNTLVKQLSSNFGAISSVLNDILSRLDKVEAEVQIDRLITGRLQSLQTYVTQQLIRAAEIRASANLAATKMSECVLGQSKRVDFCGKGYHLMSFPQSAPHGVVFLHVTYVCAQEKNFTTAPAICHDGKAHFPREGVFVSNGTHWFVTQRNFYEPQIITTDNTFVSGNCDVVIGIVNNTVYDPLQPELDSFKEELDKYFKNHTSPDVDLGDISGINASVVNIQKEIDRLNEVAKNLNESLIDLQELGKYEQYIKGGGGSDIDPYKEFGSSYQLLNFLPLDFFPDLNALVDTATALYEEELTGREHCSPHHTAIRQALVCWDELTKLIAWMSSNITSEQVRTIIVNHVNDTWGLKVRQSLWFHLSCLTFGQHTVQEFLVSFGVWIRTPAPYRPPNAPILSTLPEHTVIC

SEQ ID NO: 7141 - protein, 1365 aa, Artificial Sequence
  SARS-CoV-2/Netherlands/ZuidHolland_2/2020__EPI_ISL_414556 spike protein (1-1211)(P715C_P1069C) WhcAg construct
MFVFLVLLPLVSSQCVNLTTRTQLPPAYTNSFTRGVYYPDKVFRSSVLHSTQDLFLPFFSNVTWFHAIHVSGTNGTKRFDNPVLPFNDGVYFASTEKSNIIRGWIFGTTLDSKTQSLLIVNNATNVVIKVCEFQFCNDPFLGVYYHKNNKSWMESEFRVYSSANNCTFEYVSQPFLMDLEGKQGNFKNLREFVFKNIDGYFKIYSKHTPINLVRDLPQGFSALEPLVDLPIGINITRFQTLLALHRSYLTPGDSSSGWTAGAAAYYVGYLQPRTFLLKYNENGTITDAVDCALDPLSETKCTLKSFTVEKGIYQTSNFRVQPTESIVRFPNITNLCPFGEVFNATRFASVYAWNRKRISNCVADYSVLYNSASFSTFKCYGVSPTKLNDLCFTNVYADSFVIRGDEVRQIAPGQTGKIADYNYKLPDDFTGCVIAWNSNNLDSKVGGNYNYLYRLFRKSNLKPFERDISTEIYQAGSTPCNGVEGFNCYFPLQSYGFQPTNGVGYQPYRVVVLSFELLHAPATVCGPKKSTNLVKNKCVNFNFNGLTGTGVLTESNKKFLPFQQFGRDIADTTDAVRDPQTLEILDITPCSFGGVSVITPGTNTSNQVAVLYQGVNCTEVPVAIHADQLTPTWRVYSTGSNVFQTRAGCLIGAEHVNNSYECDIPIGAGICASYQTQTNSPRRARSVASQSIIAYTMSLGAENSVAYSNNSIAICTNFTISVTTEILPVSMTKTSVDCTMYICGDSTECSNLLLQYGSFCTQLNRALTGIALEQDKNTQEVFAQVKQIYKTPPIKDFGGFNFSQILPDPSKPSKRSFIEDLLFNKVTLADAGFIKQYGDCLGDIAARDLICAQKFNGLTVLPPLLTDEMIAQYTSALLAGTITSGWTFGAGAALQIPFAMQMAYRFNGIGVTQNVLYENQKLIANQFNSAIGKIQDSLSSTASALGKLQDVVNQNAQALNTLVKQLSSNFGAISSVLNDILSRLDKVEAEVQIDRLITGRLQSLQTYVTQQLIRAAEIRASANLAATKMSECVLGQSKRVDFCGKGYHLMSFPQSAPHGVVFLHVTYVCAQEKNFTTAPAICHDGKAHFPREGVFVSNGTHWFVTQRNFYEPQIITTDNTFVSGNCDVVIGIVNNTVYDPLQPELDSFKEELDKYFKNHTSPDVDLGDISGINASVVNIQKEIDRLNEVAKNLNESLIDLQELGKYEQYIKGGGGSDIDPYKEFGSSYQLLNFLPLDFFPDLNALVDTATALYEEELTGREHCSPHHTAIRQALVCWDELTKLIAWMSSNITSEQVRTIIVNHVNDTWGLKVRQSLWFHLSCLTFGQHTVQEFLVSFGVWIRTPAPYRPPNAPILSTLPEHTVIC

SEQ ID NO: 7142 - protein, 1365 aa, Artificial Sequence
  SARS-CoV-2/USA/WA-UW31/2020__EPI_ISL_414618 spike protein (1-1211)(P715C_P1069C) WhcAg construct
MFVFLVLLPLVSSQCVNLTTRTQLPPAYTNSFTRGVYYPDKVFRSSVLHSTQDLFLPFFSNVTWFHAIHVSGTNGTKRFDNPVLPFNDGVYFASTEKSNIIRGWIFGTTLDSKTQSLLIVNNATNVVIKVCEFQFCNDPFLGVYYHKNNKSWMESEFRVYSSANNCTFEYVSQPFLMDLEGKQGNFKNLREFVFKNIDGYFKIYSKHTPINLVRDLPQGFSALEPLVDLPIGINITRFQTLLALHRSYLTPGDSSSGWTAGAAAYYVGYLQPRTFLLKYNENGTITDAVDCALDPLSETKCTLKSFTVEKGIYQTSNFRVQPTESIVRFPNITNLCPFGEVFNATRFASVYAWNRKRISNCVADYSVLYNSASFSTFKCYGVSPTKLNDLCFTNVYADSFVIRGDEVRQIAPGQTGKIADYNYKLPDDFTGCVIAWNSNNLDSKVGGNYNYLYRLFRKSNLKPFERDISTEIYQAGSTPCNGAEGFNCYFPLQSYGFQPTNGVGYQPYRVVVLSFELLHAPATVCGPKKSTNLVKNKCVNFNFNGLTGTGVLTESNKKFLPFQQFGRDIADTTDAVRDPQTLEILDITPCSFGGVSVITPGTNTSNQVAVLYQDVNCTEVPVAIHADQLTPTWRVYSTGSNVFQTRAGCLIGAEHVNNSYECDIPIGAGICASYQTQTNSPRRARSVASQSIIAYTMSLGAENSVAYSNNSIAICTNFTISVTTEILPVSMTKTSVDCTMYICGDSTECSNLLLQYGSFCTQLNRALTGIAVEQDKNTQEVFAQVKQIYKTPPIKDFGGFNFSQILPDPSKPSKRSFIEDLLFNKVTLADAGFIKQYGDCLGDIAARDLICAQKFNGLTVLPPLLTDEMIAQYTSALLAGTITSGWTFGAGAALQIPFAMQMAYRFNGIGVTQNVLYENQKLIANQFNSAIGKIQDSLSSTASALGKLQDVVNQNAQALNTLVKQLSSNFGAISSVLNDILSRLDKVEAEVQIDRLITGRLQSLQTYVTQQLIRAAEIRASANLAATKMSECVLGQSKRVDFCGKGYHLMSFPQSAPHGVVFLHVTYVCAQEKNFTTAPAICHDGKAHFPREGVFVSNGTHWFVTQRNFYEPQIITTDNTFVSGNCDVVIGIVNNTVYDPLQPELDSFKEELDKYFKNHTSPDVDLGDISGINASVVNIQKEIDRLNEVAKNLNESLIDLQELGKYEQYIKGGGGSDIDPYKEFGSSYQLLNFLPLDFFPDLNALVDTATALYEEELTGREHCSPHHTAIRQALVCWDELTKLIAWMSSNITSEQVRTIIVNHVNDTWGLKVRQSLWFHLSCLTFGQHTVQEFLVSFGVWIRTPAPYRPPNAPILSTLPEHTVIC

SEQ ID NO: 7143 - protein, 1365 aa, Artificial Sequence
  SARS-CoV-2/South Korea/SNU01/2020__EPI_ISL_411929 spike protein (1-1211)(P715C_P1069C) WhcAg construct
MFVFLVLLPLVSSQCVNLTTRTQLPPAYTNSFTRGVYYPDKVFRSSVLHSTQDLFLPFFSNVTWFHAIHVSGTNGTKRFDNPVLPFNDGVYFASTEKSNIIRGWIFGTTLDSKTQSLLIVNNATNVVIKVCEFQFCNDPFLGVYYHKNNKSWMESEFRVYSSANNCTFEYVSQPFLMDLEGKQGNFKNLREFVFKNIDGYFKIYSKHTPINLVRDLPQGFWALEPLVDLPIGINITRFQTLLALHRSYLTPGDSSSGWTAGAAAYYVGYLQPRTFLLKYNENGTITDAVDCALDPLSETKCTLKSFTVEKGIYQTSNFRVQPTESIVRFPNITNLCPFGEVFNATRFASVYAWNRKRISNCVADYSVLYNSASFSTFKCYGVSPTKLNDLCFTNVYADSFVIRGDEVRQIAPGQTGKIADYNYKLPDDFTGCVIAWNSNNLDSKVGGNYNYLYRLFRKSNLKPFERDISTEIYQAGSTPCNGVEGFNCYFPLQSYGFQPTNGVGYQPYRVVVLSFELLHAPATVCGPKKSTNLVKNKCVNFNFNGLTGTGVLTESNKKFLPFQQFGRDIADTTDAVRDPQTLEILDITPCSFGGVSVITPGTNTSNQVAVLYQDVNCTEVPVAIHADQLTPTWRVYSTGSNVFQTRAGCLIGAEHVNNSYECDIPIGAGICASYQTQTNSPRRARSVASQSIIAYTMSLGAENSVAYSNNSIAICTNFTISVTTEILPVSMTKTSVDCTMYICGDSTECSNLLLQYGSFCTQLNRALTGIAVEQDKNTQEVFAQVKQIYKTPPIKDFGGFNFSQILPDPSKPSKRSFIEDLLFNKVTLADAGFIKQYGDCLGDIAARDLICAQKFNGLTVLPPLLTDEMIAQYTSALLAGTITSGWTFGAGAALQIPFAMQMAYRFNGIGVTQNVLYENQKLIANQFNSAIGKIQDSLSSTASALGKLQDVVNQNAQALNTLVKQLSSNFGAISSVLNDILSRLDKVEAEVQIDRLITGRLQSLQTYVTQQLIRAAEIRASANLAATKMSECVLGQSKRVDFCGKGYHLMSFPQSAPHGVVFLHVTYVCAQEKNFTTAPAICHDGKAHFPREGVFVSNGTHWFVTQRNFYEPQIITTDNTFVSGNCDVVIGIVNNTVYDPLQPELDSFKEELDKYFKNHTSPDVDLGDISGINASVVNIQKEIDRLNEVAKNLNESLIDLQELGKYEQYIKGGGGSDIDPYKEFGSSYQLLNFLPLDFFPDLNALVDTATALYEEELTGREHCSPHHTAIRQALVCWDELTKLIAWMSSNITSEQVRTIIVNHVNDTWGLKVRQSLWFHLSCLTFGQHTVQEFLVSFGVWIRTPAPYRPPNAPILSTLPEHTVIC

SEQ ID NO: 7144 - protein, 1365 aa, Artificial Sequence
  SARS-CoV-2/China/WF0004/2020__EPI_ISL_413694 spike protein (1-1211)(P715C_P1069C) WhcAg construct
MFVFLVLLPLVSSQCVNLTTRTQLPPAYTNSFTRGVYYPDKVFRSSVLHSTQDLFLPFFSNVTWFHAIHVSGTNGTKRFDNPVLPFNDGVYFASTEKSNIIRGWIFGTTLDSKTQSLLIVNNATNVVIKVCEFQFCNDPFLGVYYHKNNKSWTESEFRVYSSANNCTFEYVSQPFLMDLEGKQGNFKNLREFVFKNIDGYFKIYSKHTPINLVRDLPQGFSALEPLVDLPIGINITRFQTLLALHRSYLTPGDSSSGWTAGAAAYYVGYLQPRTFLLKYNENGTITDAVDCALDPLSETKCTLKSFTVEKGIYQTSNFRVQPTESIVRFPNITNLCPFGEVFNATRFASVYAWNRKRISNCVADYSVLYNSASFSTFKCYGVSPTKLNDLCFTNVYADSFVIRGDEVRQIAPGQTGKIADYNYKLPDDFTGCVIAWNSNNLDSKVGGNYNYLYRLFRKSNLKPFERDISTEIYQAGSTPCNGVEGFNCYFPLQSYGFQPTNGVGYQPYRVVVLSFELLHAPATVCGPKKSTNLVKNKCVNFNFNGLTGTGVLTESNKKFLPFQQFGRDIADTTDAVRDPQTLEILDITPCSFGGVSVITPGTNTSNQVAVLYQDVNCTEVPVAIHADQLTPTWRVYSTGSNVFQTRAGCLIGAEHVNNSYECDIPIGAGICASYQTQTNSPRRARSVASQSIIAYTMSLGAENSVAYSNNSIAICTNFTISVTTEILPVSMTKTSVDCTMYICGDSTECSNLLLQYGSFCTQLNRALTGIAVEQDKNTQEVFAQVKQIYKTPPIKDFGGFNFSQILPDPSKPSKRSFIEDLLFNKVTLADAGFIKQYGDCLGDIAARDLICAQKFNGLTVLPPLLTDEMIAQYTSALLAGTITSGWTFGAGAALQIPFAMQMAYRFNGIGVTQNVLYENQKLIANQFNSAIGKIQDSLSSTASALGKLQDVVNQNAQALNTLVKQLSSNFGAISSVLNDILSRLDKVEAEVQIDRLITGRLQSLQTYVTQQLIRAAEIRASANLAATKMSECVLGQSKRFDFCGKGYHLMSFPQSAPHGVVFLHVTYVCAQEKNFTTAPAICHDGKAHFPREGVFVSNGTHWFVTQRNFYEPQIITTDNTFVSGNCDVVIGIVNNTVYDPLQPELDSFKEELDKYFKNHTSPDVDLGDISGINASVVNIQKEIDRLNEVAKNLNESLIDLQELGKYEQYIKGGGGSDIDPYKEFGSSYQLLNFLPLDFFPDLNALVDTATALYEEELTGREHCSPHHTAIRQALVCWDELTKLIAWMSSNITSEQVRTIIVNHVNDTWGLKVRQSLWFHLSCLTFGQHTVQEFLVSFGVWIRTPAPYRPPNAPILSTLPEHTVIC

SEQ ID NO: 7145 - protein, 1365 aa, Artificial Sequence
  SARS-CoV-2/China/WF0028/2020__EPI_ISL_413791 spike protein (1-1211)(P715C_P1069C) WhcAg construct
MFVFLVLLPLVSSQCVNLTTRTQLPPAYTNSFTRGVYYPDKVFRSSVLHSTQDLFLPFFSNVTWFHAIHVSGTNGTKRFDNPVLPFNDGVYFASTEKSNIIRGWIFGTTLDSKTQSLLIVNNATNVVIKVCEFQFCNDPFLGVYYHKNNKSWMESEFRVYSSANNCTFEYVSQPFLMDLEGKQGNFKNLREFVFKNIDGYFKIYSKHTPINLVRDLPQGFSALEPLVDLPIGINITRFQTLLALHRSYLTPGDSSSGWTAGAAAYYVGYLQPRTFLLKYNENGTITDAVDCALDPLSETKCTLKSFTVEKGIYQTSNFRVQPTESIVRFPNITNLCPFGEVFNATRFASVYAWNRKRISNCVADYSVLYNSASFSTFKCYGVSPTKLNDLCFTNVYADSFVIRGDEVRQIAPGQTGKIADYNYKLPDDFTGCVIAWNSNNLDSKVGGNYNYLYRLFRKSNLKPFERDISTEIYQAGSTPCNGVEGFNCYFPLQSYGFQPTNGVGYQPYRVVVLSFELLHAPATVCGPKKSTNLVKNKCVNFNFNGLTGTGVLTESNKKFLPFQQFGRDIADTTDAVRDPQTLEILDITPCSFGGVSVITPGTNTSNQVAVLYQDVNCTEVPVAIHADQLTPTWRVYSTGSNVFQTRAGCLIGAEHVNNSYECDIPIGAGICASYQTQTNSPRRARSVASQSIIAYTMSLGAENSVAYSNNSIAICTNFTISVTTEILPVSMTKTSVDCTMYICGDSTECSNLLLQYGSFCTQLNRALTGIAVEQDKNTQEVFAQVKQIYKTPPIKDFGGFNFSQILPDPSKPSKRSFIEDLLFNKVTLADAGFIKQYGDCLGDIAARDLICAQKFNGLTVLPPLLTDEMIAQYTSALLAGTITSGWTFGAGAALQIPFAMQMAYRFNGIGVTQNVLYENQKLIANQFNSAIGKIQDSLSSTASALGKLQDVVNQNAQALNTLVKQLSSNFGAISSVLNDILSRLDKVEAEVQIDRLITGRLQSLQTYVTQQLIRAAEIRASANLAATKMSECVLGQSKRVDFCGKGYHLMSFPQSAPHGVVFLHVTYVCAQEKNFTTAPAICHDGKAHFPREGVFVSNGTHWFVTQRNFYEPQIITTDNTFVSGNCDVVIGIVNNTVYDPLQPELESFKEELDKYFKNHTSPDVDLGDISGINASVVNIQKEIDRLNEVAKNLNESLIDLQELGKYEQYIKGGGGSDIDPYKEFGSSYQLLNFLPLDFFPDLNALVDTATALYEEELTGREHCSPHHTAIRQALVCWDELTKLIAWMSSNITSEQVRTIIVNHVNDTWGLKVRQSLWFHLSCLTFGQHTVQEFLVSFGVWIRTPAPYRPPNAPILSTLPEHTVIC

SEQ ID NO: 7146 - protein, 1365 aa, Artificial Sequence
  SARS-CoV-2/2019-nCoV/USA-CruiseA-18/2020__MT159716.1 spike protein (1-1211)(P715C_P1069C) WhcAg construct
MFVFLVLLPLVSSQCVNLTTRTQLPPAYTNSFTRGVYYPDKVFRSSVLHSTQDLFLPFFSNVTWFHAIHVSGTNGTKRFDNPVLPFNDGVYFASTEKSNIIRGWIFGTTLDSKTQSLLIVNNATNVVIKVCEFQFCNDPFLGVYYHKNNKSWMESELRVYSSANNCTFEYVSQPFLMDLEGKQGNFKNLREFVFKNIDGYFKIYSKHTPINLVRDLPQGFSALEPLVDLPIGINITRFQTLLALHRSYLTPGDSSSGWTAGAAAYYVGYLQPRTFLLKYNENGTITDAVDCALDPLSETKCTLKSFTVEKGIYQTSNFRVQPTESIVRFPNITNLCPFGEVFNATRFASVYAWNRKRISNCVADYSVLYNSASFSTFKCYGVSPTKLNDLCFTNVYADSFVIRGDEVRQIAPGQTGKIADYNYKLPDDFTGCVIAWNSNNLDSKVGGNYNYLYRLFRKSNLKPFERDISTEIYQAGSTPCNGVEGFNCYFPLQSYGFQPTNGVGYQPYRVVVLSFELLHAPATVCGPKKSTNLVKNKCVNFNFNGLTGTGVLTESNKKFLPFQQFGRDIADTTDAVRDPQTLEILDITPCSFGGVSVITPGTNTSNQVAVLYQDVNCTEVPVAIHADQLTPTWRVYSTGSNVFQTRAGCLIGAEHVNNSYECDIPIGAGICASYQTQTNSPRRARSVASQSIIAYTMSLGAENSVAYSNNSIAICTNFTISVTTEILPVSMTKTSVDCTMYICGDSTECSNLLLQYGSFCTQLNRALTGIAVEQDKNTQEVFAQVKQIYKTPPIKDFGGFNFSQILPDPSKPSKRSFIEDLLFNKVTLADAGFIKQYGDCLGDIAARDLICAQKFNGLTVLPPLLTDEMIAQYTSALLAGTITSGWTFGAGAALQIPFAMQMAYRFNGIGVTQNVLYENQKLIANQFNSAIGKIQDSLSSTASALGKLQDVVNQNAQALNTLVKQLSSNFGAISSVLNDILSRLDKVEAEVQIDRLITGRLQSLQTYVTQQLIRAAEIRASANLAATKMSECVLGQSKRVDFCGKGYHLMSFPQSAPHGVVFLHVTYVCAQEKNFTTAPAICHDGKAHFPREGVFVSNGTHWFVTQRNFYEPQIITTDNTFVSGNCDVVIGIVNNTVYDPLQPELDSFKEELDKYFKNHTSPDVDLGDISGINASVVNIQKEIDRLNEVAKNLNESLIDLQELGKYEQYIKGGGGSDIDPYKEFGSSYQLLNFLPLDFFPDLNALVDTATALYEEELTGREHCSPHHTAIRQALVCWDELTKLIAWMSSNITSEQVRTIIVNHVNDTWGLKVRQSLWFHLSCLTFGQHTVQEFLVSFGVWIRTPAPYRPPNAPILSTLPEHTVIC

SEQ ID NO: 7147 - protein, 1365 aa, Artificial Sequence
  SARS-CoV-2/SARS-CoV-2/Yunnan-01/human/2020/CHN__MT049951.1 spike protein (1-1211)(P715C_P1069C) WhcAg construct
MFVFLVLLPLVSSQCVNLTTRTQLPPANTNSFTRGVYYPDKVFRSSVLHSTQDLFLPFFSNVTWFHAIHVSGTNGTKRFDNPVLPFNDGVYFASTEKSNIIRGWIFGTTLDSKTQSLLIVNNATNVVIKVCEFQFCNDPFLGVYYHKNNKSWMESEFRVYSSANNCTFEYVSQPFLMDLEGKQGNFKNLREFVFKNIDGYFKIYSKHTPINLVRDLPQGFSALEPLVDLPIGINITRFQTLLALHRSYLTPGDSSSGWTAGAAAYYVGYLQPRTFLLKYNENGTITDAVDCALDPLSETKCTLKSFTVEKGIYQTSNFRVQPTESIVRFPNITNLCPFGEVFNATRFASVYAWNRKRISNCVADYSVLYNSASFSTFKCYGVSPTKLNDLCFTNVYADSFVIRGDEVRQIAPGQTGKIADYNYKLPDDFTGCVIAWNSNNLDSKVGGNYNYLYRLFRKSNLKPFERDISTEIYQAGSTPCNGVEGFNCYFPLQSYGFQPTNGVGYQPYRVVVLSFELLHAPATVCGPKKSTNLVKNKCVNFNFNGLTGTGVLTESNKKFLPFQQFGRDIADTTDAVRDPQTLEILDITPCSFGGVSVITPGTNTSNQVAVLYQDVNCTEVPVAIHADQLTPTWRVYSTGSNVFQTRAGCLIGAEHVNNSYECDIPIGAGICASYQTQTNSPRRARSVASQSIIAYTMSLGAENSVAYSNNSIAICTNFTISVTTEILPVSMTKTSVDCTMYICGDSTECSNLLLQYGSFCTQLNRALTGIAVEQDKNTQEVFAQVKQIYKTPPIKDFGGFNFSQILPDPSKPSKRSFIEDLLFNKVTLADAGFIKQYGDCLGDIAARDLICAQKFNGLTVLPPLLTDEMIAQYTSALLAGTITSGWTFGAGAALQIPFAMQMAYRFNGIGVTQNVLYENQKLIANQFNSAIGKIQDSLSSTASALGKLQDVVNQNAQALNTLVKQLSSNFGAISSVLNDILSRLDKVEAEVQIDRLITGRLQSLQTYVTQQLIRAAEIRASANLAATKMSECVLGQSKRVDFCGKGYHLMSFPQSAPHGVVFLHVTYVCAQEKNFTTAPAICHDGKAHFPREGVFVSNGTHWFVTQRNFYEPQIITTDNTFVSGNCDVVIGIVNNTVYDPLQPELDSFKEELDKYFKNHTSPDVDLGDISGINASVVNIQKEIDRLNEVAKNLNESLIDLQELGKYEQYIKGGGGSDIDPYKEFGSSYQLLNFLPLDFFPDLNALVDTATALYEEELTGREHCSPHHTAIRQALVCWDELTKLIAWMSSNITSEQVRTIIVNHVNDTWGLKVRQSLWFHLSCLTFGQHTVQEFLVSFGVWIRTPAPYRPPNAPILSTLPEHTVIC

SEQ ID NO: 7148 - protein, 1365 aa, Artificial Sequence
  SARS-CoV-2/USA/WA-UW292/2020__EPI_ISL_418077 spike protein (1-1211)(P715C_P1069C) WhcAg construct
MFVFLVLLPLVSSQCVNLTTRTQLPPAYTNSFTRGVYYPDKVFRSSVLHSTQDLFLPFFSNVTWFHAIHVSGTNGTKRFDNPVLPFNDGVYFASTEKSNIIRGWIFGTTLDSKTQSLLIVNNATNVVIKVCEFQFCNDPFLGVYYHKNNKSWMESEFRVYSSANNCTFEYVSQPFLMDLEGKQGNFKNLREFVFKNIDGYFKIYSKHTPINLVRDLPQGFSALEPLVDLPIGINITRFQTLLALHRSYLTPGDSSSGWTAGAAAYYVGYLQPRTFLLKYNENGTITDAVDCALDPLSETKCTLKSFTVEKGIYQTSNFRVQPTESIVRFPNITNLCPFGEVFNATRFASVYAWNRKRISNCVADYSVLYNSASFSTFKCYGVSPTKLNDLCFTNVYADSFVIRGDEVRQIAPGQTGKIADYNYKLPDDFTGCVIAWNSNNLDSKVGGNYNYLYRLFRKSNLKPFERDISTEIYQASSTPCNGVEGFNCYFPLQSYGFQPTNGVGYQPYRVVVLSFELLHAPATVCGPKKSTNLVKNKCVNFNFNGLTGTGVLTESNKKFLPFQQFGRDIADTTDAVRDPQTLEILDITPCSFGGVSVITPGTNTSNQVAVLYQDVNCTEVPVAIHADQLTPTWRVYSTGSNVFQTRAGCLIGAEHVNNSYECDIPIGAGICASYQTQTNSPRRARSVASQSIIAYTMSLGAENSVAYSNNSIAICTNFTISVTTEILPVSMTKTSVDCTMYICGDSTECSNLLLQYGSFCTQLNRALTGIAVEQDKNTQEVFAQVKQIYKTPPIKDFGGFNFSQILPDPSKPSKRSFIEDLLFNKVTLADAGFIKQYGDCLGDIAARDLICAQKFNGLTVLPPLLTDEMIAQYTSALLAGTITSGWTFGAGAALQIPFAMQMAYRFNGIGVTQNVLYENQKLIANQFNSAIGKIQDSLSSTASALGKLQDVVNQNAQALNTLVKQLSSNFGAISSVLNDILSRLDKVEAEVQIDRLITGRLQSLQTYVTQQLIRAAEIRASANLAATKMSECVLGQSKRVDFCGKGYHLMSFPQSAPHGVVFLHVTYVCAQEKNFTTAPAICHDGKAHFPREGVFVSNGTHWFVTQRNFYEPQIITTDNTFVSGNCDVVIGIVNNTVYDPLQPELDSFKEELDKYFKNHTSPDVDLGDISGINASVVNIQKEIDRLNEVAKNLNESLIDLQELGKYEQYIKGGGGSDIDPYKEFGSSYQLLNFLPLDFFPDLNALVDTATALYEEELTGREHCSPHHTAIRQALVCWDELTKLIAWMSSNITSEQVRTIIVNHVNDTWGLKVRQSLWFHLSCLTFGQHTVQEFLVSFGVWIRTPAPYRPPNAPILSTLPEHTVIC

SEQ ID NO: 7149 - protein, 1365 aa, Artificial Sequence
  SARS-CoV-2/Iceland/192/2020__EPI_ISL_417819 spike protein (1-1211)(P715C_P1069C) WhcAg construct
MFVFFVLLPLVSSQCVNLTTRTQLPPAYTNSFTRGVYYPDKVFRSSVLHSTQDLFLPFFSNVTWFHAIHVSGTNGTKRFDNPVLPFNDGVYFASTEKSNIIRGWIFGTTLDSKTQSLLIVNNATNVVIKVCEFQFCNDPFLGVYYHKNNKSWMESEFRVYSSANNCTFEYVSQPFLMDLEGKQGNFKNLREFVFKNIDGYFKIYSKHTPINLVRDLPQGFSALEPLVDLPIGINITRFQTLLALHRSYLTPGDSSSGWTAGAAAYYVGYLQPRTFLLKYNENGTITDAVDCALDPLSETKCTLKSFTVEKGIYQTSNFRVQPTESIVRFPNITNLCPFGEVFNATRFASVYAWNRKRISNCVADYSVLYNSASFSTFKCYGVSPTKLNDLCFTNVYADSFVIRGDEVRQIAPGQTGKIADYNYKLPDDFTGCVIAWNSNNLDSKVGGNYNYLYRLFRKSNLKPFERDISTEIYQAGSTPCNGVEGFNCYFPLQSYGFQPTNGVGYQPYRVVVLSFELLHAPATVCGPKKSTNLVKNKCVNFNFNGLTGTGVLTESNKKFLPFQQFGRDIADTTDAVRDPQTLEILDITPCSFGGVSVITPGTNTSNQVAVLYQGVNCTEVPVAIHADQLTPTWRVYSTGSNVFQTRAGCLIGAEHVNNSYECDIPIGAGICASYQTQTNSPRRARSVASQSIIAYTMSLGAENSVAYSNNSIAICTNFTISVTTEILPVSMTKTSVDCTMYICGDSTECSNLLLQYGSFCTQLNRALTGIAVEQDKNTQEVFAQVKQIYKTPPIKDFGGFNFSQILPDPSKPSKRSFIEDLLFNKVTLADAGFIKQYGDCLGDIAARDLICAQKFNGLTVLPPLLTDEMIAQYTSALLAGTITSGWTFGAGAALQIPFAMQMAYRFNGIGVTQNVLYENQKLIANQFNSAIGKIQDSLSSTASALGKLQDVVNQNAQALNTLVKQLSSNFGAISSVLNDILSRLDKVEAEVQIDRLITGRLQSLQTYVTQQLIRAAEIRASANLAATKMSECVLGQSKRVDFCGKGYHLMSFPQSAPHGVVFLHVTYVCAQEKNFTTAPAICHDGKAHFPREGVFVSNGTHWFVTQRNFYEPQIITTDNTFVSGNCDVVIGIVNNTVYDPLQPELDSFKEELDKYFKNHTSPDVDLGDISGINASVVNIQKEIDRLNEVAKNLNESLIDLQELGKYEQYIKGGGGSDIDPYKEFGSSYQLLNFLPLDFFPDLNALVDTATALYEEELTGREHCSPHHTAIRQALVCWDELTKLIAWMSSNITSEQVRTIIVNHVNDTWGLKVRQSLWFHLSCLTFGQHTVQEFLVSFGVWIRTPAPYRPPNAPILSTLPEHTVIC

SEQ ID NO: 7150 - protein, 1365 aa, Artificial Sequence
  SARS-CoV-2/Belgium/ULG-6939/2020__EPI_ISL_417020 spike protein (1-1211)(P715C_P1069C) WhcAg construct
MFVFLVLLPLVSSQCVNLTTRTQLPPAYTNSFTRGVYYPDKVFRSSVLHSTQDLFLPFFSNVTWFHAIHVSGTNGTKRFDNPVLPFNDGVYFASTEKSNIIRGWIFGTTLDSKTQSLLIVNNATNVVIKVCEFQFCNDPFLGVYYHKNNKSWMESEFRVYSSANNCTFEYVSQPFLMDLEGKQGNFKNLREFVFKNIDGYFKIYSKHTPINLVRDLPQGFSALEPLVDLPIGINITRFQTLLALHRSYLTPGDSSSGWTAGAAAYYVGYLQPRTFLLKYNENGTITDAVDCALDPLSETKCTLKSFTVEKGIYQTSNFRVQPTESIVRFPNITNLCPFGEVFNATRFASVYAWNRKRISNCVADYSVLYNSASFSTFKCYGVSPTKLNDLCFTNVYADSFVIRGDEVRQIAPGQTGKIADYNYKLPDDFTGCVIAWNSNNLDSKVGGNYNYLYRLFRKSNLKPFERDISTEIYQAGSTPCNGVEGFNCYFPLQSYGFQPTNGVGYQPYRVVVLSFELLHAPATVCGPKKSTNLVKNKCVNFNFNGLTGTGVLTESNKKFLPFQQFGRDIADTTDAVRDPQTLEILDITPCSFGGVSVITPGTNTSNQVAVLYQGVNCTEVPVAIHADQLTPTWRVYSTGSNVFQTRAGCLIGAEHVNNSYECDIPIGAGICASYQTQTNSPRRARSVASQSIIAYTMSLGAENSVVYSNNSIAICTNFTISVTTEILPVSMTKTSVDCTMYICGDSTECSNLLLQYGSFCTQLNRALTGIAVEQDKNTQEVFAQVKQIYKTPPIKDFGGFNFSQILPDPSKPSKRSFIEDLLFNKVTLADAGFIKQYGDCLGDIAARDLICAQKFNGLTVLPPLLTDEMIAQYTSALLAGTITSGWTFGAGAALQIPFAMQMAYRFNGIGVTQNVLYENQKLIANQFNSAIGKIQDSLSSTASALGKLQDVVNQNAQALNTLVKQLSSNFGAISSVLNDILSRLDKVEAEVQIDRLITGRLQSLQTYVTQQLIRAAEIRASANLAATKMSECVLGQSKRVDFCGKGYHLMSFPQSAPHGVVFLHVTYVCAQEKNFTTAPAICHDGKAHFPREGVFVSNGTHWFVTQRNFYEPQIITTDNTFVSGNCDVVIGIVNNTVYDPLQPELDSFKEELDKYFKNHTSPDVDLGDISGINASVVNIQKEIDRLNEVAKNLNESLIDLQELGKYEQYIKGGGGSDIDPYKEFGSSYQLLNFLPLDFFPDLNALVDTATALYEEELTGREHCSPHHTAIRQALVCWDELTKLIAWMSSNITSEQVRTIIVNHVNDTWGLKVRQSLWFHLSCLTFGQHTVQEFLVSFGVWIRTPAPYRPPNAPILSTLPEHTVIC

SEQ ID NO: 7151 - protein, 1365 aa, Artificial Sequence
  SARS-CoV-2/France/HF2496/2020__EPI_ISL_418231 spike protein (1-1211)(P715C_P1069C) WhcAg construct
MFVFLVLLPLVSSQCVNLTTRTQLPPAYTNSFTRGVYYPDKVFRSSVLHSTQDLFLPFFSNVTWFHAIHVSGTNGTKRFDNPVLPFNDGVYFASTEKSNIIRGWIFGTTLDSKTQSLLIVNNATNVVIKVCEFQFCNDPFLGVYYHKNNKSWMESEFRVYSSANNCTFEYVSQPFLMDLEGKQGNFKNLREFVFKNIDGYFKIYSKHTPINLVRDLPQGFSALEPLVDLPIGINITRFQTLLALHRSYLTPGDSSSGWTAGAAAYYVGYLQPRTFLLKYNENGTITDAVDCALDPLSETKCTLKSFTVEKGIYQTSNFRVQPTESIVRFPNITNLCPFGEVFNATRFASVYAWNRKRISNCVADYSVLYNSASFSTFKCYGVSPTKLNDLCFTNVYADSFVIRGDEVRQIAPGQTGKIADYNYKLPDDFTGCVIAWNSNNLDSKVGGNYNYLYRLFRKSNLKPFERDISTEIYQAGSTPCNGVEGFNCYFPLQSYGFQPTNGVGYQPYRVVVLSFELLHAPATVCGPKKSTNLVKNKCVNFNFNGLTGTGVLTESNKKFLPFQQFGRDIADTTDAVRDPQTLEILDITPCSFGGVSVITPGTNTSNQVAVLYQGVNCTEVPVAIHADQLTPTWRVYSTGSNVFQTRAGCLIGAEHVNNSYECDIPIGAGICASYQTQTNSPRRARSVASQSIIAYTMSLGAENSVAYSNNSIAICTNFTISVTTEILPVSMTKTSVDCTMYICGDSTECSNLLLQYGSFCTQLNRALTGIAVEQDKNTQEVFAQVKQIYKTPPIKDFGGFNFSQILPDPSKPSKRSFIEDLLFNKVTLADAGFIKQYGDCLGDIVARDLICAQKFNGLTVLPPLLTDEMIAQYTSALLAGTITSGWTFGAGAALQIPFAMQMAYRFNGIGVTQNVLYENQKLIANQFNSAIGKIQDSLSSTASALGKLQDVVNQNAQALNTLVKQLSSNFGAISSVLNDILSRLDKVEAEVQIDRLITGRLQSLQTYVTQQLIRAAEIRASANLAATKMSECVLGQSKRVDFCGKGYHLMSFPQSAPHGVVFLHVTYVCAQEKNFTTAPAICHDGKAHFPREGVFVSNGTHWFVTQRNFYEPQIITTDNTFVSGNCDVVIGIVNNTVYDPLQPELDSFKEELDKYFKNHTSPDVDLGDISGINASVVNIQKEIDRLNEVAKNLNESLIDLQELGKYEQYIKGGGGSDIDPYKEFGSSYQLLNFLPLDFFPDLNALVDTATALYEEELTGREHCSPHHTAIRQALVCWDELTKLIAWMSSNITSEQVRTIIVNHVNDTWGLKVRQSLWFHLSCLTFGQHTVQEFLVSFGVWIRTPAPYRPPNAPILSTLPEHTVIC

SEQ ID NO: 7152 - protein, 1365 aa, Artificial Sequence
  SARS-CoV-2/USA/WA-UW291/2020__EPI_ISL_418076 spike protein (1-1211)(P715C_P1069C) WhcAg construct
MFVFLVLLPLVSSQCVNLTTRTQLPPAYTNSFTRGVYYPDKVFRSSVLHSTQDLFLPFFSNVTWFHAIHVSGTNGTKRFDNPVLPFNDGVYFASTEKSNIIRGWIFGTTLDSKTQSLLIVNNATNVVIKVCEFQFCNDPFLGVYYHKNNKSWMESEFRVYSSANNCTFEYVSQPFLMDLEGKQGNFKNLREFVFKNIDGYFKIYSKHTPINLVRDLPQGFSALEPLVDLPIGINITRFQTLLALHRSYLTPGDSSSGWTAGAAAYYVGYLQPRTFLLKYNENGTITDAVDCALDPLSETKCTLKSFTVEKGIYQTSNFRVQPTESIVRFPNITNLCPFGEVFNATRFASVYAWNRKRISNCVADYSVLYNSASFSTFKCYGVSPTKLNDLCFTNVYADSFVIRGDEVRQIAPGQTGKIADYNYKLPDDFTGCVIAWNSNNLDSKVGGNYNYLYRLFRKSNLKPFERDISTEIYQAGSTPCNGVEGFNCYFPLQSYGFQPTNGVGYQPYRVVVLSFELLHAPATVCGPKKSTNLVKNKCVNFNFNGLTGTGVLTESNKKFLPFQQFGRDIADTTDAVRDPQTLEILDITPCSFGGVSVITPGTNTSNQVAVLYQGVNCTEVPVAIHADQLTPTWRVYSTGSNVFQTRAGCLIGAEHVNNSYECDIPIGAGICASYQTQTNSPRRARSVASQSIIAYTMSLGAENSVAYSNNSIAICTNFTISVTTEILPVSMTKTSVDCTMYICGDSTECSNLLLQYGSFCTQLNRALTGIAVEQDKNTQEVFAQVKQIYKTPPIKDFGGFNFSQILPDPSKPSKRSFIEDLLFNKVTLADAGFIKQYGDCLGDIAARDLICAQKFNGLTVLPPLLTDEMIAQYTSALLAGTITSGWTFGAGAALQIPFAMQMAYRFNGIGVTQNVLYENQKLIANQFNSAIGKIQYSLSSTASALGKLQDVVNQNAQALNTLVKQLSSNFGAISSVLNDILSRLDKVEAEVQIDRLITGRLQSLQTYVTQQLIRAAEIRASANLAATKMSECVLGQSKRVDFCGKGYHLMSFPQSAPHGVVFLHVTYVCAQEKNFTTAPAICHDGKAHFPREGVFVSNGTHWFVTQRNFYEPQIITTDNTFVSGNCDVVIGIVNNTVYDPLQPELDSFKEELDKYFKNHTSPDVDLGDISGINASVVNIQKEIDRLNEVAKNLNESLIDLQELGKYEQYIKGGGGSDIDPYKEFGSSYQLLNFLPLDFFPDLNALVDTATALYEEELTGREHCSPHHTAIRQALVCWDELTKLIAWMSSNITSEQVRTIIVNHVNDTWGLKVRQSLWFHLSCLTFGQHTVQEFLVSFGVWIRTPAPYRPPNAPILSTLPEHTVIC

SEQ ID NO: 7153 - protein, 1365 aa, Artificial Sequence; identical to SEQ ID NO: 7116
  SARS-CoV-2/Portugal/PT0034/2020__EPI_ISL_418019 spike protein (1-1211)(P715C_P1069C) WhcAg construct

SEQ ID NO: 7154 - protein, 1365 aa, Artificial Sequence
  SARS-CoV-2/Iceland/202/2020__EPI_ISL_417750 spike protein (1-1211)(P715C_P1069C) WhcAg construct
MFVFLVLLPLVSSQCVNLTTRTQLPPAYTNSFTRGVYYPDKVFRSSVLHSTQDLFLPFFSNVTWFHAIHVSGTNGTKRFDNPVLPFNDGVYFASTEKSNIIRGWIFGTTLDSKTQSLLIVNNATNVVIKVCEFQFCNDPFLGVYYHKNNKSWMESEFRVYSSANNCTFEYVSQPFLMDLEGKQGNFKNLREFVFKNIDGYFKIYSKHTPINLVRDLPQGFSALEPLVDLPIGINITRFQTLLALHRSYLTPGDSSSGWTAGAAAYYVGYLQPRTFLLKYNENGTITDAVDCALDPLSETKCTLKSFTVEKGIYQTSNFRVQPTESIVRFPNITNLCPFGEVFNATRFASVYAWNRKRISNCVADYSVLYNSASFSTFKCYGVSPTKLNDLCFTNVYADSFVIRGDEVRQIAPGQTGKIADYNYKLPDDFTGCVIAWNSNNLDSKVGGNYNYLYRLFRKSNLKPFERDISTEIYQAGSTPCNGVEGFNCYFPLQSYGFQPTNGVGYQPYRVVVLSFELLHAPATVCGPKKSTNLVKNKCVNFNFNGLTGTGVLTESNKKFLPFQQFGRDIADTTDAVRDPQTLEILDITPCSFGGVSVITPGTNTSNQVAVLYQDVNCTEVPVAIHADQLTPTWRVYSTGSNVFQTRAGCLIGAEHVNNSYECDIPIGAGICASYQTQTNSPRRARSVASQSIIAYTMSLGAENSVAYSNNSIAICTNFTISVTTEILPVSMTKTSVDCTMYICGDSTECSNLLLQYGSFCTQLNRALTGIAVEQDKNTQEVFAQVKQIYKTPPIKDFGGFNFSQILPDPSKPSKRSFIEDLLFNKVTLADAGFIKQYGDCLGDIAARDLICAQKFNGLTVLPPLLTDEMIAQYTSALLAGTITSGWTFGAGAALQIPFAMQMAYRFNGIGVTQNVLYENQKLIANQFNSAIGKIQDSLSSTASALGKLQDVVNQNAQALNTLVKQLSSNFGAISSVLNDILSRLDKVEAEVQIDRLITGRLQSLQTYVTQQLIRAAEIRASANLAATKMSECVLGQSKRVDFCGKGYHLMSFPQSAPHGVVFLHVTYVCAQEKNFTTAPAICHDGKAHFPREGVFVSNGTHWFVTQRNFYEPQIITTDNTFVSGNCDVVIGIVNNTVYDPLQPELDSFKEELDKYFKNHTSPDVDLGDIPGINASVVNIQKEIDRLNEVAKNLNESLIDLQELGKYEQYIKGGGGSDIDPYKEFGSSYQLLNFLPLDFFPDLNALVDTATALYEEELTGREHCSPHHTAIRQALVCWDELTKLIAWMSSNITSEQVRTIIVNHVNDTWGLKVRQSLWFHLSCLTFGQHTVQEFLVSFGVWIRTPAPYRPPNAPILSTLPEHTVIC

SEQ ID NO: 7155 - protein, 1365 aa, Artificial Sequence
  SARS-CoV-2/USA/WA-UW261/2020__EPI_ISL_418046 spike protein (1-1211)(P715C_P1069C) WhcAg construct
MFVFLVLLPLVSSQCVNLTTRTQLPPAYTNSFTRGVYYPDKVFRSSVLHSTQDLFLPFFSNVTWFHAIHVSGTNGTKRFDNPVLPFNDGVYFASTEKSNIIRGWIFGTTLDSKTQSLLIVNNATNVVIKVCEFQFCNDPFLGVYYHKNNKSWMESEFRVYSSANNCTFEYVSQPFLMDLEGKQGNFKNLREFVFKNIDGYFKIYSKHTPINLVRDLPQGFSALEPLVDLPIGINITRFQTLLALHRSYLTPGDSSSGWTAGAAAYYVGYLQPRTFLLKYNENGTITDAVDCALDPLSETKCTLKSFTVEKGIYQTSNFRVQPTESIVRFPNITNLCPFGEVFNATRFTSVYAWNRKRISNCVADYSVLYNSASFSTFKCYGVSPTKLNDLCFTNVYADSFVIRGDEVRQIAPGQTGKIADYNYKLPDDFTGCVIAWNSNNLDSKVGGNYNYLYRLFRKSNLKPFERDISTEIYQAGSTPCNGVEGFNCYFPLQSYGFQPTNGVGYQPYRVVVLSFELLHAPATVCGPKKSTNLVKNKCVNFNFNGLTGTGVLTESNKKFLPFQQFGRDIADTTDAVRDPQTLEILDITPCSFGGVSVITPGTNTSNQVAVLYQDVNCTEVPVAIHADQLTPTWRVYSTGSNVFQTRAGCLIGAEHVNNSYECDIPIGAGICASYQTQTNSPRRARSVASQSIIAYTMSLGAENSVAYSNNSIAICTNFTISVTTEILPVSMTKTSVDCTMYICGDSTECSNLLLQYGSFCTQLNRALTGIAVEQDKNTQEVFAQVKQIYKTPPIKDFGGFNFSQILPDPSKPSKRSFIEDLLFNKVTLADAGFIKQYGDCLGDIAARDLICAQKFNGLTVLPPLLTDEMIAQYTSALLAGTITSGWTFGAGAALQIPFAMQMAYRFNGIGVTQNVLYENQKLIANQFNSAIGKIQDSLSSTASALGKLQDVVNQNAQALNTLVKQLSSNFGAISSVLNDILSRLDKVEAEVQIDRLITGRLQSLQTYVTQQLIRAAEIRASANLAATKMSECVLGQSKRVDFCGKGYHLMSFPQSAPHGVVFLHVTYVCAQEKNFTTAPAICHDGKAHFPREGVFVSNGTHWFVTQRNFYEPQIITTDNTFVSGNCDVVIGIVNNTVYDPLQPELDSFKEELDKYFKNHTSPDVDLGDISGINASVVNIQKEIDRLNEVAKNLNESLIDLQELGKYEQYIKGGGGSDIDPYKEFGSSYQLLNFLPLDFFPDLNALVDTATALYEEELTGREHCSPHHTAIRQALVCWDELTKLIAWMSSNITSEQVRTIIVNHVNDTWGLKVRQSLWFHLSCLTFGQHTVQEFLVSFGVWIRTPAPYRPPNAPILSTLPEHTVIC

SEQ ID NO: 7156 - protein, 1365 aa, Artificial Sequence
  SARS-CoV-2/Portugal/PT0035/2020__EPI_ISL_418020 spike protein (1-1211)(P715C_P1069C) WhcAg construct
MFVFLVLLPLVSSQCVNLTTRTQLPPAYTNSFTRGVYYPDKVFRSSVLHSTQDLFLPFFSNVTWFHAIHVSGTNGTKRFDNPVLPFNDGVYFASTEKSNIIRGWIFGTTLDSKTQSLLIVNNATNVVIKVCEFQFCNDPFLGVYYHKNNKSWMESEFRVYSSANNCTFEYVSQPFLMDLEGKQGNFKNLREFVFKNIDGYFKIYSKHTPINLVRDLPQGFSALEPLVDLPIGINITRFQTLLALHRSYLTPGDSSSGWTAGAAAYYVGYLQPRTFLLKYNENGTITDAVDCALDPLSETKCTLKSFTVEKGIYQTSNFRVQPTESIVRFPNITNLCPFGEVFNATRFASVYAWNRKRISNCVADYSVLYNSASFSTFKCYGVSPTKLNDLCFTNVYADSFVIRGDEVRQIAPGQTGKIADYNYKLPDDFTGCVIAWNSNNLDSKVGGNYNYLYRLFRKSNLKPFERDISTEIYQAGSTPCNGVEGFNCYFPLQSYGFQPTNGVGYQPYRVVVLSFELLHAPATVCGPKKSTNLVKNKCVNFNFNGLTGTGVLTESNKKFLPFQQFGRDIADTTDAVRDPQTLEILDITPCSFGGVSVITPGTNTSNQVAVLYQDVNCTEVPVAIHADQLTPTWRVYSTGSNVFQTRAGCLIGAEHVNNSYECDIPIGAGICASYQTQTNSPRRARSVASQSIIAYTMSLGAENSVAYSNNSIAICTNFTISVTTEILPVSMTKTSVDCTMYICGDSTECSNLLLQYGSFCTQLNRALTGIAVEQDKNTQEVFAQVKQIYKTPPIKDFGGFNFSQILPDPSKPSKRSFIEDLLFNKVTLADAGFIKQYGDCLGDISARDLICAQKFNGLTVLPPLLTDEMIAQYTSALLAGTITSGWTFGAGAALQIPFAMQMAYRFNGIGVTQNVLYENQKLIANQFNSAIGKIQDSLSSTASALGKLQDVVNQNAQALNTLVKQLSSNFGAISSVLNDILSRLDKVEAEVQIDRLITGRLQSLQTYVTQQLIRAAEIRASANLAATKMSECVLGQSKRVDFCGKGYHLMSFPQSAPHGVVFLHVTYVCAQEKNFTTAPAICHDGKAHFPREGVFVSNGTHWFVTQRNFYEPQIITTDNTFVSGNCDVVIGIVNNTVYDPLQPELDSFKEELDKYFKNHTSPDVDLGDISGINASVVNIQKEIDRLNEVAKNLNESLIDLQELGKYEQYIKGGGGSDIDPYKEFGSSYQLLNFLPLDFFPDLNALVDTATALYEEELTGREHCSPHHTAIRQALVCWDELTKLIAWMSSNITSEQVRTIIVNHVNDTWGLKVRQSLWFHLSCLTFGQHTVQEFLVSFGVWIRTPAPYRPPNAPILSTLPEHTVIC

SEQ ID NO: 7157 - protein, 1365 aa, Artificial Sequence
  SARS-CoV-2/USA/NY-NYUMC7/2020__EPI_ISL_418192 spike protein (1-1211)(P715C_P1069C) WhcAg construct
MFVFLVLLPLVSSQCVNLTTRTQLPPAYTNSFTRGVYYPDKVFRSSVLHSTQDLFLPFFSNVTWFHAIHVSGTNGTKRFDNPVLPFNDGVYFASTEKSNIIRGWIFGTTLDSKTQSLLIVNNATNVVIKVCEFQFCNDPFLGVYHHKNNKSWMESEFRVYSSANNCTFEYVSQPFLMDLEGKQGNFKNLREFVFKNIDGYFKIYSKHTPINLVRDLPQGFSALEPLVDLPIGINITRFQTLLALHRSYLTPGDSSSGWTAGAAAYYVGYLQPRTFLLKYNENGTITDAVDCALDPLSETKCTLKSFTVEKGIYQTSNFRVQPTESIVRFPNITNLCPFGEVFNATRFASVYAWNRKRISNCVADYSVLYNSASFSTFKCYGVSPTKLNDLCFTNVYADSFVIRGDEVRQIAPGQTGKIADYNYKLPDDFTGCVIAWNSNNLDSKVGGNYNYLYRLFRKSNLKPFERDISTEIYQAGSTPCNGVEGFNCYFPLQSYGFQPTNGVGYQPYRVVVLSFELLHAPATVCGPKKSTNLVKNKCVNFNFNGLTGTGVLTESNKKFLPFQQFGRDIADTTDAVRDPQTLEILDITPCSFGGVSVITPGTNTSNQVAVLYQGVNCTEVPVAIHADQLTPTWRVYSTGSNVFQTRAGCLIGAEHVNNSYECDIPIGAGICASYQTQTNSPRRARSVASQSIIAYTMSLGAENSVAYSNNSIAICTNFTISVTTEILPVSMTKTSVDCTMYICGDSTECSNLLLQYGSFCTQLNRALTGIAVEQDKNTQEVFAQVKQIYKTPPIKDFGGFNFSQILPDPSKPSKRSFIEDLLFNKVTLADAGFIKQYGDCLGDIAARDLICAQKFNGLTVLPPLLTDEMIAQYTSALLAGTITSGWTFGAGAALQIPFAMQMAYRFNGIGVTQNVLYENQKLIANQFNSAIGKIQDSLSSTASALGKLQDVVNQNAQALNTLVKQLSSNFGAISSVLNDILSRLDKVEAEVQIDRLITGRLQSLQTYVTQQLIRAAEIRASANLAATKMSECVLGQSKRVDFCGKGYHLMSFPQSAPHGVVFLHVTYVCAQEKNFTTAPAICHDGKAHFPREGVFVSNGTHWFVTQRNFYEPQIITTDNTFVSGNCDVVIGIVNNTVYDPLQPELDSFKEELDKYFKNHTSPDVDLGDISGINASVVNIQKEIDRLNEVAKNLNESLIDLQELGKYEQYIKGGGGSDIDPYKEFGSSYQLLNFLPLDFFPDLNALVDTATALYEEELTGREHCSPHHTAIRQALVCWDELTKLIAWMSSNITSEQVRTIIVNHVNDTWGLKVRQSLWFHLSCLTFGQHTVQEFLVSFGVWIRTPAPYRPPNAPILSTLPEHTVIC

SEQ ID NO: 7158 - protein, 1365 aa, Artificial Sequence
  SARS-CoV-2/Iceland/189/2020__EPI_ISL_417709 spike protein (1-1211)(P715C_P1069C) WhcAg construct
MFVFLVLLPLVSSQCVNLTTRTQLPPAYTNSFTRGVYYPDKVFRSSVLHSTQDLFLPFFSNVTWFHAIHVSGTNGTKRFDNPVLPFNDGVYFASTEKSNIIRGWIFGTTLDSKTQSLLIVNNATNVVIKVCEFQFCNDPFLGVYYHKNNKSWMESEFRVYSSANNCTFEYVSQPFLMDLEGKQGNFKNLREFVFKNIDGYFKIYSKHTPINLVRDLPQGFSALEPLVDLPIGINITRFQTLLALHRSYLTPGDSSSGWTAGAAAYYVGYLQPRTFLLKYNENGTITDAVDCALDPLSETKCTLKSFTVEKGIYQTSNFRVQPTESIVRFPNITNLCPFGEVFNATRFASVYAWNRKRISNCVADYSVLYNSASFSTFKCYGVSPTKLNDLCFTNVYADSFVIRGDEVRQIAPGQTGKIADYNYKLPDDFTGCVIAWNSNNLDSKVGGNYNYLYRLFRKSNLKPFERDISTEIYQAGSTPCNGVEGFNCYFPLQSYGFQPTNGVGYQPYRVVVLSFELLHAPATVCGPKKSTNLVKNKCVNFNFNGLTGTGVLTESNKKFLPFQQFGRDIADTTDAVRDPQTLEILDITPCSFGGVSVITPGTNTSNQVAVLYQGVNCTEVPVAIHADQLTPTWRVYSTGSNVFQTRAGCLIGAEHVNNSYECDIPIGAGICASYQTQTNSPRRARSVASQSIIAYTMSLGAENSVAYSNNSIAICTNFTISVTTEILPVSMTKTSVDCTMYICGDSTECSNLLLQYGSFCTQLNRALTGIAVEQDKNTQEVFAQVKQIYKTPPIKDFGGFNFSQILPDPSKPSKRSFIEDLLFNKVTLADAGFTKQYGDCLGDIAARDLICAQKFNGLTVLPPLLTDEMIAQYTSALLAGTITSGWTFGAGAALQIPFAMQMAYRFNGIGVTQNVLYENQKLIANQFNSAIGKIQDSLSSTASALGKLQDVVNQNAQALNTLVKQLSSNFGAISSVLNDILSRLDKVEAEVQIDRLITGRLQSLQTYVTQQLIRAAEIRASANLAATKMSECVLGQSKRVDFCGKGYHLMSFPQSAPHGVVFLHVTYVCAQEKNFTTAPAICHDGKAHFPREGVFVSNGTHWFVTQRNFYEPQIITTDNTFVSGNCDVVIGIVNNTVYDPLQPELDSFKEELDKYFKNHTSPDVDLGDISGINASVVNIQKEIDRLNEVAKNLNESLIDLQELGKYEQYIKGGGGSDIDPYKEFGSSYQLLNFLPLDFFPDLNALVDTATALYEEELTGREHCSPHHTAIRQALVCWDELTKLIAWMSSNITSEQVRTIIVNHVNDTWGLKVRQSLWFHLSCLTFGQHTVQEFLVSFGVWIRTPAPYRPPNAPILSTLPEHTVIC

SEQ ID NO: 7159 - protein, 1365 aa, Artificial Sequence
  SARS-CoV-2/Australia/NSW56/2020__EPI_ISL_417408 spike protein (1-1211)(P715C_P1069C) WhcAg construct
MFVFLVLLPLVSSQCVNLTTRTQLPPAYTNSFTRGVYYPDKVFRSSVLHSTQDLFLPFFSNVTWFHAIHVSGTNGTKRFDNPVLPFNDGVYFASTEKSNIIRGWIFGTTLDSKTQSLLIVNNATNVVIKVCEFQFCNDPFLGVYYHKNNKSWMESEFRVYSSANNCTFEYVSQPFLMDLEGKQGNFKNLREFVFKNIDGYFKIYSKHTPINLVRDLPQGFSALEPLVDLPIGINITRFQTLLALHRSYLTPGDSSSGWTAGAAAYYVGYLQPRTFLLKYNENGTITDAVDCALDPLSETKCTLKSFTVEKGIYQTSNFRVQPTESIVRFPNITNLCPFGEVFNATRFASVYAWNRKRISNCVADYSVLYNSASFSTFKCYGVSPTKLNDLCFTNVYADSFVIRGDEVRQIAPGQTGKIADYNYKLPDDFTGCVIAWNSNNLDSKVGGNYNYLYRLFRKSNLKPFERDISTEIYQAGSTPCNGVEGFNCYFPLQSYGFQPTNGVGYQPYRVVVLSFELLHAPATVCGPKKSTNLVKNKCVNFNFNGLTGTGVLTESNKKFLPFQQFGRDIADTTDAVRDPQTLEILDITPCSFGGVSVITPGTNTSNQVAVLYQDVNCTEVPVAIHADQLTPTWRVYSTGSNVFQTRAGCLIGAEHVNNSYECDIPIGAGICASYQTQTNSPRRARSVASQSIIAYTMSLGAENSVAYSNNSIAICTNFTISVTTEILPVSMTKTSVDCTMYICGDSTECSNLLLQYGSFCTQLNRALTGIAVEQDKNTQEVFAQVKQIYKTPPIKDFGGFNFSQILPDSSKPSKRSFIEDLLFNKVTLADAGFIKQYGDCLGDIAARDLICAQKFNGLTVLPPLLTDEMIAQYTSALLAGTITSGWTFGAGAALQIPFAMQMAYRFNGIGVTQNVLYENQKLIANQFNSAIGKIQDSLSSTASALGKLQDVVNQNAQALNTLVKQLSSNFGAISSVLNDILSRLDKVEAEVQIDRLITGRLQSLQTYVTQQLIRAAEIRASANLAATKMSECVLGQSKRVDFCGKGYHLMSFPQSAPHGVVFLHVTYVCAQEKNFTTAPAICHDGKAHFPREGVFVSNGTHWFVTQRNFYEPQIITTDNTFVSGNCDVVIGIVNNTVYDPLQPELDSFKEELDKYFKNHTSPDVDLGDISGINASVVNIQKEIDRLNEVAKNLNESLIDLQELGKYEQYIKGGGGSDIDPYKEFGSSYQLLNFLPLDFFPDLNALVDTATALYEEELTGREHCSPHHTAIRQALVCWDELTKLIAWMSSNITSEQVRTIIVNHVNDTWGLKVRQSLWFHLSCLTFGQHTVQEFLVSFGVWIRTPAPYRPPNAPILSTLPEHTVIC

SEQ ID NO: 7160 - protein, 1365 aa, Artificial Sequence
  SARS-CoV-2/Iceland/280/2020__EPI_ISL_417608 spike protein (1-1211)(P715C_P1069C) WhcAg construct
MFVFLVLLPLVSSQCVNLTTRTQLPPAYTNSFTRGVYYPDKVFRSSVLHSTQDLFLPFFSNVTWFHAIHVSGTNGTKRFDNPVLPFNDGVYFASTEKSNIIRGWIFGTTLDSKTQSLLIVNNATNVVIKVCEFQFCNDPFLGVYYHKNNKSWMESEFRVYSSANNCTFEYVSQPFLMDLEGKQGNFKNLREFVFKNIDGYFKIYSKHTPINLVRDLPQGFSALEPLVDLPIGINITRFQTLLALHRSYLTPGDSSSGWTAGAAAYYVGYLQPRTFLLKYNENGTITDAVDCALDPLSETKCTLKSFTVEKGIYQTSNFRVQPTESIVRFPNITNLCPFGEVFNATRFASVYAWNRKRISNCVADYSVLYNSASFSTFKCYGVSPTKLNDLCFTNVYADSFVIRGDEVRQIAPGQTGKIADYNYKLPDDFTGCVIAWNSNNLDSKVGGNYNYLYRLFRKSNLKPFERDISTEIYQAGSTPCNGVEGFNCYFPLQSYGFQPTNGVGYQPYRVVVLSFELLHAPATVCGPKKSTNLVKNKCVNFNFNGLTGTGVLTESNKKFLPFQQFGRDIADTTDAVRDPQTLEILDITPCSFGGVSVITPGTNTSNQVAVLYQGVNCTEVPVAIHADQLTPTWRVYSTGSNVFQTRAGCLIGAEHVNNSYECDIPIGAGICASYHTQTNSPRRARSVASQSIIAYTMSLGAENSVAYSNNSIAICTNFTISVTTEILPVSMTKTSVDCTMYICGDSTECSNLLLQYGSFCTQLNRALTGIAVEQDKNTQEVFAQVKQIYKTPPIKDFGGFNFSQILPDPSKPSKRSFIEDLLFNKVTLADAGFIKQYGDCLGDIAARDLICAQKFNGLTVLPPLLTDEMIAQYTSALLAGTITSGWTFGAGAALQIPFAMQMAYRFNGIGVTQNVLYENQKLIANQFNSAIGKIQDSLSSTASALGKLQDVVNQNAQALNTLVKQLSSNFGAISSVLNDILSRLDKVEAEVQIDRLITGRLQSLQTYVTQQLIRAAEIRASANLAATKMSECVLGQSKRVDFCGKGYHLMSFPQSAPHGVVFLHVTYVCAQEKNFTTAPAICHDGKAHFPREGVFVSNGTHWFVTQRNFYEPQIITTDNTFVSGNCDVVIGIVNNTVYDPLQPELDSFKEELDKYFKNHTSPDVDLGDISGINASVVNIQKEIDRLNEVAKNLNESLIDLQELGKYEQYIKGGGGSDIDPYKEFGSSYQLLNFLPLDFFPDLNALVDTATALYEEELTGREHCSPHHTAIRQALVCWDELTKLIAWMSSNITSEQVRTIIVNHVNDTWGLKVRQSLWFHLSCLTFGQHTVQEFLVSFGVWIRTPAPYRPPNAPILSTLPEHTVIC

SEQ ID NO: 7161 - protein, 1365 aa, Artificial Sequence; identical to SEQ ID NO: 7116
  SARS-CoV-2/Iceland/247/2020__EPI_ISL_417575 spike protein (1-1211)(P715C_P1069C) WhcAg construct

SEQ ID NO: 7162 - protein, 1365 aa, Artificial Sequence
  SARS-CoV-2/Iceland/238/2020__EPI_ISL_417566 spike protein (1-1211)(P715C_P1069C) WhcAg construct
MFVFLVLLPLVSSQCVNLTTRTQLPPAYTNSFTRGVYYPDKVFRSSVLHSTQDLFLPFFSNVTWFHAIHVSGTNGTKRFDNPVLPFNDGVYFASTEKSNIIRGWIFGTTLDSKTQSLLIVNNATNVVIKVCEFQFCNDPFLGVYYHKNNKSWMESEFRVYSSANNCTFEYVSQPFLMDLEGKQGNFKNLREFVFKNIDGYFKIYSKHTPINLVRDLPQGFSALEPLVDLPIGINITRFQTLLALHRSYLTPGDSSSGWTAGAAAYYVGYLQPRTFLLKYNENGTITDAVDCALDPLSETKCTLKSFTVEKGIYQTSNFRVQPTESIVRFPNITNLCPFGEVFNATRFASVYAWNRKRISNCVADYSVLYNSASFSTFKCYGVSPTKLNDLCFTNVYADSFVIRGDEVRQIAPGQTGKIADYNYKLPDDFTGCVIAWNSNNLDSKVGGNYNYLYRLFRKSNLKPFERDISTEIYQAGSTPCNGVEGFNCYFPLQSYGFQPTNGVGYQPYRVVVLSFELLHAPATVCGPKKSTNLVKNKCVNFNFNGLTGTGVLTESNKKFLPFQQFGRDIADTTDAVRDPQTLEILDITPCSFGGVSVITPGTNTSNQVAVLYQGVNCTEVPVAIHADQLTPTWRVYSTGSNVFQTRAGCLIGAEHVNNSYECDIPIGAGICASYQTQTNSPRRARSVASQSIIAYTMSLGAENSVAYSNNSIAICTNFTISVTTEILPVSMTKTSVDCTMYICGDSTECSNLLLQYGSFCTQLNRALTGIAVEQDKNTQEVFAQVKQIYKTPPIKDFGGFNFSQILPDPSKPSKRSFIEDLLFNKVTLADVGFIKQYGDCLGDIAARDLICAQKFNGLTVLPPLLTDEMIAQYTSALLAGTITSGWTFGAGAALQIPFAMQMAYRFNGIGVTQNVLYENQKLIANQFNSAIGKIQDSLSSTASALGKLQDVVNQNAQALNTLVKQLSSNFGAISSVLNDILSRLDKVEAEVQIDRLITGRLQSLQTYVTQQLIRAAEIRASANLAATKMSECVLGQSKRVDFCGKGYHLMSFPQSAPHGVVFLHVTYVCAQEKNFTTAPAICHDGKAHFPREGVFVSNGTHWFVTQRNFYEPQIITTDNTFVSGNCDVVIGIVNNTVYDPLQPELDSFKEELDKYFKNHTSPDVDLGDISGINASVVNIQKEIDRLNEVAKNLNESLIDLQELGKYEQYIKGGGGSDIDPYKEFGSSYQLLNFLPLDFFPDLNALVDTATALYEEELTGREHCSPHHTAIRQALVCWDELTKLIAWMSSNITSEQVRTIIVNHVNDTWGLKVRQSLWFHLSCLTFGQHTVQEFLVSFGVWIRTPAPYRPPNAPILSTLPEHTVIC

SEQ ID NO: 7163 - protein, 1365 aa, Artificial Sequence
  SARS-CoV-2/Greece/16/2020__EPI_ISL_418265 spike protein (1-1211)(P715C_P1069C) WhcAg construct
MFVFLVLLPLVSSQCVNLTTRTQLPPAYTNSFTRGVYYPDKVFRSSVLHSTQDLFLPFFSNVTWFHAIHVSGTNGTKRFDNPVLPFNDGVYFASTEKSNIIRGWIFGTTLDSKTQSLLIVNNATNVVIKVCEFQFCNDPFLGVYYHKNNKSWMESEFRVYSSANNCTFEYVSQPFLMDLEGKQGNFKNLREFVFKNVDGYFKIYSKHTPINLVRDLPQGFSALEPLVDLPIGINITRFQTLLALHRSYLTPGDSSSGWTAGAAAYYVGYLQPRTFLLKYNENGTITDAVDCALDPLSETKCTLKSFTVEKGIYQTSNFRVQPTESIVRFPNITNLCPFGEVFNATRFASVYAWNRKRISNCVADYSVLYNSASFSTFKCYGVSPTKLNDLCFTNVYADSFVIRGDEVRQIAPGQTGKIADYNYKLPDDFTGCVIAWNSNNLDSKVGGNYNYLYRLFRKSNLKPFERDISTEIYQAGSTPCNGVEGFNCYFPLQSYGFQPTNGVGYQPYRVVVLSFELLHAPATVCGPKKSTNLVKNKCVNFNFNGLTGTGVLTESNKKFLPFQQFGRDIADTTDAVRDPQTLEILDITPCSFGGVSVITPGTNTSNQVAVLYQDVNCTEVPVAIHADQLTPTWRVYSTGSNVFQTRAGCLIGAEHVNNSYECDIPIGAGICASYQTQTNSPRRARSVASQSIIAYTMSLGAENSVAYSNNSIAICTNFTISVTTEILPVSMTKTSVDCTMYICGDSTECSNLLLQYGSFCTQLNRALTGIAVEQDKNTQEVFAQVKQIYKTPPIKDFGGFNFSQILPDPSKPSKRSFIEDLLFNKVTLADAGFIKQYGDCLGDIAARDLICAQKFNGLTVLPPLLTDEMIAQYTSALLAGTITSGWTFGAGAALQIPFAMQMAYRFNGIGVTQNVLYENQKLIANQFNSAIGKIQDSLSSTASALGKLQDVVNQNAQALNTLVKQLSSNFGAISSVLNDILSRLDKVEAEVQIDRLITGRLQSLQTYVTQQLIRAAEIRASANLAATKMSECVLGQSKRVDFCGKGYHLMSFPQSAPHGVVFLHVTYVCAQEKNFTTAPAICHDGKAHFPREGVFVSNGTHWFVTQRNFYEPQIITTDNTFVSGNCDVVIGIVNNTVYDPLQPELDSFKEELDKYFKNHTSPDVDLGDISGINASVVNIQKEIDRLNEVAKNLNESLIDLQELGKYEQYIKGGGGSDIDPYKEFGSSYQLLNFLPLDFFPDLNALVDTATALYEEELTGREHCSPHHTAIRQALVCWDELTKLIAWMSSNITSEQVRTIIVNHVNDTWGLKVRQSLWFHLSCLTFGQHTVQEFLVSFGVWIRTPAPYRPPNAPILSTLPEHTVIC

SEQ ID NO: 7164 - protein, 1365 aa, Artificial Sequence
  SARS-CoV-2/Iceland/319/2020__EPI_ISL_417648 spike protein (1-1211)(P715C_P1069C) WhcAg construct
MFVFLVLLPLVSSQCVNLTTRTQLPPAYTNSFTRGVYYPDKVFRSSVLHSTQDLFLPFFSNVTWFHAIHVSGTNGTKRFDNPVLPFNDGVYFASTEKSNIIRGWIFGTTLDSKTQSLLIVNNATNVVIKVCEFQFCNDPFLGVYYHKNNKSWMESEFRVYSSANNCTFEYVSQPFLIDLEGKQGNFKNLREFVFKNIDGYFKIYSKHTPINLVRDLPQGFSALEPLVDLPIGINITRFQTLLALHRSYLTPGDSSSGWTAGAAAYYVGYLQPRTFLLKYNENGTITDAVDCALDPLSETKCTLKSFTVEKGIYQTSNFRVQPTESIVRFPNITNLCPFGEVFNATRFASVYAWNRKRISNCVADYSVLYNSASFSTFKCYGVSPTKLNDLCFTNVYADSFVIRGDEVRQIAPGQTGKIADYNYKLPDDFTGCVIAWNSNNLDSKVGGNYNYLYRLFRKSNLKPFERDISTEIYQAGSTPCNGVEGFNCYFPLQSYGFQPTNGVGYQPYRVVVLSFELLHAPATVCGPKKSTNLVKNKCVNFNFNGLTGTGVLTESNKKFLPFQQFGRDIADTTDAVRDPQTLEILDITPCSFGGVSVITPGTNTSNQVAVLYQGVNCTEVPVAIHADQLTPTWRVYSTGSNVFQTRAGCLIGAEHVNNSYECDIPIGAGICASYQTQTNSPRRARSVASQSIIAYTMSLGAENSVAYSNNSIAICTNFTISVTTEILPVSMTKTSVDCTMYICGDSTECSNLLLQYGSFCTQLNRALTGIAVEQDKNTQEVFAQVKQIYKTPPIKDFGGFNFSQILPDPSKPSKRSFIEDLLFNKVTLADAGFIKQYGDCLGDIAARDLICAQKFNGLTVLPPLLTDEMIAQYTSALLAGTITSGWTFGAGAALQIPFAMQMAYRFNGIGVTQNVLYENQKLIANQFNSAIGKIQDSLSSTASALGKLQDVVNQNAQALNTLVKQLSSNFGAISSVLNDILSRLDKVEAEVQIDRLITGRLQSLQTYVTQQLIRAAEIRASANLAATKMSECVLGQSKRVDFCGKGYHLMSFPQSAPHGVVFLHVTYVCAQEKNFTTAPAICHDGKAHFPREGVFVSNGTHWFVTQRNFYEPQIITTDNTFVSGNCDVVIGIVNNTVYDPLQPELDSFKEELDKYFKNHTSPDVDLGDISGINASVVNIQKEIDRLNEVAKNLNESLIDLQELGKYEQYIKGGGGSDIDPYKEFGSSYQLLNFLPLDFFPDLNALVDTATALYEEELTGREHCSPHHTAIRQALVCWDELTKLIAWMSSNITSEQVRTIIVNHVNDTWGLKVRQSLWFHLSCLTFGQHTVQEFLVSFGVWIRTPAPYRPPNAPILSTLPEHTVIC

SEQ ID NO: 7165 - protein, 1365 aa, Artificial Sequence
  SARS-CoV-2/Congo/94/2020__EPI_ISL_417947 spike protein (1-1211)(P715C_P1069C) WhcAg construct
MFVFLVLLPLVSSQCVNLTTRTQLPPAYTNSFTRGVYYPDKVFRSSVLHSTQDLFLPFFSNVTWFHAIHVSGTNGTKRFDNPVLPFNDGVYFASTEKSNIIRGWIFGTTLDSKTQSLLIVNNATNVVIKVCEFQFCNDPFLGVYYHKNNKSWMESEFRVYSSANNCTFEYVSQPFLMDLEGKQGNFKNLREFVFKNIDGYFKIYSKHTPINLVRDLPQGFSALEPLVDLPIGINITRFQTLLALHRSYLTPGDSSSGWTAGAAAYYVGYLQPRTFLLKYNENGTITDAVDCALDPLSETKCTLKSFTVEKGIYQTSNFRVQPTESIVRFPNITNLCPFGEVFNATRFASVYAWNRKRISNCVADYSVLYNSASFSTFKCYGVSPTKLNDLCFTNVYADSFVIRGDEVRQIAPGQTGKIADYNYKLPDDFTGCVIAWNSNNLDSKVGGNYNYLYRLFRKSNLKPFERDISTEIYQAGSTPCNGVEGFNCYFPLQSYGFQPTNGVGYQPYRVVVLSFELLHAPATVCGPKKSTNLVKNKCVNFNFNGLTGTGVLTESNKKFLPFQQFGRDIADTTDAVRDPQTLEILDITPCSFGGVSVITPGTNTSNQVAVLYQGVNCTEVPVAIHADQLTPTWRVYSTGSNVFQTRAGCLIGAEHVNNSYECDIPIGAGICASYQTQTNSPRRARSVASQSIIAYTMSLGAENSVAYSNNSIAICTNFTISVTTEILPVSMTKTSVDCTMYICGDSTECSNLLLQYGSFCTQLNRALTGIAVEQDKNTQEVFAQVKQIYKTPPIKDFGGFNFSQILPDPSKPSKRSFIEDILFNKVTLADAGFIKQYGDCLGDIAARDLICAQKFNGLTVLPPLLTDEMIAQYTSALLAGTITSGWTFGAGAALQIPFAMQMAYRFNGIGVTQNVLYENQKLIANQFNSAIGKIQDSLSSTASALGKLQDVVNQNAQALNTLVKQLSSNFGAISSVLNDILSRLDKVEAEVQIDRLITGRLQSLQTYVTQQLIRAAEIRASANLAATKMSECVLGQSKRVDFCGKGYHLMSFPQSAPHGVVFLHVTYVCAQEKNFTTAPAICHDGKAHFPREGVFVSNGTHWFVTQRNFYEPQIITTDNTFVSGNCDVVIGIVNNTVYDPLQPELDSFKEELDKYFKNHTSPDVDLGDISGINASVVNIQKEIDRLNEVAKNLNESLIDLQELGKYEQYIKGGGGSDIDPYKEFGSSYQLLNFLPLDFFPDLNALVDTATALYEEELTGREHCSPHHTAIRQALVCWDELTKLIAWMSSNITSEQVRTIIVNHVNDTWGLKVRQSLWFHLSCLTFGQHTVQEFLVSFGVWIRTPAPYRPPNAPILSTLPEHTVIC

SEQ ID NO: 7166 - protein, 1365 aa, Artificial Sequence
  SARS-CoV-2/Congo/158/2020__EPI_ISL_417950 spike protein (1-1211)(P715C_P1069C) WhcAg construct
MFVFLVLLPLVSSQCVNLTTRTQLPPAYTNSFTRGVYYPDKVFRSSVLHSTQDLFLPFFSNVTWFHAIHVSGTNGTKRFDNPVLPFNDGVYFASTEKSNIIRGWIFGTTLDSKTQSLLIVNNATNVVIKVCEFQFCNDPFLGVYYHKNNKSWMESEFRVYSSANNCTFEYVSQPFLMDLEGKQGNFKNLREFVFKNIDGYFKIYSKHTPINLVRDLPQGFSALEPLVDLPIGINITRFQTLLALHRSYLTPGDSSSGWTAGAAAYYVGYLQPRTFLLKYNENGTITDAVDCALDPLSETKCTLKSFTVEKGIYQTSNFRVQPTESIVRFPNITNLCPFGEVFNATRFASVYAWNRKRISNCVADYSVLYNSASFSTFKCYGVSPTKLNDLCFTNVYADSFVIRGDEVRQIAPGQTGKIADYNYKLPDDFTGCVIAWNSNNLDSKVGGNYNYLYRLFRKSNLKPFERDISTEIYQAGSTPCNGVEGFNCYFPLQSYGFQPTNGVGYQPYRVVVLSFELLHAPATVCGPKKSTNLVKNKCVNFNFNGLTGTGVLTESNKKFLPFQQFGRDIADTTDAVRDPQTLEILDITPCSFGGVSVITPGTNTSNQVAVLYQDVNCTEVPVAIHADQLTPTWRVYSTGSNVFQTRAGCLIGAEHVNNSYECDIPIGAGICASYQTQTNSPRRARSVASQSIIAYTMSLGAENSVAYSNNSIAICTNFTISVTTEILPVSMTKTSVDCTMYICGDSTECSNLLLQYGSFCTQLNRALTGIAVEQDKNTQEVFAQVKQIYKTPPIKDFGGFNFSQILPDPSKPSKRSFIEDLLFNKVTLADAGFIKQYGDCLGDIAARDLICAQKFNGLTVLPPLLTDEMIAQYTSALLAGTITSGWTFGAGAALQIPFAMQMAYRFNGIGVTQNVLYENQKLIANQFNSAIGKIQDSLSSTASALGKLQDVVNQNAQALNTLVKQLSSNFGAISSVLNDILSRLDKVEAEVQIDRLITGRLQSLQTYVTQQLIRAAEIRASANLAATKMSECVLGQSKRVDFCGKGYHLMSFPQSAPHGVVFLHVTYVCAQEKNFTTAPAICHDGKAHFPREGVFVSNGTHWFVTQRNFYEPQIITTDNTFLSGNCDVVIGIVNNTVYDPLQPELDSFKEELDKYFKNHTSPDVDLGDISGINASVVNIQKEIDRLNEVAKNLNESLIDLQELGKYEQYIKGGGGSDIDPYKEFGSSYQLLNFLPLDFFPDLNALVDTATALYEEELTGREHCSPHHTAIRQALVCWDELTKLIAWMSSNITSEQVRTIIVNHVNDTWGLKVRQSLWFHLSCLTFGQHTVQEFLVSFGVWIRTPAPYRPPNAPILSTLPEHTVIC

SEQ ID NO: 7167 - protein, 1365 aa, Artificial Sequence
  SARS-CoV-2/USA/UT-00034/2020__EPI_ISL_417977 spike protein (1-1211)(P715C_P1069C) WhcAg construct
MFVFLVLLPLVSSQCVNLTTRTQLPPAYTNSFTRGVYYPDKVFRSSVLHSTQDLFLPFFSNVTWFHAIHVSGTNGTKRFDNPVLPFNDGVYFASTEKSNIIRGWIFGTTLDSKTQSLLIVNNATNVVIKVCEFQFCNDPFLGVYYYKNNKSWMESEFRVYSSANNCTFEYVSQPFLMDLEGKQGNFKNLREFVFKNIDGYFKIYSKHTPINLVRDLPQGFSALEPLVDLPIGINITRFQTLLALHRSYLTPGDSSSGWTAGAAAYYVGYLQPRTFLLKYNENGTITDAVDCALDPLSETKCTLKSFTVEKGIYQTSNFRVQPTESIVRFPNITNLCPFGEVFNATRFASVYAWNRKRISNCVADYSVLYNSASFSTFKCYGVSPTKLNDLCFTNVYADSFVIRGDEVRQIAPGQTGKIADYNYKLPDDFTGCVIAWNSNNLDSKVGGNYNYLYRLFRKSNLKPFERDISTEIYQAGSTPCNGVEGFNCYFPLQSYGFQPTNGVGYQPYRVVVLSFELLHAPATVCGPKKSTNLVKNKCVNFNFNGLTGTGVLTESNKKFLPFQQFGRDIADTTDAVRDPQTLEILDITPCSFGGVSVITPGTNTSNQVAVLYQGVNCTEVPVAIHADQLTPTWRVYSTGSNVFQTRAGCLIGAEHVNNSYECDIPIGAGICASYQTQTNSPRRARSVASQSIIAYTMSLGAENSVAYSNNSIAICTNFTISVTTEILPVSMTKTSVDCTMYICGDSTECSNLLLQYGSFCTQLNRALTGIAVEQDKNTQEVFAQVKQIYKTPPIKDFGGFNFSQILPDPSKPSKRSFIEDLLFNKVTLADAGFIKQYGDCLGDIAARDLICAQKFNGLTVLPPLLTDEMIAQYTSALLAGTITSGWTFGAGAALQIPFAMQMAYRFNGIGVTQNVLYENQKLIANQFNSAIGKIQDSLSSTASALGKLQDVVNQNAQALNTLVKQLSSNFGAISSVLNDILSRLDKVEAEVQIDRLITGRLQSLQTYVTQQLIRAAEIRASANLAATKMSECVLGQSKRVDFCGKGYHLMSFPQSAPHGVVFLHVTYVCAQEKNFTTAPAICHDGKAHFPREGVFVSNGTHWFVTQRNFYEPQIITTDNTFVSGNCDVVIGIVNNTVYDPLQPELDSFKEELDKYFKNHTSPDVDLGDISGINASVVNIQKEIDRLNEVAKNLNESLIDLQELGKYEQYIKGGGGSDIDPYKEFGSSYQLLNFLPLDFFPDLNALVDTATALYEEELTGREHCSPHHTAIRQALVCWDELTKLIAWMSSNITSEQVRTIIVNHVNDTWGLKVRQSLWFHLSCLTFGQHTVQEFLVSFGVWIRTPAPYRPPNAPILSTLPEHTVIC

SEQ ID NO: 7168 - protein, 1365 aa, Artificial Sequence
  SARS-CoV-2/USA/UT-00033/2020__EPI_ISL_417976 spike protein (1-1211)(P715C_P1069C) WhcAg construct
MFVFLVLLPLVSSQCVNLTTRTQLPPAYTNSFTRGVYYPDKVFRSSVLHSTQDLFLPFFSNVTWFHAIHVSGTNGTKRFDNPVLPFNDGVYFASTEKSNIIRGWIFGTTLDSKTQSLLIVNNATNVVIKVCEFQFCNDPFLGVYYHKNNKSWMESEFRVYSSANNCTFEYVSQPFLMDLEGKQGNFKNLREFVFKNIDGYFKIYSKHTPINLVRDLPQGFSALEPLVDLPIGINITRFQTLLALHRSYLTPGDSSSGLTAGAAAYYVGYLQPRTFLLKYNENGTITDAVDCALDPLSETKCTLKSFTVEKGIYQTSNFRVQPTESIVRFPNITNLCPFGEVFNATRFASVYAWNRKRISNCVADYSVLYNSASFSTFKCYGVSPTKLNDLCFTNVYADSFVIRGDEVRQIAPGQTGKIADYNYKLPDDFTGCVIAWNSNNLDSKVGGNYNYLYRLFRKSNLKPFERDISTEIYQAGSTPCNGVEGFNCYFPLQSYGFQPTNGVGYQPYRVVVLSFELLHAPATVCGPKKSTNLVKNKCVNFNFNGLTGTGVLTESNKKFLPFQQFGRDIADTTDAVRDPQTLEILDITPCSFGGVSVITPGTNTSNQVAVLYQGVNCTEVPVAIHADQLTPTWRVYSTGSNVFQTRAGCLIGAEHVNNSYECDIPIGAGICASYQTQTNSPRRARSVASQSIIAYTMSLGAENSVAYSNNSIAICTNFTISVTTEILPVSMTKTSVDCTMYICGDSTECSNLLLQYGSFCTQLNRALTGIAVEQDKNTQEVFAQVKQIYKTPPIKDFGGFNFSQILPDPSKPSKRSFIEDLLFNKVTLADAGFIKQYGDCLGDIAARDLICAQKFNGLTVLPPLLTDEMIAQYTSALLAGTITSGWTFGAGAALQIPFAMQMAYRFNGIGVTQNVLYENQKLIANQFNSAIGKIQDSLSSTASALGKLQDVVNQNAQALNTLVKQLSSNFGAISSVLNDILSRLDKVEAEVQIDRLITGRLQSLQTYVTQQLIRAAEIRASANLAATKMSECVLGQSKRVDFCGKGYHLMSFPQSAPHGVVFLHVTYVCAQEKNFTTAPAICHDGKAHFPREGVFVSNGTHWFVTQRNFYEPQIITTDNTFVSGNCDVVIGIVNNTVYDPLQPELDSFKEELDKYFKNHTSPDVDLGDISGINASVVNIQKEIDRLNEVAKNLNESLIDLQELGKYEQYIKGGGGSDIDPYKEFGSSYQLLNFLPLDFFPDLNALVDTATALYEEELTGREHCSPHHTAIRQALVCWDELTKLIAWMSSNITSEQVRTIIVNHVNDTWGLKVRQSLWFHLSCLTFGQHTVQEFLVSFGVWIRTPAPYRPPNAPILSTLPEHTVIC

SEQ ID NO: 7169 - protein, 1365 aa, Artificial Sequence
  SARS-CoV-2/USA/WI-13/2020__EPI_ISL_417516 spike protein (1-1211)(P715C_P1069C) WhcAg construct
MFVFLVLLPLVSSQCVNLTTRTQLPPAYTNSFTRGVYYPDKVFRSSVLHSTQDLFLPFFSNVTWFHAIHVSGTNGTKRFDNPVLPFNDGVYFASTEKSNIIRGWIFGTTLDSKTQSLLIVNNATNVVIKVCEFQFCNDPFLGVYYHKNNKSWMESEFRVYSSANNCTFEYVSQPFLMDLEGKQGNFKNLREFVFKNIDGYFKIYSKHTPINLVRDLPQGFSALEPLVDLPIGINITRFQTLLALHRSYLTPGDSSSGWTAGAAAYYVGYLQPRTFLLKYNENGTITDAVDCALDPLSETKCTLKSFTVEKGIYQTSNFRVLPTESIVRFPNITNLCPFGEVFNATRFASVYAWNRKRISNCVADYSVLYNSASFSTFKCYGVSPTKLNDLCFTNVYADSFVIRGDEVRQIAPGQTGKIADYNYKLPDDFTGCVIAWNSNNLDSKVGGNYNYLYRLFRKSNLKPFERDISTEIYQAGSTPCNGVEGFNCYFPLQSYGFQPTNGVGYQPYRVVVLSFELLHAPATVCGPKKSTNLVKNKCVNFNFNGLTGTGVLTESNKKFLPFQQFGRDIADTTDAVRDPQTLEILDITPCSFGGVSVITPGTNTSNQVAVLYQGVNCTEVPVAIHADQLTPTWRVYSTGSNVFQTRAGCLIGAEHVNNSYECDIPIGAGICASYQTQTNSPRRARSVASQSIIAYTMSLGAENSVAYSNNSIAICTNFTISVTTEILPVSMTKTSVDCTMYICGDSTECSNLLLQYGSFCTQLNRALTGIAVEQDKNTQEVFAQVKQIYKTPPIKDFGGFNFSQILPDPSKPSKRSFIEDLLFNKVTLADAGFIKQYGDCLGDIAARDLICAQKFNGLTVLPPLLTDEMIAQYTSALLAGTITSGWTFGAGAALQIPFAMQMAYRFNGIGVTQNVLYENQKLIANQFNSAIGKIQDSLSSTASALGKLQDVVNQNAQALNTLVKQLSSNFGAISSVLNDILSRLDKVEAEVQIDRLITGRLQSLQTYVTQQLIRAAEIRASANLAATKMSECVLGQSKRVDFCGKGYHLMSFPQSAPHGVVFLHVTYVCAQEKNFTTAPAICHDGKAHFPREGVFVSNGTHWFVTQRNFYEPQIITTDNTFVSGNCDVVIGIVNNTVYDPLQPELDSFKEELDKYFKNHTSPDVDLGDISGINASVVNIQKEIDRLNEVAKNLNESLIDLQELGKYEQYIKGGGGSDIDPYKEFGSSYQLLNFLPLDFFPDLNALVDTATALYEEELTGREHCSPHHTAIRQALVCWDELTKLIAWMSSNITSEQVRTIIVNHVNDTWGLKVRQSLWFHLSCLTFGQHTVQEFLVSFGVWIRTPAPYRPPNAPILSTLPEHTVIC

SEQ ID NO: 7170 - protein, 1364 aa, Artificial Sequence
  SARS-CoV-2/India/1-27/2020__EPI_ISL_413522 spike protein (1-1210)(P714C_P1068C) WhcAg construct
MFVFLVLLPLVSSQCVNLTTRTQLPPAYTNSFTRGVYYPDKVFRSSVLHSTQDLFLPFFSNVTWFHAIHVSGTNGTKRFDNPVLPFNDGVYFASTEKSNIIRGWIFGTTLDSKTQSLLIVNNATNVVIKVCEFQFCNDPFLGVYHKNNKSWMESEFRVYSSANNCTFEYVSQPFLMDLEGKQGNFKNLREFVFKNIDGYFKIYSKHTPINLVRDLPQGFSALEPLVDLPIGINITRFQTLLALHRSYLTPGDSSSGWTAGAAAYYVGYLQPRTFLLKYNENGTITDAVDCALDPLSETKCTLKSFTVEKGIYQTSNFRVQPTESIVRFPNITNLCPFGEVFNATRFASVYAWNRKRISNCVADYSVLYNSASFSTFKCYGVSPTKLNDLCFTNVYADSFVIRGDEVIQIAPGQTGKIADYNYKLPDDFTGCVIAWNSNNLDSKVGGNYNYLYRLFRKSNLKPFERDISTEIYQAGSTPCNGVEGFNCYFPLQSYGFQPTNGVGYQPYRVVVLSFELLHAPATVCGPKKSTNLVKNKCVNFNFNGLTGTGVLTESNKKFLPFQQFGRDIADTTDAVRDPQTLEILDITPCSFGGVSVITPGTNTSNQVAVLYQDVNCTEVPVAIHADQLTPTWRVYSTGSNVFQTRAGCLIGAEHVNNSYECDIPIGAGICASYQTQTNSPRRARSVASQSIIAYTMSLGAENSVAYSNNSIAICTNFTISVTTEILPVSMTKTSVDCTMYICGDSTECSNLLLQYGSFCTQLNRALTGIAVEQDKNTQEVFAQVKQIYKTPPIKDFGGFNFSQILPDPSKPSKRSFIEDLLFNKVTLADAGFIKQYGDCLGDIAARDLICAQKFNGLTVLPPLLTDEMIAQYTSALLAGTITSGWTFGAGAALQIPFAMQMAYRFNGIGVTQNVLYENQKLIANQFNSAIGKIQDSLSSTASALGKLQDVVNQNAQALNTLVKQLSSNFGAISSVLNDILSRLDKVEAEVQIDRLITGRLQSLQTYVTQQLIRAAEIRASANLAATKMSECVLGQSKRVDFCGKGYHLMSFPQSAPHGVVFLHVTYVCAQEKNFTTAPAICHDGKAHFPREGVFVSNGTHWFVTQRNFYEPQIITTDNTFVSGNCDVVIGIVNNTVYDPLQPELDSFKEELDKYFKNHTSPDVDLGDISGINASVVNIQKEIDRLNEVAKNLNESLIDLQELGKYEQYIKGGGGSDIDPYKEFGSSYQLLNFLPLDFFPDLNALVDTATALYEEELTGREHCSPHHTAIRQALVCWDELTKLIAWMSSNITSEQVRTIIVNHVNDTWGLKVRQSLWFHLSCLTFGQHTVQEFLVSFGVWIRTPAPYRPPNAPILSTLPEHTVIC

SEQ ID NO: 7171 - protein, 1359 aa, Artificial Sequence
  SARS-CoV-2/pangolin/Guangxi/P4L/2017__EPI_ISL_410538 spike protein (1-1205)(P709C_P1063C) WhcAg construct
MFVFLFVLPLVSSQCVNLTTRTGIPPGYTNSSTRGVYYPDKVFRSSILHLTQDLFLPFFSNVTWFNTINYQGGFKKFDNPVLPFNDGVYFASTEKSNIIRGWIFGTTLDARTQSLLIVNNATNVVIKVCEFQFCTDPFLGVYYHNNNKTWVENEFRVYSSANNCTFEYISQPFLMDLEGKQGNFKNLREFVFKNVDGYFKIYSKHTPIDLVRDLPRGFAALEPLVDLPIGINITRFQTLLALHRSYLTPGNLESGWTTGAAAYYVGYLQQRTFLLSYNQNGTITDAVDCSLDPLSETKCTLKSLTVEKGIYQTSNFRVQPTISIVRFPNITNLCPFGEVFNASKFASVYAWNRKRISNCVADYSVLYNSTSFSTFKCYGVSPTKLNDLCFTNVYADSFVVKGDEVRQIAPGQTGVIADYNYKLPDDFTGCVIAWNSVKQDALTGGNYGYLYRLFRKSKLKPFERDISTEIYQAGSTPCNGQVGLNCYYPLERYGFHPTTGVNYQPFRVVVLSFELLNGPATVCGPKLSTTLVKDKCVNFNFNGLTGTGVLTTSKKQFLPFQQFGRDISDTTDAVRDPQTLEILDITPCSFGGVSVITPGTNTSNQVAVLYQDVNCTEVPMAIHAEQLTPAWRVYSAGANVFQTRAGCLVGAEHVNNSYECDIPVGAGICASYHSMSSLRSVNQRSIIAYTMSLGAENSVAYSNNSIAICTNFTISVTTEILPVSMTKTSVDCTMYICGDSIECSNLLLQYGSFCTQLNRALTGIAVEQDKNTQEVFAQVKQIYKTPPIKDFGGFNFSQILPDPSKPSKRSFIEDLLFNKVTLADAGFIKQYGDCLGDIAARDLICAQKFNGLTVLPPLLTDEMIAQYTSALLAGTITSGWTFGAGAALQIPFAMQMAYRFNGIGVTQNVLYENQKLIANQFNSAIGKIQDSLSSTASALGKLQDVVNQNAQALNTLVKQLSSNFGAISSVLNDILSRLDKVEAEVQIDRLITGRLQSLQTYVTQQLIRAAEIRASANLAATKMSECVLGQSKRVDFCGKGYHLMSFPQSAPHGVVFLHVTYVCAQEKNFTTAPAICHEGKAHFPREGVFVSNGTHWFITQRNFYEPQIITTDNTFVSGSCDVVIGIVNNTVYDPLQPELDSFKEELDKYFKNHTSPDVDLGDISGINASVVNIQKEIDRLNEVAKNLNESPIDLQELGKYEQYIKGGGGSDIDPYKEFGSSYQLLNFLPLDFFPDLNALVDTATALYEEELTGREHCSPHHTAIRQALVCWDELTKLIAWMSSNITSEQVRTIIVNHVNDTWGLKVRQSLWFHLSCLTFGQHTVQEFLVSFGVWIRTPAPYRPPNAPILSTLPEHTVIC

SEQ ID NO: 7172 - protein, 1359 aa, Artificial Sequence
  SARS-CoV-2/pangolin/Guangxi/P5L/2017__EPI_ISL_410540 spike protein (1-1205)(P709C_P1063C) WhcAg construct
MFVFLFVLPLVSSQCVNLTTRTGIPPGYTNSSTRGVYYPDKVFRSSILHLTQDLFLPFFSNVTWFNTINYQGGFKKFDNPVLPFNDGVYFASTEKSNIIRGWIFGTTLDARTQSLLIVNNATNVVIKVCEFQFCTDPFLGVYYHNNNKTWVENEFRVYSSANNCTFEYISQPFLMDLEGKQGNFKNLREFVFKNVDGYFKIYSKHTPIDLVRDLPRGFAALEPLVDLPIGINITRFQTLLALHRSYLTPGKLESGWTTGAAAYYVGYLQQRTFLLSYNQNGTITDAVDCSLDPLSETKCTLKSLTVEKGIYQTSNFRVQPTISIVRFPNITNLCPFGEVFNASKFASVYAWNRKRISNCVADYSVLYNSTSFSTFKCYGVSPTKLNDLCFTNVYADSFVVKGDEVRQIAPGQTGVIADYNYKLPDDFTGCVIAWNSVKQDALTGGNYGYLYRLFRKSKLKPFERDISTEIYQAGSTPCNGQVGLNCYYPLERYGFHPTTGVNYQPFRVVVLSFELLNGPATVCGPKLSTTLVKDKCVNFNFNGLTGTGVLTTSKKQFLPFQQFGRDISDTTDAVRDPQTLEILDITPCSFGGVSVITPGTNTSNQVAVLYQDVNCTEVPMAIHAEQLTPAWRVYSAGANVFQTRAGCLVGAEHVNNSYECDIPVGAGICASYHSMSSFRSVNQRSIIAYTMSLGAENSVAYSNNSIAICTNFTISVTTEILPVSMTKTSVDCTMYICGDSIECSNLLLQYGSFCTQLNRALTGIAVEQDKNTQEVFAQVKQIYKTPPIKDFGGFNFSQILPDPSKPSKRSFIEDLLFNKVTLADAGFIKQYGDCLGDIAARDLICAQKFNGLTVLPPLLTDEMIAQYTSALLAGTITSGWTFGAGAALQIPFAMQMAYRFNGIGVTQNVLYENQKLIANQFNSAIGKIQDSLSSTASALGKLQDVVNQNAQALNTLVKQLSSNFGAISSVLNDILSRLDKVEAEVQIDRLITGRLQSLQTYVTQQLIRAAEIRASANLAATKMSECVLGQSKRVDFCGKGYHLMSFPQSAPHGVVFLHVTYVCAQEKNFTTAPAICHEGKAHFPREGVFVSNGTHWFITQRNFYEPQIITTDNTFVSGSCDVVIGIVNNTVYDPLQPELDSFKEELDKYFKNHTSPDVDLGDISGINASVVNIQKEIDRLNEVAKNLNESLIDLQELGKYEQYIKGGGGSDIDPYKEFGSSYQLLNFLPLDFFPDLNALVDTATALYEEELTGREHCSPHHTAIRQALVCWDELTKLIAWMSSNITSEQVRTIIVNHVNDTWGLKVRQSLWFHLSCLTFGQHTVQEFLVSFGVWIRTPAPYRPPNAPILSTLPEHTVIC

SEQ ID NO: 7173 - protein, 1359 aa, Artificial Sequence
  SARS-CoV-2/pangolin/Guangxi/P5E/2017__EPI_ISL_410541 spike protein (1-1205)(P709C_P1063C) WhcAg construct
MFVFLFVLPLVSSQCVNLTTRTGIPPGYTNSSTRGVYYPDKVFRSSILHLTQDLFLPFFSNVTWFNTITYQGGSKKFDNPVLPFNDGVYFASTEKSNIIRGWIFGTTLDARTQSLLIVNNATNVVIKVCEFQFCTDPFLGVYYHNNNKTWVENEFRVYSSANNCTFEYISQPFLMDLEGKQGNFKNLREFVFKNVDGYFKIYSKHTPIDLVRDLPRGFAALEPLVDLPIGINITRFQTLLALHRSYLTPGKLESGWTTGAAAYYVGYLQQRTFLLSYNQNGTITDAVDCSLDPLSETKCTLKSLTVEKGIYQTSNFRVQPTISIVRFPNITNLCPFGEVFNASKFASVYAWNRKRISNCVADYSVLYNSTSFSTFKCYGVSPTKLNDLCFTNVYADSFVVKGDEVRQIAPGQTGVIADYNYKLPDDFTGCVIAWNSVKQDALTGDNYGYLYRLFRKSKLKPFERDISTEIYQAGSTPCNGQVGLNCYYPLERYGFHPTTGVNYQPFRVVVLSFELLNGPATVCGPKLSTTLVKDKCVNFNFNGLTGTGVLTTSKKQFLPFQQFGRDISDTTDAVRDPQTLEILDITPCSFGGVSVITPGTNTSNQVAVLYQDVNCTEVPMAIHAEQLTPAWRVYSAGANVFQTRAGCLVGAEHVNNSYECDIPVGAGICASYHSMSSFRSVNQRSIIAYTMSLGAENSVAYSNNSIAICTNFTISVTTEILPVSMTKTSVDCTMYICGDSIECSNLLLQYGSFCTQLNRALTGIAVEQDKNTQEVFAQVKQIYKTPPIKDFGGFNFSQILPDPSKPSKRSFIEDLLFNKVTLADAGFIKQYGDCLGDIAARDLICAQKFNGLTVLPPLLTDEMIAQYTSALLAGTITSGWTFGAGAALQIPFAMQMAYRFNGIGVTQNVLYENQKLIANQFNSAIGKIQDSLSSTASALGKLQDVVNQNAQALNTLVKQLSSNFGAISSVLNDILSRLDKVEAEVQIDRLITGRLQSLQTYVTQQLIRAAEIRASANLAATKMSECVLGQSKRVDFCGKGYHLMSFPQSAPHGVVFLHVTYVCAQEKNFTTAPAICHEGKAHFPREGVFVSNGTHWFITQRNFYEPQIITTDNTFVSGSCDVVIGIVNNTVYDPLQPELDSFKEELDKYFKNHTSPDVDLGDISGINASVVNIQKEIDRLNEVAKNLNESLIDLQELGKYEQYIKGGGGSDIDPYKEFGSSYQLLNFLPLDFFPDLNALVDTATALYEEELTGREHCSPHHTAIRQALVCWDELTKLIAWMSSNITSEQVRTIIVNHVNDTWGLKVRQSLWFHLSCLTFGQHTVQEFLVSFGVWIRTPAPYRPPNAPILSTLPEHTVIC

SEQ ID NO: 7174 - protein, 1357 aa, Artificial Sequence
  SARS-CoV-2/pangolin/Guangxi/P1E/2017__EPI_ISL_410539 spike protein (1-1203)(P707C_P1061C) WhcAg construct
MFVFLFVLPLVSSQCVNLTTRTGIQPGYTNSSTRGVYYPDKVFRSSILHLTQDLFLPFFSNVTWFNTINYQGGFKKFDNPVLPFNDGVYFASTEKSNIIRGWIFGTTLDARTQSLLIVNNATNVVIKVCEFQFCTDPFLGVYYHNNNKTWVENEFRVYSSANNCTFEYISQPFLMDLEGKQGNFKNLREFVFKNVDGYFKIYSKHTPIDLVRDLPRGFAALEPLVDLPIGINITRFQTLLALHRSYLTPGKLESGWTTGAAAYYVGYLQQRTFLLSYNQNGTITDAVDCSLDPLSETKCTLKSLTVEKGIYQTSNFRVQPTISIVRFPNITNLCPFGEVFNASKFASVYAWNRKRISNCVADYSVLYNSTSFSTFKCYGVSPTKLNDLCFTNVYADSFVVKGDEVRQIAPGQTGVIADYNYKLPDDFTGCVIAWNSVKQDALTGGNYLYRLFRKSKLKPFERDISTEIYQAGSTPCNGQVGLNCYYPLERYGFHPTTGVNYQPFRVVVLSFELLNGPATVCGPKLSTTLVKDKCVNFNFNGLTGTGVLTTSKKQFLPFQQFGRDISDTTDAVRDPQTLEILDITPCSFGGVSVITPGTNTSNQVAVLYQDVNCTEVPMAIHAEQLTPAWRVYSAGANVFQTRAGCLVGAEHVNNSYECDIPVGAGICASYHSMSSLRSVNQRSIIAYTMSLGAENSVAYSNNSIAICTNFTISVTTEILPVSMTKTSVDCTMYICGDSIECSNLLLQYGSFCTQLNRALTGIAVEQDKNTQEVFAQVKQIYKTPPIKDFGGFNFSQILPDPSKPSKRSFIEDLLFNKVTLADAGFIKQYGDCLGDIAARDLICAQKFNGLTVLPPLLTDEMIAQYTSALLAGTITSGWTFGAGAALQIPFAMQMAYRFNGIGVTQNVLYENQKLIANQFNSAIGKIQDSLSSTASALGKLQDVVNQNAQALNTLVKQLSSNFGAISSVLNDILSRLDKVEAEVQIDRLITGRLQSLQTYVTQQLIRAAEIRASANLAATKMSECVLGQSKRVDFCGKGYHLMSFPQSAPHGVVFLHVTYVCAQEKNFTTAPAICHEGKAHFPREGVFVSNGTHWFITQRNFYEPQIITTDNTFVSGSCDVVIGIVNNTVYDPLQPELDSFKEELDKYFKNHTSPDVDLGDISGINASVVNIQKEIDRLNEVAKNLNESLIDLQELGKYEQYIKGGGGSDIDPYKEFGSSYQLLNFLPLDFFPDLNALVDTATALYEEELTGREHCSPHHTAIRQALVCWDELTKLIAWMSSNITSEQVRTIIVNHVNDTWGLKVRQSLWFHLSCLTFGQHTVQEFLVSFGVWIRTPAPYRPPNAPILSTLPEHTVIC

SEQ ID NO: 7175 - protein, 1365 aa, Artificial Sequence
  SARS-CoV-2/Wuhan/WIV05/2019__EPI_ISL_402128 spike protein (1-1211)(G889C_L1034C) WhcAg construct
MFVFLVLLPLVSSQCVNLTTRTQLPPAYTNSFTRGVYYPDKVFRSSVLHSTQDLFLPFFSNVTWFHAIHVSGTNGTKRFDNPVLPFNDGVYFASTEKSNIIRGWIFGTTLDSKTQSLLIVNNATNVVIKVCEFQFCNDPFLGVYYHKNNKSWMESEFRVYSSANNCTFEYVSQPFLMDLEGKQGNFKNLREFVFKNIDGYFKIYSKHTPINLVRDLPQGFSALEPLVDLPIGINITRFQTLLALHRSYLTPGDSSSGWTAGAAAYYVGYLQPRTFLLKYNENGTITDAVDCALDPLSETKCTLKSFTVEKGIYQTSNFRVQPTESIVRFPNITNLCPFGEVFNATRFASVYAWNRKRISNCVADYSVLYNSASFSTFKCYGVSPTKLNDLCFTNVYADSFVIRGDEVRQIAPGQTGKIADYNYKLPDDFTGCVIAWNSNNLDSKVGGNYNYLYRLFRKSNLKPFERDISTEIYQAGSTPCNGVEGFNCYFPLQSYGFQPTNGVGYQPYRVVVLSFELLHAPATVCGPKKSTNLVKNKCVNFNFNGLTGTGVLTESNKKFLPFQQFGRDIADTTDAVRDPQTLEILDITPCSFGGVSVITPGTNTSNQVAVLYQDVNCTEVPVAIHADQLTPTWRVYSTGSNVFQTRAGCLIGAEHVNNSYECDIPIGAGICASYQTQTNSPRRARSVASQSIIAYTMSLGAENSVAYSNNSIAIPTNFTISVTTEILPVSMTKTSVDCTMYICGDSTECSNLLLQYGSFCTQLNRALTGIAVEQDKNTQEVFAQVKQIYKTPPIKDFGGFNFSQILPDPSKPSKRSFIEDLLFNKVTLADAGFIKQYGDCLGDIAARDLICAQKFNGLTVLPPLLTDEMIAQYTSALLAGTITSGWTFCAGAALQIPFAMQMAYRFNGIGVTQNVLYENQKLIANQFNSAIGKIQDSLSSTASALGKLQDVVNQNAQALNTLVKQLSSNFGAISSVLNDILSRLDKVEAEVQIDRLITGRLQSLQTYVTQQLIRAAEIRASANLAATKMSECVCGQSKRVDFCGKGYHLMSFPQSAPHGVVFLHVTYVPAQEKNFTTAPAICHDGKAHFPREGVFVSNGTHWFVTQRNFYEPQIITTDNTFVSGNCDVVIGIVNNTVYDPLQPELDSFKEELDKYFKNHTSPDVDLGDISGINASVVNIQKEIDRLNEVAKNLNESLIDLQELGKYEQYIKGGGGSDIDPYKEFGSSYQLLNFLPLDFFPDLNALVDTATALYEEELTGREHCSPHHTAIRQALVCWDELTKLIAWMSSNITSEQVRTIIVNHVNDTWGLKVRQSLWFHLSCLTFGQHTVQEFLVSFGVWIRTPAPYRPPNAPILSTLPEHTVIC

SEQ ID NO: 7176 - protein, 1361 aa, Artificial Sequence
  SARS-CoV-2/bat/Yunnan/RaTG13/2013__EPI_ISL_402131 spike protein (1-1207)(G885C_L1030C) WhcAg construct
MFVFLVLLPLVSSQCVNLTTRTQLPPAYTNSSTRGVYYPDKVFRSSVLHLTQDLFLPFFSNVTWFHAIHVSGTNGIKRFDNPVLPFNDGVYFASTEKSNIIRGWIFGTTLDSKTQSLLIVNNATNVVIKVCEFQFCNDPFLGVYYHKNNKSWMESEFRVYSSANNCTFEYVSQPFLMDLEGKQGNFKNLREFVFKNIDGYFKIYSKHTPINLVRDLPPGFSALEPLVDLPIGINITRFQTLLALHRSYLTPGDSSSGWTAGAAAYYVGYLQPRTFLLKYNENGTITDAVDCALDPLSETKCTLKSFTVEKGIYQTSNFRVQPTDSIVRFPNITNLCPFGEVFNATTFASVYAWNRKRISNCVADYSVLYNSTSFSTFKCYGVSPTKLNDLCFTNVYADSFVITGDEVRQIAPGQTGKIADYNYKLPDDFTGCVIAWNSKHIDAKEGGNFNYLYRLFRKANLKPFERDISTEIYQAGSKPCNGQTGLNCYYPLYRYGFYPTDGVGHQPYRVVVLSFELLNAPATVCGPKKSTNLVKNKCVNFNFNGLTGTGVLTESNKKFLPFQQFGRDIADTTDAVRDPQTLEILDITPCSFGGVSVITPGTNASNQVAVLYQDVNCTEVPVAIHADQLTPTWRVYSTGSNVFQTRAGCLIGAEHVNNSYECDIPIGAGICASYQTQTNSRSVASQSIIAYTMSLGAENSVAYSNNSIAIPTNFTISVTTEILPVSMTKTSVDCTMYICGDSTECSNLLLQYGSFCTQLNRALTGIAVEQDKNTQEVFAQVKQIYKTPPIKDFGGFNFSQILPDPSKPSKRSFIEDLLFNKVTLADAGFIKQYGDCLGDIAARDLICAQKFNGLTVLPPLLTDEMIAQYTSALLAGTITSGWTFCAGAALQIPFAMQMAYRFNGIGVTQNVLYENQKLIANQFNSAIGKIQDSLSSTASALGKLQDVVNQNAQALNTLVKQLSSNFGAISSVLNDILSRLDKVEAEVQIDRLITGRLQSLQTYVTQQLIRAAEIRASANLAATKMSECVCGQSKRVDFCGKGYHLMSFPQSAPHGVVFLHVTYVPAQEKNFTTAPAICHDGKAHFPREGVFVSNGTHWFVTQRNFYEPQIITTDNTFVSGSCDVVIGIVNNTVYDPLQPELDSFKEELDKYFKNHTSPDVDLGDISGINASVVNIQKEIDRLNEVAKNLNESLIDLQELGKYEQYIKGGGGSDIDPYKEFGSSYQLLNFLPLDFFPDLNALVDTATALYEEELTGREHCSPHHTAIRQALVCWDELTKLIAWMSSNITSEQVRTIIVNHVNDTWGLKVRQSLWFHLSCLTFGQHTVQEFLVSFGVWIRTPAPYRPPNAPILSTLPEHTVIC

SEQ ID NO: 7177 - protein, 1365 aa, Artificial Sequence
  SARS-CoV-2/Wuhan/HBCDC-HB-01/2019__EPI_ISL_402132 spike protein (1-1211)(G889C_L1034C) WhcAg construct
MFVFLVLLPLVSSQCVNLTTRTQLPPAYTNSITRGVYYPDKVFRSSVLHSTQDLFLPFFSNVTWFHAIHVSGTNGTKRFDNPVLPFNDGVYFASTEKSNIIRGWIFGTTLDSKTQSLLIVNNATNVVIKVCEFQFCNDPFLGVYYHKNNKSWMESEFRVYSSANNCTFEYVSQPFLMDLEGKQGNFKNLREFVFKNIDGYFKIYSKHTPINLVRDLPQGFSALEPLVDLPIGINITRFQTLLALHRSYLTPGDSSSGWTAGAAAYYVGYLQPRTFLLKYNENGTITDAVDCALDPLSETKCTLKSFTVEKGIYQTSNFRVQPTESIVRFPNITNLCPFGEVFNATRFASVYAWNRKRISNCVADYSVLYNSASFSTFKCYGVSPTKLNDLCFTNVYADSFVIRGDEVRQIAPGQTGKIADYNYKLPDDFTGCVIAWNSNNLDSKVGGNYNYLYRLFRKSNLKPFERDISTEIYQAGSTPCNGVEGFNCYFPLQSYGFQPTNGVGYQPYRVVVLSFELLHAPATVCGPKKSTNLVKNKCVNFNFNGLTGTGVLTESNKKFLPFQQFGRDIADTTDAVRDPQTLEILDITPCSFGGVSVITPGTNTSNQVAVLYQDVNCTEVPVAIHADQLTPTWRVYSTGSNVFQTRAGCLIGAEHVNNSYECDIPIGAGICASYQTQTNSPRRARSVASQSIIAYTMSLGAENSVAYSNNSIAIPTNFTISVTTEILPVSMTKTSVDCTMYICGDSTECSNLLLQYGSFCTQLNRALTGIAVEQDKNTQEVFAQVKQIYKTPPIKDFGGFNFSQILPDPSKPSKRSFIEDLLFNKVTLADAGFIKQYGDCLGDIAARDLICAQKFNGLTVLPPLLTDEMIAQYTSALLAGTITSGWTFCAGAALQIPFAMQMAYRFNGIGVTQNVLYENQKLIANQFNSAIGKIQDSLSSTASALGKLQDVVNQNAQALNTLVKQLSSNFGAISSVLNDILSRLDKVEAEVQIDRLITGRLQSLQTYVTQQLIRAAEIRASANLAATKMSECVCGQSKRVDFCGKGYHLMSFPQSAPHGVVFLHVTYVPAQEKNFTTAPAICHDGKAHFPREGVFVSNGTHWFVTQRNFYEPQIITTDNTFVSGNCDVVIGIVNNTVYDPLQPELDSFKEELDKYFKNHTSPDVDLGDISGINASVVNIQKEIDRLNEVAKNLNESLIDLQELGKYEQYIKGGGGSDIDPYKEFGSSYQLLNFLPLDFFPDLNALVDTATALYEEELTGREHCSPHHTAIRQALVCWDELTKLIAWMSSNITSEQVRTIIVNHVNDTWGLKVRQSLWFHLSCLTFGQHTVQEFLVSFGVWIRTPAPYRPPNAPILSTLPEHTVIC

SEQ ID NO: 7178 - protein, 1365 aa, Artificial Sequence
  SARS-CoV-2/Guangdong/20SF028/2020__EPI_ISL_403936 spike protein (1-1211)(G889C_L1034C) WhcAg construct
MFVFLVLLPLVSSQCVNLTTRTQLPPAYTNSFTRGVYYPDKVFRSSVLYSTQDLFLPFFSNVTWFHAIHVSGTNGTKRFDNPVLPFNDGVYFASTEKSNIIRGWIFGTTLDSKTQSLLIVNNATNVVIKVCEFQFCNDPFLGVYYHKNNKSWMESEFRVYSSANNCTFEYVSQPFLMDLEGKQGNFKNLREFVFKNIDGYFKIYSKHTPINLVRDLPQGFSALEPLVDLPIGINITRFQTLLALHRSYLTPGDSSSGWTAGAAAYYVGYLQPRTFLLKYNENGTITDAVDCALDPLSETKCTLKSFTVEKGIYQTSNFRVQPTESIVRFPNITNLCPFGEVFNATRFASVYAWNRKRISNCVADYSVLYNSASFSTFKCYGVSPTKLNDLCFTNVYADSFVIRGDEVRQIAPGQTGKIADYNYKLPDDFTGCVIAWNSNNLDSKVGGNYNYLYRLFRKSNLKPFERDISTEIYQAGSTPCNGVEGFNCYFPLQSYGFQPTNGVGYQPYRVVVLSFELLHAPATVCGPKKSTNLVKNKCVNFNFNGLTGTGVLTESNKKFLPFQQFGRDIADTTDAVRDPQTLEILDITPCSFGGVSVITPGTNTSNQVAVLYQDVNCTEVPVAIHADQLTPTWRVYSTGSNVFQTRAGCLIGAEHVNNSYECDIPIGAGICASYQTQTNSPRRARSVASQSIIAYTMSLGAENSVAYSNNSIAIPTNFTISVTTEILPVSMTKTSVDCTMYICGDSTECSNLLLQYGSFCTQLNRALTGIAVEQDKNTQEVFAQVKQIYKTPPIKDFGGFNFSQILPDPSKPSKRSFIEDLLFNKVTLADAGFIKQYGDCLGDIAARDLICAQKFNGLTVLPPLLTDEMIAQYTSALLAGTITSGWTFCAGAALQIPFAMQMAYRFNGIGVTQNVLYENQKLIANQFNSAIGKIQDSLSSTASALGKLQDVVNQNAQALNTLVKQLSSNFGAISSVLNDILSRLDKVEAEVQIDRLITGRLQSLQTYVTQQLIRAAEIRASANLAATKMSECVCGQSKRVDFCGKGYHLMSFPQSAPHGVVFLHVTYVPAQEKNFTTAPAICHDGKAHFPREGVFVSNGTHWFVTQRNFYEPQIITTDNTFVSGNCDVVIGIVNNTVYDPLQPELDSFKEELDKYFKNHTSPDVDLGDISGINASVVNIQKEIDRLNEVAKNLNESLIDLQELGKYEQYIKGGGGSDIDPYKEFGSSYQLLNFLPLDFFPDLNALVDTATALYEEELTGREHCSPHHTAIRQALVCWDELTKLIAWMSSNITSEQVRTIIVNHVNDTWGLKVRQSLWFHLSCLTFGQHTVQEFLVSFGVWIRTPAPYRPPNAPILSTLPEHTVIC

SEQ ID NO: 7179 - protein, 1365 aa, Artificial Sequence
  SARS-CoV-2/Shenzhen/SZTH-001/2020__EPI_ISL_406592 spike protein (1-1211)(G889C_L1034C) WhcAg construct
MFVFLVLLPLVSSQCVNLTTRTQLPPAYTNSFTRGVYYPDKVFRSSVLHSTQDLFLPFFSNVTWFHAIHVSGTNGTKRFDNPVLPFNDGVYFASTEKSNIIRGWIFGTTLDSKTQSLLIVNNATNVVIKVCEFQFCNDPFLGVYYHKNNKSWMESEFRVYSSANNCTFEYVSQPFLMDLEGKQGNFKNLREFVFKNIDGYFKIYSKHTPINLVRDLPQGFSALEPLVDLPIGINITRFQTLLALHRSYLTPGDSSSGWTAGAAAYYVGYLQPRTFLLKYNENGTITDAVDCALDPLSETKCTLKSFTVEKGIYQTSNFRVQPTESIVRFPNITNLCPFGEVFNATRFASVYAWNRKRISNCVADYSVLYNSASFSTFKCYGVSPTKLNDLCFTNVYADSFVIRGDEVRQIAPGQTGKIADYNYKLPDDFTGCVIAWNSNNLDSKVGGNYNYLYRLFRKSNLKPFERDISTEIYQAGSTPCNGVEGFNCYFPLQSYGFQPTNGVGYQPYRVVVLSFELLHAPATVCGPKKSTNLVKNKCVNFNFNGLTGTGVLTESNKKFLPFQQFGRDIADTTDAVRDPQTLEILDITPCSFGGVSVITPGTNTSNQVAVLYQDVNCTEVPVAIHADQLTPTWRVYSTGSNVFQTRAGCLIGAEHVNNSYECDIPIGAGICASYQTQTNSPRRARSVASQSIIAYTMSLGAENSVAYSNNSIAIPTNFTISVTTEILPVSMTKTSVDCTMYICGDSTECSNLLLQYGSFCTQLNRALTGIAVEQDKNTQEVFAQVKQIYKTPPIKDFGGFNFSQILPDPSKPSKRSFIEDLLFNKVTLADAGFIKQYGDCLGDIAARDLICAQKFNGLTVLPPLLTDEMIAQYTSALLAGTITSGWTFCAGAALQIPFAMQMAYRFNGIGVTQNVLYENQKLIANQFNSAIGKIQDSLSSTASALGKLQDVVNQNAQALNTLVKQLSSNFGAISSVLNDILSRLDKVEAEVQIDRLITGRLQSLQTYVTQQLIRAAEIRASANLAATKMSECVCGQSKRVDFCGKGYHLMSFPQSAPHGVVFLHVTYVPAQEKNFTTAPAICHDGKAHFPREGVFVSNGTHWFVTQRNFYEPQIITTDNTFVSGNCDVLIGIVNNTVYDPLQPELDSFKEELDKYFKNHTSPDVDLGDISGINASVVNIQKEIDRLNEVAKNLNESLIDLQELGKYEQYIKGGGGSDIDPYKEFGSSYQLLNFLPLDFFPDLNALVDTATALYEEELTGREHCSPHHTAIRQALVCWDELTKLIAWMSSNITSEQVRTIIVNHVNDTWGLKVRQSLWFHLSCLTFGQHTVQEFLVSFGVWIRTPAPYRPPNAPILSTLPEHTVIC

SEQ ID NO: 7180 - protein, 1365 aa, Artificial Sequence
  SARS-CoV-2/Shenzhen/SZTH-004/2020__EPI_ISL_406595 spike protein (1-1211)(G889C_L1034C) WhcAg construct
MFVFLVLLPLVSSQCVNLTTRTQLPPAYTNSFTRGVYYPDKVFRSSVLHSTQDLFLPFFSNVTWFHAIHVSGTNGTKRFDNPVLPFNDGVYFASTEKSNIIRGWIFGTTLDSKTQSLLIVNNATNVVIKVCEFQFCNDPFLGVYYHKNNKSWMESEFRVYSSANNCTFEYVSQPFLMDLEGKQGNFKNLREFVFKNIDGYFKIYSKHTPINLVRDLPQGFSALEPLVDLPIGINITRFQTLLALHRSYLTPGDSSSGWTAGAAAYYVGYLQPRTFLLKYNENGTITDAVDCALDPLSETKCTLKSFTVEKGIYQTSNFRVQPTESIVRFPNITNLCPFGEVFNATRFASVYAWDRKRISNCVAYYSVLYNSASFSTFKCYGVSPTKLNDLCFTNVYADSFVIRGDEVRQIAPGQTGKIADYNYKLPDDFTGCVIAWNSNNLDSKVGGNYNYLYRLFRKSNLKPFERDISTEIYQAGSTPCNGVEGFNCYFPLQSYGFQPTNGVGYQPYRVVVLSFELLHAPATVCGPKKSTNLVKNKCVNFNFNGLTGTGVLTESNKKFLPFQQFGRDIADTTDAVRDPQTLEILDITPCSFGGVSVITPGTNTSNQVAVLYQDVNCTEVPVAIHADQLTPTWRVYSTGSNVFQTRAGCLIGAEHVNNSYECDIPIGAGICASYQTQTNSPRRARSVASQSIIAYTMSLGAENSVAYSNNSIAIPTNFTISVTTEILPVSMTKTSVDCTMYICGDSTECSNLLLQYGSFCTQLNRALTGIAVEQDKNTQEVFAQVKQIYKTPPIKDFGGFNFSQILPDPSKPSKRSFIEDLLFNKVTLADAGFIKQYGDCLGDIAARDLICAQKFNGLTVLPPLLTDEMIAQYTSALLAGTITSGWTFCAGAALQIPFAMQMAYRFNGIGVTQNVLYENQKLIANQFNSAIGKIQDSLSSTASALGKLQDVVNQNAQALNTLVKQLSSNFGAISSVLNDILSRLDKVEAEVQIDRLITGRLQSLQTYVTQQLIRAAEIRASANLAATKMSECVCGQSKRVDFCGKGYHLMSFPQSAPHGVVFLHVTYVPAQEKNFTTAPAICHDGKAHFPREGVFVSNGTHWFVTQRNFYEPQIITTDNTFVSGNCDVVIGIVNNTVYDPLQPELDSFKEELDKYFKNHTSPDVDLGDISGINASVVNIQKEIDRLNEVAKNLNESLIDLQELGKYEQYIKGGGGSDIDPYKEFGSSYQLLNFLPLDFFPDLNALVDTATALYEEELTGREHCSPHHTAIRQALVCWDELTKLIAWMSSNITSEQVRTIIVNHVNDTWGLKVRQSLWFHLSCLTFGQHTVQEFLVSFGVWIRTPAPYRPPNAPILSTLPEHTVIC

SEQ ID NO: 7181 - protein, 1365 aa, Artificial Sequence
  SARS-CoV-2/France/IDF0372/2020__EPI_ISL_406596 spike protein (1-1211)(G889C_L1034C) WhcAg construct
MFVFLVLLPLVSSQCVNLTTRTQLPPAYTNSFTRGVYYPDKVFRSSVLHSTQDLFLPFFSNVTWFHAIHVSGTNGTKRFDNPVLPFNDGVYFASTEKSNIIRGWIFGTTLDSKTQSLLIVNNATNVVIKVCEFQFCNDPFLGVYYHKNNKSWMESEFRVYSSANNCTFEYVSQPFLMDLEGKQGNFKNLREFVFKNIDGYFKIYSKHTPINLVRDLPQGFSALEPLVDLPIGINITRFQTLLALHRSYLTPGDSSSGWTAGAAAYYVGYLQPRTFLLKYNENGTITDAVDCALDPLSETKCTLKSFTVEKGIYQTSNFRVQPTESIVRFPNITNLCPFGEVFNATRFASVYAWNRKRISNCVADYSFLYNSASFSTFKCYGVSPTKLNDLCFTNVYADSFVIRGDEVRQIAPGQTGKIADYNYKLPDDFTGCVIAWNSNNLDSKVGGNYNYLYRLFRKSNLKPFERDISTEIYQAGSTPCNGVEGFNCYFPLQSYGFQPTNGVGYQPYRVVVLSFELLHAPATVCGPKKSTNLVKNKCVNFNFNGLTGTGVLTESNKKFLPFQQFGRDIADTTDAVRDPQTLEILDITPCSFGGVSVITPGTNTSNQVAVLYQDVNCTEVPVAIHADQLTPTWRVYSTGSNVFQTRAGCLIGAEHVNNSYECDIPIGAGICASYQTQTNSPRRARSVASQSIIAYTMSLGAENSVAYSNNSIAIPTNFTISVTTEILPVSMTKTSVDCTMYICGDSTECSNLLLQYGSFCTQLNRALTGIAVEQDKNTQEVFAQVKQIYKTPPIKDFGGFNFSQILPDPSKPSKRSFIEDLLFNKVTLADAGFIKQYGDCLGDIAARDLICAQKFNGLTVLPPLLTDEMIAQYTSALLAGTITSGWTFCAGAALQIPFAMQMAYRFNGIGVTQNVLYENQKLIANQFNSAIGKIQDSLSSTASALGKLQDVVNQNAQALNTLVKQLSSNFGAISSVLNDILSRLDKVEAEVQIDRLITGRLQSLQTYVTQQLIRAAEIRASANLAATKMSECVCGQSKRVDFCGKGYHLMSFPQSAPHGVVFLHVTYVPAQEKNFTTAPAICHDGKAHFPREGVFVSNGTHWFVTQRNFYEPQIITTDNTFVSGNCDVVIGIVNNTVYDPLQPELDSFKEELDKYFKNHTSPDVDLGDISGINASVVNIQKEIDRLNEVAKNLNESLIDLQELGKYEQYIKGGGGSDIDPYKEFGSSYQLLNFLPLDFFPDLNALVDTATALYEEELTGREHCSPHHTAIRQALVCWDELTKLIAWMSSNITSEQVRTIIVNHVNDTWGLKVRQSLWFHLSCLTFGQHTVQEFLVSFGVWIRTPAPYRPPNAPILSTLPEHTVIC

SEQ ID NO: 7182 - protein, 1365 aa, Artificial Sequence
  SARS-CoV-2/Australia/VIC01/2020__EPI_ISL_406844 spike protein (1-1211)(G889C_L1034C) WhcAg construct
MFVFLVLLPLVSSQCVNLTTRTQLPPAYTNSFTRGVYYPDKVFRSSVLHSTQDLFLPFFSNVTWFHAIHVSGTNGTKRFDNPVLPFNDGVYFASTEKSNIIRGWIFGTTLDSKTQSLLIVNNATNVVIKVCEFQFCNDPFLGVYYHKNNKSWMESEFRVYSSANNCTFEYVSQPFLMDLEGKQGNFKNLREFVFKNIDGYFKIYSKHTPINLVRDLPQGFSALEPLVDLPIGINITRFQTLLALHRRYLTPGDSSSGWTAGAAAYYVGYLQPRTFLLKYNENGTITDAVDCALDPLSETKCTLKSFTVEKGIYQTSNFRVQPTESIVRFPNITNLCPFGEVFNATRFASVYAWNRKRISNCVADYSVLYNSASFSTFKCYGVSPTKLNDLCFTNVYADSFVIRGDEVRQIAPGQTGKIADYNYKLPDDFTGCVIAWNSNNLDSKVGGNYNYLYRLFRKSNLKPFERDISTEIYQAGSTPCNGVEGFNCYFPLQSYGFQPTNGVGYQPYRVVVLSFELLHAPATVCGPKKSTNLVKNKCVNFNFNGLTGTGVLTESNKKFLPFQQFGRDIADTTDAVRDPQTLEILDITPCSFGGVSVITPGTNTSNQVAVLYQDVNCTEVPVAIHADQLTPTWRVYSTGSNVFQTRAGCLIGAEHVNNSYECDIPIGAGICASYQTQTNSPRRARSVASQSIIAYTMSLGAENSVAYSNNSIAIPTNFTISVTTEILPVSMTKTSVDCTMYICGDSTECSNLLLQYGSFCTQLNRALTGIAVEQDKNTQEVFAQVKQIYKTPPIKDFGGFNFSQILPDPSKPSKRSFIEDLLFNKVTLADAGFIKQYGDCLGDIAARDLICAQKFNGLTVLPPLLTDEMIAQYTSALLAGTITSGWTFCAGAALQIPFAMQMAYRFNGIGVTQNVLYENQKLIANQFNSAIGKIQDSLSSTASALGKLQDVVNQNAQALNTLVKQLSSNFGAISSVLNDILSRLDKVEAEVQIDRLITGRLQSLQTYVTQQLIRAAEIRASANLAATKMSECVCGQSKRVDFCGKGYHLMSFPQSAPHGVVFLHVTYVPAQEKNFTTAPAICHDGKAHFPREGVFVSNGTHWFVTQRNFYEPQIITTDNTFVSGNCDVVIGIVNNTVYDPLQPELDSFKEELDKYFKNHTSPDVDLGDISGINASVVNIQKEIDRLNEVAKNLNESLIDLQELGKYEQYIKGGGGSDIDPYKEFGSSYQLLNFLPLDFFPDLNALVDTATALYEEELTGREHCSPHHTAIRQALVCWDELTKLIAWMSSNITSEQVRTIIVNHVNDTWGLKVRQSLWFHLSCLTFGQHTVQEFLVSFGVWIRTPAPYRPPNAPILSTLPEHTVIC

SEQ ID NO: 7183 - protein, 1365 aa, Artificial Sequence
  SARS-CoV-2/Germany/BavPat1/2020__EPI_ISL_406862 spike protein (1-1211)(G889C_L1034C) WhcAg construct
MFVFLVLLPLVSSQCVNLTTRTQLPPAYTNSFTRGVYYPDKVFRSSVLHSTQDLFLPFFSNVTWFHAIHVSGTNGTKRFDNPVLPFNDGVYFASTEKSNIIRGWIFGTTLDSKTQSLLIVNNATNVVIKVCEFQFCNDPFLGVYYHKNNKSWMESEFRVYSSANNCTFEYVSQPFLMDLEGKQGNFKNLREFVFKNIDGYFKIYSKHTPINLVRDLPQGFSALEPLVDLPIGINITRFQTLLALHRSYLTPGDSSSGWTAGAAAYYVGYLQPRTFLLKYNENGTITDAVDCALDPLSETKCTLKSFTVEKGIYQTSNFRVQPTESIVRFPNITNLCPFGEVFNATRFASVYAWNRKRISNCVADYSVLYNSASFSTFKCYGVSPTKLNDLCFTNVYADSFVIRGDEVRQIAPGQTGKIADYNYKLPDDFTGCVIAWNSNNLDSKVGGNYNYLYRLFRKSNLKPFERDISTEIYQAGSTPCNGVEGFNCYFPLQSYGFQPTNGVGYQPYRVVVLSFELLHAPATVCGPKKSTNLVKNKCVNFNFNGLTGTGVLTESNKKFLPFQQFGRDIADTTDAVRDPQTLEILDITPCSFGGVSVITPGTNTSNQVAVLYQGVNCTEVPVAIHADQLTPTWRVYSTGSNVFQTRAGCLIGAEHVNNSYECDIPIGAGICASYQTQTNSPRRARSVASQSIIAYTMSLGAENSVAYSNNSIAIPTNFTISVTTEILPVSMTKTSVDCTMYICGDSTECSNLLLQYGSFCTQLNRALTGIAVEQDKNTQEVFAQVKQIYKTPPIKDFGGFNFSQILPDPSKPSKRSFIEDLLFNKVTLADAGFIKQYGDCLGDIAARDLICAQKFNGLTVLPPLLTDEMIAQYTSALLAGTITSGWTFCAGAALQIPFAMQMAYRFNGIGVTQNVLYENQKLIANQFNSAIGKIQDSLSSTASALGKLQDVVNQNAQALNTLVKQLSSNFGAISSVLNDILSRLDKVEAEVQIDRLITGRLQSLQTYVTQQLIRAAEIRASANLAATKMSECVCGQSKRVDFCGKGYHLMSFPQSAPHGVVFLHVTYVPAQEKNFTTAPAICHDGKAHFPREGVFVSNGTHWFVTQRNFYEPQIITTDNTFVSGNCDVVIGIVNNTVYDPLQPELDSFKEELDKYFKNHTSPDVDLGDISGINASVVNIQKEIDRLNEVAKNLNESLIDLQELGKYEQYIKGGGGSDIDPYKEFGSSYQLLNFLPLDFFPDLNALVDTATALYEEELTGREHCSPHHTAIRQALVCWDELTKLIAWMSSNITSEQVRTIIVNHVNDTWGLKVRQSLWFHLSCLTFGQHTVQEFLVSFGVWIRTPAPYRPPNAPILSTLPEHTVIC

SEQ ID NO: 7184 - protein, 1365 aa, Artificial Sequence
  SARS-CoV-2/Wuhan/HBCDC-HB-02/2020__EPI_ISL_412978 spike protein (1-1211)(G889C_L1034C) WhcAg construct
MFVFLVLLPLVSSQCVNLTTRTQLPPAYTNSFTRGVYYPDKVFRSSVLHSTQDLFLPFFSNVTWFHAIHVSGTNGTKRFDNPVLPFNDGVYFASTEKSNIIRGWIFGTTLDSKTQSLLIVNNATNVVIKVCEFQFCNDPFLGVYYHKNNKSWMESEFRVYSSANNCTFEYVSQPFLMDLEGKQGNFKNLREFVFKNIDGYFKIYSKHTPINLVRDLPQGFSALEPLVDLPIGINITRFQTLLALHRSYLTPGDSSSGWTAGAAAYYVGYLQPRTFLLKYNENGTITDAVDCALDPLSETKCTLKSFTVEKGIYQTSNFRVQPTESIVRFPNITNLCPFGEVFNATRFASVYAWNRKRISNCVADYSVLYNSASFSTFKCYGVSPTKLNDLCFTNVYADSFVIRGDEVRQIAPGQTGKIADYNYKLPDDFTGCVIAWNSNNLDSKVGGNYNYLYRLFRKSNLKPFERDISTEIYQAGSTPCNGVEGFNCYFPLQSYGFQPTNGVGYQPYRVVVLSFELLHAPATVCGPKKSTNLVKNKCVNFNFNGLTGTGVLTESNKKFLPFQQFGRDIADTTDAVRDPQTLEILDITPCSFGGVSVITPGTNTSNQVAVLYQDVNCTEVPVAIHADQLTPTWRVYSTGSNVFQTRAGCLIGAEHVNNSYECDIPIGAGICASYQTQTNSPRRARSVASQSIIAYTMSLGAENSVAYSNNSIAIPTNFTISVTTEILPVSMTKTSVDCTMYICGDSTECSNFLLQYGSFCTQLNRALTGIAVEQDKNTQEVFAQVKQIYKTPPIKDFGGFNFSQILPDPSKPSKRSFIEDLLFNKVTLADAGFIKQYGDCLGDIAARDLICAQKFNGLTVLPPLLTDEMIAQYTSALLAGTITSGWTFCAGAALQIPFAMQMAYRFNGIGVTQNVLYENQKLIANQFNSAIGKIQDSLSSTASALGKLQDVVNQNAQALNTLVKQLSSNFGAISSVLNDILSRLDKVEAEVQIDRLITGRLQSLQTYVTQQLIRAAEIRASANLAATKMSECVCGQSKRVDFCGKGYHLMSFPQSAPHGVVFLHVTYVPAQEKNFTTAPAICHDGKAHFPREGVFVSNGTHWFVTQRNFYEPQIITTDNTFVSGNCDVVIGIVNNTVYDPLQPELDSFKEELDKYFKNHTSPDVDLGDISGINASVVNIQKEIDRLNEVAKNLNESLIDLQELGKYEQYIKGGGGSDIDPYKEFGSSYQLLNFLPLDFFPDLNALVDTATALYEEELTGREHCSPHHTAIRQALVCWDELTKLIAWMSSNITSEQVRTIIVNHVNDTWGLKVRQSLWFHLSCLTFGQHTVQEFLVSFGVWIRTPAPYRPPNAPILSTLPEHTVIC

SEQ ID NO: 7185 - protein, 1365 aa, Artificial Sequence
  SARS-CoV-2/Australia/QLD02/2020__EPI_ISL_407896 spike protein (1-1211)(G889C_L1034C) WhcAg construct
MFVFLVLLPLVSSQCVNLTTRTQLPPAYTNSFTRGVYYPDKVFRSSVLHSTQDLFLPFFSNVTWFHAIHVSGTNGTKRFDNPVLPFNDGVYFASTEKSNIIRGWIFGTTLDSKTQSLLIVNNATNVVIKVCEFQFCNDPFLGVYYHKNNKSWMESEFRVYSSANNCTFEYVSQPFLMDLEGKQGNFKNLREFVFKNIDGYFKIYSKHTPINLVRDLPQGFSALEPLVDLPIGINITRFQTLLALHRSYLTPGDSSSGWTAGAAAYYVGYLQPRTFLLKYNENGTITDAVDCALDPLSETKCTLKSFTVEKGIYQTSNFRVQPTESIVRFPNITNLCPFGEVFNATRFASVYAWNRKRISNCVADYSVLYNSASFSTFKCYGVSPTKLNDLCFTNVYADSFVIRGDEVRQIAPGQTGKIADYNYKLPDDFTGCVIAWNSNNLDSKVGGNYNYLYRLFRKSNLKPFERDISTEIYQAGSTPCNGVEGFNCYFPLQSYGFQPTNGVGYQPYRVVVLSFELLHAPATVCGPKKSTNLVKNKCVNFNFNGLTGTGVLTESNKKFLPFQQFGRDIADTTDAVRDPQTLEILDITPCSFGGVSVITPGTNTSNQVAVLYQDVNCTEVPVAIHADQLTPTWRVYSTGSNVFQTRAGCLIGAEHVNNSYECDIPIGAGICASYQTQTNSPRRARSVASQSIIAYTMSLGAENSVAYSNNSIAIPTNFTISVTTEILPVSMTKTSVDCTMYICGDSTECSNLLLQYGSFCTQLNRALTGIAVEQDKNTQEVFAQVKQIYKTPPIKDFGGFNFSQILPDPSKPSKRSFIEDLLFNKVTLADAGFIKQYGDCLGDIAARDLICAQKFNGLTVLPPLLTDEMIAQYTSALLAGTITSGWTFCAGAALQIPFAMQMAYRFNGIGVTQNVLYENQKLIANQFNSAIGKIQDSLSSTASALGKLQDVVNQNAQALNTLVKQLSSNFGAISSVLNDILSRLDKVEAEVQIDRLITGRLQSLQTYVTQQLIRAAEIRASANLAATKMSECVCGQSKRVDFCGKGYHLMSFPQSAPHGVVFLHVTYVPAQEKNFTTAPAICHDGKAHFPREGVFVSNGTHWFVTQRNFYEPQIITTDNTFVSGNCDVVIGIVNNTVYDPLQLELDSFKEELDKYFKNHTSPDVDLGDISGINASVVNIQKEIDRLNEVAKNLNESLIDLQELGKYEQYIKGGGGSDIDPYKEFGSSYQLLNFLPLDFFPDLNALVDTATALYEEELTGREHCSPHHTAIRQALVCWDELTKLIAWMSSNITSEQVRTIIVNHVNDTWGLKVRQSLWFHLSCLTFGQHTVQEFLVSFGVWIRTPAPYRPPNAPILSTLPEHTVIC

SEQ ID NO: 7186 - protein, 1365 aa, Artificial Sequence
  SARS-CoV-2/India/1-31/2020__EPI_ISL_413523 spike protein (1-1211)(G889C_L1034C) WhcAg construct
MFVFLVLLPLVSSQCVNLTTRTQLPPAYTNSFTRGVYYPDKVFRSSVLHSTQDLFLPFFSNVTWFHAIHVSGTNGTKRFDNPVLPFNDGVYFASTEKSNIIRGWIFGTTLDSKTQSLLIVNNATNVVIKVCEFQFCNDPFLGVYYHKNNKSWMESEFRVYSSANNCTFEYVSQPFLMDLEGKQGNFKNLREFVFKNIDGYFKIYSKHTPINLVRDLPQGFSALEPLVDLPIGINITRFQTLLALHRSYLTPGDSSSGWTAGAAAYYVGYLQPRTFLLKYNENGTITDAVDCALDPLSETKCTLKSFTVEKGIYQTSNFRVQPTESIVRFPNITNLCPFGEVFNATRFASVYAWNRKRISNCVADYSVLYNSASFSTFKCYGVSPTKLNDLCFTNVYADSFVIRGDEVRQIAPGQTGKIADYNYKLPDDFTGCVIAWNSNNLDSKVGGNYNYLYRLFRKSNLKPFERDISTEIYQAGSTPCNGVEGFNCYFPLQSYGFQPTNGVGYQPYRVVVLSFELLHAPATVCGPKKSTNLVKNKCVNFNFNGLTGTGVLTESNKKFLPFQQFGRDIADTTDAVRDPQTLEILDITPCSFGGVSVITPGTNTSNQVAVLYQDVNCTEVPVAIHADQLTPTWRVYSTGSNVFQTRAGCLIGAEHVNNSYECDIPIGAGICASYQTQTNSPRRARSVASQSIIAYTMSLGAENSVAYSNNSIAIPTNFTISVTTEILPVSMTKTSVDCTMYICGDSTECSNLLLQYGSFCTQLNRALTGIAVEQDKNTQEVFAQVKQIYKTPPIKDFGGFNFSQILPDPSKPSKRSFIEDLLFNKVTLADAGFIKQYGDCLGDIAARDLICAQKFNGLTVLPPLLTDEMIAQYTSALLAGTITSGWTFCAGAALQIPFAMQMAYRFNGIGVTQNVLYENQKLIANQFNSVIGKIQDSLSSTASALGKLQDVVNQNAQALNTLVKQLSSNFGAISSVLNDILSRLDKVEAEVQIDRLITGRLQSLQTYVTQQLIRAAEIRASANLAATKMSECVCGQSKRVDFCGKGYHLMSFPQSAPHGVVFLHVTYVPAQEKNFTTAPAICHDGKAHFPREGVFVSNGTHWFVTQRNFYEPQIITTDNTFVSGNCDVVIGIVNNTVYDPLQPELDSFKEELDKYFKNHTSPDVDLGDISGINASVVNIQKEIDRLNEVAKNLNESLIDLQELGKYEQYIKGGGGSDIDPYKEFGSSYQLLNFLPLDFFPDLNALVDTATALYEEELTGREHCSPHHTAIRQALVCWDELTKLIAWMSSNITSEQVRTIIVNHVNDTWGLKVRQSLWFHLSCLTFGQHTVQEFLVSFGVWIRTPAPYRPPNAPILSTLPEHTVIC

SEQ ID NO: 7187 - protein, 1365 aa, Artificial Sequence
  SARS-CoV-2/Guangdong/GD2020087-P0008/2020__EPI_ISL_413863 spike protein (1-1211)(G889C_L1034C) WhcAg construct
MFVFLVLLPLVSSQCVNLTTRTQLPPAYTNSFTRGVYYPDKVFRSSVLHSTQDLFLPFFSNVTWFHAIHVSGTNGTKRFDNPVLPFNDGVYFASTEKSNIIRGWIFGTTLDSKTQSLLIVNNATNVVIKVCEFQFCNDPFLGVYYHKNNKSWMESEFRVYSSANNCTFEYVSQPFLMDLEGKQGNFKNLREFVFKNIDGYFKIYSKHTPINLVRDLPQGFSALEPLVDLPIGINITRFQTLLALHRSYLTPGDSSSGWTAGAAAYYVGYLQPRTFLLKYNENGTITDAVDCALDPLSETKCTLKSFTVEKGIYQTSNFRVQPTESIVRFPNITNLCPFGEVFNATRFASVYAWNRKRISNCVADYSVLYNSASFSTFKCYGVSPTKLNDLCFTNVYADSFVIRGDEVREIAPGQTGKIADYNYKLPDDFTGCVIAWNSNNLDSKVGGNYNYLYRLFRKSNLKPFERDISTEIYQAGSTPCNGVEGFNCYFPLQSYGFQPTNGVGYQPYRVVVLSFELLHAPATVCGPKKSTNLVKNKCVNFNFNGLTGTGVLTESNKKFLPFQQFGRDIADTTDAVRDPQTLEILDITPCSFGGVSVITPGTNTSNQVAVLYQDVNCTEVPVAIHADQLTPTWRVYSTGSNVFQTRAGCLIGAEHVNNSYECDIPIGAGICASYQTQTNSPRRARSVASQSIIAYTMSLGAENSVAYSNNSIAIPTNFTISVTTEILPVSMTKTSVDCTMYICGDSTECSNLLLQYGSFCTQLNRALTGIAVEQDKNTQEVFAQVKQIYKTPPIKDFGGFNFSQILPDPSKPSKRSFIEDLLFNKVTLADAGFIKQYGDCLGDIAARDLICAQKFNGLTVLPPLLTDEMIAQYTSALLAGTITSGWTFCAGAALQIPFAMQMAYRFNGIGVTQNVLYENQKLIANQFNSAIGKIQDSLSSTASALGKLQDVVNQNAQALNTLVKQLSSNFGAISSVLNDILSRLDKVEAEVQIDRLITGRLQSLQTYVTQQLIRAAEIRASANLAATKMSECVCGQSKRVDFCGKGYHLMSFPQSAPHGVVFLHVTYVPAQEKNFTTAPAICHDGKAHFPREGVFVSNGTHWFVTQRNFYEPQIITTDNTFVSGNCDVVIGIVNNTVYDPLQPELDSFKEELDKYFKNHTSPDVDLGDISGINASVVNIQKEIDRLNEVAKNLNESLIDLQELGKYEQYIKGGGGSDIDPYKEFGSSYQLLNFLPLDFFPDLNALVDTATALYEEELTGREHCSPHHTAIRQALVCWDELTKLIAWMSSNITSEQVRTIIVNHVNDTWGLKVRQSLWFHLSCLTFGQHTVQEFLVSFGVWIRTPAPYRPPNAPILSTLPEHTVIC

SEQ ID NO: 7188 - protein, 1365 aa, Artificial Sequence
  SARS-CoV-2/Sweden/01/2020__EPI_ISL_411951 spike protein (1-1211)(G889C_L1034C) WhcAg construct
MFVFLVLLPLVSSQCVNLTTRTQLPPAYTNSFTRGVYYPDKVFRSSVLHSTQDLFLPFFSNVTWFHAIHVSGTNGTKRFDNPVLPFNDGVYFASTEKSNIIRGWIFGTTLDSKTQSLLIVNNATNVVIKVCEFQFCNDPFLGVYYHKNNKSWMESEFRVYSSANNCTFEYVSQPFLMDLEGKQGNFKNLREFVFKNIDGYFKIYSKHTPINLVRDLPQGFSALEPLVDLPIGINITRFQTLLALHRSYLTPGDSSSGWTAGAAAYYVGYLQPRTFLLKYNENGTITDAVDCALDPLSETKCTLKSFTVEKGIYQTSNFRVQPTESIVRFPNITNLCPFGEVFNATRFASVYAWNRKRISNCVADYSVLYNSASFSTFKCYGVSPTKLNDLCFTNVYADSFVIRGDEVRQIAPGQTGKIADYNYKLPDDFTGCVIAWNSNNLDSKVGGNYNYLYRLFRKSNLKPFERDISTEIYQAGSTPCNGVEGFNCYFPLQSYGFQPTNGVGYQPYRVVVLSFELLHAPATVCGPKKSTNLVKNKCVNFNFNGLTGTGVLTESNKKFLPFQQFGRDIADTTDAVRDPQTLEILDITPCSFGGVSVITPGTNTSNQVAVLYQDVNCTEVPVAIHADQLTPTWRVYSTGSNVFQTRAGCLIGAEHVNNSYECDIPIGAGICASYQTQTNSPRRARSVASQSIIAYTMSLGAENSVAYSNNSIAIPTNFTISVTTEILPVSMTKTSVDCTMYICGDSTECSNLLLQYGSFCTQLNRALTGIAVEQDKNTQEVFAQVKQIYKTPPIKDCGGFNFSQILPDPSKPSKRSFIEDLLFNKVTLADAGFIKQYGDCLGDIAARDLICAQKFNGLTVLPPLLTDEMIAQYTSALLAGTITSGWTFCAGAALQIPFAMQMAYRFNGIGVTQNVLYENQKLIANQFNSAIGKIQDSLSSTASALGKLQDVVNQNAQALNTLVKQLSSNFGAISSVLNDILSRLDKVEAEVQIDRLITGRLQSLQTYVTQQLIRAAEIRASANLAATKMSECVCGQSKRVDFCGKGYHLMSFPQSAPHGVVFLHVTYVPAQEKNFTTAPAICHDGKAHFPREGVFVSNGTHWFVTQRNFYEPQIITTDNTFVSGNCDVVIGIVNNTVYDPLQPELDSFKEELDKYFKNHTSPDVDLGDISGINASVVNIQKEIDRLNEVAKNLNESLIDLQELGKYEQYIKGGGGSDIDPYKEFGSSYQLLNFLPLDFFPDLNALVDTATALYEEELTGREHCSPHHTAIRQALVCWDELTKLIAWMSSNITSEQVRTIIVNHVNDTWGLKVRQSLWFHLSCLTFGQHTVQEFLVSFGVWIRTPAPYRPPNAPILSTLPEHTVIC

SEQ ID NO: 7189 - protein, 1365 aa, Artificial Sequence
  SARS-CoV-2/Tianmen/HBCDC-HB-07/2020__EPI_ISL_412983 spike protein (1-1211)(G889C_L1034C) WhcAg construct
MFVFLVLLPLVSSQCVNLTTRTQLPPAYTNSFTRGVYYPDKVFRSSVLHSTQDLFLPFFSNVTWFHAIHVSGTNGTKRFDNPVLPFNDGVYFASTEKSNIIRGWIFGTTLDSKTQSLLIVNNATNVVIKVCEFQFCNDPFLGVYYHKNNKSWMESEFRVYSSANNCTFEYVSQPFLMDLEGKQGNFKNLREFVFKNIDGYFKIYSKHTPINLVRDLPQGFSALEPLVDLPIGINITRFQTLLALHRSYLTPGDSSSGWTAGAAAYYVGYLQPRTFLLKYNENGTITDAVDCALDPLSETKCTLKSFTVEKGIYQTSNFRVQPTESIVRFPNITNLCPFGEVFNATRFASVYAWNRKRISNCVADYSVLYNSASFSTFKCYGVSPTKLNDLCFTNVYADSFVIRGDEVRQIAPGQTGKIADYNYKLPDDFTGCVIAWNSNNLDSKVGGNYNYLYRLFRKSNLKPFERDISTEIYQAGSTPCNGVEGFNCYFPLQSYGFQPTNGVGYQPYRVVVLSFELLHAPATVCGPKKSTNLVKNKCVNFNFNGLTGTGVLTESNKKFLPFQQFGRDIADTTDAVRDPQTLEILDITPCSFGGVSVITPGTNTSNQVAVLYQDLNCTEVPVAIHADQLTPTWRVYSTGSNVFQTRAGCLIGAEHVNNSYECDIPIGAGICASYQTQTNSPRRARSVASQSIIAYTMSLGAENSVAYSNNSIAIPTNFTISVTTEILPVSMTKTSVDCTMYICGDSTECSNLLLQYGSFCTQLNRALTGIAVEQDKNTQEVFAQVKQIYKTPPIKDFGGFNFSQILPDPSKPSKRSFIEDLLFNKVTLADAGFIKQYGDCLGDIAARDLICAQKFNGLTVLPPLLTDEMIAQYTSALLAGTITSGWTFCAGAALQIPFAMQMAYRFNGIGVTQNVLYENQKLIANQFNSAIGKIQDSLSSTASALGKLQDVVNQNAQALNTLVKQLSSNFGAISSVLNDILSRLDKVEAEVQIDRLITGRLQSLQTYVTQQLIRAAEIRASANLAATKMSECVCGQSKRVDFCGKGYHLMSFPQSAPHGVVFLHVTYVPAQEKNFTTAPAICHDGKAHFPREGVFVSNGTHWFVTQRNFYEPQIITTDNTFVSGNCDVVIGIVNNTVYDPLQPELDSFKEELDKYFKNHTSPDVDLGDISGINASVVNIQKEIDRLNEVAKNLNESLIDLQELGKYEQYIKGGGGSDIDPYKEFGSSYQLLNFLPLDFFPDLNALVDTATALYEEELTGREHCSPHHTAIRQALVCWDELTKLIAWMSSNITSEQVRTIIVNHVNDTWGLKVRQSLWFHLSCLTFGQHTVQEFLVSFGVWIRTPAPYRPPNAPILSTLPEHTVIC

SEQ ID NO: 7190 - protein, 1365 aa, Artificial Sequence
  SARS-CoV-2/Hong Kong/case42_VM20002493/2020__EPI_ISL_414527 spike protein (1-1211)(G889C_L1034C) WhcAg construct
MFVFLVLLPLVSSQCVNLTTRTQLPPAYTNSFTRGVYYPDKVFRSSVLHSTQDLFLPFFSNVTWFHAIHVSGTNGTKRFDNPVLPFNDGVYFASTEKSNIIRGWIFGTTLDSKTQSLLIVNNATNVVIKVCEFQFCNDPFLGVYYHKNNKSWMESEFRVYSSANNCTFEYVSQPFLMDLEGKQGNFKNLREFVFKNIDGYFKIYSKHTPINLVRDLPQGFSALEPLVDLPIGINITRFQTLLALHRSYLTPGDSSSGWTAGAAAYYVGYLQPRTFLLKYNENGTITDAVDCALDPLSETKCTLKSFTVEKGIYQTSNFRVQPTESIVRFPNITNLCPFGEVFNATRFASVYAWNRKRISNCVADYSVLYNSASFSTFKCYGVSPTKLNDLCFTNVYADSFVIRGDEVRQIAPGQTGKIADYNYKLPDDFTGCVIAWNSNNLDSKVGGNYNYLYRLFRKSNLKPFERDISTEIYQAGSTPCNGVEGFNCYFPLQSYGFQPTNGVGYQPYRVVVLSFELLHAPATVCGPKKSTNLVKNKCVNFNFNGLTGTGVLTESNKKFLPFQQFGRDIADTTDAVRDPQTLEILDITPCSFGGVSVITPGTNTSNQVAVLYQDVNCTEVPVAIHADQLTPTWRVYSTGSNVFQTRAGCLIGAEHVNNSYECDIPIGAGICASYQTQTNSPRRARSVASQSIIAYTMSLGAENSVAYSNNSIAIPTNFAISVTTEILPVSMTKTSVDCTMYICGDSTECSNLLLQYGSFCTQLNRALTGIAVEQDKNTQEVFAQVKQIYKTPPIKDFGGFNFSQILPDPSKPSKRSFIEDLLFNKVTLADAGFIKQYGDCLGDIAARDLICAQKFNGLTVLPPLLTDEMIAQYTSALLAGTITSGWTFCAGAALQIPFAMQMAYRFNGIGVTQNVLYENQKLIANQFNSAIGKIQDSLSSTASALGKLQDVVNQNAQALNTLVKQLSSNFGAISSVLNDILSRLDKVEAEVQIDRLITGRLQSLQTYVTQQLIRAAEIRASANLAATKMSECVCGQSKRVDFCGKGYHLMSFPQSAPHGVVFLHVTYVPAQEKNFTTAPAICHDGKAHFPREGVFVSNGTHWFVTQRNFYEPQIITTDNTFVSGNCDVVIGIVNNTVYDPLQPELDSFKEELDKYFKNHTSPDVDLGDISGINASVVNIQKEIDRLNEVAKNLNESLIDLQELGKYEQYIKGGGGSDIDPYKEFGSSYQLLNFLPLDFFPDLNALVDTATALYEEELTGREHCSPHHTAIRQALVCWDELTKLIAWMSSNITSEQVRTIIVNHVNDTWGLKVRQSLWFHLSCLTFGQHTVQEFLVSFGVWIRTPAPYRPPNAPILSTLPEHTVIC

SEQ ID NO: 7191 - protein, 1365 aa, Artificial Sequence
  SARS-CoV-2/USA/CruiseA-23/2020__EPI_ISL_414482 spike protein (1-1211)(G889C_L1034C) WhcAg construct
MFVFLVLLPLVSSQCVNLTTRTQLPPAYTNSFTRGVYYPDKVFRSSVLHSTQDLFLPFFSNVTWFHAIHVSGTNGTKRFDNPVLPFNDGVYFASTEKSNIIRGWIFGTTLDSKTQSLLIVNNATNVVIKVCEFQFCNDPFLGVYYHKNNKSWMESEFRVYSSANNCTFEYVSQPFLMDLEVKQGNFKNLREFVFKNIDGYFKIYSKHTPINLVRDLPQGFSALEPLVDLPIGINITRFQTLLALHRSYLTPGDSSSGWTAGAAAYYVGYLQPRTFLLKYNENGTITDAVDCALDPLSETKCTLKSFTVEKGIYQTSNFRVQPTESIVRFPNITNLCPFGEVFNATRFASVYAWNRKRISNCVADYSVLYNSASFSTFKCYGVSPTKLNDLCFTNVYADSFVIRGDEVRQIAPGQTGKIADYNYKLPDDFTGCVIAWNSNNLDSKVGGNYNYLYRLFRKSNLKPFERDISTEIYQAGSTPCNGVEGFNCYFPLQSYGFQPTNGVGYQPYRVVVLSFELLHAPATVCGPKKSTNLVKNKCVNFNFNGLTGTGVLTESNKKFLPFQQFGRDIADTTDAVRDPQTLEILDITPCSFGGVSVITPGTNTSNQVAVLYQDVNCTEVPVAIHADQLTPTWRVYSTGSNVFQTRAGCLIGAEHVNNSYECDIPIGAGICASYQTQTNSPRRARSVASQSIIAYTMSLGAENSVAYSNNSIAIPTNFTISVTTEILPVSMTKTSVDCTMYICGDSTECSNLLLQYGSFCTQLNRALTGIAVEQDKNTQEVFAQVKQIYKTPPIKDFGGFNFSQILPDPSKPSKRSFIEDLLFNKVTLADAGFIKQYGDCLGDIAARDLICAQKFNGLTVLPPLLTDEMIAQYTSALLAGTITSGWTFCAGAALQIPFAMQMAYRFNGIGVTQNVLYENQKLIANQFNSAIGKIQDSLSSTASALGKLQDVVNQNAQALNTLVKQLSSNFGAISSVLNDILSRLDKVEAEVQIDRLITGRLQSLQTYVTQQLIRAAEIRASANLAATKMSECVCGQSKRVDFCGKGYHLMSFPQSAPHGVVFLHVTYVPAQEKNFTTAPAICHDGKAHFPREGVFVSNGTHWFVTQRNFYEPQIITTDNTFVSGNCDVVIGIVNNTVYDPLQPELDSFKEELDKYFKNHTSPDVDLGDISGINASVVNIQKEIDRLNEVAKNLNESLIDLQELGKYEQYIKGGGGSDIDPYKEFGSSYQLLNFLPLDFFPDLNALVDTATALYEEELTGREHCSPHHTAIRQALVCWDELTKLIAWMSSNITSEQVRTIIVNHVNDTWGLKVRQSLWFHLSCLTFGQHTVQEFLVSFGVWIRTPAPYRPPNAPILSTLPEHTVIC

SEQ ID NO: 7192 - protein, 1365 aa, Artificial Sequence
  SARS-CoV-2/Hong Kong/case85_VM20002868/2020__EPI_ISL_414519 spike protein (1-1211)(G889C_L1034C) WhcAg construct
MFVFLVLVPLVSSQCVNLTTRTQLPPAYTNSFTRGVYYPDKVFRSSVLHSTQDLFLPFFSNVTWFHAIHVSGTNGTKRFDNPVLPFNDGVYFASTEKSNIIRGWIFGTTLDSKTQSLLIVNNATNVVIKVCEFQFCNDPFLGVYYHKNNKSWMESEFRVYSSANNCTFEYVSQPFLMDLEGKQGNFKNLREFVFKNIDGYFKIYSKHTPINLVRDLPQGFSALEPLVDLPIGINITRFQTLLALHRSYLTPGDSSSGWTAGAAAYYVGYLQPRTFLLKYNENGTITDAVDCALDPLSETKCTLKSFTVEKGIYQTSNFRVQPTESIVRFPNITNLCPFGEVFNATRFASVYAWNRKRISNCVADYSVLYNSASFSTFKCYGVSPTKLNDLCFTNVYADSFVIRGDEVRQIAPGQTGKIADYNYKLPDDFTGCVIAWNSNNLDSKVGGNYNYLYRLFRKSNLKPFERDISTEIYQAGSTPCNGVEGFNCYFPLQSYGFQPTNGVGYQPYRVVVLSFELLHAPATVCGPKKSTNLVKNKCVNFNFNGLTGTGVLTESNKKFLPFQQFGRDIADTTDAVRDPQTLEILDITPCSFGGVSVITPGTNTSNQVAVLYQDVNCTEVPVAIHADQLTPTWRVYSTGSNVFQTRAGCLIGAEHVNNSYECDIPIGAGICASYQTQTNSPRRARSVASQSIIAYTMSLGAENSVAYSNNSIAIPTNFTISVTTEILPVSMTKTSVDCTMYICGDSTECSNLLLQYGSFCTQLNRALTGIAVEQDKNTQEVFAQVKQIYKTPPIKDFGGFNFSQILPDPSKPSKRSFIEDLLFNKVTLADAGFIKQYGDCLGDIAARDLICAQKFNGLTVLPPLLTDEMIAQYTSALLAGTITSGWTFCAGAALQIPFAMQMAYRFNGIGVTQNVLYENQKLIANQFNSAIGKIQDSLSSTASALGKLQDVVNQNAQALNTLVKQLSSNFGAISSVLNDILSRLDKVEAEVQIDRLITGRLQSLQTYVTQQLIRAAEIRASANLAATKMSECVCGQSKRVDFCGKGYHLMSFPQSAPHGVVFLHVTYVPAQEKNFTTAPAICHDGKAHFPREGVFVSNGTHWFVTQRNFYEPQIITTDNTFVSGNCDVVIGIVNNTVYDPLQPELDSFKEELDKYFKNHTSPDVDLGDISGINASVVNIQKEIDRLNEVAKNLNESLIDLQELGKYEQYIKGGGGSDIDPYKEFGSSYQLLNFLPLDFFPDLNALVDTATALYEEELTGREHCSPHHTAIRQALVCWDELTKLIAWMSSNITSEQVRTIIVNHVNDTWGLKVRQSLWFHLSCLTFGQHTVQEFLVSFGVWIRTPAPYRPPNAPILSTLPEHTVIC

SEQ ID NO: 7193 - protein, 1365 aa, Artificial Sequence; identical to SEQ ID NO: 7183
  SARS-CoV-2/England/200990660/2020__EPI_ISL_414523 spike protein (1-1211)(G889C_L1034C) WhcAg construct

SEQ ID NO: 7194 - protein, 1365 aa, Artificial Sequence
  SARS-CoV-2/Australia/NSW09/2020__EPI_ISL_413595 spike protein (1-1211)(G889C_L1034C) WhcAg construct
MFVFLVLLPLVSSQCVNLTTRTQLPPAYTNSFTRGVYYPDKVFRSSVLHSTQDLFLPFFSNVTWFHAIHVSGTNGTKRFDNPVLPFNDGVYFASTEKSNIIRGWIFGTTLDSKTQSLLIVNNATNVVIKVCEFQFCNDPFLGVYYHKNNKSWMESEFRVYSSANNCTFEYVSQPFLMDLEGKQGNFKNLREFVFKNIDGYFKIYSKHTPINLVRDLPQGFSALEPLVDLPIGINITRFQTLLALHRSYLTPGDSSSGWTAGAAAYYVGYLQPRTFLLKYNENGTITDAVDCALDPLSETKCTLKSFTVEKGIYQTSNFRVQPTESIVRFPNITNLCPFGEVFNATRFASVYAWNRKRISNCVADYSVLYNSASFSTFKCYGVSPTKLNDLCFTNVYADSFVIRGDEVRQIAPGQTGKIADYNYKLPDDFTGCVIAWNSNNLDSKVGGNYNYLYRLFRKSNLKPFERDISTEIYQAGSTPCNGVEGFNCYFPLQSYGFQPTNGVGYQPYRVVVLSFELLHAPATVCGPKKSTNLVKNKCVNFNFNGLTGTGVLTESNKKFLPFQQFGRDIADTTDAVRDPQTLEILDITPCSFGGVSVITPGTNTSNQVAVLYQDVNCTEVPVAIHADQLTPTWRVYSTGSNVFQTRAGCLIGAEHVNNSYECDIPIGAGICASYQTQTNSPRRARSVASQSIIAYTMSLGAENSVAYSNNSIAIPTNFTISVTTEILPVSMTKTSVDCTMYICGDSTECSNLLLQYGSFCTQLNRALTGIAVEQDKNTQEVFAQVKQIYKTPPIKDFGGFNFSQILPDPSKPSKRSFIEDLLFNKVTLADAGFIKQYGDCLGDIAARDLICAQKFNGLTVLPPLLTDEMIAQYTSALLAGTITSGWTFCAGAALQIPFAMQMAYRFNGIGVTQNVLYENQKLIANQFNSAIGKIQDSLSFTASALGKLQDVVNQNAQALNTLVKQLSSNFGAISSVLNDILSRLDKVEAEVQIDRLITGRLQSLQTYVTQQLIRAAEIRASANLAATKMSECVCGQSKRVDFCGKGYHLMSFPQSAPHGVVFLHVTYVPAQEKNFTTAPAICHDGKAHFPREGVFVSNGTHWFVTQRNFYEPQIITTDNTFVSGNCDVVIGIVNNTVYDPLQPELDSFKEELDKYFKNHTSPDVDLGDISGINASVVNIQKEIDRLNEVAKNLNESLIDLQELGKYEQYIKGGGGSDIDPYKEFGSSYQLLNFLPLDFFPDLNALVDTATALYEEELTGREHCSPHHTAIRQALVCWDELTKLIAWMSSNITSEQVRTIIVNHVNDTWGLKVRQSLWFHLSCLTFGQHTVQEFLVSFGVWIRTPAPYRPPNAPILSTLPEHTVIC

SEQ ID NO: 7195 - protein, 1365 aa, Artificial Sequence; identical to SEQ ID NO: 7175
  SARS-CoV-2/Australia/NSW10/2020__EPI_ISL_413596 spike protein (1-1211)(G889C_L1034C) WhcAg construct

SEQ ID NO: 7196 - protein, 1365 aa, Artificial Sequence
  SARS-CoV-2/Switzerland/1000477797/2020__EPI_ISL_413023 spike protein (1-1211)(G889C_L1034C) WhcAg construct
MFVFLVLLPLVSSQCVNLTTRTQLPPAYTNSFTRGVYYPDKVFRSSVLHSTQDLFLPFFSNVTWFHAIHVSGTNGTKRFDNPVLPFNDGVYFASTEKSNIIRGWIFGTTLDSKTQSLLIVNNATNVVIKVCEFQFCNDPFLGVYYHKNNKSWMESEFRVYSSANNCTFEYVSQPFLMDLEGKQGNFKNLREFVFKNIDGYFNIYSKHTPINLVRDLPQGFSALEPLVDLPIGINITRFQTLLALHRSYLTPGDSSSGWTAGAAAYYVGYLQPRTFLLKYNENGTITDAVDCALDPLSETKCTLKSFTVEKGIYQTSNFRVQPTESIVRFPNITNLCPFGEVFNATRFASVYAWNRKRISNCVADYSVLYNSASFSTFKCYGVSPTKLNDLCFTNVYADSFVIRGDEVRQIAPGQTGKIADYNYKLPDDFTGCVIAWNSNNLDSKVGGNYNYLYRLFRKSNLKPFERDISTEIYQAGSTPCNGVEGFNCYFPLQSYGFQPTNGVGYQPYRVVVLSFELLHAPATVCGPKKSTNLVKNKCVNFNFNGLTGTGVLTESNKKFLPFQQFGRDIADTTDAVRDPQTLEILDITPCSFGGVSVITPGTNTSNQVAVLYQGVNCTEVPVAIHADQLTPTWRVYSTGSNVFQTRAGCLIGAEHVNNSYECDIPIGAGICASYQTQTNSPRRARSVASQSIIAYTMSLGAENSVAYSNNSIAIPTNFTISVTTEILPVSMTKTSVDCTMYICGDSTECSNLLLQYGSFCTQLNRALTGIAVEQDKNTQEVFAQVKQIYKTPPIKDFGGFNFSQILPDPSKPSKRSFIEDLLFNKVTLADAGFIKQYGDCLGDIAARDLICAQKFNGLTVLPPLLTDEMIAQYTSALLAGTITSGWTFCAGAALQIPFAMQMAYRFNGIGVTQNVLYENQKLIANQFNSAIGKIQDSLSSTASALGKLQDVVNQNAQALNTLVKQLSSNFGAISSVLNDILSRLDKVEAEVQIDRLITGRLQSLQTYVTQQLIRAAEIRASANLAATKMSECVCGQSKRVDFCGKGYHLMSFPQSAPHGVVFLHVTYVPAQEKNFTTAPAICHDGKAHFPREGVFVSNGTHWFVTQRNFYEPQIITTDNTFVSGNCDVVIGIVNNTVYDPLQPELDSFKEELDKYFKNHTSPDVDLGDISGINASVVNIQKEIDRLNEVAKNLNESLIDLQELGKYEQYIKGGGGSDIDPYKEFGSSYQLLNFLPLDFFPDLNALVDTATALYEEELTGREHCSPHHTAIRQALVCWDELTKLIAWMSSNITSEQVRTIIVNHVNDTWGLKVRQSLWFHLSCLTFGQHTVQEFLVSFGVWIRTPAPYRPPNAPILSTLPEHTVIC

SEQ ID NO: 7197 - protein, 1365 aa, Artificial Sequence
  SARS-CoV-2/Belgium/BA-02291/2020__EPI_ISL_415159 spike protein (1-1211)(G889C_L1034C) WhcAg construct
MFVFLVLLPLVSSQCVNLTTRTQLPPAYTNSFTRGVYYPDKVFRSSVLHSTQDLFLPFFSNVTWFHAIHVSGTNGTKRFDNPVLPFNDGVYFASTEKSNIIRGWIFGTTLDSKTQSLLIVNNATNVVIKVCEFQFCNDPFLGVYYHKNNKSWMESEFRVYSSANNCTFEYVSQPFLMDLEGKQGNFKNLREFVFKNIDGYFKIYSKHTPINLVRDLPQGFSALEPLVDLPIGINITRFQTLLALHRSYLTPGDSSSGWTAGAAAYYVGYLQPRTFLLKYNENGTITDAVDCALDPLSETKCTLKSFTVEKGIYQTSNFRVQPTESIVRFPNITNLCPFGEVFNATRFASVYAWNRKRISNCVADYSVLYNSASFSTFKCYGVSPTKLNDLCFTNVYADSFVIRGDEVRQIAPGQTGKIADYNYKLPDDFTGCVIAWNSNNLDSKVGGNYNYLYRLFRRSNLKPFERDISTEIYQAGSTPCNGVEGFNCYFPLQSYGFQPTNGVGYQPYRVVVLSFELLPAPATVCGPKKSTNLVKNKCVNFNFNGLTGTGVLTESNKKFLPFQQFGRDIADTTDAVRDPQTLEILDITPCSFGGVSVITPGTNTSNQVAVLYQGVNCTEVPVAIHADQLTPTWRVYSTGSNVFQTRAGCLIGAEHVNNSYECDIPIGAGICASYQTQTNSPRRARSVASQSIIAYTMSLGAENSVAYSNNSIAIPTNFTISVTTEILPVSMTKTSVDCTMYICGDSTECSNLLLQYGSFCTQLNRALTGIAVEQDKNTQEVFAQVKQIYKTPPIKDFGGFNFSQILPDPSKPSKRSFIEDLLFNKVTLADAGFIKQYGDCLGDIAARDLICAQKFNGLTVLPPLLTDEMIAQYTSALLAGTITSGWTFCAGAALQIPFAMQMAYRFNGIGVTQNVLYENQKLIANQFNSAIGKIQDSLSSAAPALGKLQDVVNQNAQALNTLVKQLSSNFGAISSVLNDILSRLDKVEAEVQIDRLITGRLQSLQTYVTQQLIRAAEIRASANLAATKMSECVCGQSKRVDFCGKGYHLMSFPQSAPHGVVFLHVTYVPAQEKNFTTAPAICHDGKAHFPREGVFVSNGTHWFVTQRNFYEPQIITTDNTFVSGNCDVVIGIVNNTVYDPLQPELDSFKEELDKYFKNHTSPDVDLGDISGINASVVNIQKEIDRLNEVAKNLNESLIDLQELGKYEQYIKGGGGSDIDPYKEFGSSYQLLNFLPLDFFPDLNALVDTATALYEEELTGREHCSPHHTAIRQALVCWDELTKLIAWMSSNITSEQVRTIIVNHVNDTWGLKVRQSLWFHLSCLTFGQHTVQEFLVSFGVWIRTPAPYRPPNAPILSTLPEHTVIC

SEQ ID NO: 7198 - protein, 1365 aa, Artificial Sequence
  SARS-CoV-2/USA/WA8-UW5/2020__EPI_ISL_413486 spike protein (1-1211)(G889C_L1034C) WhcAg construct
MFVFLVLLPLVSSQCVNLTTRTQLPPAYTNSFTRGVYYPDKVFRSSVLHSTQDLFLPFFSNVTWFHAIHVSGTNGTKRFDNPVLPFNDGVYFASTEKSNIIRGWIFGTTLDSKTQSLLIVNNATNVVIKVCEFQFCNDPFLGVYYHKNNKSWMESEFRVYSSANNCTFEYVSQPFLMDLEGKQGNFKNLREFVFKNIDGYFKIYSKHTPINLVRDLPQGFSALEPLVDLPIGINITRFQTLLALHRSYLTPGDSSSGWTAGAAAYYVGYLQPRTFLLKYNENGTITDAVDCALDPLSETKCTLKSFTVEKGIYQTSNFRVQPTESIVRFPNITNLCPFGEVFNATRFASVYAWNRKRISNCVADYSVLYNSASFSTFKCYGVSPTKLNDLCFTNVYADSFVIRGDEVRQIAPGQTGKIADYNYKLPDDFTGCVIAWNSNNLDSKVGGNYNYLYRLFRKSNLKPFERDISTEIYQAGSTPCNGVEGFNCYFPLQSYGFQPTNGVGYQPYRVVVLSFELLHAPATVCGPKKSTNLVKNKCVNFNFNGLTGTGVLTESNKKFLPFQQFGRDIADTTDAVRDPQTLEILDITPCSFGGVSVITPGTNTSNQVAVLYQDVNCTEVPVAIHADQLTPTWRVYSTGSNVFQTRAGCLIGAEYVNNSYECDIPIGAGICASYQTQTNSPRRARSVASQSIIAYTMSLGAENSVAYSNNSIAIPTNFTISVTTEILPVSMTKTSVDCTMYICGDSTECSNLLLQYGSFCTQLNRALTGIAVEQDKNTQEVFAQVKQIYKTPPIKDFGGFNFSQILPDPSKPSKRSFIEDLLFNKVTLADAGFIKQYGDCLGDIAARDLICAQKFNGLTVLPPLLTDEMIAQYTSALLAGTITSGWTFCAGAALQIPFAMQMAYRFNGIGVTQNVLYENQKLIANQFNSAIGKIQDSLSSTASALGKLQDVVNQNAQALNTLVKQLSSNFGAISSVLNDILSRLDKVEAEVQIDRLITGRLQSLQTYVTQQLIRAAEIRASANLAATKMSECVCGQSKRVDFCGKGYHLMSFPQSAPHGVVFLHVTYVPAQEKNFTTAPAICHDGKAHFPREGVFVSNGTHWFVTQRNFYEPQIITTDNTFVSGNCDVVIGIVNNTVYDPLQPELDSFKEELDKYFKNHTSPDVDLGDISGINASVVNIQKEIDRLNEVAKNLNESLIDLQELGKYEQYIKGGGGSDIDPYKEFGSSYQLLNFLPLDFFPDLNALVDTATALYEEELTGREHCSPHHTAIRQALVCWDELTKLIAWMSSNITSEQVRTIIVNHVNDTWGLKVRQSLWFHLSCLTFGQHTVQEFLVSFGVWIRTPAPYRPPNAPILSTLPEHTVIC

SEQ ID NO: 7199 - protein, 1365 aa, Artificial Sequence
  SARS-CoV-2/England/20102000506/2020__EPI_ISL_415147 spike protein (1-1211)(G889C_L1034C) WhcAg construct
MFVFLVLLPLVSSQCVNLTTRTQLPPAYTNSFTRGVYYPDKVFRSSVLHSTQDLFLPFFSNVTWFHAIHVSGTNGTKRFDNPVLPFNDGVYFASTEKSNIIRGWIFGTTLDSKTQSLLIVNNATNVVIKVCEFQFCNDPFLGVYYHKNNKSWMESEFRVYSSANNCTFEYVSQPFLMDLEGKQGNFKNLREFVFKNIDGYFKIYSKHTPINLVRDLPQGFSALEPLVDLPIGINITRFQTLLALHRSYLTPGDSSSGWTAGAAAYYVGYLQPRTFLLKYNENGTITDAVDCALDPLSETKCTLKSFTVEKGIYQTSNFRVQPTESIVRFPNITNLCPFGEVFNATRFASVYAWNRKRISNCVADYSVLYNSASFSTFKCYGVSPTKLNDLCFTNVYADSFVIRGDEVRQIAPGQTGKIADYNYKLPDDFTGCVIAWNSNNLDSKVGGNYNYLYRLFRKSNLKPFERDISTEIYQAGSTPCNGVEGFNCYFPLQSYGFQPTNGVGYQPYRVVVLSFELLHAPATVCGPKKSTNLVKNKCVNFNFNGLTGTGVLTESNKKFLPFQQFGRDIADTTDAVRDPQTLEILDITPCSFGGVSVITPGTNTSNQVAVLYQGVNCTEVPVAIHADQLTPTWRVYSTGSNVFQTRAGCLIGAEHVNNSYECDIPIGAGICASYQTQTNSPRRARSVASQSIIAYTMSLGAENSVAYSNNSIAIPTNFTISVTTEILPVSMTKTSVDCTMYICGDSTECSNLLLQYGSFCTQLNRALTGIAVEQDKNTQEVFAQVKQIYKTPPIKDFGGFNFSQILPDPSKPSKRSFIEDLLFNKVTLADAGFIKQYGYCLGDIAARDLICAQKFNGLTVLPPLLTDEMIAQYTSALLAGTITSGWTFCAGAALQIPFAMQMAYRFNGIGVTQNVLYENQKLIANQFNSAIGKIQDSLSSTASALGKLQDVVNQNAQALNTLVKQLSSNFGAISSVLNDILSRLDKVEAEVQIDRLITGRLQSLQTYVTQQLIRAAEIRASANLAATKMSECVCGQSKRVDFCGKGYHLMSFPQSAPHGVVFLHVTYVPAQEKNFTTAPAICHDGKAHFPREGVFVSNGTHWFVTQRNFYEPQIITTDNTFVSGNCDVVIGIVNNTVYDPLQPELDSFKEELDKYFKNHTSPDVDLGDISGINASVVNIQKEIDRLNEVAKNLNESLIDLQELGKYEQYIKGGGGSDIDPYKEFGSSYQLLNFLPLDFFPDLNALVDTATALYEEELTGREHCSPHHTAIRQALVCWDELTKLIAWMSSNITSEQVRTIIVNHVNDTWGLKVRQSLWFHLSCLTFGQHTVQEFLVSFGVWIRTPAPYRPPNAPILSTLPEHTVIC

SEQ ID NO: 7200 - protein, 1365 aa, Artificial Sequence
  SARS-CoV-2/Belgium/VAG-03013/2020__EPI_ISL_415155 spike protein (1-1211)(G889C_L1034C) WhcAg construct
MFVFLVLLPLVSSQCVNLTTRTQLPPAYTNSFTRGVYYPDKVFRSSVLHSTQDLFLPFFSNVTWFHAIHVSGTNGTKRFDNPVLPFNDGVYFASTEKSNIIRGWIFGTTLDSKTQSLLIVNNATNVVIKVCEFQFCNDPFLGVYYHKNNKSWMESEFRVYSSANNCTFEYVSQPFLMDLEGKQGNFKNLREFVFKNIDGYFKIYSKHTPINLVRDLPQGFSALEPLVDLPIGINITRFQTLLALHRSYLTPGDSSSGWTAGAAAYYVGYLQPRTFLLKYNENGTITDAVDCALDPLSETKCTLKSFTVEKGIYQTSNFRVQPTESIVRFPNITNLCPFGEVFNATRFASVYAWNRKRISNCVADYSVLYNSASFSTFKCYGVSPTKLNDLCFTNVYADSFVIRGDEVRQIAPGQTGKIADYNYKLPDDFTGCVIAWNSNNLDSKVGGNYNYLYRLFRKSNLKPFERDISTEIYQAGSTPCNGVEGFNCYFPLQSYGFQPTNGVGYQPYRVVVLSFELLHAPATVCGPKKSTNLVKNKCVNFNFNGLTGTGVLTESNKKFLPFQQFGRDIADTTDAVRDPQTLEILDITPCSFGGVSVITPGTNTSNQVAVLYQGVNCTEVPVAIHADQLTPTWRVYSTGSNVFQTRAGCLIGAEHVNNSYECDIPIGAGICASYQTQTNSPRRARSVASQSIIAYTMSLGAENSVAYSNNSIAIPTNFTISVTTEILPVSMTKTSVDCTMYICGDSTECSNLLLQYGSFCTQLNRALTGIAVEQDKNTQEVFAQVKQIYKTPPIKDFGGFNFSQILPDPSKPSKRSFIEDLLFNKVTLADAGFIKQYGDCLGDIAARDLICAQKFNGLTVLPPLLTDEMIAQYTSALLAGTITSGWTFCAGAALQIPFAMQMAYRFNGIGVTQNVLYENQKLIANQFNSAIGKIQDSLSSTATALGKLQDVVNQNAQALNTLVKQLSSNFGAISSVLNDILSRLDKVEAEVQIDRLITGRLQSLQTYVTQQLIRAAEIRASANLAATKMSECVCGQSKRVDFCGKGYHLMSFPQSAPHGVVFLHVTYVPAQEKNFTTAPAICHDGKAHFPREGVFVSNGTHWFVTQRNFYEPQIITTDNTFVSGNCDVVIGIVNNTVYDPLQPELDSFKEELDKYFKNHTSPDVDLGDISGINASVVNIQKEIDRLNEVAKNLNESLIDLQELGKYEQYIKGGGGSDIDPYKEFGSSYQLLNFLPLDFFPDLNALVDTATALYEEELTGREHCSPHHTAIRQALVCWDELTKLIAWMSSNITSEQVRTIIVNHVNDTWGLKVRQSLWFHLSCLTFGQHTVQEFLVSFGVWIRTPAPYRPPNAPILSTLPEHTVIC

SEQ ID NO: 7201 - protein, 1365 aa, Artificial Sequence
  SARS-CoV-2/Belgium/BC-03016/2020__EPI_ISL_415157 spike protein (1-1211)(G889C_L1034C) WhcAg construct
MFVFLVLLPLVSSQCVNLTTRTQLPPAYTNSFTRGVYYPDKVFRSSVLHSTQDLFLPFFSNVTWFHAIHVSGTNGTKRFDNPVLPFNDGVYFASTEKSNIIRGWIFGTTLDSKTQSLLIVNNATNVVIKVCEFQFCNDPFLGVYYHKNNKSWMESEFRVYSSANNCTFEYVSQPFLMDLEGKQGNFKNLREFVFKNIDGYFKIYSKHTPINLVRDLPQGFSALEPLVDLPIGINITRFQTLLALHRSYLTPGDSSSGWTAGAAAYYVGYLQPRTFLLKYNENGTITDAVDCALDPLSETKCTLKSFTVEKGIYQTSNFRVQPTESIVRFPNITNLCPFGEVFNATRFASVYAWNRKRISNCVADYSVLYNSASFSTFKCYGVSPTKLNDLCFTNVYADSFVIRGDEVRQIAPGQTGKIADYNYKLPDDFTGCVIAWNSNNLDSKVGGNYNYLYRLFRKSNLKPFERDISTEIYQAGSTPCNGVEGFNCYFPLQSYGFQPTNGVGYQPYRVVVLSFELLHAPATVCGPKKSTNLVKNKCVNFNFNGLTGTGVLTESNKKFLPFQQFGRDIADTTDAVRDPQTLEILDITPCSFGGVSVITPGTNTSNQVAVLYQGVNCTEVPVAIHADQLTPTWRVYSTGSNVFQTRAGCLIGAEHVNNSYECDIPIGAGICASYQTQTNSPRRARSVASQSIIAYTMSLGAENSVAYSNNSIAIPTNFTISVTTEILPVSMTKTSVDCTMYICGDSTECSNLLLQYGSFCTQLNRALTGIAVEQDKNTQEVFAQVKQIYKTPPIKDFGGFNFSQILPDPSKPSKRSFIEDLLFNKVTLADAGFIKQYGDCLGDIAARDLICAQKFNGLTVLPPLLTDEMIAQYTSALLAGTITSGWTFCAGAALQIPFAMQMAYRFNGIGVTQNVLYENQKLIANQFNSAIGKIQDSLSSTAPALGKLQDVVNQNAQALNTLVKQLSSNFGAISSVLNDILSRLDKVEAEVQIDRLITGRLQSLQTYVTQQLIRAAEIRASANLAATKMSECVCGQSKRVDFCGKGYHLMSFPQSAPHGVVFLHVTYVPAQEKNFTTAPAICHDGKAHFPREGVFVSNGTHWFVTQRNFYEPQIITTDNTFVSGNCDVVIGIVNNTVYDPLQPELDSFKEELDKYFKNHTSPDVDLGDISGINASVVNIQKEIDRLNEVAKNLNESLIDLQELGKYEQYIKGGGGSDIDPYKEFGSSYQLLNFLPLDFFPDLNALVDTATALYEEELTGREHCSPHHTAIRQALVCWDELTKLIAWMSSNITSEQVRTIIVNHVNDTWGLKVRQSLWFHLSCLTFGQHTVQEFLVSFGVWIRTPAPYRPPNAPILSTLPEHTVIC

SEQ ID NO: 7202 - protein, 1365 aa, Artificial Sequence
  SARS-CoV-2/Germany/BavPat3/2020__EPI_ISL_414521 spike protein (1-1211)(G889C_L1034C) WhcAg construct
MFVFLVLLPLVSSQCVNLTTRTQLPPAYTNSFTRGVYYPDKVFRSSVLHSTQDLFLPFFSNVTWFHAIHVSGTNGTKRFDNPVLPFNDGVYFASTEKSNIIRGWIFGTTLDSKTQSLLIVNNATNVVIKVCEFQFCNDPFLGVYYHKNNKSWMESEFRVYSSANNCTFEYVSQPFLMDLEGKQGNFKNLREFVFKNIDGYFKIYSKHTPINLVRDLPQGFSALEPLVDLPIGINITRFQTLLALHRSYLTPGDSSSGWTAGAAAYYVGYLQPRTFLLKYNENGTITDAVDCALDPLSETKCTLKSFTVEKGIYQTSNFRVQPTESIVRFPNITNLCPFGEVFNATRFASVYAWNRKRISNCVADYSVLYNSASFSTFKCYGVSPTKLNDLCFTNVYADSFVIRGDEVRQIAPGQTGKIADYNYKLPDDFTGCVIAWNSNNLDSKVGGNYNYLYRLFRKSNLKPFERDISTEIYQAGSTPCNGVEGFNCYFPLQSYGFQPTNGVGYQPYRVVVLSFELLHAPATVCGPKKSTNLVKNKCVNFNFNGLTGTGVLTESNKKFLPFQQFGRDIADTTDAVRDPQTLEILDITPCSFGGVSVITPGTNTSNQVAVLYQDVNCTEVPVAIHADQLTPTWRVYSTGSNVFQTRAGCLIGAEHVNNSYECDIPIGAGICASYQTQTNSPRRARSVASQSIIAYTMSLGAENSVAYSNNSIAIPTNFTISVTTEILPVSMTKTSVDCTMYICGDSTECSNLLLQYGSFCTQLNRALTGIAVEQDKNTQQVFAQVKQIYKTPPIKDFGGFNFSQILPDPSKPSKRSFIEDLLFNKVTLADAGFIKQYGDCLGDIAARDLICAQKFNGLTVLPPLLTDEMIAQYTSALLAGTITSGWTFCAGAALQIPFAMQMAYRFNGIGVTQNVLYENQKLIANQFNSAIGKIQDSLSSTASALGKLQDVVNQNAQALNTLVKQLSSNFGAISSVLNDILSRLDKVEAEVQIDRLITGRLQSLQTYVTQQLIRAAEIRASANLAATKMSECVCGQSKRVDFCGKGYHLMSFPQSAPHGVVFLHVTYVPAQEKNFTTAPAICHDGKAHFPREGVFVSNGTHWFVTQRNFYEPQIITTDNTFVSGNCDVVIGIVNNTVYDPLQPELDSFKEELDKYFKNHTSPDVDLGDISGINASVVNIQKEIDRLNEVAKNLNESLIDLQELGKYEQYIKGGGGSDIDPYKEFGSSYQLLNFLPLDFFPDLNALVDTATALYEEELTGREHCSPHHTAIRQALVCWDELTKLIAWMSSNITSEQVRTIIVNHVNDTWGLKVRQSLWFHLSCLTFGQHTVQEFLVSFGVWIRTPAPYRPPNAPILSTLPEHTVIC

SEQ ID NO: 7203 - protein, 1365 aa, Artificial Sequence
  SARS-CoV-2/France/HF1805/2020__EPI_ISL_414628 spike protein (1-1211)(G889C_L1034C) WhcAg construct
MFVFLVLLPLVSSQCVNLTTRTQLPPAYTNSFTRGVYYPDKVFRSSVLHSTQDLFLPFFSNVTWFHAIHVSGTNGTKRFDNPVLPFNDGVYFASTEKSNIIRGWIFGTTLDSKTQSLLIVNNATNVVIKVCEFQFCNDPFLGVYYHKNNKSWMESEFRVYSSANNCTFEYVSQPFLMDLEGKQGNFKNLREFVFKNIDGYFKIYSKHTPINLVRDLPQGFSALEPLVDLPIGINITRFQTLLALHRSYLTPGDSSSGWTAGAAAYYVGYLQPRTFLLKYNENGTITDAVDCALDPLSETKCTLKSFTVEKGIYQTSNFRVQPTESIVRFPNITNLCPFGEVFNATRFASVYAWNRKRISNCVADYSVLYNSASFSTFKCYGVSPTKLNDLCFTNVYADSFVIRGDEVRQIAPGQTGKIADYNYKLPDDFTGCVIAWNSNNLDSKVGGNYNYLYRLFRKSNLKPFERDISTEIYQAGSTPCNGVEGFNCYFPLQSYGFQPTNGVGYQPYRVVVLSFELLHAPATVCGPKKSTNLVKNKCVNFNFNGLTGTGVLTESNKKFLPFQQFGRDIADTTDAVRDPQTLEILDITPCSFGGVSVITPGTNTSNQVAVLYQGVNCTEVPVAIHADQLTPTWRVYSTGSNVFQTRAGCLIGAEHVNNSYECDIPIGAGICASYQTQTNSPRRARSVASQSIIAYTMSLGAENSVAYSNNSIAIPTNFTISVTTEILPVSMTKTSVDCTMYICGDSTECSNLLLQYGSFCTQLNRALTGIAVEQDKNTQEVFAQVKQIYKTPPIKDFGGFNFSQILPDPSKPSKRSFIEDLLFNKVTLADAGFIKQYGDCLGDIAARDLICAQKFNGLTVLPPLLTDEMIAQYTSALLAGTITSGWTFCAGAALQIPFAMQMAYRFNGIGVTQNVLYENQKLIANQFNSAIGKIQDSLSSTASALGKLQDVVNQNAQALNTLVKQLSSNFGAISSVLNDILSRLDKVEAEVQIDRLITGRLQSLQTYVTQQLIRAAEIRASANLAATKMSECVCGQSKRVDFCGKGYHLMSFPQSAPHGVVFLHVTYVPAQEKNFTTAPAICHDGKAHFPREGVFVSNGTHWFVTQRNFYEPQIITTDNTFVSGNCDVVIGVVNNTVYDPLQPELDSFKEELDKYFKNHTSPDVDLGDISGINASVVNIQKEIDRLNEVAKNLNESLIDLQELGKYEQYIKGGGGSDIDPYKEFGSSYQLLNFLPLDFFPDLNALVDTATALYEEELTGREHCSPHHTAIRQALVCWDELTKLIAWMSSNITSEQVRTIIVNHVNDTWGLKVRQSLWFHLSCLTFGQHTVQEFLVSFGVWIRTPAPYRPPNAPILSTLPEHTVIC

SEQ ID NO: 7204 - protein, 1365 aa, Artificial Sequence
  SARS-CoV-2/Netherlands/ZuidHolland_9/2020__EPI_ISL_414445 spike protein (1-1211)(G889C_L1034C) WhcAg construct
MFVFLVLLPLVSSQCVNLTTRTQLPPAYTNSFTRGVYYPDKVFRSSVLHSTQDLFLPFFSNVTWFHAIHVSGTNGTKRFDNPVLPFNDGVYFASTEKSNIIRGWIFGTTLDSKTQSLLIVNNATNVVIKVCEFQFCNDPFLGVYYHKNNKSWMESEFRVYSSANNCTFEYVSQPFLMDLEGKQGNFKNLREFVFKNIDGYFKIYSKHTPINLVRDLPQGFSALEPLVDLPIGINITRFQTLLALHRSYLTPGDSSSGWTAGAAAYYVGYLQPRTFLLKYNENGTITDAVDCALDPLSETKCTLKSFTVEKGIYQTSNFRVQPTESIVRFPNITNLCPFGEVFNATRFASVYAWNRKRISNCVADYSVLYNSASFSTFKCYGVSPTKLNDLCFTNVYADSFVIRGDEVRQIAPGQTGKIADYNYKLPDDFTGCVIAWNSNNLDSKVGGNYNYLYRLFRKSNLKPFERDISTEIYQAGSTPCNGVEGFNCYFPLQSYGFQPTNGVGYQPYRVVVLSFELLHAPATVCGPKKSTNLVKNKCVNFNFNGLTGTGVLTESNKKFLPFQQFGRDIADTTDAVRDPQTLEILDITPCSFGGVSVITPGTNTSNQVAVLYQGVNCTEVPVAIHADQLTPTWRVYSTGSNVFQTRAGCLIGAEHVNNSYECDIPIGAGICASYQTQTNSPRRARSVASQSIIAYTMSLGAENSVAYSNNSIAIPTNFTISVTTEILPVSMTKTSVDCTMYICGDSTECSNLLLQYGSFCTQLNRALTGIAVEQDKNTQEVFAQVKQIYKTPPIKDFGGFNFSQILPDPSKPSKRSFIEDLLFNKVTLADAGFIKQYGDCLGDIAARDLICVQKFNGLTVLPPLLTDEMIAQYTSALLAGTITSGWTFCAGAALQIPFAMQMAYRFNGIGVTQNVLYENQKLIANQFNSAIGKIQDSLSSTASALGKLQDVVNQNAQALNTLVKQLSSNFGAISSVLNDILSRLDKVEAEVQIDRLITGRLQSLQTYVTQQLIRAAEIRASANLAATKMSECVCGQSKRVDFCGKGYHLMSFPQSAPHGVVFLHVTYVPAQEKNFTTAPAICHDGKAHFPREGVFVSNGTHWFVTQRNFYEPQIITTDNTFVSGNCDVVIGIVNNTVYDPLQPELDSFKEELDKYFKNHTSPDVDLGDISGINASVVNIQKEIDRLNEVAKNLNESLIDLQELGKYEQYIKGGGGSDIDPYKEFGSSYQLLNFLPLDFFPDLNALVDTATALYEEELTGREHCSPHHTAIRQALVCWDELTKLIAWMSSNITSEQVRTIIVNHVNDTWGLKVRQSLWFHLSCLTFGQHTVQEFLVSFGVWIRTPAPYRPPNAPILSTLPEHTVIC

SEQ ID NO: 7205 - protein, 1365 aa, Artificial Sequence
  SARS-CoV-2/Finland/FIN03032020A/2020__EPI_ISL_413602 spike protein (1-1211)(G889C_L1034C) WhcAg construct
MFVFLVLLPLVSSQCVNLTTRTQLPPAYTNSFTRGVYYPDKVFRSSVLHSTQDLFLPFFSNVTWFHAIHVSGTNGTKRFDNPVLPFNDGVYFASTEKSNIIRGWIFGTTLDSKTQSLLIVNNATNVVIKVCEFQFCNDPFLGVYYHKNNKSWMESEFRVYSSANNCTFEYVSQPFLMDLEGKQGNFKNLREFVFKNIDGYFKIYSKHTPINLVRDLPQGFSALEPLVDLPIGINITRFQTLLALHRSYLTPGDSSSGWTAGAAAYYVGYLQPRTFLLKYNENGTITDAVDCALDPLSETKCTLKSFTVEKGIYQTSNFRVQPTESIVRFPNITNLCPFGEVFNATRFASVYAWNRKRISNCVADYSVLYNSASFSTFKCYGVSPTKLNDLCFTNVYADSFVIRGDEVRQIAPGQTGKIADYNYKLPDDFTGCVISWNSNNLDSKVGGNYNYLYRLFRKSNLKPFERDISTEIYQAGSTPCNGVEGFNCYFPLQSYGFQPTNGVGYQPYRVVVLSFELLHAPATVCGPKKSTNLVKNKCVNFNFNGLTGTGVLTESNKKFLPFQQFGRDIADTTDAVRDPQTLEILDITPCSFGGVSVITPGTNTSNQVAVLYQGVNCTEVPVAIHADQLTPTWRVYSTGSNVFQTRAGCLIGAEHVNNSYECDIPIGAGICASYQTQTNSPRRARSVASQSIIAYTMSLGAENSVAYSNNSIAIPTNFTISVTTEILPVSMTKTSVDCTMYICGDSTECSNLLLQYGSFCTQLNRALTGIAVEQDKNTQEVFAQVKQIYKTPPIKDFGGFNFSQILPDPSKPSKRSFIEDLLFNKVTLADAGFIKQYGDCLGDIAARDLICAQKFNGLTVLPPLLTDEMIAQYTSALLAGTITSGWTFCAGAALQIPFAMQMAYRFNGIGVTQNVLYENQKLIANQFNSAIGKIQDSLSSTASALGKLQDVVNQNAQALNTLVKQLSSNFGAISSVLNDILSRLDKVEAEVQIDRLITGRLQSLQTYVTQQLIRAAEIRASANLAATKMSECVCGQSKRVDFCGKGYHLMSFPQSAPHGVVFLHVTYVPAQEKNFTTAPAICHDGKAHFPREGVFVSNGTHWFVTQRNFYEPQIITTDNTFVSGNCDVVIGIVNNTVYDPLQPELDSFKEELDKYFKNHTSPDVDLGDISGINASVVNIQKEIDRLNEVAKNLNESLIDLQELGKYEQYIKGGGGSDIDPYKEFGSSYQLLNFLPLDFFPDLNALVDTATALYEEELTGREHCSPHHTAIRQALVCWDELTKLIAWMSSNITSEQVRTIIVNHVNDTWGLKVRQSLWFHLSCLTFGQHTVQEFLVSFGVWIRTPAPYRPPNAPILSTLPEHTVIC

SEQ ID NO: 7206 - protein, 1365 aa, Artificial Sequence
  SARS-CoV-2/France/GE1977/2020__EPI_ISL_414632 spike protein (1-1211)(G889C_L1034C) WhcAg construct
MFVFLVLLPLVSSQCVNLTTRTQLPPAYTNSFTRGVYYPDKVFRSSVLHSTQDLFLPFFSNVTWFHAIHVSGTNGTKRFDNPVLPFNDGVYFASTEKSNIIRGWIFGTTLDSKTQSLLIVNNATNVVIKVCEFQFCNDPFLGVYYHKNNKSWMESEFRVYSSANNCTFEYVSQPFLMDLEGKQGNFKNLREFVFKNIDGYFKIYSKHTPINLVRDLPQGFSALEPLVDLPIGINITRFQTLLALHRSYLTPGDSSSGWTAGAAAYYVGYLQPRTFLLKYNENGTITDAVDCALDPLSETKCTLKSFTVEKGIYQTSNFRVQPTESIVRFPNITNLCPFGEVFNATRFASVYAWNRKRISNCVADYSVLYNSASFSTFKCYGVSPTKLNDLCFTNVYADSFVIRGDEVRQIAPGQTGKIADYNYKLPDDFTGCVIAWNSNNLDSKVGGNYNYLYRLFRKSNLKPFERDISTEIYQAGSTPCNGVEGFNCYFPLQSYGFQPTNGVGYQPYRVVVLSFELLHAPATVCGPKKSTNLVKNKCVNFNFNGLTGTGVLTESNKKFLPFQQFGRDIADTTDAVRDPQTLEILDITPCSFGGVSVITPGTNTSNQVAVLYQGVNCTEVPVAIHADQLTPTWRVYSTGSNVFQTRAGCLIGAEHVNNSYECDIPIGAGICASYQTQTNSPRRARSVASQSIIAYTMSLGAENSVAYSNNSIAIPTNFTISVTTEILPVSMTKTSVDCTMYICGDSTECSNLLLQYGSFCTQLNRALTGIAVEQDKNTQEVFAQVKQIYKTPPIKDFGGFNFSQILPDPSKPSKRSFIEDLLFNKVTLADAGFIKQYGDCLGDIAARDLICAQKFNGLTVLPPLLTDEMIAQYTSALLAGTITSGWTFCAGAALQIPFAMQMAYRFNGIGVTQNVLYENQKLIANQFNSAIGKIQDSLFSTASALGKLQDVVNQNAQALNTLVKQLSSNFGAISSVLNDILSRLDKVEAEVQIDRLITGRLQSLQTYVTQQLIRAAEIRASANLAATKMSECVCGQSKRVDFCGKGYHLMSFPQSAPHGVVFLHVTYVPAQEKNFTTAPAICHDGKAHFPREGVFVSNGTHWFVTQRNFYEPQIITTDNTFVSGNCDVVIGIVNNTVYDPLQPELDSFKEELDKYFKNHTSPDVDLGDISGINASVVNIQKEIDRLNEVAKNLNESLIDLQELGKYEQYIKGGGGSDIDPYKEFGSSYQLLNFLPLDFFPDLNALVDTATALYEEELTGREHCSPHHTAIRQALVCWDELTKLIAWMSSNITSEQVRTIIVNHVNDTWGLKVRQSLWFHLSCLTFGQHTVQEFLVSFGVWIRTPAPYRPPNAPILSTLPEHTVIC

SEQ ID NO: 7207 - protein, 1365 aa, Artificial Sequence
  SARS-CoV-2/Finland/FIN-313/2020__EPI_ISL_414641 spike protein (1-1211)(G889C_L1034C) WhcAg construct
MFVFLVLLPLVSSQCVNLTTRTQLPPAYTNSFTRGVYYPDKVFRSSVLHSTQDLFLPFFSNVTWFHAIHVSGTNGTKRFDNPVLPFNDGVYFASTEKSNIIRGWIFGTTLDSKTQSLLIVNNATNVVIKVCEFQFCNDPFLGVYYHKNNKSWMESEFRVYSSANNCTFEYVSQPFLMDLEGKQGNFKNLREFVFKNIDGYFKIYSKHTPINLVRDLPQGFSALEPLVDLPIGINITRFKTLLALHRSYLTPGDSSSGWTAGAAAYYVGYLQPRTFLLKYNENGTITDAVDCALDPLSETKCTLKSFTVEKGIYQTSNFRVQPTESIVRFPNITNLCPFGEVFNATRFASVYAWNRKRISNCVADYSVLYNSASFSTFKCYGVSPTKLNDLCFTNVYADSFVIRGDEVRQIAPGQTGKIADYNYKLPDDFTGCVIAWNSNNLDSKVGGNYNYLYRLFRKSNLKPFERDISTEIYQAGSTPCNGVEGFNCYFPLQSYGFQPTNGVGYQPYRVVVLSFELLHAPATVCGPKKSTNLVKNKCVNFNFNGLTGTGVLTESNKKFLPFQQFGRDIADTTDAVRDPQTLEILDITPCSFGGVSVITPGTNTSNQVAVLYQGVNCTEVPVAIHADQLTPTWRVYSTGSNVFQTRAGCLIGAEHVNNSYECDIPIGAGICASYQTQTNSPRRARSVASQSIIAYTMSLGAENSVAYSNNSIAIPTNFTISVTTEILPVSMTKTSVDCTMYICGDSTECSNLLLQYGSFCTQLNRALTGIAVEQDKNTQEVFAQVKQIYKTPPIKDFGGFNFSQILPDPSKPSKRSFIEDLLFNKVTLADAGFIKQYGDCLGDIAARDLICAQKFNGLTVLPPLLTDEMIAQYTSALLAGTITSGWTFCAGAALQIPFAMQMAYRFNGIGVTQNVLYENQKLIANQFNSAIGKIQDSLSSTASALGKLQDVVNQNAQALNTLVKQLSSNFGAISSVLNDILSRLDKVEAEVQIDRLITGRLQSLQTYVTQQLIRAAEIRASANLAATKMSECVCGQSKRVDFCGKGYHLMSFPQSAPHGVVFLHVTYVPAQEKNFTTAPAICHDGKAHFPREGVFVSNGTHWFVTQRNFYEPQIITTDNTFVSGNCDVVIGIVNNTVYDPLQPELDSFKEELDKYFKNHTSPDVDLGDISGINASVVNIQKEIDRLNEVAKNLNESLIDLQELGKYEQYIKGGGGSDIDPYKEFGSSYQLLNFLPLDFFPDLNALVDTATALYEEELTGREHCSPHHTAIRQALVCWDELTKLIAWMSSNITSEQVRTIIVNHVNDTWGLKVRQSLWFHLSCLTFGQHTVQEFLVSFGVWIRTPAPYRPPNAPILSTLPEHTVIC

SEQ ID NO: 7208 - protein, 1365 aa, Artificial Sequence
  SARS-CoV-2/Netherlands/ZuidHolland_2/2020__EPI_ISL_414556 spike protein (1-1211)(G889C_L1034C) WhcAg construct
MFVFLVLLPLVSSQCVNLTTRTQLPPAYTNSFTRGVYYPDKVFRSSVLHSTQDLFLPFFSNVTWFHAIHVSGTNGTKRFDNPVLPFNDGVYFASTEKSNIIRGWIFGTTLDSKTQSLLIVNNATNVVIKVCEFQFCNDPFLGVYYHKNNKSWMESEFRVYSSANNCTFEYVSQPFLMDLEGKQGNFKNLREFVFKNIDGYFKIYSKHTPINLVRDLPQGFSALEPLVDLPIGINITRFQTLLALHRSYLTPGDSSSGWTAGAAAYYVGYLQPRTFLLKYNENGTITDAVDCALDPLSETKCTLKSFTVEKGIYQTSNFRVQPTESIVRFPNITNLCPFGEVFNATRFASVYAWNRKRISNCVADYSVLYNSASFSTFKCYGVSPTKLNDLCFTNVYADSFVIRGDEVRQIAPGQTGKIADYNYKLPDDFTGCVIAWNSNNLDSKVGGNYNYLYRLFRKSNLKPFERDISTEIYQAGSTPCNGVEGFNCYFPLQSYGFQPTNGVGYQPYRVVVLSFELLHAPATVCGPKKSTNLVKNKCVNFNFNGLTGTGVLTESNKKFLPFQQFGRDIADTTDAVRDPQTLEILDITPCSFGGVSVITPGTNTSNQVAVLYQGVNCTEVPVAIHADQLTPTWRVYSTGSNVFQTRAGCLIGAEHVNNSYECDIPIGAGICASYQTQTNSPRRARSVASQSIIAYTMSLGAENSVAYSNNSIAIPTNFTISVTTEILPVSMTKTSVDCTMYICGDSTECSNLLLQYGSFCTQLNRALTGIALEQDKNTQEVFAQVKQIYKTPPIKDFGGFNFSQILPDPSKPSKRSFIEDLLFNKVTLADAGFIKQYGDCLGDIAARDLICAQKFNGLTVLPPLLTDEMIAQYTSALLAGTITSGWTFCAGAALQIPFAMQMAYRFNGIGVTQNVLYENQKLIANQFNSAIGKIQDSLSSTASALGKLQDVVNQNAQALNTLVKQLSSNFGAISSVLNDILSRLDKVEAEVQIDRLITGRLQSLQTYVTQQLIRAAEIRASANLAATKMSECVCGQSKRVDFCGKGYHLMSFPQSAPHGVVFLHVTYVPAQEKNFTTAPAICHDGKAHFPREGVFVSNGTHWFVTQRNFYEPQIITTDNTFVSGNCDVVIGIVNNTVYDPLQPELDSFKEELDKYFKNHTSPDVDLGDISGINASVVNIQKEIDRLNEVAKNLNESLIDLQELGKYEQYIKGGGGSDIDPYKEFGSSYQLLNFLPLDFFPDLNALVDTATALYEEELTGREHCSPHHTAIRQALVCWDELTKLIAWMSSNITSEQVRTIIVNHVNDTWGLKVRQSLWFHLSCLTFGQHTVQEFLVSFGVWIRTPAPYRPPNAPILSTLPEHTVIC

SEQ ID NO: 7209 - protein, 1365 aa, Artificial Sequence
  SARS-CoV-2/USA/WA-UW31/2020__EPI_ISL_414618 spike protein (1-1211)(G889C_L1034C) WhcAg construct
MFVFLVLLPLVSSQCVNLTTRTQLPPAYTNSFTRGVYYPDKVFRSSVLHSTQDLFLPFFSNVTWFHAIHVSGTNGTKRFDNPVLPFNDGVYFASTEKSNIIRGWIFGTTLDSKTQSLLIVNNATNVVIKVCEFQFCNDPFLGVYYHKNNKSWMESEFRVYSSANNCTFEYVSQPFLMDLEGKQGNFKNLREFVFKNIDGYFKIYSKHTPINLVRDLPQGFSALEPLVDLPIGINITRFQTLLALHRSYLTPGDSSSGWTAGAAAYYVGYLQPRTFLLKYNENGTITDAVDCALDPLSETKCTLKSFTVEKGIYQTSNFRVQPTESIVRFPNITNLCPFGEVFNATRFASVYAWNRKRISNCVADYSVLYNSASFSTFKCYGVSPTKLNDLCFTNVYADSFVIRGDEVRQIAPGQTGKIADYNYKLPDDFTGCVIAWNSNNLDSKVGGNYNYLYRLFRKSNLKPFERDISTEIYQAGSTPCNGAEGFNCYFPLQSYGFQPTNGVGYQPYRVVVLSFELLHAPATVCGPKKSTNLVKNKCVNFNFNGLTGTGVLTESNKKFLPFQQFGRDIADTTDAVRDPQTLEILDITPCSFGGVSVITPGTNTSNQVAVLYQDVNCTEVPVAIHADQLTPTWRVYSTGSNVFQTRAGCLIGAEHVNNSYECDIPIGAGICASYQTQTNSPRRARSVASQSIIAYTMSLGAENSVAYSNNSIAIPTNFTISVTTEILPVSMTKTSVDCTMYICGDSTECSNLLLQYGSFCTQLNRALTGIAVEQDKNTQEVFAQVKQIYKTPPIKDFGGFNFSQILPDPSKPSKRSFIEDLLFNKVTLADAGFIKQYGDCLGDIAARDLICAQKFNGLTVLPPLLTDEMIAQYTSALLAGTITSGWTFCAGAALQIPFAMQMAYRFNGIGVTQNVLYENQKLIANQFNSAIGKIQDSLSSTASALGKLQDVVNQNAQALNTLVKQLSSNFGAISSVLNDILSRLDKVEAEVQIDRLITGRLQSLQTYVTQQLIRAAEIRASANLAATKMSECVCGQSKRVDFCGKGYHLMSFPQSAPHGVVFLHVTYVPAQEKNFTTAPAICHDGKAHFPREGVFVSNGTHWFVTQRNFYEPQIITTDNTFVSGNCDVVIGIVNNTVYDPLQPELDSFKEELDKYFKNHTSPDVDLGDISGINASVVNIQKEIDRLNEVAKNLNESLIDLQELGKYEQYIKGGGGSDIDPYKEFGSSYQLLNFLPLDFFPDLNALVDTATALYEEELTGREHCSPHHTAIRQALVCWDELTKLIAWMSSNITSEQVRTIIVNHVNDTWGLKVRQSLWFHLSCLTFGQHTVQEFLVSFGVWIRTPAPYRPPNAPILSTLPEHTVIC

SEQ ID NO: 7210 - protein, 1365 aa, Artificial Sequence
  SARS-CoV-2/South Korea/SNU01/2020__EPI_ISL_411929 spike protein (1-1211)(G889C_L1034C) WhcAg construct
MFVFLVLLPLVSSQCVNLTTRTQLPPAYTNSFTRGVYYPDKVFRSSVLHSTQDLFLPFFSNVTWFHAIHVSGTNGTKRFDNPVLPFNDGVYFASTEKSNIIRGWIFGTTLDSKTQSLLIVNNATNVVIKVCEFQFCNDPFLGVYYHKNNKSWMESEFRVYSSANNCTFEYVSQPFLMDLEGKQGNFKNLREFVFKNIDGYFKIYSKHTPINLVRDLPQGFWALEPLVDLPIGINITRFQTLLALHRSYLTPGDSSSGWTAGAAAYYVGYLQPRTFLLKYNENGTITDAVDCALDPLSETKCTLKSFTVEKGIYQTSNFRVQPTESIVRFPNITNLCPFGEVFNATRFASVYAWNRKRISNCVADYSVLYNSASFSTFKCYGVSPTKLNDLCFTNVYADSFVIRGDEVRQIAPGQTGKIADYNYKLPDDFTGCVIAWNSNNLDSKVGGNYNYLYRLFRKSNLKPFERDISTEIYQAGSTPCNGVEGFNCYFPLQSYGFQPTNGVGYQPYRVVVLSFELLHAPATVCGPKKSTNLVKNKCVNFNFNGLTGTGVLTESNKKFLPFQQFGRDIADTTDAVRDPQTLEILDITPCSFGGVSVITPGTNTSNQVAVLYQDVNCTEVPVAIHADQLTPTWRVYSTGSNVFQTRAGCLIGAEHVNNSYECDIPIGAGICASYQTQTNSPRRARSVASQSIIAYTMSLGAENSVAYSNNSIAIPTNFTISVTTEILPVSMTKTSVDCTMYICGDSTECSNLLLQYGSFCTQLNRALTGIAVEQDKNTQEVFAQVKQIYKTPPIKDFGGFNFSQILPDPSKPSKRSFIEDLLFNKVTLADAGFIKQYGDCLGDIAARDLICAQKFNGLTVLPPLLTDEMIAQYTSALLAGTITSGWTFCAGAALQIPFAMQMAYRFNGIGVTQNVLYENQKLIANQFNSAIGKIQDSLSSTASALGKLQDVVNQNAQALNTLVKQLSSNFGAISSVLNDILSRLDKVEAEVQIDRLITGRLQSLQTYVTQQLIRAAEIRASANLAATKMSECVCGQSKRVDFCGKGYHLMSFPQSAPHGVVFLHVTYVPAQEKNFTTAPAICHDGKAHFPREGVFVSNGTHWFVTQRNFYEPQIITTDNTFVSGNCDVVIGIVNNTVYDPLQPELDSFKEELDKYFKNHTSPDVDLGDISGINASVVNIQKEIDRLNEVAKNLNESLIDLQELGKYEQYIKGGGGSDIDPYKEFGSSYQLLNFLPLDFFPDLNALVDTATALYEEELTGREHCSPHHTAIRQALVCWDELTKLIAWMSSNITSEQVRTIIVNHVNDTWGLKVRQSLWFHLSCLTFGQHTVQEFLVSFGVWIRTPAPYRPPNAPILSTLPEHTVIC

SEQ ID NO: 7211 - protein, 1365 aa, Artificial Sequence
  SARS-CoV-2/China/WF0004/2020__EPI_ISL_413694 spike protein (1-1211)(G889C_L1034C) WhcAg construct
MFVFLVLLPLVSSQCVNLTTRTQLPPAYTNSFTRGVYYPDKVFRSSVLHSTQDLFLPFFSNVTWFHAIHVSGTNGTKRFDNPVLPFNDGVYFASTEKSNIIRGWIFGTTLDSKTQSLLIVNNATNVVIKVCEFQFCNDPFLGVYYHKNNKSWTESEFRVYSSANNCTFEYVSQPFLMDLEGKQGNFKNLREFVFKNIDGYFKIYSKHTPINLVRDLPQGFSALEPLVDLPIGINITRFQTLLALHRSYLTPGDSSSGWTAGAAAYYVGYLQPRTFLLKYNENGTITDAVDCALDPLSETKCTLKSFTVEKGIYQTSNFRVQPTESIVRFPNITNLCPFGEVFNATRFASVYAWNRKRISNCVADYSVLYNSASFSTFKCYGVSPTKLNDLCFTNVYADSFVIRGDEVRQIAPGQTGKIADYNYKLPDDFTGCVIAWNSNNLDSKVGGNYNYLYRLFRKSNLKPFERDISTEIYQAGSTPCNGVEGFNCYFPLQSYGFQPTNGVGYQPYRVVVLSFELLHAPATVCGPKKSTNLVKNKCVNFNFNGLTGTGVLTESNKKFLPFQQFGRDIADTTDAVRDPQTLEILDITPCSFGGVSVITPGTNTSNQVAVLYQDVNCTEVPVAIHADQLTPTWRVYSTGSNVFQTRAGCLIGAEHVNNSYECDIPIGAGICASYQTQTNSPRRARSVASQSIIAYTMSLGAENSVAYSNNSIAIPTNFTISVTTEILPVSMTKTSVDCTMYICGDSTECSNLLLQYGSFCTQLNRALTGIAVEQDKNTQEVFAQVKQIYKTPPIKDFGGFNFSQILPDPSKPSKRSFIEDLLFNKVTLADAGFIKQYGDCLGDIAARDLICAQKFNGLTVLPPLLTDEMIAQYTSALLAGTITSGWTFCAGAALQIPFAMQMAYRFNGIGVTQNVLYENQKLIANQFNSAIGKIQDSLSSTASALGKLQDVVNQNAQALNTLVKQLSSNFGAISSVLNDILSRLDKVEAEVQIDRLITGRLQSLQTYVTQQLIRAAEIRASANLAATKMSECVCGQSKRFDFCGKGYHLMSFPQSAPHGVVFLHVTYVPAQEKNFTTAPAICHDGKAHFPREGVFVSNGTHWFVTQRNFYEPQIITTDNTFVSGNCDVVIGIVNNTVYDPLQPELDSFKEELDKYFKNHTSPDVDLGDISGINASVVNIQKEIDRLNEVAKNLNESLIDLQELGKYEQYIKGGGGSDIDPYKEFGSSYQLLNFLPLDFFPDLNALVDTATALYEEELTGREHCSPHHTAIRQALVCWDELTKLIAWMSSNITSEQVRTIIVNHVNDTWGLKVRQSLWFHLSCLTFGQHTVQEFLVSFGVWIRTPAPYRPPNAPILSTLPEHTVIC

SEQ ID NO: 7212 - protein, 1365 aa, Artificial Sequence
  SARS-CoV-2/China/WF0028/2020__EPI_ISL_413791 spike protein (1-1211)(G889C_L1034C) WhcAg construct
MFVFLVLLPLVSSQCVNLTTRTQLPPAYTNSFTRGVYYPDKVFRSSVLHSTQDLFLPFFSNVTWFHAIHVSGTNGTKRFDNPVLPFNDGVYFASTEKSNIIRGWIFGTTLDSKTQSLLIVNNATNVVIKVCEFQFCNDPFLGVYYHKNNKSWMESEFRVYSSANNCTFEYVSQPFLMDLEGKQGNFKNLREFVFKNIDGYFKIYSKHTPINLVRDLPQGFSALEPLVDLPIGINITRFQTLLALHRSYLTPGDSSSGWTAGAAAYYVGYLQPRTFLLKYNENGTITDAVDCALDPLSETKCTLKSFTVEKGIYQTSNFRVQPTESIVRFPNITNLCPFGEVFNATRFASVYAWNRKRISNCVADYSVLYNSASFSTFKCYGVSPTKLNDLCFTNVYADSFVIRGDEVRQIAPGQTGKIADYNYKLPDDFTGCVIAWNSNNLDSKVGGNYNYLYRLFRKSNLKPFERDISTEIYQAGSTPCNGVEGFNCYFPLQSYGFQPTNGVGYQPYRVVVLSFELLHAPATVCGPKKSTNLVKNKCVNFNFNGLTGTGVLTESNKKFLPFQQFGRDIADTTDAVRDPQTLEILDITPCSFGGVSVITPGTNTSNQVAVLYQDVNCTEVPVAIHADQLTPTWRVYSTGSNVFQTRAGCLIGAEHVNNSYECDIPIGAGICASYQTQTNSPRRARSVASQSIIAYTMSLGAENSVAYSNNSIAIPTNFTISVTTEILPVSMTKTSVDCTMYICGDSTECSNLLLQYGSFCTQLNRALTGIAVEQDKNTQEVFAQVKQIYKTPPIKDFGGFNFSQILPDPSKPSKRSFIEDLLFNKVTLADAGFIKQYGDCLGDIAARDLICAQKFNGLTVLPPLLTDEMIAQYTSALLAGTITSGWTFCAGAALQIPFAMQMAYRFNGIGVTQNVLYENQKLIANQFNSAIGKIQDSLSSTASALGKLQDVVNQNAQALNTLVKQLSSNFGAISSVLNDILSRLDKVEAEVQIDRLITGRLQSLQTYVTQQLIRAAEIRASANLAATKMSECVCGQSKRVDFCGKGYHLMSFPQSAPHGVVFLHVTYVPAQEKNFTTAPAICHDGKAHFPREGVFVSNGTHWFVTQRNFYEPQIITTDNTFVSGNCDVVIGIVNNTVYDPLQPELESFKEELDKYFKNHTSPDVDLGDISGINASVVNIQKEIDRLNEVAKNLNESLIDLQELGKYEQYIKGGGGSDIDPYKEFGSSYQLLNFLPLDFFPDLNALVDTATALYEEELTGREHCSPHHTAIRQALVCWDELTKLIAWMSSNITSEQVRTIIVNHVNDTWGLKVRQSLWFHLSCLTFGQHTVQEFLVSFGVWIRTPAPYRPPNAPILSTLPEHTVIC

SEQ ID NO: 7213 - protein, 1365 aa, Artificial Sequence
  SARS-CoV-2/2019-nCoV/USA-CruiseA-18/2020__MT159716.1 spike protein (1-1211)(G889C_L1034C) WhcAg construct
MFVFLVLLPLVSSQCVNLTTRTQLPPAYTNSFTRGVYYPDKVFRSSVLHSTQDLFLPFFSNVTWFHAIHVSGTNGTKRFDNPVLPFNDGVYFASTEKSNIIRGWIFGTTLDSKTQSLLIVNNATNVVIKVCEFQFCNDPFLGVYYHKNNKSWMESELRVYSSANNCTFEYVSQPFLMDLEGKQGNFKNLREFVFKNIDGYFKIYSKHTPINLVRDLPQGFSALEPLVDLPIGINITRFQTLLALHRSYLTPGDSSSGWTAGAAAYYVGYLQPRTFLLKYNENGTITDAVDCALDPLSETKCTLKSFTVEKGIYQTSNFRVQPTESIVRFPNITNLCPFGEVFNATRFASVYAWNRKRISNCVADYSVLYNSASFSTFKCYGVSPTKLNDLCFTNVYADSFVIRGDEVRQIAPGQTGKIADYNYKLPDDFTGCVIAWNSNNLDSKVGGNYNYLYRLFRKSNLKPFERDISTEIYQAGSTPCNGVEGFNCYFPLQSYGFQPTNGVGYQPYRVVVLSFELLHAPATVCGPKKSTNLVKNKCVNFNFNGLTGTGVLTESNKKFLPFQQFGRDIADTTDAVRDPQTLEILDITPCSFGGVSVITPGTNTSNQVAVLYQDVNCTEVPVAIHADQLTPTWRVYSTGSNVFQTRAGCLIGAEHVNNSYECDIPIGAGICASYQTQTNSPRRARSVASQSIIAYTMSLGAENSVAYSNNSIAIPTNFTISVTTEILPVSMTKTSVDCTMYICGDSTECSNLLLQYGSFCTQLNRALTGIAVEQDKNTQEVFAQVKQIYKTPPIKDFGGFNFSQILPDPSKPSKRSFIEDLLFNKVTLADAGFIKQYGDCLGDIAARDLICAQKFNGLTVLPPLLTDEMIAQYTSALLAGTITSGWTFCAGAALQIPFAMQMAYRFNGIGVTQNVLYENQKLIANQFNSAIGKIQDSLSSTASALGKLQDVVNQNAQALNTLVKQLSSNFGAISSVLNDILSRLDKVEAEVQIDRLITGRLQSLQTYVTQQLIRAAEIRASANLAATKMSECVCGQSKRVDFCGKGYHLMSFPQSAPHGVVFLHVTYVPAQEKNFTTAPAICHDGKAHFPREGVFVSNGTHWFVTQRNFYEPQIITTDNTFVSGNCDVVIGIVNNTVYDPLQPELDSFKEELDKYFKNHTSPDVDLGDISGINASVVNIQKEIDRLNEVAKNLNESLIDLQELGKYEQYIKGGGGSDIDPYKEFGSSYQLLNFLPLDFFPDLNALVDTATALYEEELTGREHCSPHHTAIRQALVCWDELTKLIAWMSSNITSEQVRTIIVNHVNDTWGLKVRQSLWFHLSCLTFGQHTVQEFLVSFGVWIRTPAPYRPPNAPILSTLPEHTVIC

SEQ ID NO: 7214 - protein, 1365 aa, Artificial Sequence
  SARS-CoV-2/SARS-CoV-2/Yunnan-01/human/2020/CHN__MT049951.1 spike protein (1-1211)(G889C_L1034C) WhcAg construct
MFVFLVLLPLVSSQCVNLTTRTQLPPANTNSFTRGVYYPDKVFRSSVLHSTQDLFLPFFSNVTWFHAIHVSGTNGTKRFDNPVLPFNDGVYFASTEKSNIIRGWIFGTTLDSKTQSLLIVNNATNVVIKVCEFQFCNDPFLGVYYHKNNKSWMESEFRVYSSANNCTFEYVSQPFLMDLEGKQGNFKNLREFVFKNIDGYFKIYSKHTPINLVRDLPQGFSALEPLVDLPIGINITRFQTLLALHRSYLTPGDSSSGWTAGAAAYYVGYLQPRTFLLKYNENGTITDAVDCALDPLSETKCTLKSFTVEKGIYQTSNFRVQPTESIVRFPNITNLCPFGEVFNATRFASVYAWNRKRISNCVADYSVLYNSASFSTFKCYGVSPTKLNDLCFTNVYADSFVIRGDEVRQIAPGQTGKIADYNYKLPDDFTGCVIAWNSNNLDSKVGGNYNYLYRLFRKSNLKPFERDISTEIYQAGSTPCNGVEGFNCYFPLQSYGFQPTNGVGYQPYRVVVLSFELLHAPATVCGPKKSTNLVKNKCVNFNFNGLTGTGVLTESNKKFLPFQQFGRDIADTTDAVRDPQTLEILDITPCSFGGVSVITPGTNTSNQVAVLYQDVNCTEVPVAIHADQLTPTWRVYSTGSNVFQTRAGCLIGAEHVNNSYECDIPIGAGICASYQTQTNSPRRARSVASQSIIAYTMSLGAENSVAYSNNSIAIPTNFTISVTTEILPVSMTKTSVDCTMYICGDSTECSNLLLQYGSFCTQLNRALTGIAVEQDKNTQEVFAQVKQIYKTPPIKDFGGFNFSQILPDPSKPSKRSFIEDLLFNKVTLADAGFIKQYGDCLGDIAARDLICAQKFNGLTVLPPLLTDEMIAQYTSALLAGTITSGWTFCAGAALQIPFAMQMAYRFNGIGVTQNVLYENQKLIANQFNSAIGKIQDSLSSTASALGKLQDVVNQNAQALNTLVKQLSSNFGAISSVLNDILSRLDKVEAEVQIDRLITGRLQSLQTYVTQQLIRAAEIRASANLAATKMSECVCGQSKRVDFCGKGYHLMSFPQSAPHGVVFLHVTYVPAQEKNFTTAPAICHDGKAHFPREGVFVSNGTHWFVTQRNFYEPQIITTDNTFVSGNCDVVIGIVNNTVYDPLQPELDSFKEELDKYFKNHTSPDVDLGDISGINASVVNIQKEIDRLNEVAKNLNESLIDLQELGKYEQYIKGGGGSDIDPYKEFGSSYQLLNFLPLDFFPDLNALVDTATALYEEELTGREHCSPHHTAIRQALVCWDELTKLIAWMSSNITSEQVRTIIVNHVNDTWGLKVRQSLWFHLSCLTFGQHTVQEFLVSFGVWIRTPAPYRPPNAPILSTLPEHTVIC

SEQ ID NO: 7215 - protein, 1365 aa, Artificial Sequence
  SARS-CoV-2/USA/WA-UW292/2020__EPI_ISL_418077 spike protein (1-1211)(G889C_L1034C) WhcAg construct
MFVFLVLLPLVSSQCVNLTTRTQLPPAYTNSFTRGVYYPDKVFRSSVLHSTQDLFLPFFSNVTWFHAIHVSGTNGTKRFDNPVLPFNDGVYFASTEKSNIIRGWIFGTTLDSKTQSLLIVNNATNVVIKVCEFQFCNDPFLGVYYHKNNKSWMESEFRVYSSANNCTFEYVSQPFLMDLEGKQGNFKNLREFVFKNIDGYFKIYSKHTPINLVRDLPQGFSALEPLVDLPIGINITRFQTLLALHRSYLTPGDSSSGWTAGAAAYYVGYLQPRTFLLKYNENGTITDAVDCALDPLSETKCTLKSFTVEKGIYQTSNFRVQPTESIVRFPNITNLCPFGEVFNATRFASVYAWNRKRISNCVADYSVLYNSASFSTFKCYGVSPTKLNDLCFTNVYADSFVIRGDEVRQIAPGQTGKIADYNYKLPDDFTGCVIAWNSNNLDSKVGGNYNYLYRLFRKSNLKPFERDISTEIYQASSTPCNGVEGFNCYFPLQSYGFQPTNGVGYQPYRVVVLSFELLHAPATVCGPKKSTNLVKNKCVNFNFNGLTGTGVLTESNKKFLPFQQFGRDIADTTDAVRDPQTLEILDITPCSFGGVSVITPGTNTSNQVAVLYQDVNCTEVPVAIHADQLTPTWRVYSTGSNVFQTRAGCLIGAEHVNNSYECDIPIGAGICASYQTQTNSPRRARSVASQSIIAYTMSLGAENSVAYSNNSIAIPTNFTISVTTEILPVSMTKTSVDCTMYICGDSTECSNLLLQYGSFCTQLNRALTGIAVEQDKNTQEVFAQVKQIYKTPPIKDFGGFNFSQILPDPSKPSKRSFIEDLLFNKVTLADAGFIKQYGDCLGDIAARDLICAQKFNGLTVLPPLLTDEMIAQYTSALLAGTITSGWTFCAGAALQIPFAMQMAYRFNGIGVTQNVLYENQKLIANQFNSAIGKIQDSLSSTASALGKLQDVVNQNAQALNTLVKQLSSNFGAISSVLNDILSRLDKVEAEVQIDRLITGRLQSLQTYVTQQLIRAAEIRASANLAATKMSECVCGQSKRVDFCGKGYHLMSFPQSAPHGVVFLHVTYVPAQEKNFTTAPAICHDGKAHFPREGVFVSNGTHWFVTQRNFYEPQIITTDNTFVSGNCDVVIGIVNNTVYDPLQPELDSFKEELDKYFKNHTSPDVDLGDISGINASVVNIQKEIDRLNEVAKNLNESLIDLQELGKYEQYIKGGGGSDIDPYKEFGSSYQLLNFLPLDFFPDLNALVDTATALYEEELTGREHCSPHHTAIRQALVCWDELTKLIAWMSSNITSEQVRTIIVNHVNDTWGLKVRQSLWFHLSCLTFGQHTVQEFLVSFGVWIRTPAPYRPPNAPILSTLPEHTVIC

SEQ ID NO: 7216 - protein, 1365 aa, Artificial Sequence
  SARS-CoV-2/Iceland/192/2020__EPI_ISL_417819 spike protein (1-1211)(G889C_L1034C) WhcAg construct
MFVFFVLLPLVSSQCVNLTTRTQLPPAYTNSFTRGVYYPDKVFRSSVLHSTQDLFLPFFSNVTWFHAIHVSGTNGTKRFDNPVLPFNDGVYFASTEKSNIIRGWIFGTTLDSKTQSLLIVNNATNVVIKVCEFQFCNDPFLGVYYHKNNKSWMESEFRVYSSANNCTFEYVSQPFLMDLEGKQGNFKNLREFVFKNIDGYFKIYSKHTPINLVRDLPQGFSALEPLVDLPIGINITRFQTLLALHRSYLTPGDSSSGWTAGAAAYYVGYLQPRTFLLKYNENGTITDAVDCALDPLSETKCTLKSFTVEKGIYQTSNFRVQPTESIVRFPNITNLCPFGEVFNATRFASVYAWNRKRISNCVADYSVLYNSASFSTFKCYGVSPTKLNDLCFTNVYADSFVIRGDEVRQIAPGQTGKIADYNYKLPDDFTGCVIAWNSNNLDSKVGGNYNYLYRLFRKSNLKPFERDISTEIYQAGSTPCNGVEGFNCYFPLQSYGFQPTNGVGYQPYRVVVLSFELLHAPATVCGPKKSTNLVKNKCVNFNFNGLTGTGVLTESNKKFLPFQQFGRDIADTTDAVRDPQTLEILDITPCSFGGVSVITPGTNTSNQVAVLYQGVNCTEVPVAIHADQLTPTWRVYSTGSNVFQTRAGCLIGAEHVNNSYECDIPIGAGICASYQTQTNSPRRARSVASQSIIAYTMSLGAENSVAYSNNSIAIPTNFTISVTTEILPVSMTKTSVDCTMYICGDSTECSNLLLQYGSFCTQLNRALTGIAVEQDKNTQEVFAQVKQIYKTPPIKDFGGFNFSQILPDPSKPSKRSFIEDLLFNKVTLADAGFIKQYGDCLGDIAARDLICAQKFNGLTVLPPLLTDEMIAQYTSALLAGTITSGWTFCAGAALQIPFAMQMAYRFNGIGVTQNVLYENQKLIANQFNSAIGKIQDSLSSTASALGKLQDVVNQNAQALNTLVKQLSSNFGAISSVLNDILSRLDKVEAEVQIDRLITGRLQSLQTYVTQQLIRAAEIRASANLAATKMSECVCGQSKRVDFCGKGYHLMSFPQSAPHGVVFLHVTYVPAQEKNFTTAPAICHDGKAHFPREGVFVSNGTHWFVTQRNFYEPQIITTDNTFVSGNCDVVIGIVNNTVYDPLQPELDSFKEELDKYFKNHTSPDVDLGDISGINASVVNIQKEIDRLNEVAKNLNESLIDLQELGKYEQYIKGGGGSDIDPYKEFGSSYQLLNFLPLDFFPDLNALVDTATALYEEELTGREHCSPHHTAIRQALVCWDELTKLIAWMSSNITSEQVRTIIVNHVNDTWGLKVRQSLWFHLSCLTFGQHTVQEFLVSFGVWIRTPAPYRPPNAPILSTLPEHTVIC

SEQ ID NO: 7217 - protein, 1365 aa, Artificial Sequence
  SARS-CoV-2/Belgium/ULG-6939/2020__EPI_ISL_417020 spike protein (1-1211)(G889C_L1034C) WhcAg construct
MFVFLVLLPLVSSQCVNLTTRTQLPPAYTNSFTRGVYYPDKVFRSSVLHSTQDLFLPFFSNVTWFHAIHVSGTNGTKRFDNPVLPFNDGVYFASTEKSNIIRGWIFGTTLDSKTQSLLIVNNATNVVIKVCEFQFCNDPFLGVYYHKNNKSWMESEFRVYSSANNCTFEYVSQPFLMDLEGKQGNFKNLREFVFKNIDGYFKIYSKHTPINLVRDLPQGFSALEPLVDLPIGINITRFQTLLALHRSYLTPGDSSSGWTAGAAAYYVGYLQPRTFLLKYNENGTITDAVDCALDPLSETKCTLKSFTVEKGIYQTSNFRVQPTESIVRFPNITNLCPFGEVFNATRFASVYAWNRKRISNCVADYSVLYNSASFSTFKCYGVSPTKLNDLCFTNVYADSFVIRGDEVRQIAPGQTGKIADYNYKLPDDFTGCVIAWNSNNLDSKVGGNYNYLYRLFRKSNLKPFERDISTEIYQAGSTPCNGVEGFNCYFPLQSYGFQPTNGVGYQPYRVVVLSFELLHAPATVCGPKKSTNLVKNKCVNFNFNGLTGTGVLTESNKKFLPFQQFGRDIADTTDAVRDPQTLEILDITPCSFGGVSVITPGTNTSNQVAVLYQGVNCTEVPVAIHADQLTPTWRVYSTGSNVFQTRAGCLIGAEHVNNSYECDIPIGAGICASYQTQTNSPRRARSVASQSIIAYTMSLGAENSVVYSNNSIAIPTNFTISVTTEILPVSMTKTSVDCTMYICGDSTECSNLLLQYGSFCTQLNRALTGIAVEQDKNTQEVFAQVKQIYKTPPIKDFGGFNFSQILPDPSKPSKRSFIEDLLFNKVTLADAGFIKQYGDCLGDIAARDLICAQKFNGLTVLPPLLTDEMIAQYTSALLAGTITSGWTFCAGAALQIPFAMQMAYRFNGIGVTQNVLYENQKLIANQFNSAIGKIQDSLSSTASALGKLQDVVNQNAQALNTLVKQLSSNFGAISSVLNDILSRLDKVEAEVQIDRLITGRLQSLQTYVTQQLIRAAEIRASANLAATKMSECVCGQSKRVDFCGKGYHLMSFPQSAPHGVVFLHVTYVPAQEKNFTTAPAICHDGKAHFPREGVFVSNGTHWFVTQRNFYEPQIITTDNTFVSGNCDVVIGIVNNTVYDPLQPELDSFKEELDKYFKNHTSPDVDLGDISGINASVVNIQKEIDRLNEVAKNLNESLIDLQELGKYEQYIKGGGGSDIDPYKEFGSSYQLLNFLPLDFFPDLNALVDTATALYEEELTGREHCSPHHTAIRQALVCWDELTKLIAWMSSNITSEQVRTIIVNHVNDTWGLKVRQSLWFHLSCLTFGQHTVQEFLVSFGVWIRTPAPYRPPNAPILSTLPEHTVIC

SEQ ID NO: 7218 - protein, 1365 aa, Artificial Sequence
  SARS-CoV-2/France/HF2496/2020__EPI_ISL_418231 spike protein (1-1211)(G889C_L1034C) WhcAg construct
MFVFLVLLPLVSSQCVNLTTRTQLPPAYTNSFTRGVYYPDKVFRSSVLHSTQDLFLPFFSNVTWFHAIHVSGTNGTKRFDNPVLPFNDGVYFASTEKSNIIRGWIFGTTLDSKTQSLLIVNNATNVVIKVCEFQFCNDPFLGVYYHKNNKSWMESEFRVYSSANNCTFEYVSQPFLMDLEGKQGNFKNLREFVFKNIDGYFKIYSKHTPINLVRDLPQGFSALEPLVDLPIGINITRFQTLLALHRSYLTPGDSSSGWTAGAAAYYVGYLQPRTFLLKYNENGTITDAVDCALDPLSETKCTLKSFTVEKGIYQTSNFRVQPTESIVRFPNITNLCPFGEVFNATRFASVYAWNRKRISNCVADYSVLYNSASFSTFKCYGVSPTKLNDLCFTNVYADSFVIRGDEVRQIAPGQTGKIADYNYKLPDDFTGCVIAWNSNNLDSKVGGNYNYLYRLFRKSNLKPFERDISTEIYQAGSTPCNGVEGFNCYFPLQSYGFQPTNGVGYQPYRVVVLSFELLHAPATVCGPKKSTNLVKNKCVNFNFNGLTGTGVLTESNKKFLPFQQFGRDIADTTDAVRDPQTLEILDITPCSFGGVSVITPGTNTSNQVAVLYQGVNCTEVPVAIHADQLTPTWRVYSTGSNVFQTRAGCLIGAEHVNNSYECDIPIGAGICASYQTQTNSPRRARSVASQSIIAYTMSLGAENSVAYSNNSIAIPTNFTISVTTEILPVSMTKTSVDCTMYICGDSTECSNLLLQYGSFCTQLNRALTGIAVEQDKNTQEVFAQVKQIYKTPPIKDFGGFNFSQILPDPSKPSKRSFIEDLLFNKVTLADAGFIKQYGDCLGDIVARDLICAQKFNGLTVLPPLLTDEMIAQYTSALLAGTITSGWTFCAGAALQIPFAMQMAYRFNGIGVTQNVLYENQKLIANQFNSAIGKIQDSLSSTASALGKLQDVVNQNAQALNTLVKQLSSNFGAISSVLNDILSRLDKVEAEVQIDRLITGRLQSLQTYVTQQLIRAAEIRASANLAATKMSECVCGQSKRVDFCGKGYHLMSFPQSAPHGVVFLHVTYVPAQEKNFTTAPAICHDGKAHFPREGVFVSNGTHWFVTQRNFYEPQIITTDNTFVSGNCDVVIGIVNNTVYDPLQPELDSFKEELDKYFKNHTSPDVDLGDISGINASVVNIQKEIDRLNEVAKNLNESLIDLQELGKYEQYIKGGGGSDIDPYKEFGSSYQLLNFLPLDFFPDLNALVDTATALYEEELTGREHCSPHHTAIRQALVCWDELTKLIAWMSSNITSEQVRTIIVNHVNDTWGLKVRQSLWFHLSCLTFGQHTVQEFLVSFGVWIRTPAPYRPPNAPILSTLPEHTVIC

SEQ ID NO: 7219 - protein, 1365 aa, Artificial Sequence
  SARS-CoV-2/USA/WA-UW291/2020__EPI_ISL_418076 spike protein (1-1211)(G889C_L1034C) WhcAg construct
MFVFLVLLPLVSSQCVNLTTRTQLPPAYTNSFTRGVYYPDKVFRSSVLHSTQDLFLPFFSNVTWFHAIHVSGTNGTKRFDNPVLPFNDGVYFASTEKSNIIRGWIFGTTLDSKTQSLLIVNNATNVVIKVCEFQFCNDPFLGVYYHKNNKSWMESEFRVYSSANNCTFEYVSQPFLMDLEGKQGNFKNLREFVFKNIDGYFKIYSKHTPINLVRDLPQGFSALEPLVDLPIGINITRFQTLLALHRSYLTPGDSSSGWTAGAAAYYVGYLQPRTFLLKYNENGTITDAVDCALDPLSETKCTLKSFTVEKGIYQTSNFRVQPTESIVRFPNITNLCPFGEVFNATRFASVYAWNRKRISNCVADYSVLYNSASFSTFKCYGVSPTKLNDLCFTNVYADSFVIRGDEVRQIAPGQTGKIADYNYKLPDDFTGCVIAWNSNNLDSKVGGNYNYLYRLFRKSNLKPFERDISTEIYQAGSTPCNGVEGFNCYFPLQSYGFQPTNGVGYQPYRVVVLSFELLHAPATVCGPKKSTNLVKNKCVNFNFNGLTGTGVLTESNKKFLPFQQFGRDIADTTDAVRDPQTLEILDITPCSFGGVSVITPGTNTSNQVAVLYQGVNCTEVPVAIHADQLTPTWRVYSTGSNVFQTRAGCLIGAEHVNNSYECDIPIGAGICASYQTQTNSPRRARSVASQSIIAYTMSLGAENSVAYSNNSIAIPTNFTISVTTEILPVSMTKTSVDCTMYICGDSTECSNLLLQYGSFCTQLNRALTGIAVEQDKNTQEVFAQVKQIYKTPPIKDFGGFNFSQILPDPSKPSKRSFIEDLLFNKVTLADAGFIKQYGDCLGDIAARDLICAQKFNGLTVLPPLLTDEMIAQYTSALLAGTITSGWTFCAGAALQIPFAMQMAYRFNGIGVTQNVLYENQKLIANQFNSAIGKIQYSLSSTASALGKLQDVVNQNAQALNTLVKQLSSNFGAISSVLNDILSRLDKVEAEVQIDRLITGRLQSLQTYVTQQLIRAAEIRASANLAATKMSECVCGQSKRVDFCGKGYHLMSFPQSAPHGVVFLHVTYVPAQEKNFTTAPAICHDGKAHFPREGVFVSNGTHWFVTQRNFYEPQIITTDNTFVSGNCDVVIGIVNNTVYDPLQPELDSFKEELDKYFKNHTSPDVDLGDISGINASVVNIQKEIDRLNEVAKNLNESLIDLQELGKYEQYIKGGGGSDIDPYKEFGSSYQLLNFLPLDFFPDLNALVDTATALYEEELTGREHCSPHHTAIRQALVCWDELTKLIAWMSSNITSEQVRTIIVNHVNDTWGLKVRQSLWFHLSCLTFGQHTVQEFLVSFGVWIRTPAPYRPPNAPILSTLPEHTVIC

SEQ ID NO: 7220 - protein, 1365 aa, Artificial Sequence; identical to SEQ ID NO: 7183
  SARS-CoV-2/Portugal/PT0034/2020__EPI_ISL_418019 spike protein (1-1211)(G889C_L1034C) WhcAg construct

SEQ ID NO: 7221 - protein, 1365 aa, Artificial Sequence
  SARS-CoV-2/Iceland/202/2020__EPI_ISL_417750 spike protein (1-1211)(G889C_L1034C) WhcAg construct
MFVFLVLLPLVSSQCVNLTTRTQLPPAYTNSFTRGVYYPDKVFRSSVLHSTQDLFLPFFSNVTWFHAIHVSGTNGTKRFDNPVLPFNDGVYFASTEKSNIIRGWIFGTTLDSKTQSLLIVNNATNVVIKVCEFQFCNDPFLGVYYHKNNKSWMESEFRVYSSANNCTFEYVSQPFLMDLEGKQGNFKNLREFVFKNIDGYFKIYSKHTPINLVRDLPQGFSALEPLVDLPIGINITRFQTLLALHRSYLTPGDSSSGWTAGAAAYYVGYLQPRTFLLKYNENGTITDAVDCALDPLSETKCTLKSFTVEKGIYQTSNFRVQPTESIVRFPNITNLCPFGEVFNATRFASVYAWNRKRISNCVADYSVLYNSASFSTFKCYGVSPTKLNDLCFTNVYADSFVIRGDEVRQIAPGQTGKIADYNYKLPDDFTGCVIAWNSNNLDSKVGGNYNYLYRLFRKSNLKPFERDISTEIYQAGSTPCNGVEGFNCYFPLQSYGFQPTNGVGYQPYRVVVLSFELLHAPATVCGPKKSTNLVKNKCVNFNFNGLTGTGVLTESNKKFLPFQQFGRDIADTTDAVRDPQTLEILDITPCSFGGVSVITPGTNTSNQVAVLYQDVNCTEVPVAIHADQLTPTWRVYSTGSNVFQTRAGCLIGAEHVNNSYECDIPIGAGICASYQTQTNSPRRARSVASQSIIAYTMSLGAENSVAYSNNSIAIPTNFTISVTTEILPVSMTKTSVDCTMYICGDSTECSNLLLQYGSFCTQLNRALTGIAVEQDKNTQEVFAQVKQIYKTPPIKDFGGFNFSQILPDPSKPSKRSFIEDLLFNKVTLADAGFIKQYGDCLGDIAARDLICAQKFNGLTVLPPLLTDEMIAQYTSALLAGTITSGWTFCAGAALQIPFAMQMAYRFNGIGVTQNVLYENQKLIANQFNSAIGKIQDSLSSTASALGKLQDVVNQNAQALNTLVKQLSSNFGAISSVLNDILSRLDKVEAEVQIDRLITGRLQSLQTYVTQQLIRAAEIRASANLAATKMSECVCGQSKRVDFCGKGYHLMSFPQSAPHGVVFLHVTYVPAQEKNFTTAPAICHDGKAHFPREGVFVSNGTHWFVTQRNFYEPQIITTDNTFVSGNCDVVIGIVNNTVYDPLQPELDSFKEELDKYFKNHTSPDVDLGDIPGINASVVNIQKEIDRLNEVAKNLNESLIDLQELGKYEQYIKGGGGSDIDPYKEFGSSYQLLNFLPLDFFPDLNALVDTATALYEEELTGREHCSPHHTAIRQALVCWDELTKLIAWMSSNITSEQVRTIIVNHVNDTWGLKVRQSLWFHLSCLTFGQHTVQEFLVSFGVWIRTPAPYRPPNAPILSTLPEHTVIC

SEQ ID NO: 7222 - protein, 1365 aa, Artificial Sequence
  SARS-CoV-2/USA/WA-UW261/2020__EPI_ISL_418046 spike protein (1-1211)(G889C_L1034C) WhcAg construct
MFVFLVLLPLVSSQCVNLTTRTQLPPAYTNSFTRGVYYPDKVFRSSVLHSTQDLFLPFFSNVTWFHAIHVSGTNGTKRFDNPVLPFNDGVYFASTEKSNIIRGWIFGTTLDSKTQSLLIVNNATNVVIKVCEFQFCNDPFLGVYYHKNNKSWMESEFRVYSSANNCTFEYVSQPFLMDLEGKQGNFKNLREFVFKNIDGYFKIYSKHTPINLVRDLPQGFSALEPLVDLPIGINITRFQTLLALHRSYLTPGDSSSGWTAGAAAYYVGYLQPRTFLLKYNENGTITDAVDCALDPLSETKCTLKSFTVEKGIYQTSNFRVQPTESIVRFPNITNLCPFGEVFNATRFTSVYAWNRKRISNCVADYSVLYNSASFSTFKCYGVSPTKLNDLCFTNVYADSFVIRGDEVRQIAPGQTGKIADYNYKLPDDFTGCVIAWNSNNLDSKVGGNYNYLYRLFRKSNLKPFERDISTEIYQAGSTPCNGVEGFNCYFPLQSYGFQPTNGVGYQPYRVVVLSFELLHAPATVCGPKKSTNLVKNKCVNFNFNGLTGTGVLTESNKKFLPFQQFGRDIADTTDAVRDPQTLEILDITPCSFGGVSVITPGTNTSNQVAVLYQDVNCTEVPVAIHADQLTPTWRVYSTGSNVFQTRAGCLIGAEHVNNSYECDIPIGAGICASYQTQTNSPRRARSVASQSIIAYTMSLGAENSVAYSNNSIAIPTNFTISVTTEILPVSMTKTSVDCTMYICGDSTECSNLLLQYGSFCTQLNRALTGIAVEQDKNTQEVFAQVKQIYKTPPIKDFGGFNFSQILPDPSKPSKRSFIEDLLFNKVTLADAGFIKQYGDCLGDIAARDLICAQKFNGLTVLPPLLTDEMIAQYTSALLAGTITSGWTFCAGAALQIPFAMQMAYRFNGIGVTQNVLYENQKLIANQFNSAIGKIQDSLSSTASALGKLQDVVNQNAQALNTLVKQLSSNFGAISSVLNDILSRLDKVEAEVQIDRLITGRLQSLQTYVTQQLIRAAEIRASANLAATKMSECVCGQSKRVDFCGKGYHLMSFPQSAPHGVVFLHVTYVPAQEKNFTTAPAICHDGKAHFPREGVFVSNGTHWFVTQRNFYEPQIITTDNTFVSGNCDVVIGIVNNTVYDPLQPELDSFKEELDKYFKNHTSPDVDLGDISGINASVVNIQKEIDRLNEVAKNLNESLIDLQELGKYEQYIKGGGGSDIDPYKEFGSSYQLLNFLPLDFFPDLNALVDTATALYEEELTGREHCSPHHTAIRQALVCWDELTKLIAWMSSNITSEQVRTIIVNHVNDTWGLKVRQSLWFHLSCLTFGQHTVQEFLVSFGVWIRTPAPYRPPNAPILSTLPEHTVIC

SEQ ID NO: 7223 - protein, 1365 aa, Artificial Sequence
  SARS-CoV-2/Portugal/PT0035/2020__EPI_ISL_418020 spike protein (1-1211)(G889C_L1034C) WhcAg construct
MFVFLVLLPLVSSQCVNLTTRTQLPPAYTNSFTRGVYYPDKVFRSSVLHSTQDLFLPFFSNVTWFHAIHVSGTNGTKRFDNPVLPFNDGVYFASTEKSNIIRGWIFGTTLDSKTQSLLIVNNATNVVIKVCEFQFCNDPFLGVYYHKNNKSWMESEFRVYSSANNCTFEYVSQPFLMDLEGKQGNFKNLREFVFKNIDGYFKIYSKHTPINLVRDLPQGFSALEPLVDLPIGINITRFQTLLALHRSYLTPGDSSSGWTAGAAAYYVGYLQPRTFLLKYNENGTITDAVDCALDPLSETKCTLKSFTVEKGIYQTSNFRVQPTESIVRFPNITNLCPFGEVFNATRFASVYAWNRKRISNCVADYSVLYNSASFSTFKCYGVSPTKLNDLCFTNVYADSFVIRGDEVRQIAPGQTGKIADYNYKLPDDFTGCVIAWNSNNLDSKVGGNYNYLYRLFRKSNLKPFERDISTEIYQAGSTPCNGVEGFNCYFPLQSYGFQPTNGVGYQPYRVVVLSFELLHAPATVCGPKKSTNLVKNKCVNFNFNGLTGTGVLTESNKKFLPFQQFGRDIADTTDAVRDPQTLEILDITPCSFGGVSVITPGTNTSNQVAVLYQDVNCTEVPVAIHADQLTPTWRVYSTGSNVFQTRAGCLIGAEHVNNSYECDIPIGAGICASYQTQTNSPRRARSVASQSIIAYTMSLGAENSVAYSNNSIAIPTNFTISVTTEILPVSMTKTSVDCTMYICGDSTECSNLLLQYGSFCTQLNRALTGIAVEQDKNTQEVFAQVKQIYKTPPIKDFGGFNFSQILPDPSKPSKRSFIEDLLFNKVTLADAGFIKQYGDCLGDISARDLICAQKFNGLTVLPPLLTDEMIAQYTSALLAGTITSGWTFCAGAALQIPFAMQMAYRFNGIGVTQNVLYENQKLIANQFNSAIGKIQDSLSSTASALGKLQDVVNQNAQALNTLVKQLSSNFGAISSVLNDILSRLDKVEAEVQIDRLITGRLQSLQTYVTQQLIRAAEIRASANLAATKMSECVCGQSKRVDFCGKGYHLMSFPQSAPHGVVFLHVTYVPAQEKNFTTAPAICHDGKAHFPREGVFVSNGTHWFVTQRNFYEPQIITTDNTFVSGNCDVVIGIVNNTVYDPLQPELDSFKEELDKYFKNHTSPDVDLGDISGINASVVNIQKEIDRLNEVAKNLNESLIDLQELGKYEQYIKGGGGSDIDPYKEFGSSYQLLNFLPLDFFPDLNALVDTATALYEEELTGREHCSPHHTAIRQALVCWDELTKLIAWMSSNITSEQVRTIIVNHVNDTWGLKVRQSLWFHLSCLTFGQHTVQEFLVSFGVWIRTPAPYRPPNAPILSTLPEHTVIC

SEQ ID NO: 7224 - protein, 1365 aa, Artificial Sequence
  SARS-CoV-2/USA/NY-NYUMC7/2020__EPI_ISL_418192 spike protein (1-1211)(G889C_L1034C) WhcAg construct
MFVFLVLLPLVSSQCVNLTTRTQLPPAYTNSFTRGVYYPDKVFRSSVLHSTQDLFLPFFSNVTWFHAIHVSGTNGTKRFDNPVLPFNDGVYFASTEKSNIIRGWIFGTTLDSKTQSLLIVNNATNVVIKVCEFQFCNDPFLGVYHHKNNKSWMESEFRVYSSANNCTFEYVSQPFLMDLEGKQGNFKNLREFVFKNIDGYFKIYSKHTPINLVRDLPQGFSALEPLVDLPIGINITRFQTLLALHRSYLTPGDSSSGWTAGAAAYYVGYLQPRTFLLKYNENGTITDAVDCALDPLSETKCTLKSFTVEKGIYQTSNFRVQPTESIVRFPNITNLCPFGEVFNATRFASVYAWNRKRISNCVADYSVLYNSASFSTFKCYGVSPTKLNDLCFTNVYADSFVIRGDEVRQIAPGQTGKIADYNYKLPDDFTGCVIAWNSNNLDSKVGGNYNYLYRLFRKSNLKPFERDISTEIYQAGSTPCNGVEGFNCYFPLQSYGFQPTNGVGYQPYRVVVLSFELLHAPATVCGPKKSTNLVKNKCVNFNFNGLTGTGVLTESNKKFLPFQQFGRDIADTTDAVRDPQTLEILDITPCSFGGVSVITPGTNTSNQVAVLYQGVNCTEVPVAIHADQLTPTWRVYSTGSNVFQTRAGCLIGAEHVNNSYECDIPIGAGICASYQTQTNSPRRARSVASQSIIAYTMSLGAENSVAYSNNSIAIPTNFTISVTTEILPVSMTKTSVDCTMYICGDSTECSNLLLQYGSFCTQLNRALTGIAVEQDKNTQEVFAQVKQIYKTPPIKDFGGFNFSQILPDPSKPSKRSFIEDLLFNKVTLADAGFIKQYGDCLGDIAARDLICAQKFNGLTVLPPLLTDEMIAQYTSALLAGTITSGWTFCAGAALQIPFAMQMAYRFNGIGVTQNVLYENQKLIANQFNSAIGKIQDSLSSTASALGKLQDVVNQNAQALNTLVKQLSSNFGAISSVLNDILSRLDKVEAEVQIDRLITGRLQSLQTYVTQQLIRAAEIRASANLAATKMSECVCGQSKRVDFCGKGYHLMSFPQSAPHGVVFLHVTYVPAQEKNFTTAPAICHDGKAHFPREGVFVSNGTHWFVTQRNFYEPQIITTDNTFVSGNCDVVIGIVNNTVYDPLQPELDSFKEELDKYFKNHTSPDVDLGDISGINASVVNIQKEIDRLNEVAKNLNESLIDLQELGKYEQYIKGGGGSDIDPYKEFGSSYQLLNFLPLDFFPDLNALVDTATALYEEELTGREHCSPHHTAIRQALVCWDELTKLIAWMSSNITSEQVRTIIVNHVNDTWGLKVRQSLWFHLSCLTFGQHTVQEFLVSFGVWIRTPAPYRPPNAPILSTLPEHTVIC

SEQ ID NO: 7225 - protein, 1365 aa, Artificial Sequence
  SARS-CoV-2/Iceland/189/2020__EPI_ISL_417709 spike protein (1-1211)(G889C_L1034C) WhcAg construct
MFVFLVLLPLVSSQCVNLTTRTQLPPAYTNSFTRGVYYPDKVFRSSVLHSTQDLFLPFFSNVTWFHAIHVSGTNGTKRFDNPVLPFNDGVYFASTEKSNIIRGWIFGTTLDSKTQSLLIVNNATNVVIKVCEFQFCNDPFLGVYYHKNNKSWMESEFRVYSSANNCTFEYVSQPFLMDLEGKQGNFKNLREFVFKNIDGYFKIYSKHTPINLVRDLPQGFSALEPLVDLPIGINITRFQTLLALHRSYLTPGDSSSGWTAGAAAYYVGYLQPRTFLLKYNENGTITDAVDCALDPLSETKCTLKSFTVEKGIYQTSNFRVQPTESIVRFPNITNLCPFGEVFNATRFASVYAWNRKRISNCVADYSVLYNSASFSTFKCYGVSPTKLNDLCFTNVYADSFVIRGDEVRQIAPGQTGKIADYNYKLPDDFTGCVIAWNSNNLDSKVGGNYNYLYRLFRKSNLKPFERDISTEIYQAGSTPCNGVEGFNCYFPLQSYGFQPTNGVGYQPYRVVVLSFELLHAPATVCGPKKSTNLVKNKCVNFNFNGLTGTGVLTESNKKFLPFQQFGRDIADTTDAVRDPQTLEILDITPCSFGGVSVITPGTNTSNQVAVLYQGVNCTEVPVAIHADQLTPTWRVYSTGSNVFQTRAGCLIGAEHVNNSYECDIPIGAGICASYQTQTNSPRRARSVASQSIIAYTMSLGAENSVAYSNNSIAIPTNFTISVTTEILPVSMTKTSVDCTMYICGDSTECSNLLLQYGSFCTQLNRALTGIAVEQDKNTQEVFAQVKQIYKTPPIKDFGGFNFSQILPDPSKPSKRSFIEDLLFNKVTLADAGFTKQYGDCLGDIAARDLICAQKFNGLTVLPPLLTDEMIAQYTSALLAGTITSGWTFCAGAALQIPFAMQMAYRFNGIGVTQNVLYENQKLIANQFNSAIGKIQDSLSSTASALGKLQDVVNQNAQALNTLVKQLSSNFGAISSVLNDILSRLDKVEAEVQIDRLITGRLQSLQTYVTQQLIRAAEIRASANLAATKMSECVCGQSKRVDFCGKGYHLMSFPQSAPHGVVFLHVTYVPAQEKNFTTAPAICHDGKAHFPREGVFVSNGTHWFVTQRNFYEPQIITTDNTFVSGNCDVVIGIVNNTVYDPLQPELDSFKEELDKYFKNHTSPDVDLGDISGINASVVNIQKEIDRLNEVAKNLNESLIDLQELGKYEQYIKGGGGSDIDPYKEFGSSYQLLNFLPLDFFPDLNALVDTATALYEEELTGREHCSPHHTAIRQALVCWDELTKLIAWMSSNITSEQVRTIIVNHVNDTWGLKVRQSLWFHLSCLTFGQHTVQEFLVSFGVWIRTPAPYRPPNAPILSTLPEHTVIC

SEQ ID NO: 7226 - protein, 1365 aa, Artificial Sequence
  SARS-CoV-2/Australia/NSW56/2020__EPI_ISL_417408 spike protein (1-1211)(G889C_L1034C) WhcAg construct
MFVFLVLLPLVSSQCVNLTTRTQLPPAYTNSFTRGVYYPDKVFRSSVLHSTQDLFLPFFSNVTWFHAIHVSGTNGTKRFDNPVLPFNDGVYFASTEKSNIIRGWIFGTTLDSKTQSLLIVNNATNVVIKVCEFQFCNDPFLGVYYHKNNKSWMESEFRVYSSANNCTFEYVSQPFLMDLEGKQGNFKNLREFVFKNIDGYFKIYSKHTPINLVRDLPQGFSALEPLVDLPIGINITRFQTLLALHRSYLTPGDSSSGWTAGAAAYYVGYLQPRTFLLKYNENGTITDAVDCALDPLSETKCTLKSFTVEKGIYQTSNFRVQPTESIVRFPNITNLCPFGEVFNATRFASVYAWNRKRISNCVADYSVLYNSASFSTFKCYGVSPTKLNDLCFTNVYADSFVIRGDEVRQIAPGQTGKIADYNYKLPDDFTGCVIAWNSNNLDSKVGGNYNYLYRLFRKSNLKPFERDISTEIYQAGSTPCNGVEGFNCYFPLQSYGFQPTNGVGYQPYRVVVLSFELLHAPATVCGPKKSTNLVKNKCVNFNFNGLTGTGVLTESNKKFLPFQQFGRDIADTTDAVRDPQTLEILDITPCSFGGVSVITPGTNTSNQVAVLYQDVNCTEVPVAIHADQLTPTWRVYSTGSNVFQTRAGCLIGAEHVNNSYECDIPIGAGICASYQTQTNSPRRARSVASQSIIAYTMSLGAENSVAYSNNSIAIPTNFTISVTTEILPVSMTKTSVDCTMYICGDSTECSNLLLQYGSFCTQLNRALTGIAVEQDKNTQEVFAQVKQIYKTPPIKDFGGFNFSQILPDSSKPSKRSFIEDLLFNKVTLADAGFIKQYGDCLGDIAARDLICAQKFNGLTVLPPLLTDEMIAQYTSALLAGTITSGWTFCAGAALQIPFAMQMAYRFNGIGVTQNVLYENQKLIANQFNSAIGKIQDSLSSTASALGKLQDVVNQNAQALNTLVKQLSSNFGAISSVLNDILSRLDKVEAEVQIDRLITGRLQSLQTYVTQQLIRAAEIRASANLAATKMSECVCGQSKRVDFCGKGYHLMSFPQSAPHGVVFLHVTYVPAQEKNFTTAPAICHDGKAHFPREGVFVSNGTHWFVTQRNFYEPQIITTDNTFVSGNCDVVIGIVNNTVYDPLQPELDSFKEELDKYFKNHTSPDVDLGDISGINASVVNIQKEIDRLNEVAKNLNESLIDLQELGKYEQYIKGGGGSDIDPYKEFGSSYQLLNFLPLDFFPDLNALVDTATALYEEELTGREHCSPHHTAIRQALVCWDELTKLIAWMSSNITSEQVRTIIVNHVNDTWGLKVRQSLWFHLSCLTFGQHTVQEFLVSFGVWIRTPAPYRPPNAPILSTLPEHTVIC

SEQ ID NO: 7227 - protein, 1365 aa, Artificial Sequence
  SARS-CoV-2/Iceland/280/2020__EPI_ISL_417608 spike protein (1-1211)(G889C_L1034C) WhcAg construct
MFVFLVLLPLVSSQCVNLTTRTQLPPAYTNSFTRGVYYPDKVFRSSVLHSTQDLFLPFFSNVTWFHAIHVSGTNGTKRFDNPVLPFNDGVYFASTEKSNIIRGWIFGTTLDSKTQSLLIVNNATNVVIKVCEFQFCNDPFLGVYYHKNNKSWMESEFRVYSSANNCTFEYVSQPFLMDLEGKQGNFKNLREFVFKNIDGYFKIYSKHTPINLVRDLPQGFSALEPLVDLPIGINITRFQTLLALHRSYLTPGDSSSGWTAGAAAYYVGYLQPRTFLLKYNENGTITDAVDCALDPLSETKCTLKSFTVEKGIYQTSNFRVQPTESIVRFPNITNLCPFGEVFNATRFASVYAWNRKRISNCVADYSVLYNSASFSTFKCYGVSPTKLNDLCFTNVYADSFVIRGDEVRQIAPGQTGKIADYNYKLPDDFTGCVIAWNSNNLDSKVGGNYNYLYRLFRKSNLKPFERDISTEIYQAGSTPCNGVEGFNCYFPLQSYGFQPTNGVGYQPYRVVVLSFELLHAPATVCGPKKSTNLVKNKCVNFNFNGLTGTGVLTESNKKFLPFQQFGRDIADTTDAVRDPQTLEILDITPCSFGGVSVITPGTNTSNQVAVLYQGVNCTEVPVAIHADQLTPTWRVYSTGSNVFQTRAGCLIGAEHVNNSYECDIPIGAGICASYHTQTNSPRRARSVASQSIIAYTMSLGAENSVAYSNNSIAIPTNFTISVTTEILPVSMTKTSVDCTMYICGDSTECSNLLLQYGSFCTQLNRALTGIAVEQDKNTQEVFAQVKQIYKTPPIKDFGGFNFSQILPDPSKPSKRSFIEDLLFNKVTLADAGFIKQYGDCLGDIAARDLICAQKFNGLTVLPPLLTDEMIAQYTSALLAGTITSGWTFCAGAALQIPFAMQMAYRFNGIGVTQNVLYENQKLIANQFNSAIGKIQDSLSSTASALGKLQDVVNQNAQALNTLVKQLSSNFGAISSVLNDILSRLDKVEAEVQIDRLITGRLQSLQTYVTQQLIRAAEIRASANLAATKMSECVCGQSKRVDFCGKGYHLMSFPQSAPHGVVFLHVTYVPAQEKNFTTAPAICHDGKAHFPREGVFVSNGTHWFVTQRNFYEPQIITTDNTFVSGNCDVVIGIVNNTVYDPLQPELDSFKEELDKYFKNHTSPDVDLGDISGINASVVNIQKEIDRLNEVAKNLNESLIDLQELGKYEQYIKGGGGSDIDPYKEFGSSYQLLNFLPLDFFPDLNALVDTATALYEEELTGREHCSPHHTAIRQALVCWDELTKLIAWMSSNITSEQVRTIIVNHVNDTWGLKVRQSLWFHLSCLTFGQHTVQEFLVSFGVWIRTPAPYRPPNAPILSTLPEHTVIC

SEQ ID NO: 7228 - protein, 1365 aa, Artificial Sequence; identical to SEQ ID NO: 7183
  SARS-CoV-2/Iceland/247/2020__EPI_ISL_417575 spike protein (1-1211)(G889C_L1034C) WhcAg construct

SEQ ID NO: 7229 - protein, 1365 aa, Artificial Sequence
  SARS-CoV-2/Iceland/238/2020__EPI_ISL_417566 spike protein (1-1211)(G889C_L1034C) WhcAg construct
MFVFLVLLPLVSSQCVNLTTRTQLPPAYTNSFTRGVYYPDKVFRSSVLHSTQDLFLPFFSNVTWFHAIHVSGTNGTKRFDNPVLPFNDGVYFASTEKSNIIRGWIFGTTLDSKTQSLLIVNNATNVVIKVCEFQFCNDPFLGVYYHKNNKSWMESEFRVYSSANNCTFEYVSQPFLMDLEGKQGNFKNLREFVFKNIDGYFKIYSKHTPINLVRDLPQGFSALEPLVDLPIGINITRFQTLLALHRSYLTPGDSSSGWTAGAAAYYVGYLQPRTFLLKYNENGTITDAVDCALDPLSETKCTLKSFTVEKGIYQTSNFRVQPTESIVRFPNITNLCPFGEVFNATRFASVYAWNRKRISNCVADYSVLYNSASFSTFKCYGVSPTKLNDLCFTNVYADSFVIRGDEVRQIAPGQTGKIADYNYKLPDDFTGCVIAWNSNNLDSKVGGNYNYLYRLFRKSNLKPFERDISTEIYQAGSTPCNGVEGFNCYFPLQSYGFQPTNGVGYQPYRVVVLSFELLHAPATVCGPKKSTNLVKNKCVNFNFNGLTGTGVLTESNKKFLPFQQFGRDIADTTDAVRDPQTLEILDITPCSFGGVSVITPGTNTSNQVAVLYQGVNCTEVPVAIHADQLTPTWRVYSTGSNVFQTRAGCLIGAEHVNNSYECDIPIGAGICASYQTQTNSPRRARSVASQSIIAYTMSLGAENSVAYSNNSIAIPTNFTISVTTEILPVSMTKTSVDCTMYICGDSTECSNLLLQYGSFCTQLNRALTGIAVEQDKNTQEVFAQVKQIYKTPPIKDFGGFNFSQILPDPSKPSKRSFIEDLLFNKVTLADVGFIKQYGDCLGDIAARDLICAQKFNGLTVLPPLLTDEMIAQYTSALLAGTITSGWTFCAGAALQIPFAMQMAYRFNGIGVTQNVLYENQKLIANQFNSAIGKIQDSLSSTASALGKLQDVVNQNAQALNTLVKQLSSNFGAISSVLNDILSRLDKVEAEVQIDRLITGRLQSLQTYVTQQLIRAAEIRASANLAATKMSECVCGQSKRVDFCGKGYHLMSFPQSAPHGVVFLHVTYVPAQEKNFTTAPAICHDGKAHFPREGVFVSNGTHWFVTQRNFYEPQIITTDNTFVSGNCDVVIGIVNNTVYDPLQPELDSFKEELDKYFKNHTSPDVDLGDISGINASVVNIQKEIDRLNEVAKNLNESLIDLQELGKYEQYIKGGGGSDIDPYKEFGSSYQLLNFLPLDFFPDLNALVDTATALYEEELTGREHCSPHHTAIRQALVCWDELTKLIAWMSSNITSEQVRTIIVNHVNDTWGLKVRQSLWFHLSCLTFGQHTVQEFLVSFGVWIRTPAPYRPPNAPILSTLPEHTVIC

SEQ ID NO: 7230 - protein, 1365 aa, Artificial Sequence
  SARS-CoV-2/Greece/16/2020__EPI_ISL_418265 spike protein (1-1211)(G889C_L1034C) WhcAg construct
MFVFLVLLPLVSSQCVNLTTRTQLPPAYTNSFTRGVYYPDKVFRSSVLHSTQDLFLPFFSNVTWFHAIHVSGTNGTKRFDNPVLPFNDGVYFASTEKSNIIRGWIFGTTLDSKTQSLLIVNNATNVVIKVCEFQFCNDPFLGVYYHKNNKSWMESEFRVYSSANNCTFEYVSQPFLMDLEGKQGNFKNLREFVFKNVDGYFKIYSKHTPINLVRDLPQGFSALEPLVDLPIGINITRFQTLLALHRSYLTPGDSSSGWTAGAAAYYVGYLQPRTFLLKYNENGTITDAVDCALDPLSETKCTLKSFTVEKGIYQTSNFRVQPTESIVRFPNITNLCPFGEVFNATRFASVYAWNRKRISNCVADYSVLYNSASFSTFKCYGVSPTKLNDLCFTNVYADSFVIRGDEVRQIAPGQTGKIADYNYKLPDDFTGCVIAWNSNNLDSKVGGNYNYLYRLFRKSNLKPFERDISTEIYQAGSTPCNGVEGFNCYFPLQSYGFQPTNGVGYQPYRVVVLSFELLHAPATVCGPKKSTNLVKNKCVNFNFNGLTGTGVLTESNKKFLPFQQFGRDIADTTDAVRDPQTLEILDITPCSFGGVSVITPGTNTSNQVAVLYQDVNCTEVPVAIHADQLTPTWRVYSTGSNVFQTRAGCLIGAEHVNNSYECDIPIGAGICASYQTQTNSPRRARSVASQSIIAYTMSLGAENSVAYSNNSIAIPTNFTISVTTEILPVSMTKTSVDCTMYICGDSTECSNLLLQYGSFCTQLNRALTGIAVEQDKNTQEVFAQVKQIYKTPPIKDFGGFNFSQILPDPSKPSKRSFIEDLLFNKVTLADAGFIKQYGDCLGDIAARDLICAQKFNGLTVLPPLLTDEMIAQYTSALLAGTITSGWTFCAGAALQIPFAMQMAYRFNGIGVTQNVLYENQKLIANQFNSAIGKIQDSLSSTASALGKLQDVVNQNAQALNTLVKQLSSNFGAISSVLNDILSRLDKVEAEVQIDRLITGRLQSLQTYVTQQLIRAAEIRASANLAATKMSECVCGQSKRVDFCGKGYHLMSFPQSAPHGVVFLHVTYVPAQEKNFTTAPAICHDGKAHFPREGVFVSNGTHWFVTQRNFYEPQIITTDNTFVSGNCDVVIGIVNNTVYDPLQPELDSFKEELDKYFKNHTSPDVDLGDISGINASVVNIQKEIDRLNEVAKNLNESLIDLQELGKYEQYIKGGGGSDIDPYKEFGSSYQLLNFLPLDFFPDLNALVDTATALYEEELTGREHCSPHHTAIRQALVCWDELTKLIAWMSSNITSEQVRTIIVNHVNDTWGLKVRQSLWFHLSCLTFGQHTVQEFLVSFGVWIRTPAPYRPPNAPILSTLPEHTVIC

SEQ ID NO: 7231 - protein, 1365 aa, Artificial Sequence
  SARS-CoV-2/Iceland/319/2020__EPI_ISL_417648 spike protein (1-1211)(G889C_L1034C) WhcAg construct
MFVFLVLLPLVSSQCVNLTTRTQLPPAYTNSFTRGVYYPDKVFRSSVLHSTQDLFLPFFSNVTWFHAIHVSGTNGTKRFDNPVLPFNDGVYFASTEKSNIIRGWIFGTTLDSKTQSLLIVNNATNVVIKVCEFQFCNDPFLGVYYHKNNKSWMESEFRVYSSANNCTFEYVSQPFLIDLEGKQGNFKNLREFVFKNIDGYFKIYSKHTPINLVRDLPQGFSALEPLVDLPIGINITRFQTLLALHRSYLTPGDSSSGWTAGAAAYYVGYLQPRTFLLKYNENGTITDAVDCALDPLSETKCTLKSFTVEKGIYQTSNFRVQPTESIVRFPNITNLCPFGEVFNATRFASVYAWNRKRISNCVADYSVLYNSASFSTFKCYGVSPTKLNDLCFTNVYADSFVIRGDEVRQIAPGQTGKIADYNYKLPDDFTGCVIAWNSNNLDSKVGGNYNYLYRLFRKSNLKPFERDISTEIYQAGSTPCNGVEGFNCYFPLQSYGFQPTNGVGYQPYRVVVLSFELLHAPATVCGPKKSTNLVKNKCVNFNFNGLTGTGVLTESNKKFLPFQQFGRDIADTTDAVRDPQTLEILDITPCSFGGVSVITPGTNTSNQVAVLYQGVNCTEVPVAIHADQLTPTWRVYSTGSNVFQTRAGCLIGAEHVNNSYECDIPIGAGICASYQTQTNSPRRARSVASQSIIAYTMSLGAENSVAYSNNSIAIPTNFTISVTTEILPVSMTKTSVDCTMYICGDSTECSNLLLQYGSFCTQLNRALTGIAVEQDKNTQEVFAQVKQIYKTPPIKDFGGFNFSQILPDPSKPSKRSFIEDLLFNKVTLADAGFIKQYGDCLGDIAARDLICAQKFNGLTVLPPLLTDEMIAQYTSALLAGTITSGWTFCAGAALQIPFAMQMAYRFNGIGVTQNVLYENQKLIANQFNSAIGKIQDSLSSTASALGKLQDVVNQNAQALNTLVKQLSSNFGAISSVLNDILSRLDKVEAEVQIDRLITGRLQSLQTYVTQQLIRAAEIRASANLAATKMSECVCGQSKRVDFCGKGYHLMSFPQSAPHGVVFLHVTYVPAQEKNFTTAPAICHDGKAHFPREGVFVSNGTHWFVTQRNFYEPQIITTDNTFVSGNCDVVIGIVNNTVYDPLQPELDSFKEELDKYFKNHTSPDVDLGDISGINASVVNIQKEIDRLNEVAKNLNESLIDLQELGKYEQYIKGGGGSDIDPYKEFGSSYQLLNFLPLDFFPDLNALVDTATALYEEELTGREHCSPHHTAIRQALVCWDELTKLIAWMSSNITSEQVRTIIVNHVNDTWGLKVRQSLWFHLSCLTFGQHTVQEFLVSFGVWIRTPAPYRPPNAPILSTLPEHTVIC

SEQ ID NO: 7232 - protein, 1365 aa, Artificial Sequence
  SARS-CoV-2/Congo/94/2020__EPI_ISL_417947 spike protein (1-1211)(G889C_L1034C) WhcAg construct
MFVFLVLLPLVSSQCVNLTTRTQLPPAYTNSFTRGVYYPDKVFRSSVLHSTQDLFLPFFSNVTWFHAIHVSGTNGTKRFDNPVLPFNDGVYFASTEKSNIIRGWIFGTTLDSKTQSLLIVNNATNVVIKVCEFQFCNDPFLGVYYHKNNKSWMESEFRVYSSANNCTFEYVSQPFLMDLEGKQGNFKNLREFVFKNIDGYFKIYSKHTPINLVRDLPQGFSALEPLVDLPIGINITRFQTLLALHRSYLTPGDSSSGWTAGAAAYYVGYLQPRTFLLKYNENGTITDAVDCALDPLSETKCTLKSFTVEKGIYQTSNFRVQPTESIVRFPNITNLCPFGEVFNATRFASVYAWNRKRISNCVADYSVLYNSASFSTFKCYGVSPTKLNDLCFTNVYADSFVIRGDEVRQIAPGQTGKIADYNYKLPDDFTGCVIAWNSNNLDSKVGGNYNYLYRLFRKSNLKPFERDISTEIYQAGSTPCNGVEGFNCYFPLQSYGFQPTNGVGYQPYRVVVLSFELLHAPATVCGPKKSTNLVKNKCVNFNFNGLTGTGVLTESNKKFLPFQQFGRDIADTTDAVRDPQTLEILDITPCSFGGVSVITPGTNTSNQVAVLYQGVNCTEVPVAIHADQLTPTWRVYSTGSNVFQTRAGCLIGAEHVNNSYECDIPIGAGICASYQTQTNSPRRARSVASQSIIAYTMSLGAENSVAYSNNSIAIPTNFTISVTTEILPVSMTKTSVDCTMYICGDSTECSNLLLQYGSFCTQLNRALTGIAVEQDKNTQEVFAQVKQIYKTPPIKDFGGFNFSQILPDPSKPSKRSFIEDILFNKVTLADAGFIKQYGDCLGDIAARDLICAQKFNGLTVLPPLLTDEMIAQYTSALLAGTITSGWTFCAGAALQIPFAMQMAYRFNGIGVTQNVLYENQKLIANQFNSAIGKIQDSLSSTASALGKLQDVVNQNAQALNTLVKQLSSNFGAISSVLNDILSRLDKVEAEVQIDRLITGRLQSLQTYVTQQLIRAAEIRASANLAATKMSECVCGQSKRVDFCGKGYHLMSFPQSAPHGVVFLHVTYVPAQEKNFTTAPAICHDGKAHFPREGVFVSNGTHWFVTQRNFYEPQIITTDNTFVSGNCDVVIGIVNNTVYDPLQPELDSFKEELDKYFKNHTSPDVDLGDISGINASVVNIQKEIDRLNEVAKNLNESLIDLQELGKYEQYIKGGGGSDIDPYKEFGSSYQLLNFLPLDFFPDLNALVDTATALYEEELTGREHCSPHHTAIRQALVCWDELTKLIAWMSSNITSEQVRTIIVNHVNDTWGLKVRQSLWFHLSCLTFGQHTVQEFLVSFGVWIRTPAPYRPPNAPILSTLPEHTVIC

SEQ ID NO: 7233 - protein, 1365 aa, Artificial Sequence
  SARS-CoV-2/Congo/158/2020__EPI_ISL_417950 spike protein (1-1211)(G889C_L1034C) WhcAg construct
MFVFLVLLPLVSSQCVNLTTRTQLPPAYTNSFTRGVYYPDKVFRSSVLHSTQDLFLPFFSNVTWFHAIHVSGTNGTKRFDNPVLPFNDGVYFASTEKSNIIRGWIFGTTLDSKTQSLLIVNNATNVVIKVCEFQFCNDPFLGVYYHKNNKSWMESEFRVYSSANNCTFEYVSQPFLMDLEGKQGNFKNLREFVFKNIDGYFKIYSKHTPINLVRDLPQGFSALEPLVDLPIGINITRFQTLLALHRSYLTPGDSSSGWTAGAAAYYVGYLQPRTFLLKYNENGTITDAVDCALDPLSETKCTLKSFTVEKGIYQTSNFRVQPTESIVRFPNITNLCPFGEVFNATRFASVYAWNRKRISNCVADYSVLYNSASFSTFKCYGVSPTKLNDLCFTNVYADSFVIRGDEVRQIAPGQTGKIADYNYKLPDDFTGCVIAWNSNNLDSKVGGNYNYLYRLFRKSNLKPFERDISTEIYQAGSTPCNGVEGFNCYFPLQSYGFQPTNGVGYQPYRVVVLSFELLHAPATVCGPKKSTNLVKNKCVNFNFNGLTGTGVLTESNKKFLPFQQFGRDIADTTDAVRDPQTLEILDITPCSFGGVSVITPGTNTSNQVAVLYQDVNCTEVPVAIHADQLTPTWRVYSTGSNVFQTRAGCLIGAEHVNNSYECDIPIGAGICASYQTQTNSPRRARSVASQSIIAYTMSLGAENSVAYSNNSIAIPTNFTISVTTEILPVSMTKTSVDCTMYICGDSTECSNLLLQYGSFCTQLNRALTGIAVEQDKNTQEVFAQVKQIYKTPPIKDFGGFNFSQILPDPSKPSKRSFIEDLLFNKVTLADAGFIKQYGDCLGDIAARDLICAQKFNGLTVLPPLLTDEMIAQYTSALLAGTITSGWTFCAGAALQIPFAMQMAYRFNGIGVTQNVLYENQKLIANQFNSAIGKIQDSLSSTASALGKLQDVVNQNAQALNTLVKQLSSNFGAISSVLNDILSRLDKVEAEVQIDRLITGRLQSLQTYVTQQLIRAAEIRASANLAATKMSECVCGQSKRVDFCGKGYHLMSFPQSAPHGVVFLHVTYVPAQEKNFTTAPAICHDGKAHFPREGVFVSNGTHWFVTQRNFYEPQIITTDNTFLSGNCDVVIGIVNNTVYDPLQPELDSFKEELDKYFKNHTSPDVDLGDISGINASVVNIQKEIDRLNEVAKNLNESLIDLQELGKYEQYIKGGGGSDIDPYKEFGSSYQLLNFLPLDFFPDLNALVDTATALYEEELTGREHCSPHHTAIRQALVCWDELTKLIAWMSSNITSEQVRTIIVNHVNDTWGLKVRQSLWFHLSCLTFGQHTVQEFLVSFGVWIRTPAPYRPPNAPILSTLPEHTVIC

SEQ ID NO: 7234 - protein, 1365 aa, Artificial Sequence
  SARS-CoV-2/USA/UT-00034/2020__EPI_ISL_417977 spike protein (1-1211)(G889C_L1034C) WhcAg construct
MFVFLVLLPLVSSQCVNLTTRTQLPPAYTNSFTRGVYYPDKVFRSSVLHSTQDLFLPFFSNVTWFHAIHVSGTNGTKRFDNPVLPFNDGVYFASTEKSNIIRGWIFGTTLDSKTQSLLIVNNATNVVIKVCEFQFCNDPFLGVYYYKNNKSWMESEFRVYSSANNCTFEYVSQPFLMDLEGKQGNFKNLREFVFKNIDGYFKIYSKHTPINLVRDLPQGFSALEPLVDLPIGINITRFQTLLALHRSYLTPGDSSSGWTAGAAAYYVGYLQPRTFLLKYNENGTITDAVDCALDPLSETKCTLKSFTVEKGIYQTSNFRVQPTESIVRFPNITNLCPFGEVFNATRFASVYAWNRKRISNCVADYSVLYNSASFSTFKCYGVSPTKLNDLCFTNVYADSFVIRGDEVRQIAPGQTGKIADYNYKLPDDFTGCVIAWNSNNLDSKVGGNYNYLYRLFRKSNLKPFERDISTEIYQAGSTPCNGVEGFNCYFPLQSYGFQPTNGVGYQPYRVVVLSFELLHAPATVCGPKKSTNLVKNKCVNFNFNGLTGTGVLTESNKKFLPFQQFGRDIADTTDAVRDPQTLEILDITPCSFGGVSVITPGTNTSNQVAVLYQGVNCTEVPVAIHADQLTPTWRVYSTGSNVFQTRAGCLIGAEHVNNSYECDIPIGAGICASYQTQTNSPRRARSVASQSIIAYTMSLGAENSVAYSNNSIAIPTNFTISVTTEILPVSMTKTSVDCTMYICGDSTECSNLLLQYGSFCTQLNRALTGIAVEQDKNTQEVFAQVKQIYKTPPIKDFGGFNFSQILPDPSKPSKRSFIEDLLFNKVTLADAGFIKQYGDCLGDIAARDLICAQKFNGLTVLPPLLTDEMIAQYTSALLAGTITSGWTFCAGAALQIPFAMQMAYRFNGIGVTQNVLYENQKLIANQFNSAIGKIQDSLSSTASALGKLQDVVNQNAQALNTLVKQLSSNFGAISSVLNDILSRLDKVEAEVQIDRLITGRLQSLQTYVTQQLIRAAEIRASANLAATKMSECVCGQSKRVDFCGKGYHLMSFPQSAPHGVVFLHVTYVPAQEKNFTTAPAICHDGKAHFPREGVFVSNGTHWFVTQRNFYEPQIITTDNTFVSGNCDVVIGIVNNTVYDPLQPELDSFKEELDKYFKNHTSPDVDLGDISGINASVVNIQKEIDRLNEVAKNLNESLIDLQELGKYEQYIKGGGGSDIDPYKEFGSSYQLLNFLPLDFFPDLNALVDTATALYEEELTGREHCSPHHTAIRQALVCWDELTKLIAWMSSNITSEQVRTIIVNHVNDTWGLKVRQSLWFHLSCLTFGQHTVQEFLVSFGVWIRTPAPYRPPNAPILSTLPEHTVIC

SEQ ID NO: 7235 - protein, 1365 aa, Artificial Sequence
  SARS-CoV-2/USA/UT-00033/2020__EPI_ISL_417976 spike protein (1-1211)(G889C_L1034C) WhcAg construct
MFVFLVLLPLVSSQCVNLTTRTQLPPAYTNSFTRGVYYPDKVFRSSVLHSTQDLFLPFFSNVTWFHAIHVSGTNGTKRFDNPVLPFNDGVYFASTEKSNIIRGWIFGTTLDSKTQSLLIVNNATNVVIKVCEFQFCNDPFLGVYYHKNNKSWMESEFRVYSSANNCTFEYVSQPFLMDLEGKQGNFKNLREFVFKNIDGYFKIYSKHTPINLVRDLPQGFSALEPLVDLPIGINITRFQTLLALHRSYLTPGDSSSGLTAGAAAYYVGYLQPRTFLLKYNENGTITDAVDCALDPLSETKCTLKSFTVEKGIYQTSNFRVQPTESIVRFPNITNLCPFGEVFNATRFASVYAWNRKRISNCVADYSVLYNSASFSTFKCYGVSPTKLNDLCFTNVYADSFVIRGDEVRQIAPGQTGKIADYNYKLPDDFTGCVIAWNSNNLDSKVGGNYNYLYRLFRKSNLKPFERDISTEIYQAGSTPCNGVEGFNCYFPLQSYGFQPTNGVGYQPYRVVVLSFELLHAPATVCGPKKSTNLVKNKCVNFNFNGLTGTGVLTESNKKFLPFQQFGRDIADTTDAVRDPQTLEILDITPCSFGGVSVITPGTNTSNQVAVLYQGVNCTEVPVAIHADQLTPTWRVYSTGSNVFQTRAGCLIGAEHVNNSYECDIPIGAGICASYQTQTNSPRRARSVASQSIIAYTMSLGAENSVAYSNNSIAIPTNFTISVTTEILPVSMTKTSVDCTMYICGDSTECSNLLLQYGSFCTQLNRALTGIAVEQDKNTQEVFAQVKQIYKTPPIKDFGGFNFSQILPDPSKPSKRSFIEDLLFNKVTLADAGFIKQYGDCLGDIAARDLICAQKFNGLTVLPPLLTDEMIAQYTSALLAGTITSGWTFCAGAALQIPFAMQMAYRFNGIGVTQNVLYENQKLIANQFNSAIGKIQDSLSSTASALGKLQDVVNQNAQALNTLVKQLSSNFGAISSVLNDILSRLDKVEAEVQIDRLITGRLQSLQTYVTQQLIRAAEIRASANLAATKMSECVCGQSKRVDFCGKGYHLMSFPQSAPHGVVFLHVTYVPAQEKNFTTAPAICHDGKAHFPREGVFVSNGTHWFVTQRNFYEPQIITTDNTFVSGNCDVVIGIVNNTVYDPLQPELDSFKEELDKYFKNHTSPDVDLGDISGINASVVNIQKEIDRLNEVAKNLNESLIDLQELGKYEQYIKGGGGSDIDPYKEFGSSYQLLNFLPLDFFPDLNALVDTATALYEEELTGREHCSPHHTAIRQALVCWDELTKLIAWMSSNITSEQVRTIIVNHVNDTWGLKVRQSLWFHLSCLTFGQHTVQEFLVSFGVWIRTPAPYRPPNAPILSTLPEHTVIC

SEQ ID NO: 7236 - protein, 1365 aa, Artificial Sequence
  SARS-CoV-2/USA/WI-13/2020__EPI_ISL_417516 spike protein (1-1211)(G889C_L1034C) WhcAg construct
MFVFLVLLPLVSSQCVNLTTRTQLPPAYTNSFTRGVYYPDKVFRSSVLHSTQDLFLPFFSNVTWFHAIHVSGTNGTKRFDNPVLPFNDGVYFASTEKSNIIRGWIFGTTLDSKTQSLLIVNNATNVVIKVCEFQFCNDPFLGVYYHKNNKSWMESEFRVYSSANNCTFEYVSQPFLMDLEGKQGNFKNLREFVFKNIDGYFKIYSKHTPINLVRDLPQGFSALEPLVDLPIGINITRFQTLLALHRSYLTPGDSSSGWTAGAAAYYVGYLQPRTFLLKYNENGTITDAVDCALDPLSETKCTLKSFTVEKGIYQTSNFRVLPTESIVRFPNITNLCPFGEVFNATRFASVYAWNRKRISNCVADYSVLYNSASFSTFKCYGVSPTKLNDLCFTNVYADSFVIRGDEVRQIAPGQTGKIADYNYKLPDDFTGCVIAWNSNNLDSKVGGNYNYLYRLFRKSNLKPFERDISTEIYQAGSTPCNGVEGFNCYFPLQSYGFQPTNGVGYQPYRVVVLSFELLHAPATVCGPKKSTNLVKNKCVNFNFNGLTGTGVLTESNKKFLPFQQFGRDIADTTDAVRDPQTLEILDITPCSFGGVSVITPGTNTSNQVAVLYQGVNCTEVPVAIHADQLTPTWRVYSTGSNVFQTRAGCLIGAEHVNNSYECDIPIGAGICASYQTQTNSPRRARSVASQSIIAYTMSLGAENSVAYSNNSIAIPTNFTISVTTEILPVSMTKTSVDCTMYICGDSTECSNLLLQYGSFCTQLNRALTGIAVEQDKNTQEVFAQVKQIYKTPPIKDFGGFNFSQILPDPSKPSKRSFIEDLLFNKVTLADAGFIKQYGDCLGDIAARDLICAQKFNGLTVLPPLLTDEMIAQYTSALLAGTITSGWTFCAGAALQIPFAMQMAYRFNGIGVTQNVLYENQKLIANQFNSAIGKIQDSLSSTASALGKLQDVVNQNAQALNTLVKQLSSNFGAISSVLNDILSRLDKVEAEVQIDRLITGRLQSLQTYVTQQLIRAAEIRASANLAATKMSECVCGQSKRVDFCGKGYHLMSFPQSAPHGVVFLHVTYVPAQEKNFTTAPAICHDGKAHFPREGVFVSNGTHWFVTQRNFYEPQIITTDNTFVSGNCDVVIGIVNNTVYDPLQPELDSFKEELDKYFKNHTSPDVDLGDISGINASVVNIQKEIDRLNEVAKNLNESLIDLQELGKYEQYIKGGGGSDIDPYKEFGSSYQLLNFLPLDFFPDLNALVDTATALYEEELTGREHCSPHHTAIRQALVCWDELTKLIAWMSSNITSEQVRTIIVNHVNDTWGLKVRQSLWFHLSCLTFGQHTVQEFLVSFGVWIRTPAPYRPPNAPILSTLPEHTVIC

SEQ ID NO: 7237 - protein, 1364 aa, Artificial Sequence
  SARS-CoV-2/India/1-27/2020__EPI_ISL_413522 spike protein (1-1210)(G888C_L1033C) WhcAg construct
MFVFLVLLPLVSSQCVNLTTRTQLPPAYTNSFTRGVYYPDKVFRSSVLHSTQDLFLPFFSNVTWFHAIHVSGTNGTKRFDNPVLPFNDGVYFASTEKSNIIRGWIFGTTLDSKTQSLLIVNNATNVVIKVCEFQFCNDPFLGVYHKNNKSWMESEFRVYSSANNCTFEYVSQPFLMDLEGKQGNFKNLREFVFKNIDGYFKIYSKHTPINLVRDLPQGFSALEPLVDLPIGINITRFQTLLALHRSYLTPGDSSSGWTAGAAAYYVGYLQPRTFLLKYNENGTITDAVDCALDPLSETKCTLKSFTVEKGIYQTSNFRVQPTESIVRFPNITNLCPFGEVFNATRFASVYAWNRKRISNCVADYSVLYNSASFSTFKCYGVSPTKLNDLCFTNVYADSFVIRGDEVIQIAPGQTGKIADYNYKLPDDFTGCVIAWNSNNLDSKVGGNYNYLYRLFRKSNLKPFERDISTEIYQAGSTPCNGVEGFNCYFPLQSYGFQPTNGVGYQPYRVVVLSFELLHAPATVCGPKKSTNLVKNKCVNFNFNGLTGTGVLTESNKKFLPFQQFGRDIADTTDAVRDPQTLEILDITPCSFGGVSVITPGTNTSNQVAVLYQDVNCTEVPVAIHADQLTPTWRVYSTGSNVFQTRAGCLIGAEHVNNSYECDIPIGAGICASYQTQTNSPRRARSVASQSIIAYTMSLGAENSVAYSNNSIAIPTNFTISVTTEILPVSMTKTSVDCTMYICGDSTECSNLLLQYGSFCTQLNRALTGIAVEQDKNTQEVFAQVKQIYKTPPIKDFGGFNFSQILPDPSKPSKRSFIEDLLFNKVTLADAGFIKQYGDCLGDIAARDLICAQKFNGLTVLPPLLTDEMIAQYTSALLAGTITSGWTFCAGAALQIPFAMQMAYRFNGIGVTQNVLYENQKLIANQFNSAIGKIQDSLSSTASALGKLQDVVNQNAQALNTLVKQLSSNFGAISSVLNDILSRLDKVEAEVQIDRLITGRLQSLQTYVTQQLIRAAEIRASANLAATKMSECVCGQSKRVDFCGKGYHLMSFPQSAPHGVVFLHVTYVPAQEKNFTTAPAICHDGKAHFPREGVFVSNGTHWFVTQRNFYEPQIITTDNTFVSGNCDVVIGIVNNTVYDPLQPELDSFKEELDKYFKNHTSPDVDLGDISGINASVVNIQKEIDRLNEVAKNLNESLIDLQELGKYEQYIKGGGGSDIDPYKEFGSSYQLLNFLPLDFFPDLNALVDTATALYEEELTGREHCSPHHTAIRQALVCWDELTKLIAWMSSNITSEQVRTIIVNHVNDTWGLKVRQSLWFHLSCLTFGQHTVQEFLVSFGVWIRTPAPYRPPNAPILSTLPEHTVIC

SEQ ID NO: 7238 - protein, 1359 aa, Artificial Sequence
  SARS-CoV-2/pangolin/Guangxi/P4L/2017__EPI_ISL_410538 spike protein (1-1205)(G883C_L1028C) WhcAg construct
MFVFLFVLPLVSSQCVNLTTRTGIPPGYTNSSTRGVYYPDKVFRSSILHLTQDLFLPFFSNVTWFNTINYQGGFKKFDNPVLPFNDGVYFASTEKSNIIRGWIFGTTLDARTQSLLIVNNATNVVIKVCEFQFCTDPFLGVYYHNNNKTWVENEFRVYSSANNCTFEYISQPFLMDLEGKQGNFKNLREFVFKNVDGYFKIYSKHTPIDLVRDLPRGFAALEPLVDLPIGINITRFQTLLALHRSYLTPGNLESGWTTGAAAYYVGYLQQRTFLLSYNQNGTITDAVDCSLDPLSETKCTLKSLTVEKGIYQTSNFRVQPTISIVRFPNITNLCPFGEVFNASKFASVYAWNRKRISNCVADYSVLYNSTSFSTFKCYGVSPTKLNDLCFTNVYADSFVVKGDEVRQIAPGQTGVIADYNYKLPDDFTGCVIAWNSVKQDALTGGNYGYLYRLFRKSKLKPFERDISTEIYQAGSTPCNGQVGLNCYYPLERYGFHPTTGVNYQPFRVVVLSFELLNGPATVCGPKLSTTLVKDKCVNFNFNGLTGTGVLTTSKKQFLPFQQFGRDISDTTDAVRDPQTLEILDITPCSFGGVSVITPGTNTSNQVAVLYQDVNCTEVPMAIHAEQLTPAWRVYSAGANVFQTRAGCLVGAEHVNNSYECDIPVGAGICASYHSMSSLRSVNQRSIIAYTMSLGAENSVAYSNNSIAIPTNFTISVTTEILPVSMTKTSVDCTMYICGDSIECSNLLLQYGSFCTQLNRALTGIAVEQDKNTQEVFAQVKQIYKTPPIKDFGGFNFSQILPDPSKPSKRSFIEDLLFNKVTLADAGFIKQYGDCLGDIAARDLICAQKFNGLTVLPPLLTDEMIAQYTSALLAGTITSGWTFCAGAALQIPFAMQMAYRFNGIGVTQNVLYENQKLIANQFNSAIGKIQDSLSSTASALGKLQDVVNQNAQALNTLVKQLSSNFGAISSVLNDILSRLDKVEAEVQIDRLITGRLQSLQTYVTQQLIRAAEIRASANLAATKMSECVCGQSKRVDFCGKGYHLMSFPQSAPHGVVFLHVTYVPAQEKNFTTAPAICHEGKAHFPREGVFVSNGTHWFITQRNFYEPQIITTDNTFVSGSCDVVIGIVNNTVYDPLQPELDSFKEELDKYFKNHTSPDVDLGDISGINASVVNIQKEIDRLNEVAKNLNESPIDLQELGKYEQYIKGGGGSDIDPYKEFGSSYQLLNFLPLDFFPDLNALVDTATALYEEELTGREHCSPHHTAIRQALVCWDELTKLIAWMSSNITSEQVRTIIVNHVNDTWGLKVRQSLWFHLSCLTFGQHTVQEFLVSFGVWIRTPAPYRPPNAPILSTLPEHTVIC

SEQ ID NO: 7239 - protein, 1359 aa, Artificial Sequence
  SARS-CoV-2/pangolin/Guangxi/P5L/2017__EPI_ISL_410540 spike protein (1-1205)(G883C_L1028C) WhcAg construct
MFVFLFVLPLVSSQCVNLTTRTGIPPGYTNSSTRGVYYPDKVFRSSILHLTQDLFLPFFSNVTWFNTINYQGGFKKFDNPVLPFNDGVYFASTEKSNIIRGWIFGTTLDARTQSLLIVNNATNVVIKVCEFQFCTDPFLGVYYHNNNKTWVENEFRVYSSANNCTFEYISQPFLMDLEGKQGNFKNLREFVFKNVDGYFKIYSKHTPIDLVRDLPRGFAALEPLVDLPIGINITRFQTLLALHRSYLTPGKLESGWTTGAAAYYVGYLQQRTFLLSYNQNGTITDAVDCSLDPLSETKCTLKSLTVEKGIYQTSNFRVQPTISIVRFPNITNLCPFGEVFNASKFASVYAWNRKRISNCVADYSVLYNSTSFSTFKCYGVSPTKLNDLCFTNVYADSFVVKGDEVRQIAPGQTGVIADYNYKLPDDFTGCVIAWNSVKQDALTGGNYGYLYRLFRKSKLKPFERDISTEIYQAGSTPCNGQVGLNCYYPLERYGFHPTTGVNYQPFRVVVLSFELLNGPATVCGPKLSTTLVKDKCVNFNFNGLTGTGVLTTSKKQFLPFQQFGRDISDTTDAVRDPQTLEILDITPCSFGGVSVITPGTNTSNQVAVLYQDVNCTEVPMAIHAEQLTPAWRVYSAGANVFQTRAGCLVGAEHVNNSYECDIPVGAGICASYHSMSSFRSVNQRSIIAYTMSLGAENSVAYSNNSIAIPTNFTISVTTEILPVSMTKTSVDCTMYICGDSIECSNLLLQYGSFCTQLNRALTGIAVEQDKNTQEVFAQVKQIYKTPPIKDFGGFNFSQILPDPSKPSKRSFIEDLLFNKVTLADAGFIKQYGDCLGDIAARDLICAQKFNGLTVLPPLLTDEMIAQYTSALLAGTITSGWTFCAGAALQIPFAMQMAYRFNGIGVTQNVLYENQKLIANQFNSAIGKIQDSLSSTASALGKLQDVVNQNAQALNTLVKQLSSNFGAISSVLNDILSRLDKVEAEVQIDRLITGRLQSLQTYVTQQLIRAAEIRASANLAATKMSECVCGQSKRVDFCGKGYHLMSFPQSAPHGVVFLHVTYVPAQEKNFTTAPAICHEGKAHFPREGVFVSNGTHWFITQRNFYEPQIITTDNTFVSGSCDVVIGIVNNTVYDPLQPELDSFKEELDKYFKNHTSPDVDLGDISGINASVVNIQKEIDRLNEVAKNLNESLIDLQELGKYEQYIKGGGGSDIDPYKEFGSSYQLLNFLPLDFFPDLNALVDTATALYEEELTGREHCSPHHTAIRQALVCWDELTKLIAWMSSNITSEQVRTIIVNHVNDTWGLKVRQSLWFHLSCLTFGQHTVQEFLVSFGVWIRTPAPYRPPNAPILSTLPEHTVIC

SEQ ID NO: 7240 - protein, 1359 aa, Artificial Sequence
  SARS-CoV-2/pangolin/Guangxi/P5E/2017__EPI_ISL_410541 spike protein (1-1205)(G883C_L1028C) WhcAg construct
MFVFLFVLPLVSSQCVNLTTRTGIPPGYTNSSTRGVYYPDKVFRSSILHLTQDLFLPFFSNVTWFNTITYQGGSKKFDNPVLPFNDGVYFASTEKSNIIRGWIFGTTLDARTQSLLIVNNATNVVIKVCEFQFCTDPFLGVYYHNNNKTWVENEFRVYSSANNCTFEYISQPFLMDLEGKQGNFKNLREFVFKNVDGYFKIYSKHTPIDLVRDLPRGFAALEPLVDLPIGINITRFQTLLALHRSYLTPGKLESGWTTGAAAYYVGYLQQRTFLLSYNQNGTITDAVDCSLDPLSETKCTLKSLTVEKGIYQTSNFRVQPTISIVRFPNITNLCPFGEVFNASKFASVYAWNRKRISNCVADYSVLYNSTSFSTFKCYGVSPTKLNDLCFTNVYADSFVVKGDEVRQIAPGQTGVIADYNYKLPDDFTGCVIAWNSVKQDALTGDNYGYLYRLFRKSKLKPFERDISTEIYQAGSTPCNGQVGLNCYYPLERYGFHPTTGVNYQPFRVVVLSFELLNGPATVCGPKLSTTLVKDKCVNFNFNGLTGTGVLTTSKKQFLPFQQFGRDISDTTDAVRDPQTLEILDITPCSFGGVSVITPGTNTSNQVAVLYQDVNCTEVPMAIHAEQLTPAWRVYSAGANVFQTRAGCLVGAEHVNNSYECDIPVGAGICASYHSMSSFRSVNQRSIIAYTMSLGAENSVAYSNNSIAIPTNFTISVTTEILPVSMTKTSVDCTMYICGDSIECSNLLLQYGSFCTQLNRALTGIAVEQDKNTQEVFAQVKQIYKTPPIKDFGGFNFSQILPDPSKPSKRSFIEDLLFNKVTLADAGFIKQYGDCLGDIAARDLICAQKFNGLTVLPPLLTDEMIAQYTSALLAGTITSGWTFCAGAALQIPFAMQMAYRFNGIGVTQNVLYENQKLIANQFNSAIGKIQDSLSSTASALGKLQDVVNQNAQALNTLVKQLSSNFGAISSVLNDILSRLDKVEAEVQIDRLITGRLQSLQTYVTQQLIRAAEIRASANLAATKMSECVCGQSKRVDFCGKGYHLMSFPQSAPHGVVFLHVTYVPAQEKNFTTAPAICHEGKAHFPREGVFVSNGTHWFITQRNFYEPQIITTDNTFVSGSCDVVIGIVNNTVYDPLQPELDSFKEELDKYFKNHTSPDVDLGDISGINASVVNIQKEIDRLNEVAKNLNESLIDLQELGKYEQYIKGGGGSDIDPYKEFGSSYQLLNFLPLDFFPDLNALVDTATALYEEELTGREHCSPHHTAIRQALVCWDELTKLIAWMSSNITSEQVRTIIVNHVNDTWGLKVRQSLWFHLSCLTFGQHTVQEFLVSFGVWIRTPAPYRPPNAPILSTLPEHTVIC

SEQ ID NO: 7241 - protein, 1357 aa, Artificial Sequence
  SARS-CoV-2/pangolin/Guangxi/P1E/2017__EPI_ISL_410539 spike protein (1-1203)(G881C_L1026C) WhcAg construct
MFVFLFVLPLVSSQCVNLTTRTGIQPGYTNSSTRGVYYPDKVFRSSILHLTQDLFLPFFSNVTWFNTINYQGGFKKFDNPVLPFNDGVYFASTEKSNIIRGWIFGTTLDARTQSLLIVNNATNVVIKVCEFQFCTDPFLGVYYHNNNKTWVENEFRVYSSANNCTFEYISQPFLMDLEGKQGNFKNLREFVFKNVDGYFKIYSKHTPIDLVRDLPRGFAALEPLVDLPIGINITRFQTLLALHRSYLTPGKLESGWTTGAAAYYVGYLQQRTFLLSYNQNGTITDAVDCSLDPLSETKCTLKSLTVEKGIYQTSNFRVQPTISIVRFPNITNLCPFGEVFNASKFASVYAWNRKRISNCVADYSVLYNSTSFSTFKCYGVSPTKLNDLCFTNVYADSFVVKGDEVRQIAPGQTGVIADYNYKLPDDFTGCVIAWNSVKQDALTGGNYLYRLFRKSKLKPFERDISTEIYQAGSTPCNGQVGLNCYYPLERYGFHPTTGVNYQPFRVVVLSFELLNGPATVCGPKLSTTLVKDKCVNFNFNGLTGTGVLTTSKKQFLPFQQFGRDISDTTDAVRDPQTLEILDITPCSFGGVSVITPGTNTSNQVAVLYQDVNCTEVPMAIHAEQLTPAWRVYSAGANVFQTRAGCLVGAEHVNNSYECDIPVGAGICASYHSMSSLRSVNQRSIIAYTMSLGAENSVAYSNNSIAIPTNFTISVTTEILPVSMTKTSVDCTMYICGDSIECSNLLLQYGSFCTQLNRALTGIAVEQDKNTQEVFAQVKQIYKTPPIKDFGGFNFSQILPDPSKPSKRSFIEDLLFNKVTLADAGFIKQYGDCLGDIAARDLICAQKFNGLTVLPPLLTDEMIAQYTSALLAGTITSGWTFCAGAALQIPFAMQMAYRFNGIGVTQNVLYENQKLIANQFNSAIGKIQDSLSSTASALGKLQDVVNQNAQALNTLVKQLSSNFGAISSVLNDILSRLDKVEAEVQIDRLITGRLQSLQTYVTQQLIRAAEIRASANLAATKMSECVCGQSKRVDFCGKGYHLMSFPQSAPHGVVFLHVTYVPAQEKNFTTAPAICHEGKAHFPREGVFVSNGTHWFITQRNFYEPQIITTDNTFVSGSCDVVIGIVNNTVYDPLQPELDSFKEELDKYFKNHTSPDVDLGDISGINASVVNIQKEIDRLNEVAKNLNESLIDLQELGKYEQYIKGGGGSDIDPYKEFGSSYQLLNFLPLDFFPDLNALVDTATALYEEELTGREHCSPHHTAIRQALVCWDELTKLIAWMSSNITSEQVRTIIVNHVNDTWGLKVRQSLWFHLSCLTFGQHTVQEFLVSFGVWIRTPAPYRPPNAPILSTLPEHTVIC

SEQ ID NO: 7242 - protein, 1365 aa, Artificial Sequence
  SARS-CoV-2/Wuhan/WIV05/2019__EPI_ISL_402128 spike protein (1-1211)(I909C_Y1047C) WhcAg construct
MFVFLVLLPLVSSQCVNLTTRTQLPPAYTNSFTRGVYYPDKVFRSSVLHSTQDLFLPFFSNVTWFHAIHVSGTNGTKRFDNPVLPFNDGVYFASTEKSNIIRGWIFGTTLDSKTQSLLIVNNATNVVIKVCEFQFCNDPFLGVYYHKNNKSWMESEFRVYSSANNCTFEYVSQPFLMDLEGKQGNFKNLREFVFKNIDGYFKIYSKHTPINLVRDLPQGFSALEPLVDLPIGINITRFQTLLALHRSYLTPGDSSSGWTAGAAAYYVGYLQPRTFLLKYNENGTITDAVDCALDPLSETKCTLKSFTVEKGIYQTSNFRVQPTESIVRFPNITNLCPFGEVFNATRFASVYAWNRKRISNCVADYSVLYNSASFSTFKCYGVSPTKLNDLCFTNVYADSFVIRGDEVRQIAPGQTGKIADYNYKLPDDFTGCVIAWNSNNLDSKVGGNYNYLYRLFRKSNLKPFERDISTEIYQAGSTPCNGVEGFNCYFPLQSYGFQPTNGVGYQPYRVVVLSFELLHAPATVCGPKKSTNLVKNKCVNFNFNGLTGTGVLTESNKKFLPFQQFGRDIADTTDAVRDPQTLEILDITPCSFGGVSVITPGTNTSNQVAVLYQDVNCTEVPVAIHADQLTPTWRVYSTGSNVFQTRAGCLIGAEHVNNSYECDIPIGAGICASYQTQTNSPRRARSVASQSIIAYTMSLGAENSVAYSNNSIAIPTNFTISVTTEILPVSMTKTSVDCTMYICGDSTECSNLLLQYGSFCTQLNRALTGIAVEQDKNTQEVFAQVKQIYKTPPIKDFGGFNFSQILPDPSKPSKRSFIEDLLFNKVTLADAGFIKQYGDCLGDIAARDLICAQKFNGLTVLPPLLTDEMIAQYTSALLAGTITSGWTFGAGAALQIPFAMQMAYRFNGCGVTQNVLYENQKLIANQFNSAIGKIQDSLSSTASALGKLQDVVNQNAQALNTLVKQLSSNFGAISSVLNDILSRLDKVEAEVQIDRLITGRLQSLQTYVTQQLIRAAEIRASANLAATKMSECVLGQSKRVDFCGKGCHLMSFPQSAPHGVVFLHVTYVPAQEKNFTTAPAICHDGKAHFPREGVFVSNGTHWFVTQRNFYEPQIITTDNTFVSGNCDVVIGIVNNTVYDPLQPELDSFKEELDKYFKNHTSPDVDLGDISGINASVVNIQKEIDRLNEVAKNLNESLIDLQELGKYEQYIKGGGGSDIDPYKEFGSSYQLLNFLPLDFFPDLNALVDTATALYEEELTGREHCSPHHTAIRQALVCWDELTKLIAWMSSNITSEQVRTIIVNHVNDTWGLKVRQSLWFHLSCLTFGQHTVQEFLVSFGVWIRTPAPYRPPNAPILSTLPEHTVIC

SEQ ID NO: 7243 - protein, 1361 aa, Artificial Sequence
  SARS-CoV-2/bat/Yunnan/RaTG13/2013__EPI_ISL_402131 spike protein (1-1207)(I905C_Y1043C) WhcAg construct
MFVFLVLLPLVSSQCVNLTTRTQLPPAYTNSSTRGVYYPDKVFRSSVLHLTQDLFLPFFSNVTWFHAIHVSGTNGIKRFDNPVLPFNDGVYFASTEKSNIIRGWIFGTTLDSKTQSLLIVNNATNVVIKVCEFQFCNDPFLGVYYHKNNKSWMESEFRVYSSANNCTFEYVSQPFLMDLEGKQGNFKNLREFVFKNIDGYFKIYSKHTPINLVRDLPPGFSALEPLVDLPIGINITRFQTLLALHRSYLTPGDSSSGWTAGAAAYYVGYLQPRTFLLKYNENGTITDAVDCALDPLSETKCTLKSFTVEKGIYQTSNFRVQPTDSIVRFPNITNLCPFGEVFNATTFASVYAWNRKRISNCVADYSVLYNSTSFSTFKCYGVSPTKLNDLCFTNVYADSFVITGDEVRQIAPGQTGKIADYNYKLPDDFTGCVIAWNSKHIDAKEGGNFNYLYRLFRKANLKPFERDISTEIYQAGSKPCNGQTGLNCYYPLYRYGFYPTDGVGHQPYRVVVLSFELLNAPATVCGPKKSTNLVKNKCVNFNFNGLTGTGVLTESNKKFLPFQQFGRDIADTTDAVRDPQTLEILDITPCSFGGVSVITPGTNASNQVAVLYQDVNCTEVPVAIHADQLTPTWRVYSTGSNVFQTRAGCLIGAEHVNNSYECDIPIGAGICASYQTQTNSRSVASQSIIAYTMSLGAENSVAYSNNSIAIPTNFTISVTTEILPVSMTKTSVDCTMYICGDSTECSNLLLQYGSFCTQLNRALTGIAVEQDKNTQEVFAQVKQIYKTPPIKDFGGFNFSQILPDPSKPSKRSFIEDLLFNKVTLADAGFIKQYGDCLGDIAARDLICAQKFNGLTVLPPLLTDEMIAQYTSALLAGTITSGWTFGAGAALQIPFAMQMAYRFNGCGVTQNVLYENQKLIANQFNSAIGKIQDSLSSTASALGKLQDVVNQNAQALNTLVKQLSSNFGAISSVLNDILSRLDKVEAEVQIDRLITGRLQSLQTYVTQQLIRAAEIRASANLAATKMSECVLGQSKRVDFCGKGCHLMSFPQSAPHGVVFLHVTYVPAQEKNFTTAPAICHDGKAHFPREGVFVSNGTHWFVTQRNFYEPQIITTDNTFVSGSCDVVIGIVNNTVYDPLQPELDSFKEELDKYFKNHTSPDVDLGDISGINASVVNIQKEIDRLNEVAKNLNESLIDLQELGKYEQYIKGGGGSDIDPYKEFGSSYQLLNFLPLDFFPDLNALVDTATALYEEELTGREHCSPHHTAIRQALVCWDELTKLIAWMSSNITSEQVRTIIVNHVNDTWGLKVRQSLWFHLSCLTFGQHTVQEFLVSFGVWIRTPAPYRPPNAPILSTLPEHTVIC

SEQ ID NO: 7244 - protein, 1365 aa, Artificial Sequence
  SARS-CoV-2/Wuhan/HBCDC-HB-01/2019__EPI_ISL_402132 spike protein (1-1211)(I909C_Y1047C) WhcAg construct
MFVFLVLLPLVSSQCVNLTTRTQLPPAYTNSITRGVYYPDKVFRSSVLHSTQDLFLPFFSNVTWFHAIHVSGTNGTKRFDNPVLPFNDGVYFASTEKSNIIRGWIFGTTLDSKTQSLLIVNNATNVVIKVCEFQFCNDPFLGVYYHKNNKSWMESEFRVYSSANNCTFEYVSQPFLMDLEGKQGNFKNLREFVFKNIDGYFKIYSKHTPINLVRDLPQGFSALEPLVDLPIGINITRFQTLLALHRSYLTPGDSSSGWTAGAAAYYVGYLQPRTFLLKYNENGTITDAVDCALDPLSETKCTLKSFTVEKGIYQTSNFRVQPTESIVRFPNITNLCPFGEVFNATRFASVYAWNRKRISNCVADYSVLYNSASFSTFKCYGVSPTKLNDLCFTNVYADSFVIRGDEVRQIAPGQTGKIADYNYKLPDDFTGCVIAWNSNNLDSKVGGNYNYLYRLFRKSNLKPFERDISTEIYQAGSTPCNGVEGFNCYFPLQSYGFQPTNGVGYQPYRVVVLSFELLHAPATVCGPKKSTNLVKNKCVNFNFNGLTGTGVLTESNKKFLPFQQFGRDIADTTDAVRDPQTLEILDITPCSFGGVSVITPGTNTSNQVAVLYQDVNCTEVPVAIHADQLTPTWRVYSTGSNVFQTRAGCLIGAEHVNNSYECDIPIGAGICASYQTQTNSPRRARSVASQSIIAYTMSLGAENSVAYSNNSIAIPTNFTISVTTEILPVSMTKTSVDCTMYICGDSTECSNLLLQYGSFCTQLNRALTGIAVEQDKNTQEVFAQVKQIYKTPPIKDFGGFNFSQILPDPSKPSKRSFIEDLLFNKVTLADAGFIKQYGDCLGDIAARDLICAQKFNGLTVLPPLLTDEMIAQYTSALLAGTITSGWTFGAGAALQIPFAMQMAYRFNGCGVTQNVLYENQKLIANQFNSAIGKIQDSLSSTASALGKLQDVVNQNAQALNTLVKQLSSNFGAISSVLNDILSRLDKVEAEVQIDRLITGRLQSLQTYVTQQLIRAAEIRASANLAATKMSECVLGQSKRVDFCGKGCHLMSFPQSAPHGVVFLHVTYVPAQEKNFTTAPAICHDGKAHFPREGVFVSNGTHWFVTQRNFYEPQIITTDNTFVSGNCDVVIGIVNNTVYDPLQPELDSFKEELDKYFKNHTSPDVDLGDISGINASVVNIQKEIDRLNEVAKNLNESLIDLQELGKYEQYIKGGGGSDIDPYKEFGSSYQLLNFLPLDFFPDLNALVDTATALYEEELTGREHCSPHHTAIRQALVCWDELTKLIAWMSSNITSEQVRTIIVNHVNDTWGLKVRQSLWFHLSCLTFGQHTVQEFLVSFGVWIRTPAPYRPPNAPILSTLPEHTVIC

SEQ ID NO: 7245 - protein, 1365 aa, Artificial Sequence
  SARS-CoV-2/Guangdong/20SF028/2020__EPI_ISL_403936 spike protein (1-1211)(I909C_Y1047C) WhcAg construct
MFVFLVLLPLVSSQCVNLTTRTQLPPAYTNSFTRGVYYPDKVFRSSVLYSTQDLFLPFFSNVTWFHAIHVSGTNGTKRFDNPVLPFNDGVYFASTEKSNIIRGWIFGTTLDSKTQSLLIVNNATNVVIKVCEFQFCNDPFLGVYYHKNNKSWMESEFRVYSSANNCTFEYVSQPFLMDLEGKQGNFKNLREFVFKNIDGYFKIYSKHTPINLVRDLPQGFSALEPLVDLPIGINITRFQTLLALHRSYLTPGDSSSGWTAGAAAYYVGYLQPRTFLLKYNENGTITDAVDCALDPLSETKCTLKSFTVEKGIYQTSNFRVQPTESIVRFPNITNLCPFGEVFNATRFASVYAWNRKRISNCVADYSVLYNSASFSTFKCYGVSPTKLNDLCFTNVYADSFVIRGDEVRQIAPGQTGKIADYNYKLPDDFTGCVIAWNSNNLDSKVGGNYNYLYRLFRKSNLKPFERDISTEIYQAGSTPCNGVEGFNCYFPLQSYGFQPTNGVGYQPYRVVVLSFELLHAPATVCGPKKSTNLVKNKCVNFNFNGLTGTGVLTESNKKFLPFQQFGRDIADTTDAVRDPQTLEILDITPCSFGGVSVITPGTNTSNQVAVLYQDVNCTEVPVAIHADQLTPTWRVYSTGSNVFQTRAGCLIGAEHVNNSYECDIPIGAGICASYQTQTNSPRRARSVASQSIIAYTMSLGAENSVAYSNNSIAIPTNFTISVTTEILPVSMTKTSVDCTMYICGDSTECSNLLLQYGSFCTQLNRALTGIAVEQDKNTQEVFAQVKQIYKTPPIKDFGGFNFSQILPDPSKPSKRSFIEDLLFNKVTLADAGFIKQYGDCLGDIAARDLICAQKFNGLTVLPPLLTDEMIAQYTSALLAGTITSGWTFGAGAALQIPFAMQMAYRFNGCGVTQNVLYENQKLIANQFNSAIGKIQDSLSSTASALGKLQDVVNQNAQALNTLVKQLSSNFGAISSVLNDILSRLDKVEAEVQIDRLITGRLQSLQTYVTQQLIRAAEIRASANLAATKMSECVLGQSKRVDFCGKGCHLMSFPQSAPHGVVFLHVTYVPAQEKNFTTAPAICHDGKAHFPREGVFVSNGTHWFVTQRNFYEPQIITTDNTFVSGNCDVVIGIVNNTVYDPLQPELDSFKEELDKYFKNHTSPDVDLGDISGINASVVNIQKEIDRLNEVAKNLNESLIDLQELGKYEQYIKGGGGSDIDPYKEFGSSYQLLNFLPLDFFPDLNALVDTATALYEEELTGREHCSPHHTAIRQALVCWDELTKLIAWMSSNITSEQVRTIIVNHVNDTWGLKVRQSLWFHLSCLTFGQHTVQEFLVSFGVWIRTPAPYRPPNAPILSTLPEHTVIC

SEQ ID NO: 7246 - protein, 1365 aa, Artificial Sequence
  SARS-CoV-2/Shenzhen/SZTH-001/2020__EPI_ISL_406592 spike protein (1-1211)(I909C_Y1047C) WhcAg construct
MFVFLVLLPLVSSQCVNLTTRTQLPPAYTNSFTRGVYYPDKVFRSSVLHSTQDLFLPFFSNVTWFHAIHVSGTNGTKRFDNPVLPFNDGVYFASTEKSNIIRGWIFGTTLDSKTQSLLIVNNATNVVIKVCEFQFCNDPFLGVYYHKNNKSWMESEFRVYSSANNCTFEYVSQPFLMDLEGKQGNFKNLREFVFKNIDGYFKIYSKHTPINLVRDLPQGFSALEPLVDLPIGINITRFQTLLALHRSYLTPGDSSSGWTAGAAAYYVGYLQPRTFLLKYNENGTITDAVDCALDPLSETKCTLKSFTVEKGIYQTSNFRVQPTESIVRFPNITNLCPFGEVFNATRFASVYAWNRKRISNCVADYSVLYNSASFSTFKCYGVSPTKLNDLCFTNVYADSFVIRGDEVRQIAPGQTGKIADYNYKLPDDFTGCVIAWNSNNLDSKVGGNYNYLYRLFRKSNLKPFERDISTEIYQAGSTPCNGVEGFNCYFPLQSYGFQPTNGVGYQPYRVVVLSFELLHAPATVCGPKKSTNLVKNKCVNFNFNGLTGTGVLTESNKKFLPFQQFGRDIADTTDAVRDPQTLEILDITPCSFGGVSVITPGTNTSNQVAVLYQDVNCTEVPVAIHADQLTPTWRVYSTGSNVFQTRAGCLIGAEHVNNSYECDIPIGAGICASYQTQTNSPRRARSVASQSIIAYTMSLGAENSVAYSNNSIAIPTNFTISVTTEILPVSMTKTSVDCTMYICGDSTECSNLLLQYGSFCTQLNRALTGIAVEQDKNTQEVFAQVKQIYKTPPIKDFGGFNFSQILPDPSKPSKRSFIEDLLFNKVTLADAGFIKQYGDCLGDIAARDLICAQKFNGLTVLPPLLTDEMIAQYTSALLAGTITSGWTFGAGAALQIPFAMQMAYRFNGCGVTQNVLYENQKLIANQFNSAIGKIQDSLSSTASALGKLQDVVNQNAQALNTLVKQLSSNFGAISSVLNDILSRLDKVEAEVQIDRLITGRLQSLQTYVTQQLIRAAEIRASANLAATKMSECVLGQSKRVDFCGKGCHLMSFPQSAPHGVVFLHVTYVPAQEKNFTTAPAICHDGKAHFPREGVFVSNGTHWFVTQRNFYEPQIITTDNTFVSGNCDVLIGIVNNTVYDPLQPELDSFKEELDKYFKNHTSPDVDLGDISGINASVVNIQKEIDRLNEVAKNLNESLIDLQELGKYEQYIKGGGGSDIDPYKEFGSSYQLLNFLPLDFFPDLNALVDTATALYEEELTGREHCSPHHTAIRQALVCWDELTKLIAWMSSNITSEQVRTIIVNHVNDTWGLKVRQSLWFHLSCLTFGQHTVQEFLVSFGVWIRTPAPYRPPNAPILSTLPEHTVIC

SEQ ID NO: 7247 - protein, 1365 aa, Artificial Sequence
  SARS-CoV-2/Shenzhen/SZTH-004/2020__EPI_ISL_406595 spike protein (1-1211)(I909C_Y1047C) WhcAg construct
MFVFLVLLPLVSSQCVNLTTRTQLPPAYTNSFTRGVYYPDKVFRSSVLHSTQDLFLPFFSNVTWFHAIHVSGTNGTKRFDNPVLPFNDGVYFASTEKSNIIRGWIFGTTLDSKTQSLLIVNNATNVVIKVCEFQFCNDPFLGVYYHKNNKSWMESEFRVYSSANNCTFEYVSQPFLMDLEGKQGNFKNLREFVFKNIDGYFKIYSKHTPINLVRDLPQGFSALEPLVDLPIGINITRFQTLLALHRSYLTPGDSSSGWTAGAAAYYVGYLQPRTFLLKYNENGTITDAVDCALDPLSETKCTLKSFTVEKGIYQTSNFRVQPTESIVRFPNITNLCPFGEVFNATRFASVYAWDRKRISNCVAYYSVLYNSASFSTFKCYGVSPTKLNDLCFTNVYADSFVIRGDEVRQIAPGQTGKIADYNYKLPDDFTGCVIAWNSNNLDSKVGGNYNYLYRLFRKSNLKPFERDISTEIYQAGSTPCNGVEGFNCYFPLQSYGFQPTNGVGYQPYRVVVLSFELLHAPATVCGPKKSTNLVKNKCVNFNFNGLTGTGVLTESNKKFLPFQQFGRDIADTTDAVRDPQTLEILDITPCSFGGVSVITPGTNTSNQVAVLYQDVNCTEVPVAIHADQLTPTWRVYSTGSNVFQTRAGCLIGAEHVNNSYECDIPIGAGICASYQTQTNSPRRARSVASQSIIAYTMSLGAENSVAYSNNSIAIPTNFTISVTTEILPVSMTKTSVDCTMYICGDSTECSNLLLQYGSFCTQLNRALTGIAVEQDKNTQEVFAQVKQIYKTPPIKDFGGFNFSQILPDPSKPSKRSFIEDLLFNKVTLADAGFIKQYGDCLGDIAARDLICAQKFNGLTVLPPLLTDEMIAQYTSALLAGTITSGWTFGAGAALQIPFAMQMAYRFNGCGVTQNVLYENQKLIANQFNSAIGKIQDSLSSTASALGKLQDVVNQNAQALNTLVKQLSSNFGAISSVLNDILSRLDKVEAEVQIDRLITGRLQSLQTYVTQQLIRAAEIRASANLAATKMSECVLGQSKRVDFCGKGCHLMSFPQSAPHGVVFLHVTYVPAQEKNFTTAPAICHDGKAHFPREGVFVSNGTHWFVTQRNFYEPQIITTDNTFVSGNCDVVIGIVNNTVYDPLQPELDSFKEELDKYFKNHTSPDVDLGDISGINASVVNIQKEIDRLNEVAKNLNESLIDLQELGKYEQYIKGGGGSDIDPYKEFGSSYQLLNFLPLDFFPDLNALVDTATALYEEELTGREHCSPHHTAIRQALVCWDELTKLIAWMSSNITSEQVRTIIVNHVNDTWGLKVRQSLWFHLSCLTFGQHTVQEFLVSFGVWIRTPAPYRPPNAPILSTLPEHTVIC

SEQ ID NO: 7248 - protein, 1365 aa, Artificial Sequence
  SARS-CoV-2/France/IDF0372/2020__EPI_ISL_406596 spike protein (1-1211)(I909C_Y1047C) WhcAg construct
MFVFLVLLPLVSSQCVNLTTRTQLPPAYTNSFTRGVYYPDKVFRSSVLHSTQDLFLPFFSNVTWFHAIHVSGTNGTKRFDNPVLPFNDGVYFASTEKSNIIRGWIFGTTLDSKTQSLLIVNNATNVVIKVCEFQFCNDPFLGVYYHKNNKSWMESEFRVYSSANNCTFEYVSQPFLMDLEGKQGNFKNLREFVFKNIDGYFKIYSKHTPINLVRDLPQGFSALEPLVDLPIGINITRFQTLLALHRSYLTPGDSSSGWTAGAAAYYVGYLQPRTFLLKYNENGTITDAVDCALDPLSETKCTLKSFTVEKGIYQTSNFRVQPTESIVRFPNITNLCPFGEVFNATRFASVYAWNRKRISNCVADYSFLYNSASFSTFKCYGVSPTKLNDLCFTNVYADSFVIRGDEVRQIAPGQTGKIADYNYKLPDDFTGCVIAWNSNNLDSKVGGNYNYLYRLFRKSNLKPFERDISTEIYQAGSTPCNGVEGFNCYFPLQSYGFQPTNGVGYQPYRVVVLSFELLHAPATVCGPKKSTNLVKNKCVNFNFNGLTGTGVLTESNKKFLPFQQFGRDIADTTDAVRDPQTLEILDITPCSFGGVSVITPGTNTSNQVAVLYQDVNCTEVPVAIHADQLTPTWRVYSTGSNVFQTRAGCLIGAEHVNNSYECDIPIGAGICASYQTQTNSPRRARSVASQSIIAYTMSLGAENSVAYSNNSIAIPTNFTISVTTEILPVSMTKTSVDCTMYICGDSTECSNLLLQYGSFCTQLNRALTGIAVEQDKNTQEVFAQVKQIYKTPPIKDFGGFNFSQILPDPSKPSKRSFIEDLLFNKVTLADAGFIKQYGDCLGDIAARDLICAQKFNGLTVLPPLLTDEMIAQYTSALLAGTITSGWTFGAGAALQIPFAMQMAYRFNGCGVTQNVLYENQKLIANQFNSAIGKIQDSLSSTASALGKLQDVVNQNAQALNTLVKQLSSNFGAISSVLNDILSRLDKVEAEVQIDRLITGRLQSLQTYVTQQLIRAAEIRASANLAATKMSECVLGQSKRVDFCGKGCHLMSFPQSAPHGVVFLHVTYVPAQEKNFTTAPAICHDGKAHFPREGVFVSNGTHWFVTQRNFYEPQIITTDNTFVSGNCDVVIGIVNNTVYDPLQPELDSFKEELDKYFKNHTSPDVDLGDISGINASVVNIQKEIDRLNEVAKNLNESLIDLQELGKYEQYIKGGGGSDIDPYKEFGSSYQLLNFLPLDFFPDLNALVDTATALYEEELTGREHCSPHHTAIRQALVCWDELTKLIAWMSSNITSEQVRTIIVNHVNDTWGLKVRQSLWFHLSCLTFGQHTVQEFLVSFGVWIRTPAPYRPPNAPILSTLPEHTVIC

SEQ ID NO: 7249 - protein, 1365 aa, Artificial Sequence
  SARS-CoV-2/Australia/VIC01/2020__EPI_ISL_406844 spike protein (1-1211)(I909C_Y1047C) WhcAg construct
MFVFLVLLPLVSSQCVNLTTRTQLPPAYTNSFTRGVYYPDKVFRSSVLHSTQDLFLPFFSNVTWFHAIHVSGTNGTKRFDNPVLPFNDGVYFASTEKSNIIRGWIFGTTLDSKTQSLLIVNNATNVVIKVCEFQFCNDPFLGVYYHKNNKSWMESEFRVYSSANNCTFEYVSQPFLMDLEGKQGNFKNLREFVFKNIDGYFKIYSKHTPINLVRDLPQGFSALEPLVDLPIGINITRFQTLLALHRRYLTPGDSSSGWTAGAAAYYVGYLQPRTFLLKYNENGTITDAVDCALDPLSETKCTLKSFTVEKGIYQTSNFRVQPTESIVRFPNITNLCPFGEVFNATRFASVYAWNRKRISNCVADYSVLYNSASFSTFKCYGVSPTKLNDLCFTNVYADSFVIRGDEVRQIAPGQTGKIADYNYKLPDDFTGCVIAWNSNNLDSKVGGNYNYLYRLFRKSNLKPFERDISTEIYQAGSTPCNGVEGFNCYFPLQSYGFQPTNGVGYQPYRVVVLSFELLHAPATVCGPKKSTNLVKNKCVNFNFNGLTGTGVLTESNKKFLPFQQFGRDIADTTDAVRDPQTLEILDITPCSFGGVSVITPGTNTSNQVAVLYQDVNCTEVPVAIHADQLTPTWRVYSTGSNVFQTRAGCLIGAEHVNNSYECDIPIGAGICASYQTQTNSPRRARSVASQSIIAYTMSLGAENSVAYSNNSIAIPTNFTISVTTEILPVSMTKTSVDCTMYICGDSTECSNLLLQYGSFCTQLNRALTGIAVEQDKNTQEVFAQVKQIYKTPPIKDFGGFNFSQILPDPSKPSKRSFIEDLLFNKVTLADAGFIKQYGDCLGDIAARDLICAQKFNGLTVLPPLLTDEMIAQYTSALLAGTITSGWTFGAGAALQIPFAMQMAYRFNGCGVTQNVLYENQKLIANQFNSAIGKIQDSLSSTASALGKLQDVVNQNAQALNTLVKQLSSNFGAISSVLNDILSRLDKVEAEVQIDRLITGRLQSLQTYVTQQLIRAAEIRASANLAATKMSECVLGQSKRVDFCGKGCHLMSFPQSAPHGVVFLHVTYVPAQEKNFTTAPAICHDGKAHFPREGVFVSNGTHWFVTQRNFYEPQIITTDNTFVSGNCDVVIGIVNNTVYDPLQPELDSFKEELDKYFKNHTSPDVDLGDISGINASVVNIQKEIDRLNEVAKNLNESLIDLQELGKYEQYIKGGGGSDIDPYKEFGSSYQLLNFLPLDFFPDLNALVDTATALYEEELTGREHCSPHHTAIRQALVCWDELTKLIAWMSSNITSEQVRTIIVNHVNDTWGLKVRQSLWFHLSCLTFGQHTVQEFLVSFGVWIRTPAPYRPPNAPILSTLPEHTVIC

SEQ ID NO: 7250 - protein, 1365 aa, Artificial Sequence
  SARS-CoV-2/Germany/BavPat1/2020__EPI_ISL_406862 spike protein (1-1211)(I909C_Y1047C) WhcAg construct
MFVFLVLLPLVSSQCVNLTTRTQLPPAYTNSFTRGVYYPDKVFRSSVLHSTQDLFLPFFSNVTWFHAIHVSGTNGTKRFDNPVLPFNDGVYFASTEKSNIIRGWIFGTTLDSKTQSLLIVNNATNVVIKVCEFQFCNDPFLGVYYHKNNKSWMESEFRVYSSANNCTFEYVSQPFLMDLEGKQGNFKNLREFVFKNIDGYFKIYSKHTPINLVRDLPQGFSALEPLVDLPIGINITRFQTLLALHRSYLTPGDSSSGWTAGAAAYYVGYLQPRTFLLKYNENGTITDAVDCALDPLSETKCTLKSFTVEKGIYQTSNFRVQPTESIVRFPNITNLCPFGEVFNATRFASVYAWNRKRISNCVADYSVLYNSASFSTFKCYGVSPTKLNDLCFTNVYADSFVIRGDEVRQIAPGQTGKIADYNYKLPDDFTGCVIAWNSNNLDSKVGGNYNYLYRLFRKSNLKPFERDISTEIYQAGSTPCNGVEGFNCYFPLQSYGFQPTNGVGYQPYRVVVLSFELLHAPATVCGPKKSTNLVKNKCVNFNFNGLTGTGVLTESNKKFLPFQQFGRDIADTTDAVRDPQTLEILDITPCSFGGVSVITPGTNTSNQVAVLYQGVNCTEVPVAIHADQLTPTWRVYSTGSNVFQTRAGCLIGAEHVNNSYECDIPIGAGICASYQTQTNSPRRARSVASQSIIAYTMSLGAENSVAYSNNSIAIPTNFTISVTTEILPVSMTKTSVDCTMYICGDSTECSNLLLQYGSFCTQLNRALTGIAVEQDKNTQEVFAQVKQIYKTPPIKDFGGFNFSQILPDPSKPSKRSFIEDLLFNKVTLADAGFIKQYGDCLGDIAARDLICAQKFNGLTVLPPLLTDEMIAQYTSALLAGTITSGWTFGAGAALQIPFAMQMAYRFNGCGVTQNVLYENQKLIANQFNSAIGKIQDSLSSTASALGKLQDVVNQNAQALNTLVKQLSSNFGAISSVLNDILSRLDKVEAEVQIDRLITGRLQSLQTYVTQQLIRAAEIRASANLAATKMSECVLGQSKRVDFCGKGCHLMSFPQSAPHGVVFLHVTYVPAQEKNFTTAPAICHDGKAHFPREGVFVSNGTHWFVTQRNFYEPQIITTDNTFVSGNCDVVIGIVNNTVYDPLQPELDSFKEELDKYFKNHTSPDVDLGDISGINASVVNIQKEIDRLNEVAKNLNESLIDLQELGKYEQYIKGGGGSDIDPYKEFGSSYQLLNFLPLDFFPDLNALVDTATALYEEELTGREHCSPHHTAIRQALVCWDELTKLIAWMSSNITSEQVRTIIVNHVNDTWGLKVRQSLWFHLSCLTFGQHTVQEFLVSFGVWIRTPAPYRPPNAPILSTLPEHTVIC

SEQ ID NO: 7251 - protein, 1365 aa, Artificial Sequence
  SARS-CoV-2/Wuhan/HBCDC-HB-02/2020__EPI_ISL_412978 spike protein (1-1211)(I909C_Y1047C) WhcAg construct
MFVFLVLLPLVSSQCVNLTTRTQLPPAYTNSFTRGVYYPDKVFRSSVLHSTQDLFLPFFSNVTWFHAIHVSGTNGTKRFDNPVLPFNDGVYFASTEKSNIIRGWIFGTTLDSKTQSLLIVNNATNVVIKVCEFQFCNDPFLGVYYHKNNKSWMESEFRVYSSANNCTFEYVSQPFLMDLEGKQGNFKNLREFVFKNIDGYFKIYSKHTPINLVRDLPQGFSALEPLVDLPIGINITRFQTLLALHRSYLTPGDSSSGWTAGAAAYYVGYLQPRTFLLKYNENGTITDAVDCALDPLSETKCTLKSFTVEKGIYQTSNFRVQPTESIVRFPNITNLCPFGEVFNATRFASVYAWNRKRISNCVADYSVLYNSASFSTFKCYGVSPTKLNDLCFTNVYADSFVIRGDEVRQIAPGQTGKIADYNYKLPDDFTGCVIAWNSNNLDSKVGGNYNYLYRLFRKSNLKPFERDISTEIYQAGSTPCNGVEGFNCYFPLQSYGFQPTNGVGYQPYRVVVLSFELLHAPATVCGPKKSTNLVKNKCVNFNFNGLTGTGVLTESNKKFLPFQQFGRDIADTTDAVRDPQTLEILDITPCSFGGVSVITPGTNTSNQVAVLYQDVNCTEVPVAIHADQLTPTWRVYSTGSNVFQTRAGCLIGAEHVNNSYECDIPIGAGICASYQTQTNSPRRARSVASQSIIAYTMSLGAENSVAYSNNSIAIPTNFTISVTTEILPVSMTKTSVDCTMYICGDSTECSNFLLQYGSFCTQLNRALTGIAVEQDKNTQEVFAQVKQIYKTPPIKDFGGFNFSQILPDPSKPSKRSFIEDLLFNKVTLADAGFIKQYGDCLGDIAARDLICAQKFNGLTVLPPLLTDEMIAQYTSALLAGTITSGWTFGAGAALQIPFAMQMAYRFNGCGVTQNVLYENQKLIANQFNSAIGKIQDSLSSTASALGKLQDVVNQNAQALNTLVKQLSSNFGAISSVLNDILSRLDKVEAEVQIDRLITGRLQSLQTYVTQQLIRAAEIRASANLAATKMSECVLGQSKRVDFCGKGCHLMSFPQSAPHGVVFLHVTYVPAQEKNFTTAPAICHDGKAHFPREGVFVSNGTHWFVTQRNFYEPQIITTDNTFVSGNCDVVIGIVNNTVYDPLQPELDSFKEELDKYFKNHTSPDVDLGDISGINASVVNIQKEIDRLNEVAKNLNESLIDLQELGKYEQYIKGGGGSDIDPYKEFGSSYQLLNFLPLDFFPDLNALVDTATALYEEELTGREHCSPHHTAIRQALVCWDELTKLIAWMSSNITSEQVRTIIVNHVNDTWGLKVRQSLWFHLSCLTFGQHTVQEFLVSFGVWIRTPAPYRPPNAPILSTLPEHTVIC

SEQ ID NO: 7252 - protein, 1365 aa, Artificial Sequence
  SARS-CoV-2/Australia/QLD02/2020__EPI_ISL_407896 spike protein (1-1211)(I909C_Y1047C) WhcAg construct
MFVFLVLLPLVSSQCVNLTTRTQLPPAYTNSFTRGVYYPDKVFRSSVLHSTQDLFLPFFSNVTWFHAIHVSGTNGTKRFDNPVLPFNDGVYFASTEKSNIIRGWIFGTTLDSKTQSLLIVNNATNVVIKVCEFQFCNDPFLGVYYHKNNKSWMESEFRVYSSANNCTFEYVSQPFLMDLEGKQGNFKNLREFVFKNIDGYFKIYSKHTPINLVRDLPQGFSALEPLVDLPIGINITRFQTLLALHRSYLTPGDSSSGWTAGAAAYYVGYLQPRTFLLKYNENGTITDAVDCALDPLSETKCTLKSFTVEKGIYQTSNFRVQPTESIVRFPNITNLCPFGEVFNATRFASVYAWNRKRISNCVADYSVLYNSASFSTFKCYGVSPTKLNDLCFTNVYADSFVIRGDEVRQIAPGQTGKIADYNYKLPDDFTGCVIAWNSNNLDSKVGGNYNYLYRLFRKSNLKPFERDISTEIYQAGSTPCNGVEGFNCYFPLQSYGFQPTNGVGYQPYRVVVLSFELLHAPATVCGPKKSTNLVKNKCVNFNFNGLTGTGVLTESNKKFLPFQQFGRDIADTTDAVRDPQTLEILDITPCSFGGVSVITPGTNTSNQVAVLYQDVNCTEVPVAIHADQLTPTWRVYSTGSNVFQTRAGCLIGAEHVNNSYECDIPIGAGICASYQTQTNSPRRARSVASQSIIAYTMSLGAENSVAYSNNSIAIPTNFTISVTTEILPVSMTKTSVDCTMYICGDSTECSNLLLQYGSFCTQLNRALTGIAVEQDKNTQEVFAQVKQIYKTPPIKDFGGFNFSQILPDPSKPSKRSFIEDLLFNKVTLADAGFIKQYGDCLGDIAARDLICAQKFNGLTVLPPLLTDEMIAQYTSALLAGTITSGWTFGAGAALQIPFAMQMAYRFNGCGVTQNVLYENQKLIANQFNSAIGKIQDSLSSTASALGKLQDVVNQNAQALNTLVKQLSSNFGAISSVLNDILSRLDKVEAEVQIDRLITGRLQSLQTYVTQQLIRAAEIRASANLAATKMSECVLGQSKRVDFCGKGCHLMSFPQSAPHGVVFLHVTYVPAQEKNFTTAPAICHDGKAHFPREGVFVSNGTHWFVTQRNFYEPQIITTDNTFVSGNCDVVIGIVNNTVYDPLQLELDSFKEELDKYFKNHTSPDVDLGDISGINASVVNIQKEIDRLNEVAKNLNESLIDLQELGKYEQYIKGGGGSDIDPYKEFGSSYQLLNFLPLDFFPDLNALVDTATALYEEELTGREHCSPHHTAIRQALVCWDELTKLIAWMSSNITSEQVRTIIVNHVNDTWGLKVRQSLWFHLSCLTFGQHTVQEFLVSFGVWIRTPAPYRPPNAPILSTLPEHTVIC

SEQ ID NO: 7253 - protein, 1365 aa, Artificial Sequence
  SARS-CoV-2/India/1-31/2020__EPI_ISL_413523 spike protein (1-1211)(I909C_Y1047C) WhcAg construct
MFVFLVLLPLVSSQCVNLTTRTQLPPAYTNSFTRGVYYPDKVFRSSVLHSTQDLFLPFFSNVTWFHAIHVSGTNGTKRFDNPVLPFNDGVYFASTEKSNIIRGWIFGTTLDSKTQSLLIVNNATNVVIKVCEFQFCNDPFLGVYYHKNNKSWMESEFRVYSSANNCTFEYVSQPFLMDLEGKQGNFKNLREFVFKNIDGYFKIYSKHTPINLVRDLPQGFSALEPLVDLPIGINITRFQTLLALHRSYLTPGDSSSGWTAGAAAYYVGYLQPRTFLLKYNENGTITDAVDCALDPLSETKCTLKSFTVEKGIYQTSNFRVQPTESIVRFPNITNLCPFGEVFNATRFASVYAWNRKRISNCVADYSVLYNSASFSTFKCYGVSPTKLNDLCFTNVYADSFVIRGDEVRQIAPGQTGKIADYNYKLPDDFTGCVIAWNSNNLDSKVGGNYNYLYRLFRKSNLKPFERDISTEIYQAGSTPCNGVEGFNCYFPLQSYGFQPTNGVGYQPYRVVVLSFELLHAPATVCGPKKSTNLVKNKCVNFNFNGLTGTGVLTESNKKFLPFQQFGRDIADTTDAVRDPQTLEILDITPCSFGGVSVITPGTNTSNQVAVLYQDVNCTEVPVAIHADQLTPTWRVYSTGSNVFQTRAGCLIGAEHVNNSYECDIPIGAGICASYQTQTNSPRRARSVASQSIIAYTMSLGAENSVAYSNNSIAIPTNFTISVTTEILPVSMTKTSVDCTMYICGDSTECSNLLLQYGSFCTQLNRALTGIAVEQDKNTQEVFAQVKQIYKTPPIKDFGGFNFSQILPDPSKPSKRSFIEDLLFNKVTLADAGFIKQYGDCLGDIAARDLICAQKFNGLTVLPPLLTDEMIAQYTSALLAGTITSGWTFGAGAALQIPFAMQMAYRFNGCGVTQNVLYENQKLIANQFNSVIGKIQDSLSSTASALGKLQDVVNQNAQALNTLVKQLSSNFGAISSVLNDILSRLDKVEAEVQIDRLITGRLQSLQTYVTQQLIRAAEIRASANLAATKMSECVLGQSKRVDFCGKGCHLMSFPQSAPHGVVFLHVTYVPAQEKNFTTAPAICHDGKAHFPREGVFVSNGTHWFVTQRNFYEPQIITTDNTFVSGNCDVVIGIVNNTVYDPLQPELDSFKEELDKYFKNHTSPDVDLGDISGINASVVNIQKEIDRLNEVAKNLNESLIDLQELGKYEQYIKGGGGSDIDPYKEFGSSYQLLNFLPLDFFPDLNALVDTATALYEEELTGREHCSPHHTAIRQALVCWDELTKLIAWMSSNITSEQVRTIIVNHVNDTWGLKVRQSLWFHLSCLTFGQHTVQEFLVSFGVWIRTPAPYRPPNAPILSTLPEHTVIC

SEQ ID NO: 7254 - protein, 1365 aa, Artificial Sequence
  SARS-CoV-2/Guangdong/GD2020087-P0008/2020__EPI_ISL_413863 spike protein (1-1211)(I909C_Y1047C) WhcAg construct
MFVFLVLLPLVSSQCVNLTTRTQLPPAYTNSFTRGVYYPDKVFRSSVLHSTQDLFLPFFSNVTWFHAIHVSGTNGTKRFDNPVLPFNDGVYFASTEKSNIIRGWIFGTTLDSKTQSLLIVNNATNVVIKVCEFQFCNDPFLGVYYHKNNKSWMESEFRVYSSANNCTFEYVSQPFLMDLEGKQGNFKNLREFVFKNIDGYFKIYSKHTPINLVRDLPQGFSALEPLVDLPIGINITRFQTLLALHRSYLTPGDSSSGWTAGAAAYYVGYLQPRTFLLKYNENGTITDAVDCALDPLSETKCTLKSFTVEKGIYQTSNFRVQPTESIVRFPNITNLCPFGEVFNATRFASVYAWNRKRISNCVADYSVLYNSASFSTFKCYGVSPTKLNDLCFTNVYADSFVIRGDEVREIAPGQTGKIADYNYKLPDDFTGCVIAWNSNNLDSKVGGNYNYLYRLFRKSNLKPFERDISTEIYQAGSTPCNGVEGFNCYFPLQSYGFQPTNGVGYQPYRVVVLSFELLHAPATVCGPKKSTNLVKNKCVNFNFNGLTGTGVLTESNKKFLPFQQFGRDIADTTDAVRDPQTLEILDITPCSFGGVSVITPGTNTSNQVAVLYQDVNCTEVPVAIHADQLTPTWRVYSTGSNVFQTRAGCLIGAEHVNNSYECDIPIGAGICASYQTQTNSPRRARSVASQSIIAYTMSLGAENSVAYSNNSIAIPTNFTISVTTEILPVSMTKTSVDCTMYICGDSTECSNLLLQYGSFCTQLNRALTGIAVEQDKNTQEVFAQVKQIYKTPPIKDFGGFNFSQILPDPSKPSKRSFIEDLLFNKVTLADAGFIKQYGDCLGDIAARDLICAQKFNGLTVLPPLLTDEMIAQYTSALLAGTITSGWTFGAGAALQIPFAMQMAYRFNGCGVTQNVLYENQKLIANQFNSAIGKIQDSLSSTASALGKLQDVVNQNAQALNTLVKQLSSNFGAISSVLNDILSRLDKVEAEVQIDRLITGRLQSLQTYVTQQLIRAAEIRASANLAATKMSECVLGQSKRVDFCGKGCHLMSFPQSAPHGVVFLHVTYVPAQEKNFTTAPAICHDGKAHFPREGVFVSNGTHWFVTQRNFYEPQIITTDNTFVSGNCDVVIGIVNNTVYDPLQPELDSFKEELDKYFKNHTSPDVDLGDISGINASVVNIQKEIDRLNEVAKNLNESLIDLQELGKYEQYIKGGGGSDIDPYKEFGSSYQLLNFLPLDFFPDLNALVDTATALYEEELTGREHCSPHHTAIRQALVCWDELTKLIAWMSSNITSEQVRTIIVNHVNDTWGLKVRQSLWFHLSCLTFGQHTVQEFLVSFGVWIRTPAPYRPPNAPILSTLPEHTVIC

SEQ ID NO: 7255 - protein, 1365 aa, Artificial Sequence
  SARS-CoV-2/Sweden/01/2020__EPI_ISL_411951 spike protein (1-1211)(I909C_Y1047C) WhcAg construct
MFVFLVLLPLVSSQCVNLTTRTQLPPAYTNSFTRGVYYPDKVFRSSVLHSTQDLFLPFFSNVTWFHAIHVSGTNGTKRFDNPVLPFNDGVYFASTEKSNIIRGWIFGTTLDSKTQSLLIVNNATNVVIKVCEFQFCNDPFLGVYYHKNNKSWMESEFRVYSSANNCTFEYVSQPFLMDLEGKQGNFKNLREFVFKNIDGYFKIYSKHTPINLVRDLPQGFSALEPLVDLPIGINITRFQTLLALHRSYLTPGDSSSGWTAGAAAYYVGYLQPRTFLLKYNENGTITDAVDCALDPLSETKCTLKSFTVEKGIYQTSNFRVQPTESIVRFPNITNLCPFGEVFNATRFASVYAWNRKRISNCVADYSVLYNSASFSTFKCYGVSPTKLNDLCFTNVYADSFVIRGDEVRQIAPGQTGKIADYNYKLPDDFTGCVIAWNSNNLDSKVGGNYNYLYRLFRKSNLKPFERDISTEIYQAGSTPCNGVEGFNCYFPLQSYGFQPTNGVGYQPYRVVVLSFELLHAPATVCGPKKSTNLVKNKCVNFNFNGLTGTGVLTESNKKFLPFQQFGRDIADTTDAVRDPQTLEILDITPCSFGGVSVITPGTNTSNQVAVLYQDVNCTEVPVAIHADQLTPTWRVYSTGSNVFQTRAGCLIGAEHVNNSYECDIPIGAGICASYQTQTNSPRRARSVASQSIIAYTMSLGAENSVAYSNNSIAIPTNFTISVTTEILPVSMTKTSVDCTMYICGDSTECSNLLLQYGSFCTQLNRALTGIAVEQDKNTQEVFAQVKQIYKTPPIKDCGGFNFSQILPDPSKPSKRSFIEDLLFNKVTLADAGFIKQYGDCLGDIAARDLICAQKFNGLTVLPPLLTDEMIAQYTSALLAGTITSGWTFGAGAALQIPFAMQMAYRFNGCGVTQNVLYENQKLIANQFNSAIGKIQDSLSSTASALGKLQDVVNQNAQALNTLVKQLSSNFGAISSVLNDILSRLDKVEAEVQIDRLITGRLQSLQTYVTQQLIRAAEIRASANLAATKMSECVLGQSKRVDFCGKGCHLMSFPQSAPHGVVFLHVTYVPAQEKNFTTAPAICHDGKAHFPREGVFVSNGTHWFVTQRNFYEPQIITTDNTFVSGNCDVVIGIVNNTVYDPLQPELDSFKEELDKYFKNHTSPDVDLGDISGINASVVNIQKEIDRLNEVAKNLNESLIDLQELGKYEQYIKGGGGSDIDPYKEFGSSYQLLNFLPLDFFPDLNALVDTATALYEEELTGREHCSPHHTAIRQALVCWDELTKLIAWMSSNITSEQVRTIIVNHVNDTWGLKVRQSLWFHLSCLTFGQHTVQEFLVSFGVWIRTPAPYRPPNAPILSTLPEHTVIC

SEQ ID NO: 7256 - protein, 1365 aa, Artificial Sequence
  SARS-CoV-2/Tianmen/HBCDC-HB-07/2020__EPI_ISL_412983 spike protein (1-1211)(I909C_Y1047C) WhcAg construct
MFVFLVLLPLVSSQCVNLTTRTQLPPAYTNSFTRGVYYPDKVFRSSVLHSTQDLFLPFFSNVTWFHAIHVSGTNGTKRFDNPVLPFNDGVYFASTEKSNIIRGWIFGTTLDSKTQSLLIVNNATNVVIKVCEFQFCNDPFLGVYYHKNNKSWMESEFRVYSSANNCTFEYVSQPFLMDLEGKQGNFKNLREFVFKNIDGYFKIYSKHTPINLVRDLPQGFSALEPLVDLPIGINITRFQTLLALHRSYLTPGDSSSGWTAGAAAYYVGYLQPRTFLLKYNENGTITDAVDCALDPLSETKCTLKSFTVEKGIYQTSNFRVQPTESIVRFPNITNLCPFGEVFNATRFASVYAWNRKRISNCVADYSVLYNSASFSTFKCYGVSPTKLNDLCFTNVYADSFVIRGDEVRQIAPGQTGKIADYNYKLPDDFTGCVIAWNSNNLDSKVGGNYNYLYRLFRKSNLKPFERDISTEIYQAGSTPCNGVEGFNCYFPLQSYGFQPTNGVGYQPYRVVVLSFELLHAPATVCGPKKSTNLVKNKCVNFNFNGLTGTGVLTESNKKFLPFQQFGRDIADTTDAVRDPQTLEILDITPCSFGGVSVITPGTNTSNQVAVLYQDLNCTEVPVAIHADQLTPTWRVYSTGSNVFQTRAGCLIGAEHVNNSYECDIPIGAGICASYQTQTNSPRRARSVASQSIIAYTMSLGAENSVAYSNNSIAIPTNFTISVTTEILPVSMTKTSVDCTMYICGDSTECSNLLLQYGSFCTQLNRALTGIAVEQDKNTQEVFAQVKQIYKTPPIKDFGGFNFSQILPDPSKPSKRSFIEDLLFNKVTLADAGFIKQYGDCLGDIAARDLICAQKFNGLTVLPPLLTDEMIAQYTSALLAGTITSGWTFGAGAALQIPFAMQMAYRFNGCGVTQNVLYENQKLIANQFNSAIGKIQDSLSSTASALGKLQDVVNQNAQALNTLVKQLSSNFGAISSVLNDILSRLDKVEAEVQIDRLITGRLQSLQTYVTQQLIRAAEIRASANLAATKMSECVLGQSKRVDFCGKGCHLMSFPQSAPHGVVFLHVTYVPAQEKNFTTAPAICHDGKAHFPREGVFVSNGTHWFVTQRNFYEPQIITTDNTFVSGNCDVVIGIVNNTVYDPLQPELDSFKEELDKYFKNHTSPDVDLGDISGINASVVNIQKEIDRLNEVAKNLNESLIDLQELGKYEQYIKGGGGSDIDPYKEFGSSYQLLNFLPLDFFPDLNALVDTATALYEEELTGREHCSPHHTAIRQALVCWDELTKLIAWMSSNITSEQVRTIIVNHVNDTWGLKVRQSLWFHLSCLTFGQHTVQEFLVSFGVWIRTPAPYRPPNAPILSTLPEHTVIC

SEQ ID NO: 7257 - protein, 1365 aa, Artificial Sequence
  SARS-CoV-2/Hong Kong/case42_VM20002493/2020__EPI_ISL_414527 spike protein (1-1211)(I909C_Y1047C) WhcAg construct
MFVFLVLLPLVSSQCVNLTTRTQLPPAYTNSFTRGVYYPDKVFRSSVLHSTQDLFLPFFSNVTWFHAIHVSGTNGTKRFDNPVLPFNDGVYFASTEKSNIIRGWIFGTTLDSKTQSLLIVNNATNVVIKVCEFQFCNDPFLGVYYHKNNKSWMESEFRVYSSANNCTFEYVSQPFLMDLEGKQGNFKNLREFVFKNIDGYFKIYSKHTPINLVRDLPQGFSALEPLVDLPIGINITRFQTLLALHRSYLTPGDSSSGWTAGAAAYYVGYLQPRTFLLKYNENGTITDAVDCALDPLSETKCTLKSFTVEKGIYQTSNFRVQPTESIVRFPNITNLCPFGEVFNATRFASVYAWNRKRISNCVADYSVLYNSASFSTFKCYGVSPTKLNDLCFTNVYADSFVIRGDEVRQIAPGQTGKIADYNYKLPDDFTGCVIAWNSNNLDSKVGGNYNYLYRLFRKSNLKPFERDISTEIYQAGSTPCNGVEGFNCYFPLQSYGFQPTNGVGYQPYRVVVLSFELLHAPATVCGPKKSTNLVKNKCVNFNFNGLTGTGVLTESNKKFLPFQQFGRDIADTTDAVRDPQTLEILDITPCSFGGVSVITPGTNTSNQVAVLYQDVNCTEVPVAIHADQLTPTWRVYSTGSNVFQTRAGCLIGAEHVNNSYECDIPIGAGICASYQTQTNSPRRARSVASQSIIAYTMSLGAENSVAYSNNSIAIPTNFAISVTTEILPVSMTKTSVDCTMYICGDSTECSNLLLQYGSFCTQLNRALTGIAVEQDKNTQEVFAQVKQIYKTPPIKDFGGFNFSQILPDPSKPSKRSFIEDLLFNKVTLADAGFIKQYGDCLGDIAARDLICAQKFNGLTVLPPLLTDEMIAQYTSALLAGTITSGWTFGAGAALQIPFAMQMAYRFNGCGVTQNVLYENQKLIANQFNSAIGKIQDSLSSTASALGKLQDVVNQNAQALNTLVKQLSSNFGAISSVLNDILSRLDKVEAEVQIDRLITGRLQSLQTYVTQQLIRAAEIRASANLAATKMSECVLGQSKRVDFCGKGCHLMSFPQSAPHGVVFLHVTYVPAQEKNFTTAPAICHDGKAHFPREGVFVSNGTHWFVTQRNFYEPQIITTDNTFVSGNCDVVIGIVNNTVYDPLQPELDSFKEELDKYFKNHTSPDVDLGDISGINASVVNIQKEIDRLNEVAKNLNESLIDLQELGKYEQYIKGGGGSDIDPYKEFGSSYQLLNFLPLDFFPDLNALVDTATALYEEELTGREHCSPHHTAIRQALVCWDELTKLIAWMSSNITSEQVRTIIVNHVNDTWGLKVRQSLWFHLSCLTFGQHTVQEFLVSFGVWIRTPAPYRPPNAPILSTLPEHTVIC

SEQ ID NO: 7258 - protein, 1365 aa, Artificial Sequence
  SARS-CoV-2/USA/CruiseA-23/2020__EPI_ISL_414482 spike protein (1-1211)(I909C_Y1047C) WhcAg construct
MFVFLVLLPLVSSQCVNLTTRTQLPPAYTNSFTRGVYYPDKVFRSSVLHSTQDLFLPFFSNVTWFHAIHVSGTNGTKRFDNPVLPFNDGVYFASTEKSNIIRGWIFGTTLDSKTQSLLIVNNATNVVIKVCEFQFCNDPFLGVYYHKNNKSWMESEFRVYSSANNCTFEYVSQPFLMDLEVKQGNFKNLREFVFKNIDGYFKIYSKHTPINLVRDLPQGFSALEPLVDLPIGINITRFQTLLALHRSYLTPGDSSSGWTAGAAAYYVGYLQPRTFLLKYNENGTITDAVDCALDPLSETKCTLKSFTVEKGIYQTSNFRVQPTESIVRFPNITNLCPFGEVFNATRFASVYAWNRKRISNCVADYSVLYNSASFSTFKCYGVSPTKLNDLCFTNVYADSFVIRGDEVRQIAPGQTGKIADYNYKLPDDFTGCVIAWNSNNLDSKVGGNYNYLYRLFRKSNLKPFERDISTEIYQAGSTPCNGVEGFNCYFPLQSYGFQPTNGVGYQPYRVVVLSFELLHAPATVCGPKKSTNLVKNKCVNFNFNGLTGTGVLTESNKKFLPFQQFGRDIADTTDAVRDPQTLEILDITPCSFGGVSVITPGTNTSNQVAVLYQDVNCTEVPVAIHADQLTPTWRVYSTGSNVFQTRAGCLIGAEHVNNSYECDIPIGAGICASYQTQTNSPRRARSVASQSIIAYTMSLGAENSVAYSNNSIAIPTNFTISVTTEILPVSMTKTSVDCTMYICGDSTECSNLLLQYGSFCTQLNRALTGIAVEQDKNTQEVFAQVKQIYKTPPIKDFGGFNFSQILPDPSKPSKRSFIEDLLFNKVTLADAGFIKQYGDCLGDIAARDLICAQKFNGLTVLPPLLTDEMIAQYTSALLAGTITSGWTFGAGAALQIPFAMQMAYRFNGCGVTQNVLYENQKLIANQFNSAIGKIQDSLSSTASALGKLQDVVNQNAQALNTLVKQLSSNFGAISSVLNDILSRLDKVEAEVQIDRLITGRLQSLQTYVTQQLIRAAEIRASANLAATKMSECVLGQSKRVDFCGKGCHLMSFPQSAPHGVVFLHVTYVPAQEKNFTTAPAICHDGKAHFPREGVFVSNGTHWFVTQRNFYEPQIITTDNTFVSGNCDVVIGIVNNTVYDPLQPELDSFKEELDKYFKNHTSPDVDLGDISGINASVVNIQKEIDRLNEVAKNLNESLIDLQELGKYEQYIKGGGGSDIDPYKEFGSSYQLLNFLPLDFFPDLNALVDTATALYEEELTGREHCSPHHTAIRQALVCWDELTKLIAWMSSNITSEQVRTIIVNHVNDTWGLKVRQSLWFHLSCLTFGQHTVQEFLVSFGVWIRTPAPYRPPNAPILSTLPEHTVIC

SEQ ID NO: 7259 - protein, 1365 aa, Artificial Sequence
  SARS-CoV-2/Hong Kong/case85_VM20002868/2020__EPI_ISL_414519 spike protein (1-1211)(I909C_Y1047C) WhcAg construct
MFVFLVLVPLVSSQCVNLTTRTQLPPAYTNSFTRGVYYPDKVFRSSVLHSTQDLFLPFFSNVTWFHAIHVSGTNGTKRFDNPVLPFNDGVYFASTEKSNIIRGWIFGTTLDSKTQSLLIVNNATNVVIKVCEFQFCNDPFLGVYYHKNNKSWMESEFRVYSSANNCTFEYVSQPFLMDLEGKQGNFKNLREFVFKNIDGYFKIYSKHTPINLVRDLPQGFSALEPLVDLPIGINITRFQTLLALHRSYLTPGDSSSGWTAGAAAYYVGYLQPRTFLLKYNENGTITDAVDCALDPLSETKCTLKSFTVEKGIYQTSNFRVQPTESIVRFPNITNLCPFGEVFNATRFASVYAWNRKRISNCVADYSVLYNSASFSTFKCYGVSPTKLNDLCFTNVYADSFVIRGDEVRQIAPGQTGKIADYNYKLPDDFTGCVIAWNSNNLDSKVGGNYNYLYRLFRKSNLKPFERDISTEIYQAGSTPCNGVEGFNCYFPLQSYGFQPTNGVGYQPYRVVVLSFELLHAPATVCGPKKSTNLVKNKCVNFNFNGLTGTGVLTESNKKFLPFQQFGRDIADTTDAVRDPQTLEILDITPCSFGGVSVITPGTNTSNQVAVLYQDVNCTEVPVAIHADQLTPTWRVYSTGSNVFQTRAGCLIGAEHVNNSYECDIPIGAGICASYQTQTNSPRRARSVASQSIIAYTMSLGAENSVAYSNNSIAIPTNFTISVTTEILPVSMTKTSVDCTMYICGDSTECSNLLLQYGSFCTQLNRALTGIAVEQDKNTQEVFAQVKQIYKTPPIKDFGGFNFSQILPDPSKPSKRSFIEDLLFNKVTLADAGFIKQYGDCLGDIAARDLICAQKFNGLTVLPPLLTDEMIAQYTSALLAGTITSGWTFGAGAALQIPFAMQMAYRFNGCGVTQNVLYENQKLIANQFNSAIGKIQDSLSSTASALGKLQDVVNQNAQALNTLVKQLSSNFGAISSVLNDILSRLDKVEAEVQIDRLITGRLQSLQTYVTQQLIRAAEIRASANLAATKMSECVLGQSKRVDFCGKGCHLMSFPQSAPHGVVFLHVTYVPAQEKNFTTAPAICHDGKAHFPREGVFVSNGTHWFVTQRNFYEPQIITTDNTFVSGNCDVVIGIVNNTVYDPLQPELDSFKEELDKYFKNHTSPDVDLGDISGINASVVNIQKEIDRLNEVAKNLNESLIDLQELGKYEQYIKGGGGSDIDPYKEFGSSYQLLNFLPLDFFPDLNALVDTATALYEEELTGREHCSPHHTAIRQALVCWDELTKLIAWMSSNITSEQVRTIIVNHVNDTWGLKVRQSLWFHLSCLTFGQHTVQEFLVSFGVWIRTPAPYRPPNAPILSTLPEHTVIC

SEQ ID NO: 7260 - protein, 1365 aa, Artificial Sequence; identical to SEQ ID NO: 7250
  SARS-CoV-2/England/200990660/2020__EPI_ISL_414523 spike protein (1-1211)(I909C_Y1047C) WhcAg construct

SEQ ID NO: 7261 - protein, 1365 aa, Artificial Sequence
  SARS-CoV-2/Australia/NSW09/2020__EPI_ISL_413595 spike protein (1-1211)(I909C_Y1047C) WhcAg construct
MFVFLVLLPLVSSQCVNLTTRTQLPPAYTNSFTRGVYYPDKVFRSSVLHSTQDLFLPFFSNVTWFHAIHVSGTNGTKRFDNPVLPFNDGVYFASTEKSNIIRGWIFGTTLDSKTQSLLIVNNATNVVIKVCEFQFCNDPFLGVYYHKNNKSWMESEFRVYSSANNCTFEYVSQPFLMDLEGKQGNFKNLREFVFKNIDGYFKIYSKHTPINLVRDLPQGFSALEPLVDLPIGINITRFQTLLALHRSYLTPGDSSSGWTAGAAAYYVGYLQPRTFLLKYNENGTITDAVDCALDPLSETKCTLKSFTVEKGIYQTSNFRVQPTESIVRFPNITNLCPFGEVFNATRFASVYAWNRKRISNCVADYSVLYNSASFSTFKCYGVSPTKLNDLCFTNVYADSFVIRGDEVRQIAPGQTGKIADYNYKLPDDFTGCVIAWNSNNLDSKVGGNYNYLYRLFRKSNLKPFERDISTEIYQAGSTPCNGVEGFNCYFPLQSYGFQPTNGVGYQPYRVVVLSFELLHAPATVCGPKKSTNLVKNKCVNFNFNGLTGTGVLTESNKKFLPFQQFGRDIADTTDAVRDPQTLEILDITPCSFGGVSVITPGTNTSNQVAVLYQDVNCTEVPVAIHADQLTPTWRVYSTGSNVFQTRAGCLIGAEHVNNSYECDIPIGAGICASYQTQTNSPRRARSVASQSIIAYTMSLGAENSVAYSNNSIAIPTNFTISVTTEILPVSMTKTSVDCTMYICGDSTECSNLLLQYGSFCTQLNRALTGIAVEQDKNTQEVFAQVKQIYKTPPIKDFGGFNFSQILPDPSKPSKRSFIEDLLFNKVTLADAGFIKQYGDCLGDIAARDLICAQKFNGLTVLPPLLTDEMIAQYTSALLAGTITSGWTFGAGAALQIPFAMQMAYRFNGCGVTQNVLYENQKLIANQFNSAIGKIQDSLSFTASALGKLQDVVNQNAQALNTLVKQLSSNFGAISSVLNDILSRLDKVEAEVQIDRLITGRLQSLQTYVTQQLIRAAEIRASANLAATKMSECVLGQSKRVDFCGKGCHLMSFPQSAPHGVVFLHVTYVPAQEKNFTTAPAICHDGKAHFPREGVFVSNGTHWFVTQRNFYEPQIITTDNTFVSGNCDVVIGIVNNTVYDPLQPELDSFKEELDKYFKNHTSPDVDLGDISGINASVVNIQKEIDRLNEVAKNLNESLIDLQELGKYEQYIKGGGGSDIDPYKEFGSSYQLLNFLPLDFFPDLNALVDTATALYEEELTGREHCSPHHTAIRQALVCWDELTKLIAWMSSNITSEQVRTIIVNHVNDTWGLKVRQSLWFHLSCLTFGQHTVQEFLVSFGVWIRTPAPYRPPNAPILSTLPEHTVIC

SEQ ID NO: 7262 - protein, 1365 aa, Artificial Sequence; identical to SEQ ID NO: 7242
  SARS-CoV-2/Australia/NSW10/2020__EPI_ISL_413596 spike protein (1-1211)(I909C_Y1047C) WhcAg construct

SEQ ID NO: 7263 - protein, 1365 aa, Artificial Sequence
  SARS-CoV-2/Switzerland/1000477797/2020__EPI_ISL_413023 spike protein (1-1211)(I909C_Y1047C) WhcAg construct
MFVFLVLLPLVSSQCVNLTTRTQLPPAYTNSFTRGVYYPDKVFRSSVLHSTQDLFLPFFSNVTWFHAIHVSGTNGTKRFDNPVLPFNDGVYFASTEKSNIIRGWIFGTTLDSKTQSLLIVNNATNVVIKVCEFQFCNDPFLGVYYHKNNKSWMESEFRVYSSANNCTFEYVSQPFLMDLEGKQGNFKNLREFVFKNIDGYFNIYSKHTPINLVRDLPQGFSALEPLVDLPIGINITRFQTLLALHRSYLTPGDSSSGWTAGAAAYYVGYLQPRTFLLKYNENGTITDAVDCALDPLSETKCTLKSFTVEKGIYQTSNFRVQPTESIVRFPNITNLCPFGEVFNATRFASVYAWNRKRISNCVADYSVLYNSASFSTFKCYGVSPTKLNDLCFTNVYADSFVIRGDEVRQIAPGQTGKIADYNYKLPDDFTGCVIAWNSNNLDSKVGGNYNYLYRLFRKSNLKPFERDISTEIYQAGSTPCNGVEGFNCYFPLQSYGFQPTNGVGYQPYRVVVLSFELLHAPATVCGPKKSTNLVKNKCVNFNFNGLTGTGVLTESNKKFLPFQQFGRDIADTTDAVRDPQTLEILDITPCSFGGVSVITPGTNTSNQVAVLYQGVNCTEVPVAIHADQLTPTWRVYSTGSNVFQTRAGCLIGAEHVNNSYECDIPIGAGICASYQTQTNSPRRARSVASQSIIAYTMSLGAENSVAYSNNSIAIPTNFTISVTTEILPVSMTKTSVDCTMYICGDSTECSNLLLQYGSFCTQLNRALTGIAVEQDKNTQEVFAQVKQIYKTPPIKDFGGFNFSQILPDPSKPSKRSFIEDLLFNKVTLADAGFIKQYGDCLGDIAARDLICAQKFNGLTVLPPLLTDEMIAQYTSALLAGTITSGWTFGAGAALQIPFAMQMAYRFNGCGVTQNVLYENQKLIANQFNSAIGKIQDSLSSTASALGKLQDVVNQNAQALNTLVKQLSSNFGAISSVLNDILSRLDKVEAEVQIDRLITGRLQSLQTYVTQQLIRAAEIRASANLAATKMSECVLGQSKRVDFCGKGCHLMSFPQSAPHGVVFLHVTYVPAQEKNFTTAPAICHDGKAHFPREGVFVSNGTHWFVTQRNFYEPQIITTDNTFVSGNCDVVIGIVNNTVYDPLQPELDSFKEELDKYFKNHTSPDVDLGDISGINASVVNIQKEIDRLNEVAKNLNESLIDLQELGKYEQYIKGGGGSDIDPYKEFGSSYQLLNFLPLDFFPDLNALVDTATALYEEELTGREHCSPHHTAIRQALVCWDELTKLIAWMSSNITSEQVRTIIVNHVNDTWGLKVRQSLWFHLSCLTFGQHTVQEFLVSFGVWIRTPAPYRPPNAPILSTLPEHTVIC

SEQ ID NO: 7264 - protein, 1365 aa, Artificial Sequence
  SARS-CoV-2/Belgium/BA-02291/2020__EPI_ISL_415159 spike protein (1-1211)(I909C_Y1047C) WhcAg construct
MFVFLVLLPLVSSQCVNLTTRTQLPPAYTNSFTRGVYYPDKVFRSSVLHSTQDLFLPFFSNVTWFHAIHVSGTNGTKRFDNPVLPFNDGVYFASTEKSNIIRGWIFGTTLDSKTQSLLIVNNATNVVIKVCEFQFCNDPFLGVYYHKNNKSWMESEFRVYSSANNCTFEYVSQPFLMDLEGKQGNFKNLREFVFKNIDGYFKIYSKHTPINLVRDLPQGFSALEPLVDLPIGINITRFQTLLALHRSYLTPGDSSSGWTAGAAAYYVGYLQPRTFLLKYNENGTITDAVDCALDPLSETKCTLKSFTVEKGIYQTSNFRVQPTESIVRFPNITNLCPFGEVFNATRFASVYAWNRKRISNCVADYSVLYNSASFSTFKCYGVSPTKLNDLCFTNVYADSFVIRGDEVRQIAPGQTGKIADYNYKLPDDFTGCVIAWNSNNLDSKVGGNYNYLYRLFRRSNLKPFERDISTEIYQAGSTPCNGVEGFNCYFPLQSYGFQPTNGVGYQPYRVVVLSFELLPAPATVCGPKKSTNLVKNKCVNFNFNGLTGTGVLTESNKKFLPFQQFGRDIADTTDAVRDPQTLEILDITPCSFGGVSVITPGTNTSNQVAVLYQGVNCTEVPVAIHADQLTPTWRVYSTGSNVFQTRAGCLIGAEHVNNSYECDIPIGAGICASYQTQTNSPRRARSVASQSIIAYTMSLGAENSVAYSNNSIAIPTNFTISVTTEILPVSMTKTSVDCTMYICGDSTECSNLLLQYGSFCTQLNRALTGIAVEQDKNTQEVFAQVKQIYKTPPIKDFGGFNFSQILPDPSKPSKRSFIEDLLFNKVTLADAGFIKQYGDCLGDIAARDLICAQKFNGLTVLPPLLTDEMIAQYTSALLAGTITSGWTFGAGAALQIPFAMQMAYRFNGCGVTQNVLYENQKLIANQFNSAIGKIQDSLSSAAPALGKLQDVVNQNAQALNTLVKQLSSNFGAISSVLNDILSRLDKVEAEVQIDRLITGRLQSLQTYVTQQLIRAAEIRASANLAATKMSECVLGQSKRVDFCGKGCHLMSFPQSAPHGVVFLHVTYVPAQEKNFTTAPAICHDGKAHFPREGVFVSNGTHWFVTQRNFYEPQIITTDNTFVSGNCDVVIGIVNNTVYDPLQPELDSFKEELDKYFKNHTSPDVDLGDISGINASVVNIQKEIDRLNEVAKNLNESLIDLQELGKYEQYIKGGGGSDIDPYKEFGSSYQLLNFLPLDFFPDLNALVDTATALYEEELTGREHCSPHHTAIRQALVCWDELTKLIAWMSSNITSEQVRTIIVNHVNDTWGLKVRQSLWFHLSCLTFGQHTVQEFLVSFGVWIRTPAPYRPPNAPILSTLPEHTVIC

SEQ ID NO: 7265 - protein, 1365 aa, Artificial Sequence
  SARS-CoV-2/USA/WA8-UW5/2020__EPI_ISL_413486 spike protein (1-1211)(I909C_Y1047C) WhcAg construct
MFVFLVLLPLVSSQCVNLTTRTQLPPAYTNSFTRGVYYPDKVFRSSVLHSTQDLFLPFFSNVTWFHAIHVSGTNGTKRFDNPVLPFNDGVYFASTEKSNIIRGWIFGTTLDSKTQSLLIVNNATNVVIKVCEFQFCNDPFLGVYYHKNNKSWMESEFRVYSSANNCTFEYVSQPFLMDLEGKQGNFKNLREFVFKNIDGYFKIYSKHTPINLVRDLPQGFSALEPLVDLPIGINITRFQTLLALHRSYLTPGDSSSGWTAGAAAYYVGYLQPRTFLLKYNENGTITDAVDCALDPLSETKCTLKSFTVEKGIYQTSNFRVQPTESIVRFPNITNLCPFGEVFNATRFASVYAWNRKRISNCVADYSVLYNSASFSTFKCYGVSPTKLNDLCFTNVYADSFVIRGDEVRQIAPGQTGKIADYNYKLPDDFTGCVIAWNSNNLDSKVGGNYNYLYRLFRKSNLKPFERDISTEIYQAGSTPCNGVEGFNCYFPLQSYGFQPTNGVGYQPYRVVVLSFELLHAPATVCGPKKSTNLVKNKCVNFNFNGLTGTGVLTESNKKFLPFQQFGRDIADTTDAVRDPQTLEILDITPCSFGGVSVITPGTNTSNQVAVLYQDVNCTEVPVAIHADQLTPTWRVYSTGSNVFQTRAGCLIGAEYVNNSYECDIPIGAGICASYQTQTNSPRRARSVASQSIIAYTMSLGAENSVAYSNNSIAIPTNFTISVTTEILPVSMTKTSVDCTMYICGDSTECSNLLLQYGSFCTQLNRALTGIAVEQDKNTQEVFAQVKQIYKTPPIKDFGGFNFSQILPDPSKPSKRSFIEDLLFNKVTLADAGFIKQYGDCLGDIAARDLICAQKFNGLTVLPPLLTDEMIAQYTSALLAGTITSGWTFGAGAALQIPFAMQMAYRFNGCGVTQNVLYENQKLIANQFNSAIGKIQDSLSSTASALGKLQDVVNQNAQALNTLVKQLSSNFGAISSVLNDILSRLDKVEAEVQIDRLITGRLQSLQTYVTQQLIRAAEIRASANLAATKMSECVLGQSKRVDFCGKGCHLMSFPQSAPHGVVFLHVTYVPAQEKNFTTAPAICHDGKAHFPREGVFVSNGTHWFVTQRNFYEPQIITTDNTFVSGNCDVVIGIVNNTVYDPLQPELDSFKEELDKYFKNHTSPDVDLGDISGINASVVNIQKEIDRLNEVAKNLNESLIDLQELGKYEQYIKGGGGSDIDPYKEFGSSYQLLNFLPLDFFPDLNALVDTATALYEEELTGREHCSPHHTAIRQALVCWDELTKLIAWMSSNITSEQVRTIIVNHVNDTWGLKVRQSLWFHLSCLTFGQHTVQEFLVSFGVWIRTPAPYRPPNAPILSTLPEHTVIC

SEQ ID NO: 7266 - protein, 1365 aa, Artificial Sequence
  SARS-CoV-2/England/20102000506/2020__EPI_ISL_415147 spike protein (1-1211)(I909C_Y1047C) WhcAg construct
MFVFLVLLPLVSSQCVNLTTRTQLPPAYTNSFTRGVYYPDKVFRSSVLHSTQDLFLPFFSNVTWFHAIHVSGTNGTKRFDNPVLPFNDGVYFASTEKSNIIRGWIFGTTLDSKTQSLLIVNNATNVVIKVCEFQFCNDPFLGVYYHKNNKSWMESEFRVYSSANNCTFEYVSQPFLMDLEGKQGNFKNLREFVFKNIDGYFKIYSKHTPINLVRDLPQGFSALEPLVDLPIGINITRFQTLLALHRSYLTPGDSSSGWTAGAAAYYVGYLQPRTFLLKYNENGTITDAVDCALDPLSETKCTLKSFTVEKGIYQTSNFRVQPTESIVRFPNITNLCPFGEVFNATRFASVYAWNRKRISNCVADYSVLYNSASFSTFKCYGVSPTKLNDLCFTNVYADSFVIRGDEVRQIAPGQTGKIADYNYKLPDDFTGCVIAWNSNNLDSKVGGNYNYLYRLFRKSNLKPFERDISTEIYQAGSTPCNGVEGFNCYFPLQSYGFQPTNGVGYQPYRVVVLSFELLHAPATVCGPKKSTNLVKNKCVNFNFNGLTGTGVLTESNKKFLPFQQFGRDIADTTDAVRDPQTLEILDITPCSFGGVSVITPGTNTSNQVAVLYQGVNCTEVPVAIHADQLTPTWRVYSTGSNVFQTRAGCLIGAEHVNNSYECDIPIGAGICASYQTQTNSPRRARSVASQSIIAYTMSLGAENSVAYSNNSIAIPTNFTISVTTEILPVSMTKTSVDCTMYICGDSTECSNLLLQYGSFCTQLNRALTGIAVEQDKNTQEVFAQVKQIYKTPPIKDFGGFNFSQILPDPSKPSKRSFIEDLLFNKVTLADAGFIKQYGYCLGDIAARDLICAQKFNGLTVLPPLLTDEMIAQYTSALLAGTITSGWTFGAGAALQIPFAMQMAYRFNGCGVTQNVLYENQKLIANQFNSAIGKIQDSLSSTASALGKLQDVVNQNAQALNTLVKQLSSNFGAISSVLNDILSRLDKVEAEVQIDRLITGRLQSLQTYVTQQLIRAAEIRASANLAATKMSECVLGQSKRVDFCGKGCHLMSFPQSAPHGVVFLHVTYVPAQEKNFTTAPAICHDGKAHFPREGVFVSNGTHWFVTQRNFYEPQIITTDNTFVSGNCDVVIGIVNNTVYDPLQPELDSFKEELDKYFKNHTSPDVDLGDISGINASVVNIQKEIDRLNEVAKNLNESLIDLQELGKYEQYIKGGGGSDIDPYKEFGSSYQLLNFLPLDFFPDLNALVDTATALYEEELTGREHCSPHHTAIRQALVCWDELTKLIAWMSSNITSEQVRTIIVNHVNDTWGLKVRQSLWFHLSCLTFGQHTVQEFLVSFGVWIRTPAPYRPPNAPILSTLPEHTVIC

SEQ ID NO: 7267 - protein, 1365 aa, Artificial Sequence
  SARS-CoV-2/Belgium/VAG-03013/2020__EPI_ISL_415155 spike protein (1-1211)(I909C_Y1047C) WhcAg construct
MFVFLVLLPLVSSQCVNLTTRTQLPPAYTNSFTRGVYYPDKVFRSSVLHSTQDLFLPFFSNVTWFHAIHVSGTNGTKRFDNPVLPFNDGVYFASTEKSNIIRGWIFGTTLDSKTQSLLIVNNATNVVIKVCEFQFCNDPFLGVYYHKNNKSWMESEFRVYSSANNCTFEYVSQPFLMDLEGKQGNFKNLREFVFKNIDGYFKIYSKHTPINLVRDLPQGFSALEPLVDLPIGINITRFQTLLALHRSYLTPGDSSSGWTAGAAAYYVGYLQPRTFLLKYNENGTITDAVDCALDPLSETKCTLKSFTVEKGIYQTSNFRVQPTESIVRFPNITNLCPFGEVFNATRFASVYAWNRKRISNCVADYSVLYNSASFSTFKCYGVSPTKLNDLCFTNVYADSFVIRGDEVRQIAPGQTGKIADYNYKLPDDFTGCVIAWNSNNLDSKVGGNYNYLYRLFRKSNLKPFERDISTEIYQAGSTPCNGVEGFNCYFPLQSYGFQPTNGVGYQPYRVVVLSFELLHAPATVCGPKKSTNLVKNKCVNFNFNGLTGTGVLTESNKKFLPFQQFGRDIADTTDAVRDPQTLEILDITPCSFGGVSVITPGTNTSNQVAVLYQGVNCTEVPVAIHADQLTPTWRVYSTGSNVFQTRAGCLIGAEHVNNSYECDIPIGAGICASYQTQTNSPRRARSVASQSIIAYTMSLGAENSVAYSNNSIAIPTNFTISVTTEILPVSMTKTSVDCTMYICGDSTECSNLLLQYGSFCTQLNRALTGIAVEQDKNTQEVFAQVKQIYKTPPIKDFGGFNFSQILPDPSKPSKRSFIEDLLFNKVTLADAGFIKQYGDCLGDIAARDLICAQKFNGLTVLPPLLTDEMIAQYTSALLAGTITSGWTFGAGAALQIPFAMQMAYRFNGCGVTQNVLYENQKLIANQFNSAIGKIQDSLSSTATALGKLQDVVNQNAQALNTLVKQLSSNFGAISSVLNDILSRLDKVEAEVQIDRLITGRLQSLQTYVTQQLIRAAEIRASANLAATKMSECVLGQSKRVDFCGKGCHLMSFPQSAPHGVVFLHVTYVPAQEKNFTTAPAICHDGKAHFPREGVFVSNGTHWFVTQRNFYEPQIITTDNTFVSGNCDVVIGIVNNTVYDPLQPELDSFKEELDKYFKNHTSPDVDLGDISGINASVVNIQKEIDRLNEVAKNLNESLIDLQELGKYEQYIKGGGGSDIDPYKEFGSSYQLLNFLPLDFFPDLNALVDTATALYEEELTGREHCSPHHTAIRQALVCWDELTKLIAWMSSNITSEQVRTIIVNHVNDTWGLKVRQSLWFHLSCLTFGQHTVQEFLVSFGVWIRTPAPYRPPNAPILSTLPEHTVIC

SEQ ID NO: 7268 - protein, 1365 aa, Artificial Sequence
  SARS-CoV-2/Belgium/BC-03016/2020__EPI_ISL_415157 spike protein (1-1211)(I909C_Y1047C) WhcAg construct
MFVFLVLLPLVSSQCVNLTTRTQLPPAYTNSFTRGVYYPDKVFRSSVLHSTQDLFLPFFSNVTWFHAIHVSGTNGTKRFDNPVLPFNDGVYFASTEKSNIIRGWIFGTTLDSKTQSLLIVNNATNVVIKVCEFQFCNDPFLGVYYHKNNKSWMESEFRVYSSANNCTFEYVSQPFLMDLEGKQGNFKNLREFVFKNIDGYFKIYSKHTPINLVRDLPQGFSALEPLVDLPIGINITRFQTLLALHRSYLTPGDSSSGWTAGAAAYYVGYLQPRTFLLKYNENGTITDAVDCALDPLSETKCTLKSFTVEKGIYQTSNFRVQPTESIVRFPNITNLCPFGEVFNATRFASVYAWNRKRISNCVADYSVLYNSASFSTFKCYGVSPTKLNDLCFTNVYADSFVIRGDEVRQIAPGQTGKIADYNYKLPDDFTGCVIAWNSNNLDSKVGGNYNYLYRLFRKSNLKPFERDISTEIYQAGSTPCNGVEGFNCYFPLQSYGFQPTNGVGYQPYRVVVLSFELLHAPATVCGPKKSTNLVKNKCVNFNFNGLTGTGVLTESNKKFLPFQQFGRDIADTTDAVRDPQTLEILDITPCSFGGVSVITPGTNTSNQVAVLYQGVNCTEVPVAIHADQLTPTWRVYSTGSNVFQTRAGCLIGAEHVNNSYECDIPIGAGICASYQTQTNSPRRARSVASQSIIAYTMSLGAENSVAYSNNSIAIPTNFTISVTTEILPVSMTKTSVDCTMYICGDSTECSNLLLQYGSFCTQLNRALTGIAVEQDKNTQEVFAQVKQIYKTPPIKDFGGFNFSQILPDPSKPSKRSFIEDLLFNKVTLADAGFIKQYGDCLGDIAARDLICAQKFNGLTVLPPLLTDEMIAQYTSALLAGTITSGWTFGAGAALQIPFAMQMAYRFNGCGVTQNVLYENQKLIANQFNSAIGKIQDSLSSTAPALGKLQDVVNQNAQALNTLVKQLSSNFGAISSVLNDILSRLDKVEAEVQIDRLITGRLQSLQTYVTQQLIRAAEIRASANLAATKMSECVLGQSKRVDFCGKGCHLMSFPQSAPHGVVFLHVTYVPAQEKNFTTAPAICHDGKAHFPREGVFVSNGTHWFVTQRNFYEPQIITTDNTFVSGNCDVVIGIVNNTVYDPLQPELDSFKEELDKYFKNHTSPDVDLGDISGINASVVNIQKEIDRLNEVAKNLNESLIDLQELGKYEQYIKGGGGSDIDPYKEFGSSYQLLNFLPLDFFPDLNALVDTATALYEEELTGREHCSPHHTAIRQALVCWDELTKLIAWMSSNITSEQVRTIIVNHVNDTWGLKVRQSLWFHLSCLTFGQHTVQEFLVSFGVWIRTPAPYRPPNAPILSTLPEHTVIC

SEQ ID NO: 7269 - protein, 1365 aa, Artificial Sequence
  SARS-CoV-2/Germany/BavPat3/2020__EPI_ISL_414521 spike protein (1-1211)(I909C_Y1047C) WhcAg construct
MFVFLVLLPLVSSQCVNLTTRTQLPPAYTNSFTRGVYYPDKVFRSSVLHSTQDLFLPFFSNVTWFHAIHVSGTNGTKRFDNPVLPFNDGVYFASTEKSNIIRGWIFGTTLDSKTQSLLIVNNATNVVIKVCEFQFCNDPFLGVYYHKNNKSWMESEFRVYSSANNCTFEYVSQPFLMDLEGKQGNFKNLREFVFKNIDGYFKIYSKHTPINLVRDLPQGFSALEPLVDLPIGINITRFQTLLALHRSYLTPGDSSSGWTAGAAAYYVGYLQPRTFLLKYNENGTITDAVDCALDPLSETKCTLKSFTVEKGIYQTSNFRVQPTESIVRFPNITNLCPFGEVFNATRFASVYAWNRKRISNCVADYSVLYNSASFSTFKCYGVSPTKLNDLCFTNVYADSFVIRGDEVRQIAPGQTGKIADYNYKLPDDFTGCVIAWNSNNLDSKVGGNYNYLYRLFRKSNLKPFERDISTEIYQAGSTPCNGVEGFNCYFPLQSYGFQPTNGVGYQPYRVVVLSFELLHAPATVCGPKKSTNLVKNKCVNFNFNGLTGTGVLTESNKKFLPFQQFGRDIADTTDAVRDPQTLEILDITPCSFGGVSVITPGTNTSNQVAVLYQDVNCTEVPVAIHADQLTPTWRVYSTGSNVFQTRAGCLIGAEHVNNSYECDIPIGAGICASYQTQTNSPRRARSVASQSIIAYTMSLGAENSVAYSNNSIAIPTNFTISVTTEILPVSMTKTSVDCTMYICGDSTECSNLLLQYGSFCTQLNRALTGIAVEQDKNTQQVFAQVKQIYKTPPIKDFGGFNFSQILPDPSKPSKRSFIEDLLFNKVTLADAGFIKQYGDCLGDIAARDLICAQKFNGLTVLPPLLTDEMIAQYTSALLAGTITSGWTFGAGAALQIPFAMQMAYRFNGCGVTQNVLYENQKLIANQFNSAIGKIQDSLSSTASALGKLQDVVNQNAQALNTLVKQLSSNFGAISSVLNDILSRLDKVEAEVQIDRLITGRLQSLQTYVTQQLIRAAEIRASANLAATKMSECVLGQSKRVDFCGKGCHLMSFPQSAPHGVVFLHVTYVPAQEKNFTTAPAICHDGKAHFPREGVFVSNGTHWFVTQRNFYEPQIITTDNTFVSGNCDVVIGIVNNTVYDPLQPELDSFKEELDKYFKNHTSPDVDLGDISGINASVVNIQKEIDRLNEVAKNLNESLIDLQELGKYEQYIKGGGGSDIDPYKEFGSSYQLLNFLPLDFFPDLNALVDTATALYEEELTGREHCSPHHTAIRQALVCWDELTKLIAWMSSNITSEQVRTIIVNHVNDTWGLKVRQSLWFHLSCLTFGQHTVQEFLVSFGVWIRTPAPYRPPNAPILSTLPEHTVIC

SEQ ID NO: 7270 - protein, 1365 aa, Artificial Sequence
  SARS-CoV-2/France/HF1805/2020__EPI_ISL_414628 spike protein (1-1211)(I909C_Y1047C) WhcAg construct
MFVFLVLLPLVSSQCVNLTTRTQLPPAYTNSFTRGVYYPDKVFRSSVLHSTQDLFLPFFSNVTWFHAIHVSGTNGTKRFDNPVLPFNDGVYFASTEKSNIIRGWIFGTTLDSKTQSLLIVNNATNVVIKVCEFQFCNDPFLGVYYHKNNKSWMESEFRVYSSANNCTFEYVSQPFLMDLEGKQGNFKNLREFVFKNIDGYFKIYSKHTPINLVRDLPQGFSALEPLVDLPIGINITRFQTLLALHRSYLTPGDSSSGWTAGAAAYYVGYLQPRTFLLKYNENGTITDAVDCALDPLSETKCTLKSFTVEKGIYQTSNFRVQPTESIVRFPNITNLCPFGEVFNATRFASVYAWNRKRISNCVADYSVLYNSASFSTFKCYGVSPTKLNDLCFTNVYADSFVIRGDEVRQIAPGQTGKIADYNYKLPDDFTGCVIAWNSNNLDSKVGGNYNYLYRLFRKSNLKPFERDISTEIYQAGSTPCNGVEGFNCYFPLQSYGFQPTNGVGYQPYRVVVLSFELLHAPATVCGPKKSTNLVKNKCVNFNFNGLTGTGVLTESNKKFLPFQQFGRDIADTTDAVRDPQTLEILDITPCSFGGVSVITPGTNTSNQVAVLYQGVNCTEVPVAIHADQLTPTWRVYSTGSNVFQTRAGCLIGAEHVNNSYECDIPIGAGICASYQTQTNSPRRARSVASQSIIAYTMSLGAENSVAYSNNSIAIPTNFTISVTTEILPVSMTKTSVDCTMYICGDSTECSNLLLQYGSFCTQLNRALTGIAVEQDKNTQEVFAQVKQIYKTPPIKDFGGFNFSQILPDPSKPSKRSFIEDLLFNKVTLADAGFIKQYGDCLGDIAARDLICAQKFNGLTVLPPLLTDEMIAQYTSALLAGTITSGWTFGAGAALQIPFAMQMAYRFNGCGVTQNVLYENQKLIANQFNSAIGKIQDSLSSTASALGKLQDVVNQNAQALNTLVKQLSSNFGAISSVLNDILSRLDKVEAEVQIDRLITGRLQSLQTYVTQQLIRAAEIRASANLAATKMSECVLGQSKRVDFCGKGCHLMSFPQSAPHGVVFLHVTYVPAQEKNFTTAPAICHDGKAHFPREGVFVSNGTHWFVTQRNFYEPQIITTDNTFVSGNCDVVIGVVNNTVYDPLQPELDSFKEELDKYFKNHTSPDVDLGDISGINASVVNIQKEIDRLNEVAKNLNESLIDLQELGKYEQYIKGGGGSDIDPYKEFGSSYQLLNFLPLDFFPDLNALVDTATALYEEELTGREHCSPHHTAIRQALVCWDELTKLIAWMSSNITSEQVRTIIVNHVNDTWGLKVRQSLWFHLSCLTFGQHTVQEFLVSFGVWIRTPAPYRPPNAPILSTLPEHTVIC

SEQ ID NO: 7271 - protein, 1365 aa, Artificial Sequence
  SARS-CoV-2/Netherlands/ZuidHolland_9/2020__EPI_ISL_414445 spike protein (1-1211)(I909C_Y1047C) WhcAg construct
MFVFLVLLPLVSSQCVNLTTRTQLPPAYTNSFTRGVYYPDKVFRSSVLHSTQDLFLPFFSNVTWFHAIHVSGTNGTKRFDNPVLPFNDGVYFASTEKSNIIRGWIFGTTLDSKTQSLLIVNNATNVVIKVCEFQFCNDPFLGVYYHKNNKSWMESEFRVYSSANNCTFEYVSQPFLMDLEGKQGNFKNLREFVFKNIDGYFKIYSKHTPINLVRDLPQGFSALEPLVDLPIGINITRFQTLLALHRSYLTPGDSSSGWTAGAAAYYVGYLQPRTFLLKYNENGTITDAVDCALDPLSETKCTLKSFTVEKGIYQTSNFRVQPTESIVRFPNITNLCPFGEVFNATRFASVYAWNRKRISNCVADYSVLYNSASFSTFKCYGVSPTKLNDLCFTNVYADSFVIRGDEVRQIAPGQTGKIADYNYKLPDDFTGCVIAWNSNNLDSKVGGNYNYLYRLFRKSNLKPFERDISTEIYQAGSTPCNGVEGFNCYFPLQSYGFQPTNGVGYQPYRVVVLSFELLHAPATVCGPKKSTNLVKNKCVNFNFNGLTGTGVLTESNKKFLPFQQFGRDIADTTDAVRDPQTLEILDITPCSFGGVSVITPGTNTSNQVAVLYQGVNCTEVPVAIHADQLTPTWRVYSTGSNVFQTRAGCLIGAEHVNNSYECDIPIGAGICASYQTQTNSPRRARSVASQSIIAYTMSLGAENSVAYSNNSIAIPTNFTISVTTEILPVSMTKTSVDCTMYICGDSTECSNLLLQYGSFCTQLNRALTGIAVEQDKNTQEVFAQVKQIYKTPPIKDFGGFNFSQILPDPSKPSKRSFIEDLLFNKVTLADAGFIKQYGDCLGDIAARDLICVQKFNGLTVLPPLLTDEMIAQYTSALLAGTITSGWTFGAGAALQIPFAMQMAYRFNGCGVTQNVLYENQKLIANQFNSAIGKIQDSLSSTASALGKLQDVVNQNAQALNTLVKQLSSNFGAISSVLNDILSRLDKVEAEVQIDRLITGRLQSLQTYVTQQLIRAAEIRASANLAATKMSECVLGQSKRVDFCGKGCHLMSFPQSAPHGVVFLHVTYVPAQEKNFTTAPAICHDGKAHFPREGVFVSNGTHWFVTQRNFYEPQIITTDNTFVSGNCDVVIGIVNNTVYDPLQPELDSFKEELDKYFKNHTSPDVDLGDISGINASVVNIQKEIDRLNEVAKNLNESLIDLQELGKYEQYIKGGGGSDIDPYKEFGSSYQLLNFLPLDFFPDLNALVDTATALYEEELTGREHCSPHHTAIRQALVCWDELTKLIAWMSSNITSEQVRTIIVNHVNDTWGLKVRQSLWFHLSCLTFGQHTVQEFLVSFGVWIRTPAPYRPPNAPILSTLPEHTVIC

SEQ ID NO: 7272 - protein, 1365 aa, Artificial Sequence
  SARS-CoV-2/Finland/FIN03032020A/2020__EPI_ISL_413602 spike protein (1-1211)(I909C_Y1047C) WhcAg construct
MFVFLVLLPLVSSQCVNLTTRTQLPPAYTNSFTRGVYYPDKVFRSSVLHSTQDLFLPFFSNVTWFHAIHVSGTNGTKRFDNPVLPFNDGVYFASTEKSNIIRGWIFGTTLDSKTQSLLIVNNATNVVIKVCEFQFCNDPFLGVYYHKNNKSWMESEFRVYSSANNCTFEYVSQPFLMDLEGKQGNFKNLREFVFKNIDGYFKIYSKHTPINLVRDLPQGFSALEPLVDLPIGINITRFQTLLALHRSYLTPGDSSSGWTAGAAAYYVGYLQPRTFLLKYNENGTITDAVDCALDPLSETKCTLKSFTVEKGIYQTSNFRVQPTESIVRFPNITNLCPFGEVFNATRFASVYAWNRKRISNCVADYSVLYNSASFSTFKCYGVSPTKLNDLCFTNVYADSFVIRGDEVRQIAPGQTGKIADYNYKLPDDFTGCVISWNSNNLDSKVGGNYNYLYRLFRKSNLKPFERDISTEIYQAGSTPCNGVEGFNCYFPLQSYGFQPTNGVGYQPYRVVVLSFELLHAPATVCGPKKSTNLVKNKCVNFNFNGLTGTGVLTESNKKFLPFQQFGRDIADTTDAVRDPQTLEILDITPCSFGGVSVITPGTNTSNQVAVLYQGVNCTEVPVAIHADQLTPTWRVYSTGSNVFQTRAGCLIGAEHVNNSYECDIPIGAGICASYQTQTNSPRRARSVASQSIIAYTMSLGAENSVAYSNNSIAIPTNFTISVTTEILPVSMTKTSVDCTMYICGDSTECSNLLLQYGSFCTQLNRALTGIAVEQDKNTQEVFAQVKQIYKTPPIKDFGGFNFSQILPDPSKPSKRSFIEDLLFNKVTLADAGFIKQYGDCLGDIAARDLICAQKFNGLTVLPPLLTDEMIAQYTSALLAGTITSGWTFGAGAALQIPFAMQMAYRFNGCGVTQNVLYENQKLIANQFNSAIGKIQDSLSSTASALGKLQDVVNQNAQALNTLVKQLSSNFGAISSVLNDILSRLDKVEAEVQIDRLITGRLQSLQTYVTQQLIRAAEIRASANLAATKMSECVLGQSKRVDFCGKGCHLMSFPQSAPHGVVFLHVTYVPAQEKNFTTAPAICHDGKAHFPREGVFVSNGTHWFVTQRNFYEPQIITTDNTFVSGNCDVVIGIVNNTVYDPLQPELDSFKEELDKYFKNHTSPDVDLGDISGINASVVNIQKEIDRLNEVAKNLNESLIDLQELGKYEQYIKGGGGSDIDPYKEFGSSYQLLNFLPLDFFPDLNALVDTATALYEEELTGREHCSPHHTAIRQALVCWDELTKLIAWMSSNITSEQVRTIIVNHVNDTWGLKVRQSLWFHLSCLTFGQHTVQEFLVSFGVWIRTPAPYRPPNAPILSTLPEHTVIC

SEQ ID NO: 7273 - protein, 1365 aa, Artificial Sequence
  SARS-CoV-2/France/GE1977/2020__EPI_ISL_414632 spike protein (1-1211)(I909C_Y1047C) WhcAg construct
MFVFLVLLPLVSSQCVNLTTRTQLPPAYTNSFTRGVYYPDKVFRSSVLHSTQDLFLPFFSNVTWFHAIHVSGTNGTKRFDNPVLPFNDGVYFASTEKSNIIRGWIFGTTLDSKTQSLLIVNNATNVVIKVCEFQFCNDPFLGVYYHKNNKSWMESEFRVYSSANNCTFEYVSQPFLMDLEGKQGNFKNLREFVFKNIDGYFKIYSKHTPINLVRDLPQGFSALEPLVDLPIGINITRFQTLLALHRSYLTPGDSSSGWTAGAAAYYVGYLQPRTFLLKYNENGTITDAVDCALDPLSETKCTLKSFTVEKGIYQTSNFRVQPTESIVRFPNITNLCPFGEVFNATRFASVYAWNRKRISNCVADYSVLYNSASFSTFKCYGVSPTKLNDLCFTNVYADSFVIRGDEVRQIAPGQTGKIADYNYKLPDDFTGCVIAWNSNNLDSKVGGNYNYLYRLFRKSNLKPFERDISTEIYQAGSTPCNGVEGFNCYFPLQSYGFQPTNGVGYQPYRVVVLSFELLHAPATVCGPKKSTNLVKNKCVNFNFNGLTGTGVLTESNKKFLPFQQFGRDIADTTDAVRDPQTLEILDITPCSFGGVSVITPGTNTSNQVAVLYQGVNCTEVPVAIHADQLTPTWRVYSTGSNVFQTRAGCLIGAEHVNNSYECDIPIGAGICASYQTQTNSPRRARSVASQSIIAYTMSLGAENSVAYSNNSIAIPTNFTISVTTEILPVSMTKTSVDCTMYICGDSTECSNLLLQYGSFCTQLNRALTGIAVEQDKNTQEVFAQVKQIYKTPPIKDFGGFNFSQILPDPSKPSKRSFIEDLLFNKVTLADAGFIKQYGDCLGDIAARDLICAQKFNGLTVLPPLLTDEMIAQYTSALLAGTITSGWTFGAGAALQIPFAMQMAYRFNGCGVTQNVLYENQKLIANQFNSAIGKIQDSLFSTASALGKLQDVVNQNAQALNTLVKQLSSNFGAISSVLNDILSRLDKVEAEVQIDRLITGRLQSLQTYVTQQLIRAAEIRASANLAATKMSECVLGQSKRVDFCGKGCHLMSFPQSAPHGVVFLHVTYVPAQEKNFTTAPAICHDGKAHFPREGVFVSNGTHWFVTQRNFYEPQIITTDNTFVSGNCDVVIGIVNNTVYDPLQPELDSFKEELDKYFKNHTSPDVDLGDISGINASVVNIQKEIDRLNEVAKNLNESLIDLQELGKYEQYIKGGGGSDIDPYKEFGSSYQLLNFLPLDFFPDLNALVDTATALYEEELTGREHCSPHHTAIRQALVCWDELTKLIAWMSSNITSEQVRTIIVNHVNDTWGLKVRQSLWFHLSCLTFGQHTVQEFLVSFGVWIRTPAPYRPPNAPILSTLPEHTVIC

SEQ ID NO: 7274 - protein, 1365 aa, Artificial Sequence
  SARS-CoV-2/Finland/FIN-313/2020__EPI_ISL_414641 spike protein (1-1211)(I909C_Y1047C) WhcAg construct
MFVFLVLLPLVSSQCVNLTTRTQLPPAYTNSFTRGVYYPDKVFRSSVLHSTQDLFLPFFSNVTWFHAIHVSGTNGTKRFDNPVLPFNDGVYFASTEKSNIIRGWIFGTTLDSKTQSLLIVNNATNVVIKVCEFQFCNDPFLGVYYHKNNKSWMESEFRVYSSANNCTFEYVSQPFLMDLEGKQGNFKNLREFVFKNIDGYFKIYSKHTPINLVRDLPQGFSALEPLVDLPIGINITRFKTLLALHRSYLTPGDSSSGWTAGAAAYYVGYLQPRTFLLKYNENGTITDAVDCALDPLSETKCTLKSFTVEKGIYQTSNFRVQPTESIVRFPNITNLCPFGEVFNATRFASVYAWNRKRISNCVADYSVLYNSASFSTFKCYGVSPTKLNDLCFTNVYADSFVIRGDEVRQIAPGQTGKIADYNYKLPDDFTGCVIAWNSNNLDSKVGGNYNYLYRLFRKSNLKPFERDISTEIYQAGSTPCNGVEGFNCYFPLQSYGFQPTNGVGYQPYRVVVLSFELLHAPATVCGPKKSTNLVKNKCVNFNFNGLTGTGVLTESNKKFLPFQQFGRDIADTTDAVRDPQTLEILDITPCSFGGVSVITPGTNTSNQVAVLYQGVNCTEVPVAIHADQLTPTWRVYSTGSNVFQTRAGCLIGAEHVNNSYECDIPIGAGICASYQTQTNSPRRARSVASQSIIAYTMSLGAENSVAYSNNSIAIPTNFTISVTTEILPVSMTKTSVDCTMYICGDSTECSNLLLQYGSFCTQLNRALTGIAVEQDKNTQEVFAQVKQIYKTPPIKDFGGFNFSQILPDPSKPSKRSFIEDLLFNKVTLADAGFIKQYGDCLGDIAARDLICAQKFNGLTVLPPLLTDEMIAQYTSALLAGTITSGWTFGAGAALQIPFAMQMAYRFNGCGVTQNVLYENQKLIANQFNSAIGKIQDSLSSTASALGKLQDVVNQNAQALNTLVKQLSSNFGAISSVLNDILSRLDKVEAEVQIDRLITGRLQSLQTYVTQQLIRAAEIRASANLAATKMSECVLGQSKRVDFCGKGCHLMSFPQSAPHGVVFLHVTYVPAQEKNFTTAPAICHDGKAHFPREGVFVSNGTHWFVTQRNFYEPQIITTDNTFVSGNCDVVIGIVNNTVYDPLQPELDSFKEELDKYFKNHTSPDVDLGDISGINASVVNIQKEIDRLNEVAKNLNESLIDLQELGKYEQYIKGGGGSDIDPYKEFGSSYQLLNFLPLDFFPDLNALVDTATALYEEELTGREHCSPHHTAIRQALVCWDELTKLIAWMSSNITSEQVRTIIVNHVNDTWGLKVRQSLWFHLSCLTFGQHTVQEFLVSFGVWIRTPAPYRPPNAPILSTLPEHTVIC

SEQ ID NO: 7275 - protein, 1365 aa, Artificial Sequence
  SARS-CoV-2/Netherlands/ZuidHolland_2/2020__EPI_ISL_414556 spike protein (1-1211)(I909C_Y1047C) WhcAg construct
MFVFLVLLPLVSSQCVNLTTRTQLPPAYTNSFTRGVYYPDKVFRSSVLHSTQDLFLPFFSNVTWFHAIHVSGTNGTKRFDNPVLPFNDGVYFASTEKSNIIRGWIFGTTLDSKTQSLLIVNNATNVVIKVCEFQFCNDPFLGVYYHKNNKSWMESEFRVYSSANNCTFEYVSQPFLMDLEGKQGNFKNLREFVFKNIDGYFKIYSKHTPINLVRDLPQGFSALEPLVDLPIGINITRFQTLLALHRSYLTPGDSSSGWTAGAAAYYVGYLQPRTFLLKYNENGTITDAVDCALDPLSETKCTLKSFTVEKGIYQTSNFRVQPTESIVRFPNITNLCPFGEVFNATRFASVYAWNRKRISNCVADYSVLYNSASFSTFKCYGVSPTKLNDLCFTNVYADSFVIRGDEVRQIAPGQTGKIADYNYKLPDDFTGCVIAWNSNNLDSKVGGNYNYLYRLFRKSNLKPFERDISTEIYQAGSTPCNGVEGFNCYFPLQSYGFQPTNGVGYQPYRVVVLSFELLHAPATVCGPKKSTNLVKNKCVNFNFNGLTGTGVLTESNKKFLPFQQFGRDIADTTDAVRDPQTLEILDITPCSFGGVSVITPGTNTSNQVAVLYQGVNCTEVPVAIHADQLTPTWRVYSTGSNVFQTRAGCLIGAEHVNNSYECDIPIGAGICASYQTQTNSPRRARSVASQSIIAYTMSLGAENSVAYSNNSIAIPTNFTISVTTEILPVSMTKTSVDCTMYICGDSTECSNLLLQYGSFCTQLNRALTGIALEQDKNTQEVFAQVKQIYKTPPIKDFGGFNFSQILPDPSKPSKRSFIEDLLFNKVTLADAGFIKQYGDCLGDIAARDLICAQKFNGLTVLPPLLTDEMIAQYTSALLAGTITSGWTFGAGAALQIPFAMQMAYRFNGCGVTQNVLYENQKLIANQFNSAIGKIQDSLSSTASALGKLQDVVNQNAQALNTLVKQLSSNFGAISSVLNDILSRLDKVEAEVQIDRLITGRLQSLQTYVTQQLIRAAEIRASANLAATKMSECVLGQSKRVDFCGKGCHLMSFPQSAPHGVVFLHVTYVPAQEKNFTTAPAICHDGKAHFPREGVFVSNGTHWFVTQRNFYEPQIITTDNTFVSGNCDVVIGIVNNTVYDPLQPELDSFKEELDKYFKNHTSPDVDLGDISGINASVVNIQKEIDRLNEVAKNLNESLIDLQELGKYEQYIKGGGGSDIDPYKEFGSSYQLLNFLPLDFFPDLNALVDTATALYEEELTGREHCSPHHTAIRQALVCWDELTKLIAWMSSNITSEQVRTIIVNHVNDTWGLKVRQSLWFHLSCLTFGQHTVQEFLVSFGVWIRTPAPYRPPNAPILSTLPEHTVIC

SEQ ID NO: 7276 - protein, 1365 aa, Artificial Sequence
  SARS-CoV-2/USA/WA-UW31/2020__EPI_ISL_414618 spike protein (1-1211)(I909C_Y1047C) WhcAg construct
MFVFLVLLPLVSSQCVNLTTRTQLPPAYTNSFTRGVYYPDKVFRSSVLHSTQDLFLPFFSNVTWFHAIHVSGTNGTKRFDNPVLPFNDGVYFASTEKSNIIRGWIFGTTLDSKTQSLLIVNNATNVVIKVCEFQFCNDPFLGVYYHKNNKSWMESEFRVYSSANNCTFEYVSQPFLMDLEGKQGNFKNLREFVFKNIDGYFKIYSKHTPINLVRDLPQGFSALEPLVDLPIGINITRFQTLLALHRSYLTPGDSSSGWTAGAAAYYVGYLQPRTFLLKYNENGTITDAVDCALDPLSETKCTLKSFTVEKGIYQTSNFRVQPTESIVRFPNITNLCPFGEVFNATRFASVYAWNRKRISNCVADYSVLYNSASFSTFKCYGVSPTKLNDLCFTNVYADSFVIRGDEVRQIAPGQTGKIADYNYKLPDDFTGCVIAWNSNNLDSKVGGNYNYLYRLFRKSNLKPFERDISTEIYQAGSTPCNGAEGFNCYFPLQSYGFQPTNGVGYQPYRVVVLSFELLHAPATVCGPKKSTNLVKNKCVNFNFNGLTGTGVLTESNKKFLPFQQFGRDIADTTDAVRDPQTLEILDITPCSFGGVSVITPGTNTSNQVAVLYQDVNCTEVPVAIHADQLTPTWRVYSTGSNVFQTRAGCLIGAEHVNNSYECDIPIGAGICASYQTQTNSPRRARSVASQSIIAYTMSLGAENSVAYSNNSIAIPTNFTISVTTEILPVSMTKTSVDCTMYICGDSTECSNLLLQYGSFCTQLNRALTGIAVEQDKNTQEVFAQVKQIYKTPPIKDFGGFNFSQILPDPSKPSKRSFIEDLLFNKVTLADAGFIKQYGDCLGDIAARDLICAQKFNGLTVLPPLLTDEMIAQYTSALLAGTITSGWTFGAGAALQIPFAMQMAYRFNGCGVTQNVLYENQKLIANQFNSAIGKIQDSLSSTASALGKLQDVVNQNAQALNTLVKQLSSNFGAISSVLNDILSRLDKVEAEVQIDRLITGRLQSLQTYVTQQLIRAAEIRASANLAATKMSECVLGQSKRVDFCGKGCHLMSFPQSAPHGVVFLHVTYVPAQEKNFTTAPAICHDGKAHFPREGVFVSNGTHWFVTQRNFYEPQIITTDNTFVSGNCDVVIGIVNNTVYDPLQPELDSFKEELDKYFKNHTSPDVDLGDISGINASVVNIQKEIDRLNEVAKNLNESLIDLQELGKYEQYIKGGGGSDIDPYKEFGSSYQLLNFLPLDFFPDLNALVDTATALYEEELTGREHCSPHHTAIRQALVCWDELTKLIAWMSSNITSEQVRTIIVNHVNDTWGLKVRQSLWFHLSCLTFGQHTVQEFLVSFGVWIRTPAPYRPPNAPILSTLPEHTVIC

SEQ ID NO: 7277 - protein, 1365 aa, Artificial Sequence
  SARS-CoV-2/South Korea/SNU01/2020__EPI_ISL_411929 spike protein (1-1211)(I909C_Y1047C) WhcAg construct
MFVFLVLLPLVSSQCVNLTTRTQLPPAYTNSFTRGVYYPDKVFRSSVLHSTQDLFLPFFSNVTWFHAIHVSGTNGTKRFDNPVLPFNDGVYFASTEKSNIIRGWIFGTTLDSKTQSLLIVNNATNVVIKVCEFQFCNDPFLGVYYHKNNKSWMESEFRVYSSANNCTFEYVSQPFLMDLEGKQGNFKNLREFVFKNIDGYFKIYSKHTPINLVRDLPQGFWALEPLVDLPIGINITRFQTLLALHRSYLTPGDSSSGWTAGAAAYYVGYLQPRTFLLKYNENGTITDAVDCALDPLSETKCTLKSFTVEKGIYQTSNFRVQPTESIVRFPNITNLCPFGEVFNATRFASVYAWNRKRISNCVADYSVLYNSASFSTFKCYGVSPTKLNDLCFTNVYADSFVIRGDEVRQIAPGQTGKIADYNYKLPDDFTGCVIAWNSNNLDSKVGGNYNYLYRLFRKSNLKPFERDISTEIYQAGSTPCNGVEGFNCYFPLQSYGFQPTNGVGYQPYRVVVLSFELLHAPATVCGPKKSTNLVKNKCVNFNFNGLTGTGVLTESNKKFLPFQQFGRDIADTTDAVRDPQTLEILDITPCSFGGVSVITPGTNTSNQVAVLYQDVNCTEVPVAIHADQLTPTWRVYSTGSNVFQTRAGCLIGAEHVNNSYECDIPIGAGICASYQTQTNSPRRARSVASQSIIAYTMSLGAENSVAYSNNSIAIPTNFTISVTTEILPVSMTKTSVDCTMYICGDSTECSNLLLQYGSFCTQLNRALTGIAVEQDKNTQEVFAQVKQIYKTPPIKDFGGFNFSQILPDPSKPSKRSFIEDLLFNKVTLADAGFIKQYGDCLGDIAARDLICAQKFNGLTVLPPLLTDEMIAQYTSALLAGTITSGWTFGAGAALQIPFAMQMAYRFNGCGVTQNVLYENQKLIANQFNSAIGKIQDSLSSTASALGKLQDVVNQNAQALNTLVKQLSSNFGAISSVLNDILSRLDKVEAEVQIDRLITGRLQSLQTYVTQQLIRAAEIRASANLAATKMSECVLGQSKRVDFCGKGCHLMSFPQSAPHGVVFLHVTYVPAQEKNFTTAPAICHDGKAHFPREGVFVSNGTHWFVTQRNFYEPQIITTDNTFVSGNCDVVIGIVNNTVYDPLQPELDSFKEELDKYFKNHTSPDVDLGDISGINASVVNIQKEIDRLNEVAKNLNESLIDLQELGKYEQYIKGGGGSDIDPYKEFGSSYQLLNFLPLDFFPDLNALVDTATALYEEELTGREHCSPHHTAIRQALVCWDELTKLIAWMSSNITSEQVRTIIVNHVNDTWGLKVRQSLWFHLSCLTFGQHTVQEFLVSFGVWIRTPAPYRPPNAPILSTLPEHTVIC

SEQ ID NO: 7278 - protein, 1365 aa, Artificial Sequence
  SARS-CoV-2/China/WF0004/2020__EPI_ISL_413694 spike protein (1-1211)(I909C_Y1047C) WhcAg construct
MFVFLVLLPLVSSQCVNLTTRTQLPPAYTNSFTRGVYYPDKVFRSSVLHSTQDLFLPFFSNVTWFHAIHVSGTNGTKRFDNPVLPFNDGVYFASTEKSNIIRGWIFGTTLDSKTQSLLIVNNATNVVIKVCEFQFCNDPFLGVYYHKNNKSWTESEFRVYSSANNCTFEYVSQPFLMDLEGKQGNFKNLREFVFKNIDGYFKIYSKHTPINLVRDLPQGFSALEPLVDLPIGINITRFQTLLALHRSYLTPGDSSSGWTAGAAAYYVGYLQPRTFLLKYNENGTITDAVDCALDPLSETKCTLKSFTVEKGIYQTSNFRVQPTESIVRFPNITNLCPFGEVFNATRFASVYAWNRKRISNCVADYSVLYNSASFSTFKCYGVSPTKLNDLCFTNVYADSFVIRGDEVRQIAPGQTGKIADYNYKLPDDFTGCVIAWNSNNLDSKVGGNYNYLYRLFRKSNLKPFERDISTEIYQAGSTPCNGVEGFNCYFPLQSYGFQPTNGVGYQPYRVVVLSFELLHAPATVCGPKKSTNLVKNKCVNFNFNGLTGTGVLTESNKKFLPFQQFGRDIADTTDAVRDPQTLEILDITPCSFGGVSVITPGTNTSNQVAVLYQDVNCTEVPVAIHADQLTPTWRVYSTGSNVFQTRAGCLIGAEHVNNSYECDIPIGAGICASYQTQTNSPRRARSVASQSIIAYTMSLGAENSVAYSNNSIAIPTNFTISVTTEILPVSMTKTSVDCTMYICGDSTECSNLLLQYGSFCTQLNRALTGIAVEQDKNTQEVFAQVKQIYKTPPIKDFGGFNFSQILPDPSKPSKRSFIEDLLFNKVTLADAGFIKQYGDCLGDIAARDLICAQKFNGLTVLPPLLTDEMIAQYTSALLAGTITSGWTFGAGAALQIPFAMQMAYRFNGCGVTQNVLYENQKLIANQFNSAIGKIQDSLSSTASALGKLQDVVNQNAQALNTLVKQLSSNFGAISSVLNDILSRLDKVEAEVQIDRLITGRLQSLQTYVTQQLIRAAEIRASANLAATKMSECVLGQSKRFDFCGKGCHLMSFPQSAPHGVVFLHVTYVPAQEKNFTTAPAICHDGKAHFPREGVFVSNGTHWFVTQRNFYEPQIITTDNTFVSGNCDVVIGIVNNTVYDPLQPELDSFKEELDKYFKNHTSPDVDLGDISGINASVVNIQKEIDRLNEVAKNLNESLIDLQELGKYEQYIKGGGGSDIDPYKEFGSSYQLLNFLPLDFFPDLNALVDTATALYEEELTGREHCSPHHTAIRQALVCWDELTKLIAWMSSNITSEQVRTIIVNHVNDTWGLKVRQSLWFHLSCLTFGQHTVQEFLVSFGVWIRTPAPYRPPNAPILSTLPEHTVIC

SEQ ID NO: 7279 - protein, 1365 aa, Artificial Sequence
  SARS-CoV-2/China/WF0028/2020__EPI_ISL_413791 spike protein (1-1211)(I909C_Y1047C) WhcAg construct
MFVFLVLLPLVSSQCVNLTTRTQLPPAYTNSFTRGVYYPDKVFRSSVLHSTQDLFLPFFSNVTWFHAIHVSGTNGTKRFDNPVLPFNDGVYFASTEKSNIIRGWIFGTTLDSKTQSLLIVNNATNVVIKVCEFQFCNDPFLGVYYHKNNKSWMESEFRVYSSANNCTFEYVSQPFLMDLEGKQGNFKNLREFVFKNIDGYFKIYSKHTPINLVRDLPQGFSALEPLVDLPIGINITRFQTLLALHRSYLTPGDSSSGWTAGAAAYYVGYLQPRTFLLKYNENGTITDAVDCALDPLSETKCTLKSFTVEKGIYQTSNFRVQPTESIVRFPNITNLCPFGEVFNATRFASVYAWNRKRISNCVADYSVLYNSASFSTFKCYGVSPTKLNDLCFTNVYADSFVIRGDEVRQIAPGQTGKIADYNYKLPDDFTGCVIAWNSNNLDSKVGGNYNYLYRLFRKSNLKPFERDISTEIYQAGSTPCNGVEGFNCYFPLQSYGFQPTNGVGYQPYRVVVLSFELLHAPATVCGPKKSTNLVKNKCVNFNFNGLTGTGVLTESNKKFLPFQQFGRDIADTTDAVRDPQTLEILDITPCSFGGVSVITPGTNTSNQVAVLYQDVNCTEVPVAIHADQLTPTWRVYSTGSNVFQTRAGCLIGAEHVNNSYECDIPIGAGICASYQTQTNSPRRARSVASQSIIAYTMSLGAENSVAYSNNSIAIPTNFTISVTTEILPVSMTKTSVDCTMYICGDSTECSNLLLQYGSFCTQLNRALTGIAVEQDKNTQEVFAQVKQIYKTPPIKDFGGFNFSQILPDPSKPSKRSFIEDLLFNKVTLADAGFIKQYGDCLGDIAARDLICAQKFNGLTVLPPLLTDEMIAQYTSALLAGTITSGWTFGAGAALQIPFAMQMAYRFNGCGVTQNVLYENQKLIANQFNSAIGKIQDSLSSTASALGKLQDVVNQNAQALNTLVKQLSSNFGAISSVLNDILSRLDKVEAEVQIDRLITGRLQSLQTYVTQQLIRAAEIRASANLAATKMSECVLGQSKRVDFCGKGCHLMSFPQSAPHGVVFLHVTYVPAQEKNFTTAPAICHDGKAHFPREGVFVSNGTHWFVTQRNFYEPQIITTDNTFVSGNCDVVIGIVNNTVYDPLQPELESFKEELDKYFKNHTSPDVDLGDISGINASVVNIQKEIDRLNEVAKNLNESLIDLQELGKYEQYIKGGGGSDIDPYKEFGSSYQLLNFLPLDFFPDLNALVDTATALYEEELTGREHCSPHHTAIRQALVCWDELTKLIAWMSSNITSEQVRTIIVNHVNDTWGLKVRQSLWFHLSCLTFGQHTVQEFLVSFGVWIRTPAPYRPPNAPILSTLPEHTVIC

SEQ ID NO: 7280 - protein, 1365 aa, Artificial Sequence
  SARS-CoV-2/2019-nCoV/USA-CruiseA-18/2020__MT159716.1 spike protein (1-1211)(I909C_Y1047C) WhcAg construct
MFVFLVLLPLVSSQCVNLTTRTQLPPAYTNSFTRGVYYPDKVFRSSVLHSTQDLFLPFFSNVTWFHAIHVSGTNGTKRFDNPVLPFNDGVYFASTEKSNIIRGWIFGTTLDSKTQSLLIVNNATNVVIKVCEFQFCNDPFLGVYYHKNNKSWMESELRVYSSANNCTFEYVSQPFLMDLEGKQGNFKNLREFVFKNIDGYFKIYSKHTPINLVRDLPQGFSALEPLVDLPIGINITRFQTLLALHRSYLTPGDSSSGWTAGAAAYYVGYLQPRTFLLKYNENGTITDAVDCALDPLSETKCTLKSFTVEKGIYQTSNFRVQPTESIVRFPNITNLCPFGEVFNATRFASVYAWNRKRISNCVADYSVLYNSASFSTFKCYGVSPTKLNDLCFTNVYADSFVIRGDEVRQIAPGQTGKIADYNYKLPDDFTGCVIAWNSNNLDSKVGGNYNYLYRLFRKSNLKPFERDISTEIYQAGSTPCNGVEGFNCYFPLQSYGFQPTNGVGYQPYRVVVLSFELLHAPATVCGPKKSTNLVKNKCVNFNFNGLTGTGVLTESNKKFLPFQQFGRDIADTTDAVRDPQTLEILDITPCSFGGVSVITPGTNTSNQVAVLYQDVNCTEVPVAIHADQLTPTWRVYSTGSNVFQTRAGCLIGAEHVNNSYECDIPIGAGICASYQTQTNSPRRARSVASQSIIAYTMSLGAENSVAYSNNSIAIPTNFTISVTTEILPVSMTKTSVDCTMYICGDSTECSNLLLQYGSFCTQLNRALTGIAVEQDKNTQEVFAQVKQIYKTPPIKDFGGFNFSQILPDPSKPSKRSFIEDLLFNKVTLADAGFIKQYGDCLGDIAARDLICAQKFNGLTVLPPLLTDEMIAQYTSALLAGTITSGWTFGAGAALQIPFAMQMAYRFNGCGVTQNVLYENQKLIANQFNSAIGKIQDSLSSTASALGKLQDVVNQNAQALNTLVKQLSSNFGAISSVLNDILSRLDKVEAEVQIDRLITGRLQSLQTYVTQQLIRAAEIRASANLAATKMSECVLGQSKRVDFCGKGCHLMSFPQSAPHGVVFLHVTYVPAQEKNFTTAPAICHDGKAHFPREGVFVSNGTHWFVTQRNFYEPQIITTDNTFVSGNCDVVIGIVNNTVYDPLQPELDSFKEELDKYFKNHTSPDVDLGDISGINASVVNIQKEIDRLNEVAKNLNESLIDLQELGKYEQYIKGGGGSDIDPYKEFGSSYQLLNFLPLDFFPDLNALVDTATALYEEELTGREHCSPHHTAIRQALVCWDELTKLIAWMSSNITSEQVRTIIVNHVNDTWGLKVRQSLWFHLSCLTFGQHTVQEFLVSFGVWIRTPAPYRPPNAPILSTLPEHTVIC

SEQ ID NO: 7281 - protein, 1365 aa, Artificial Sequence
  SARS-CoV-2/SARS-CoV-2/Yunnan-01/human/2020/CHN__MT049951.1 spike protein (1-1211)(I909C_Y1047C) WhcAg construct
MFVFLVLLPLVSSQCVNLTTRTQLPPANTNSFTRGVYYPDKVFRSSVLHSTQDLFLPFFSNVTWFHAIHVSGTNGTKRFDNPVLPFNDGVYFASTEKSNIIRGWIFGTTLDSKTQSLLIVNNATNVVIKVCEFQFCNDPFLGVYYHKNNKSWMESEFRVYSSANNCTFEYVSQPFLMDLEGKQGNFKNLREFVFKNIDGYFKIYSKHTPINLVRDLPQGFSALEPLVDLPIGINITRFQTLLALHRSYLTPGDSSSGWTAGAAAYYVGYLQPRTFLLKYNENGTITDAVDCALDPLSETKCTLKSFTVEKGIYQTSNFRVQPTESIVRFPNITNLCPFGEVFNATRFASVYAWNRKRISNCVADYSVLYNSASFSTFKCYGVSPTKLNDLCFTNVYADSFVIRGDEVRQIAPGQTGKIADYNYKLPDDFTGCVIAWNSNNLDSKVGGNYNYLYRLFRKSNLKPFERDISTEIYQAGSTPCNGVEGFNCYFPLQSYGFQPTNGVGYQPYRVVVLSFELLHAPATVCGPKKSTNLVKNKCVNFNFNGLTGTGVLTESNKKFLPFQQFGRDIADTTDAVRDPQTLEILDITPCSFGGVSVITPGTNTSNQVAVLYQDVNCTEVPVAIHADQLTPTWRVYSTGSNVFQTRAGCLIGAEHVNNSYECDIPIGAGICASYQTQTNSPRRARSVASQSIIAYTMSLGAENSVAYSNNSIAIPTNFTISVTTEILPVSMTKTSVDCTMYICGDSTECSNLLLQYGSFCTQLNRALTGIAVEQDKNTQEVFAQVKQIYKTPPIKDFGGFNFSQILPDPSKPSKRSFIEDLLFNKVTLADAGFIKQYGDCLGDIAARDLICAQKFNGLTVLPPLLTDEMIAQYTSALLAGTITSGWTFGAGAALQIPFAMQMAYRFNGCGVTQNVLYENQKLIANQFNSAIGKIQDSLSSTASALGKLQDVVNQNAQALNTLVKQLSSNFGAISSVLNDILSRLDKVEAEVQIDRLITGRLQSLQTYVTQQLIRAAEIRASANLAATKMSECVLGQSKRVDFCGKGCHLMSFPQSAPHGVVFLHVTYVPAQEKNFTTAPAICHDGKAHFPREGVFVSNGTHWFVTQRNFYEPQIITTDNTFVSGNCDVVIGIVNNTVYDPLQPELDSFKEELDKYFKNHTSPDVDLGDISGINASVVNIQKEIDRLNEVAKNLNESLIDLQELGKYEQYIKGGGGSDIDPYKEFGSSYQLLNFLPLDFFPDLNALVDTATALYEEELTGREHCSPHHTAIRQALVCWDELTKLIAWMSSNITSEQVRTIIVNHVNDTWGLKVRQSLWFHLSCLTFGQHTVQEFLVSFGVWIRTPAPYRPPNAPILSTLPEHTVIC

SEQ ID NO: 7282 - protein, 1365 aa, Artificial Sequence
  SARS-CoV-2/USA/WA-UW292/2020__EPI_ISL_418077 spike protein (1-1211)(I909C_Y1047C) WhcAg construct
MFVFLVLLPLVSSQCVNLTTRTQLPPAYTNSFTRGVYYPDKVFRSSVLHSTQDLFLPFFSNVTWFHAIHVSGTNGTKRFDNPVLPFNDGVYFASTEKSNIIRGWIFGTTLDSKTQSLLIVNNATNVVIKVCEFQFCNDPFLGVYYHKNNKSWMESEFRVYSSANNCTFEYVSQPFLMDLEGKQGNFKNLREFVFKNIDGYFKIYSKHTPINLVRDLPQGFSALEPLVDLPIGINITRFQTLLALHRSYLTPGDSSSGWTAGAAAYYVGYLQPRTFLLKYNENGTITDAVDCALDPLSETKCTLKSFTVEKGIYQTSNFRVQPTESIVRFPNITNLCPFGEVFNATRFASVYAWNRKRISNCVADYSVLYNSASFSTFKCYGVSPTKLNDLCFTNVYADSFVIRGDEVRQIAPGQTGKIADYNYKLPDDFTGCVIAWNSNNLDSKVGGNYNYLYRLFRKSNLKPFERDISTEIYQASSTPCNGVEGFNCYFPLQSYGFQPTNGVGYQPYRVVVLSFELLHAPATVCGPKKSTNLVKNKCVNFNFNGLTGTGVLTESNKKFLPFQQFGRDIADTTDAVRDPQTLEILDITPCSFGGVSVITPGTNTSNQVAVLYQDVNCTEVPVAIHADQLTPTWRVYSTGSNVFQTRAGCLIGAEHVNNSYECDIPIGAGICASYQTQTNSPRRARSVASQSIIAYTMSLGAENSVAYSNNSIAIPTNFTISVTTEILPVSMTKTSVDCTMYICGDSTECSNLLLQYGSFCTQLNRALTGIAVEQDKNTQEVFAQVKQIYKTPPIKDFGGFNFSQILPDPSKPSKRSFIEDLLFNKVTLADAGFIKQYGDCLGDIAARDLICAQKFNGLTVLPPLLTDEMIAQYTSALLAGTITSGWTFGAGAALQIPFAMQMAYRFNGCGVTQNVLYENQKLIANQFNSAIGKIQDSLSSTASALGKLQDVVNQNAQALNTLVKQLSSNFGAISSVLNDILSRLDKVEAEVQIDRLITGRLQSLQTYVTQQLIRAAEIRASANLAATKMSECVLGQSKRVDFCGKGCHLMSFPQSAPHGVVFLHVTYVPAQEKNFTTAPAICHDGKAHFPREGVFVSNGTHWFVTQRNFYEPQIITTDNTFVSGNCDVVIGIVNNTVYDPLQPELDSFKEELDKYFKNHTSPDVDLGDISGINASVVNIQKEIDRLNEVAKNLNESLIDLQELGKYEQYIKGGGGSDIDPYKEFGSSYQLLNFLPLDFFPDLNALVDTATALYEEELTGREHCSPHHTAIRQALVCWDELTKLIAWMSSNITSEQVRTIIVNHVNDTWGLKVRQSLWFHLSCLTFGQHTVQEFLVSFGVWIRTPAPYRPPNAPILSTLPEHTVIC

SEQ ID NO: 7283 - protein, 1365 aa, Artificial Sequence
  SARS-CoV-2/Iceland/192/2020__EPI_ISL_417819 spike protein (1-1211)(I909C_Y1047C) WhcAg construct
MFVFFVLLPLVSSQCVNLTTRTQLPPAYTNSFTRGVYYPDKVFRSSVLHSTQDLFLPFFSNVTWFHAIHVSGTNGTKRFDNPVLPFNDGVYFASTEKSNIIRGWIFGTTLDSKTQSLLIVNNATNVVIKVCEFQFCNDPFLGVYYHKNNKSWMESEFRVYSSANNCTFEYVSQPFLMDLEGKQGNFKNLREFVFKNIDGYFKIYSKHTPINLVRDLPQGFSALEPLVDLPIGINITRFQTLLALHRSYLTPGDSSSGWTAGAAAYYVGYLQPRTFLLKYNENGTITDAVDCALDPLSETKCTLKSFTVEKGIYQTSNFRVQPTESIVRFPNITNLCPFGEVFNATRFASVYAWNRKRISNCVADYSVLYNSASFSTFKCYGVSPTKLNDLCFTNVYADSFVIRGDEVRQIAPGQTGKIADYNYKLPDDFTGCVIAWNSNNLDSKVGGNYNYLYRLFRKSNLKPFERDISTEIYQAGSTPCNGVEGFNCYFPLQSYGFQPTNGVGYQPYRVVVLSFELLHAPATVCGPKKSTNLVKNKCVNFNFNGLTGTGVLTESNKKFLPFQQFGRDIADTTDAVRDPQTLEILDITPCSFGGVSVITPGTNTSNQVAVLYQGVNCTEVPVAIHADQLTPTWRVYSTGSNVFQTRAGCLIGAEHVNNSYECDIPIGAGICASYQTQTNSPRRARSVASQSIIAYTMSLGAENSVAYSNNSIAIPTNFTISVTTEILPVSMTKTSVDCTMYICGDSTECSNLLLQYGSFCTQLNRALTGIAVEQDKNTQEVFAQVKQIYKTPPIKDFGGFNFSQILPDPSKPSKRSFIEDLLFNKVTLADAGFIKQYGDCLGDIAARDLICAQKFNGLTVLPPLLTDEMIAQYTSALLAGTITSGWTFGAGAALQIPFAMQMAYRFNGCGVTQNVLYENQKLIANQFNSAIGKIQDSLSSTASALGKLQDVVNQNAQALNTLVKQLSSNFGAISSVLNDILSRLDKVEAEVQIDRLITGRLQSLQTYVTQQLIRAAEIRASANLAATKMSECVLGQSKRVDFCGKGCHLMSFPQSAPHGVVFLHVTYVPAQEKNFTTAPAICHDGKAHFPREGVFVSNGTHWFVTQRNFYEPQIITTDNTFVSGNCDVVIGIVNNTVYDPLQPELDSFKEELDKYFKNHTSPDVDLGDISGINASVVNIQKEIDRLNEVAKNLNESLIDLQELGKYEQYIKGGGGSDIDPYKEFGSSYQLLNFLPLDFFPDLNALVDTATALYEEELTGREHCSPHHTAIRQALVCWDELTKLIAWMSSNITSEQVRTIIVNHVNDTWGLKVRQSLWFHLSCLTFGQHTVQEFLVSFGVWIRTPAPYRPPNAPILSTLPEHTVIC

SEQ ID NO: 7284 - protein, 1365 aa, Artificial Sequence
  SARS-CoV-2/Belgium/ULG-6939/2020__EPI_ISL_417020 spike protein (1-1211)(I909C_Y1047C) WhcAg construct
MFVFLVLLPLVSSQCVNLTTRTQLPPAYTNSFTRGVYYPDKVFRSSVLHSTQDLFLPFFSNVTWFHAIHVSGTNGTKRFDNPVLPFNDGVYFASTEKSNIIRGWIFGTTLDSKTQSLLIVNNATNVVIKVCEFQFCNDPFLGVYYHKNNKSWMESEFRVYSSANNCTFEYVSQPFLMDLEGKQGNFKNLREFVFKNIDGYFKIYSKHTPINLVRDLPQGFSALEPLVDLPIGINITRFQTLLALHRSYLTPGDSSSGWTAGAAAYYVGYLQPRTFLLKYNENGTITDAVDCALDPLSETKCTLKSFTVEKGIYQTSNFRVQPTESIVRFPNITNLCPFGEVFNATRFASVYAWNRKRISNCVADYSVLYNSASFSTFKCYGVSPTKLNDLCFTNVYADSFVIRGDEVRQIAPGQTGKIADYNYKLPDDFTGCVIAWNSNNLDSKVGGNYNYLYRLFRKSNLKPFERDISTEIYQAGSTPCNGVEGFNCYFPLQSYGFQPTNGVGYQPYRVVVLSFELLHAPATVCGPKKSTNLVKNKCVNFNFNGLTGTGVLTESNKKFLPFQQFGRDIADTTDAVRDPQTLEILDITPCSFGGVSVITPGTNTSNQVAVLYQGVNCTEVPVAIHADQLTPTWRVYSTGSNVFQTRAGCLIGAEHVNNSYECDIPIGAGICASYQTQTNSPRRARSVASQSIIAYTMSLGAENSVVYSNNSIAIPTNFTISVTTEILPVSMTKTSVDCTMYICGDSTECSNLLLQYGSFCTQLNRALTGIAVEQDKNTQEVFAQVKQIYKTPPIKDFGGFNFSQILPDPSKPSKRSFIEDLLFNKVTLADAGFIKQYGDCLGDIAARDLICAQKFNGLTVLPPLLTDEMIAQYTSALLAGTITSGWTFGAGAALQIPFAMQMAYRFNGCGVTQNVLYENQKLIANQFNSAIGKIQDSLSSTASALGKLQDVVNQNAQALNTLVKQLSSNFGAISSVLNDILSRLDKVEAEVQIDRLITGRLQSLQTYVTQQLIRAAEIRASANLAATKMSECVLGQSKRVDFCGKGCHLMSFPQSAPHGVVFLHVTYVPAQEKNFTTAPAICHDGKAHFPREGVFVSNGTHWFVTQRNFYEPQIITTDNTFVSGNCDVVIGIVNNTVYDPLQPELDSFKEELDKYFKNHTSPDVDLGDISGINASVVNIQKEIDRLNEVAKNLNESLIDLQELGKYEQYIKGGGGSDIDPYKEFGSSYQLLNFLPLDFFPDLNALVDTATALYEEELTGREHCSPHHTAIRQALVCWDELTKLIAWMSSNITSEQVRTIIVNHVNDTWGLKVRQSLWFHLSCLTFGQHTVQEFLVSFGVWIRTPAPYRPPNAPILSTLPEHTVIC

SEQ ID NO: 7285 - protein, 1365 aa, Artificial Sequence
  SARS-CoV-2/France/HF2496/2020__EPI_ISL_418231 spike protein (1-1211)(I909C_Y1047C) WhcAg construct
MFVFLVLLPLVSSQCVNLTTRTQLPPAYTNSFTRGVYYPDKVFRSSVLHSTQDLFLPFFSNVTWFHAIHVSGTNGTKRFDNPVLPFNDGVYFASTEKSNIIRGWIFGTTLDSKTQSLLIVNNATNVVIKVCEFQFCNDPFLGVYYHKNNKSWMESEFRVYSSANNCTFEYVSQPFLMDLEGKQGNFKNLREFVFKNIDGYFKIYSKHTPINLVRDLPQGFSALEPLVDLPIGINITRFQTLLALHRSYLTPGDSSSGWTAGAAAYYVGYLQPRTFLLKYNENGTITDAVDCALDPLSETKCTLKSFTVEKGIYQTSNFRVQPTESIVRFPNITNLCPFGEVFNATRFASVYAWNRKRISNCVADYSVLYNSASFSTFKCYGVSPTKLNDLCFTNVYADSFVIRGDEVRQIAPGQTGKIADYNYKLPDDFTGCVIAWNSNNLDSKVGGNYNYLYRLFRKSNLKPFERDISTEIYQAGSTPCNGVEGFNCYFPLQSYGFQPTNGVGYQPYRVVVLSFELLHAPATVCGPKKSTNLVKNKCVNFNFNGLTGTGVLTESNKKFLPFQQFGRDIADTTDAVRDPQTLEILDITPCSFGGVSVITPGTNTSNQVAVLYQGVNCTEVPVAIHADQLTPTWRVYSTGSNVFQTRAGCLIGAEHVNNSYECDIPIGAGICASYQTQTNSPRRARSVASQSIIAYTMSLGAENSVAYSNNSIAIPTNFTISVTTEILPVSMTKTSVDCTMYICGDSTECSNLLLQYGSFCTQLNRALTGIAVEQDKNTQEVFAQVKQIYKTPPIKDFGGFNFSQILPDPSKPSKRSFIEDLLFNKVTLADAGFIKQYGDCLGDIVARDLICAQKFNGLTVLPPLLTDEMIAQYTSALLAGTITSGWTFGAGAALQIPFAMQMAYRFNGCGVTQNVLYENQKLIANQFNSAIGKIQDSLSSTASALGKLQDVVNQNAQALNTLVKQLSSNFGAISSVLNDILSRLDKVEAEVQIDRLITGRLQSLQTYVTQQLIRAAEIRASANLAATKMSECVLGQSKRVDFCGKGCHLMSFPQSAPHGVVFLHVTYVPAQEKNFTTAPAICHDGKAHFPREGVFVSNGTHWFVTQRNFYEPQIITTDNTFVSGNCDVVIGIVNNTVYDPLQPELDSFKEELDKYFKNHTSPDVDLGDISGINASVVNIQKEIDRLNEVAKNLNESLIDLQELGKYEQYIKGGGGSDIDPYKEFGSSYQLLNFLPLDFFPDLNALVDTATALYEEELTGREHCSPHHTAIRQALVCWDELTKLIAWMSSNITSEQVRTIIVNHVNDTWGLKVRQSLWFHLSCLTFGQHTVQEFLVSFGVWIRTPAPYRPPNAPILSTLPEHTVIC

SEQ ID NO: 7286 - protein, 1365 aa, Artificial Sequence
  SARS-CoV-2/USA/WA-UW291/2020__EPI_ISL_418076 spike protein (1-1211)(I909C_Y1047C) WhcAg construct
MFVFLVLLPLVSSQCVNLTTRTQLPPAYTNSFTRGVYYPDKVFRSSVLHSTQDLFLPFFSNVTWFHAIHVSGTNGTKRFDNPVLPFNDGVYFASTEKSNIIRGWIFGTTLDSKTQSLLIVNNATNVVIKVCEFQFCNDPFLGVYYHKNNKSWMESEFRVYSSANNCTFEYVSQPFLMDLEGKQGNFKNLREFVFKNIDGYFKIYSKHTPINLVRDLPQGFSALEPLVDLPIGINITRFQTLLALHRSYLTPGDSSSGWTAGAAAYYVGYLQPRTFLLKYNENGTITDAVDCALDPLSETKCTLKSFTVEKGIYQTSNFRVQPTESIVRFPNITNLCPFGEVFNATRFASVYAWNRKRISNCVADYSVLYNSASFSTFKCYGVSPTKLNDLCFTNVYADSFVIRGDEVRQIAPGQTGKIADYNYKLPDDFTGCVIAWNSNNLDSKVGGNYNYLYRLFRKSNLKPFERDISTEIYQAGSTPCNGVEGFNCYFPLQSYGFQPTNGVGYQPYRVVVLSFELLHAPATVCGPKKSTNLVKNKCVNFNFNGLTGTGVLTESNKKFLPFQQFGRDIADTTDAVRDPQTLEILDITPCSFGGVSVITPGTNTSNQVAVLYQGVNCTEVPVAIHADQLTPTWRVYSTGSNVFQTRAGCLIGAEHVNNSYECDIPIGAGICASYQTQTNSPRRARSVASQSIIAYTMSLGAENSVAYSNNSIAIPTNFTISVTTEILPVSMTKTSVDCTMYICGDSTECSNLLLQYGSFCTQLNRALTGIAVEQDKNTQEVFAQVKQIYKTPPIKDFGGFNFSQILPDPSKPSKRSFIEDLLFNKVTLADAGFIKQYGDCLGDIAARDLICAQKFNGLTVLPPLLTDEMIAQYTSALLAGTITSGWTFGAGAALQIPFAMQMAYRFNGCGVTQNVLYENQKLIANQFNSAIGKIQYSLSSTASALGKLQDVVNQNAQALNTLVKQLSSNFGAISSVLNDILSRLDKVEAEVQIDRLITGRLQSLQTYVTQQLIRAAEIRASANLAATKMSECVLGQSKRVDFCGKGCHLMSFPQSAPHGVVFLHVTYVPAQEKNFTTAPAICHDGKAHFPREGVFVSNGTHWFVTQRNFYEPQIITTDNTFVSGNCDVVIGIVNNTVYDPLQPELDSFKEELDKYFKNHTSPDVDLGDISGINASVVNIQKEIDRLNEVAKNLNESLIDLQELGKYEQYIKGGGGSDIDPYKEFGSSYQLLNFLPLDFFPDLNALVDTATALYEEELTGREHCSPHHTAIRQALVCWDELTKLIAWMSSNITSEQVRTIIVNHVNDTWGLKVRQSLWFHLSCLTFGQHTVQEFLVSFGVWIRTPAPYRPPNAPILSTLPEHTVIC

SEQ ID NO: 7287 - protein, 1365 aa, Artificial Sequence; identical to SEQ ID NO: 7250
  SARS-CoV-2/Portugal/PT0034/2020__EPI_ISL_418019 spike protein (1-1211)(I909C_Y1047C) WhcAg construct

SEQ ID NO: 7288 - protein, 1365 aa, Artificial Sequence
  SARS-CoV-2/Iceland/202/2020__EPI_ISL_417750 spike protein (1-1211)(I909C_Y1047C) WhcAg construct
MFVFLVLLPLVSSQCVNLTTRTQLPPAYTNSFTRGVYYPDKVFRSSVLHSTQDLFLPFFSNVTWFHAIHVSGTNGTKRFDNPVLPFNDGVYFASTEKSNIIRGWIFGTTLDSKTQSLLIVNNATNVVIKVCEFQFCNDPFLGVYYHKNNKSWMESEFRVYSSANNCTFEYVSQPFLMDLEGKQGNFKNLREFVFKNIDGYFKIYSKHTPINLVRDLPQGFSALEPLVDLPIGINITRFQTLLALHRSYLTPGDSSSGWTAGAAAYYVGYLQPRTFLLKYNENGTITDAVDCALDPLSETKCTLKSFTVEKGIYQTSNFRVQPTESIVRFPNITNLCPFGEVFNATRFASVYAWNRKRISNCVADYSVLYNSASFSTFKCYGVSPTKLNDLCFTNVYADSFVIRGDEVRQIAPGQTGKIADYNYKLPDDFTGCVIAWNSNNLDSKVGGNYNYLYRLFRKSNLKPFERDISTEIYQAGSTPCNGVEGFNCYFPLQSYGFQPTNGVGYQPYRVVVLSFELLHAPATVCGPKKSTNLVKNKCVNFNFNGLTGTGVLTESNKKFLPFQQFGRDIADTTDAVRDPQTLEILDITPCSFGGVSVITPGTNTSNQVAVLYQDVNCTEVPVAIHADQLTPTWRVYSTGSNVFQTRAGCLIGAEHVNNSYECDIPIGAGICASYQTQTNSPRRARSVASQSIIAYTMSLGAENSVAYSNNSIAIPTNFTISVTTEILPVSMTKTSVDCTMYICGDSTECSNLLLQYGSFCTQLNRALTGIAVEQDKNTQEVFAQVKQIYKTPPIKDFGGFNFSQILPDPSKPSKRSFIEDLLFNKVTLADAGFIKQYGDCLGDIAARDLICAQKFNGLTVLPPLLTDEMIAQYTSALLAGTITSGWTFGAGAALQIPFAMQMAYRFNGCGVTQNVLYENQKLIANQFNSAIGKIQDSLSSTASALGKLQDVVNQNAQALNTLVKQLSSNFGAISSVLNDILSRLDKVEAEVQIDRLITGRLQSLQTYVTQQLIRAAEIRASANLAATKMSECVLGQSKRVDFCGKGCHLMSFPQSAPHGVVFLHVTYVPAQEKNFTTAPAICHDGKAHFPREGVFVSNGTHWFVTQRNFYEPQIITTDNTFVSGNCDVVIGIVNNTVYDPLQPELDSFKEELDKYFKNHTSPDVDLGDIPGINASVVNIQKEIDRLNEVAKNLNESLIDLQELGKYEQYIKGGGGSDIDPYKEFGSSYQLLNFLPLDFFPDLNALVDTATALYEEELTGREHCSPHHTAIRQALVCWDELTKLIAWMSSNITSEQVRTIIVNHVNDTWGLKVRQSLWFHLSCLTFGQHTVQEFLVSFGVWIRTPAPYRPPNAPILSTLPEHTVIC

SEQ ID NO: 7289 - protein, 1365 aa, Artificial Sequence
  SARS-CoV-2/USA/WA-UW261/2020__EPI_ISL_418046 spike protein (1-1211)(I909C_Y1047C) WhcAg construct
MFVFLVLLPLVSSQCVNLTTRTQLPPAYTNSFTRGVYYPDKVFRSSVLHSTQDLFLPFFSNVTWFHAIHVSGTNGTKRFDNPVLPFNDGVYFASTEKSNIIRGWIFGTTLDSKTQSLLIVNNATNVVIKVCEFQFCNDPFLGVYYHKNNKSWMESEFRVYSSANNCTFEYVSQPFLMDLEGKQGNFKNLREFVFKNIDGYFKIYSKHTPINLVRDLPQGFSALEPLVDLPIGINITRFQTLLALHRSYLTPGDSSSGWTAGAAAYYVGYLQPRTFLLKYNENGTITDAVDCALDPLSETKCTLKSFTVEKGIYQTSNFRVQPTESIVRFPNITNLCPFGEVFNATRFTSVYAWNRKRISNCVADYSVLYNSASFSTFKCYGVSPTKLNDLCFTNVYADSFVIRGDEVRQIAPGQTGKIADYNYKLPDDFTGCVIAWNSNNLDSKVGGNYNYLYRLFRKSNLKPFERDISTEIYQAGSTPCNGVEGFNCYFPLQSYGFQPTNGVGYQPYRVVVLSFELLHAPATVCGPKKSTNLVKNKCVNFNFNGLTGTGVLTESNKKFLPFQQFGRDIADTTDAVRDPQTLEILDITPCSFGGVSVITPGTNTSNQVAVLYQDVNCTEVPVAIHADQLTPTWRVYSTGSNVFQTRAGCLIGAEHVNNSYECDIPIGAGICASYQTQTNSPRRARSVASQSIIAYTMSLGAENSVAYSNNSIAIPTNFTISVTTEILPVSMTKTSVDCTMYICGDSTECSNLLLQYGSFCTQLNRALTGIAVEQDKNTQEVFAQVKQIYKTPPIKDFGGFNFSQILPDPSKPSKRSFIEDLLFNKVTLADAGFIKQYGDCLGDIAARDLICAQKFNGLTVLPPLLTDEMIAQYTSALLAGTITSGWTFGAGAALQIPFAMQMAYRFNGCGVTQNVLYENQKLIANQFNSAIGKIQDSLSSTASALGKLQDVVNQNAQALNTLVKQLSSNFGAISSVLNDILSRLDKVEAEVQIDRLITGRLQSLQTYVTQQLIRAAEIRASANLAATKMSECVLGQSKRVDFCGKGCHLMSFPQSAPHGVVFLHVTYVPAQEKNFTTAPAICHDGKAHFPREGVFVSNGTHWFVTQRNFYEPQIITTDNTFVSGNCDVVIGIVNNTVYDPLQPELDSFKEELDKYFKNHTSPDVDLGDISGINASVVNIQKEIDRLNEVAKNLNESLIDLQELGKYEQYIKGGGGSDIDPYKEFGSSYQLLNFLPLDFFPDLNALVDTATALYEEELTGREHCSPHHTAIRQALVCWDELTKLIAWMSSNITSEQVRTIIVNHVNDTWGLKVRQSLWFHLSCLTFGQHTVQEFLVSFGVWIRTPAPYRPPNAPILSTLPEHTVIC

SEQ ID NO: 7290 - protein, 1365 aa, Artificial Sequence
  SARS-CoV-2/Portugal/PT0035/2020__EPI_ISL_418020 spike protein (1-1211)(I909C_Y1047C) WhcAg construct
MFVFLVLLPLVSSQCVNLTTRTQLPPAYTNSFTRGVYYPDKVFRSSVLHSTQDLFLPFFSNVTWFHAIHVSGTNGTKRFDNPVLPFNDGVYFASTEKSNIIRGWIFGTTLDSKTQSLLIVNNATNVVIKVCEFQFCNDPFLGVYYHKNNKSWMESEFRVYSSANNCTFEYVSQPFLMDLEGKQGNFKNLREFVFKNIDGYFKIYSKHTPINLVRDLPQGFSALEPLVDLPIGINITRFQTLLALHRSYLTPGDSSSGWTAGAAAYYVGYLQPRTFLLKYNENGTITDAVDCALDPLSETKCTLKSFTVEKGIYQTSNFRVQPTESIVRFPNITNLCPFGEVFNATRFASVYAWNRKRISNCVADYSVLYNSASFSTFKCYGVSPTKLNDLCFTNVYADSFVIRGDEVRQIAPGQTGKIADYNYKLPDDFTGCVIAWNSNNLDSKVGGNYNYLYRLFRKSNLKPFERDISTEIYQAGSTPCNGVEGFNCYFPLQSYGFQPTNGVGYQPYRVVVLSFELLHAPATVCGPKKSTNLVKNKCVNFNFNGLTGTGVLTESNKKFLPFQQFGRDIADTTDAVRDPQTLEILDITPCSFGGVSVITPGTNTSNQVAVLYQDVNCTEVPVAIHADQLTPTWRVYSTGSNVFQTRAGCLIGAEHVNNSYECDIPIGAGICASYQTQTNSPRRARSVASQSIIAYTMSLGAENSVAYSNNSIAIPTNFTISVTTEILPVSMTKTSVDCTMYICGDSTECSNLLLQYGSFCTQLNRALTGIAVEQDKNTQEVFAQVKQIYKTPPIKDFGGFNFSQILPDPSKPSKRSFIEDLLFNKVTLADAGFIKQYGDCLGDISARDLICAQKFNGLTVLPPLLTDEMIAQYTSALLAGTITSGWTFGAGAALQIPFAMQMAYRFNGCGVTQNVLYENQKLIANQFNSAIGKIQDSLSSTASALGKLQDVVNQNAQALNTLVKQLSSNFGAISSVLNDILSRLDKVEAEVQIDRLITGRLQSLQTYVTQQLIRAAEIRASANLAATKMSECVLGQSKRVDFCGKGCHLMSFPQSAPHGVVFLHVTYVPAQEKNFTTAPAICHDGKAHFPREGVFVSNGTHWFVTQRNFYEPQIITTDNTFVSGNCDVVIGIVNNTVYDPLQPELDSFKEELDKYFKNHTSPDVDLGDISGINASVVNIQKEIDRLNEVAKNLNESLIDLQELGKYEQYIKGGGGSDIDPYKEFGSSYQLLNFLPLDFFPDLNALVDTATALYEEELTGREHCSPHHTAIRQALVCWDELTKLIAWMSSNITSEQVRTIIVNHVNDTWGLKVRQSLWFHLSCLTFGQHTVQEFLVSFGVWIRTPAPYRPPNAPILSTLPEHTVIC

SEQ ID NO: 7291 - protein, 1365 aa, Artificial Sequence
  SARS-CoV-2/USA/NY-NYUMC7/2020__EPI_ISL_418192 spike protein (1-1211)(I909C_Y1047C) WhcAg construct
MFVFLVLLPLVSSQCVNLTTRTQLPPAYTNSFTRGVYYPDKVFRSSVLHSTQDLFLPFFSNVTWFHAIHVSGTNGTKRFDNPVLPFNDGVYFASTEKSNIIRGWIFGTTLDSKTQSLLIVNNATNVVIKVCEFQFCNDPFLGVYHHKNNKSWMESEFRVYSSANNCTFEYVSQPFLMDLEGKQGNFKNLREFVFKNIDGYFKIYSKHTPINLVRDLPQGFSALEPLVDLPIGINITRFQTLLALHRSYLTPGDSSSGWTAGAAAYYVGYLQPRTFLLKYNENGTITDAVDCALDPLSETKCTLKSFTVEKGIYQTSNFRVQPTESIVRFPNITNLCPFGEVFNATRFASVYAWNRKRISNCVADYSVLYNSASFSTFKCYGVSPTKLNDLCFTNVYADSFVIRGDEVRQIAPGQTGKIADYNYKLPDDFTGCVIAWNSNNLDSKVGGNYNYLYRLFRKSNLKPFERDISTEIYQAGSTPCNGVEGFNCYFPLQSYGFQPTNGVGYQPYRVVVLSFELLHAPATVCGPKKSTNLVKNKCVNFNFNGLTGTGVLTESNKKFLPFQQFGRDIADTTDAVRDPQTLEILDITPCSFGGVSVITPGTNTSNQVAVLYQGVNCTEVPVAIHADQLTPTWRVYSTGSNVFQTRAGCLIGAEHVNNSYECDIPIGAGICASYQTQTNSPRRARSVASQSIIAYTMSLGAENSVAYSNNSIAIPTNFTISVTTEILPVSMTKTSVDCTMYICGDSTECSNLLLQYGSFCTQLNRALTGIAVEQDKNTQEVFAQVKQIYKTPPIKDFGGFNFSQILPDPSKPSKRSFIEDLLFNKVTLADAGFIKQYGDCLGDIAARDLICAQKFNGLTVLPPLLTDEMIAQYTSALLAGTITSGWTFGAGAALQIPFAMQMAYRFNGCGVTQNVLYENQKLIANQFNSAIGKIQDSLSSTASALGKLQDVVNQNAQALNTLVKQLSSNFGAISSVLNDILSRLDKVEAEVQIDRLITGRLQSLQTYVTQQLIRAAEIRASANLAATKMSECVLGQSKRVDFCGKGCHLMSFPQSAPHGVVFLHVTYVPAQEKNFTTAPAICHDGKAHFPREGVFVSNGTHWFVTQRNFYEPQIITTDNTFVSGNCDVVIGIVNNTVYDPLQPELDSFKEELDKYFKNHTSPDVDLGDISGINASVVNIQKEIDRLNEVAKNLNESLIDLQELGKYEQYIKGGGGSDIDPYKEFGSSYQLLNFLPLDFFPDLNALVDTATALYEEELTGREHCSPHHTAIRQALVCWDELTKLIAWMSSNITSEQVRTIIVNHVNDTWGLKVRQSLWFHLSCLTFGQHTVQEFLVSFGVWIRTPAPYRPPNAPILSTLPEHTVIC

SEQ ID NO: 7292 - protein, 1365 aa, Artificial Sequence
  SARS-CoV-2/Iceland/189/2020__EPI_ISL_417709 spike protein (1-1211)(I909C_Y1047C) WhcAg construct
MFVFLVLLPLVSSQCVNLTTRTQLPPAYTNSFTRGVYYPDKVFRSSVLHSTQDLFLPFFSNVTWFHAIHVSGTNGTKRFDNPVLPFNDGVYFASTEKSNIIRGWIFGTTLDSKTQSLLIVNNATNVVIKVCEFQFCNDPFLGVYYHKNNKSWMESEFRVYSSANNCTFEYVSQPFLMDLEGKQGNFKNLREFVFKNIDGYFKIYSKHTPINLVRDLPQGFSALEPLVDLPIGINITRFQTLLALHRSYLTPGDSSSGWTAGAAAYYVGYLQPRTFLLKYNENGTITDAVDCALDPLSETKCTLKSFTVEKGIYQTSNFRVQPTESIVRFPNITNLCPFGEVFNATRFASVYAWNRKRISNCVADYSVLYNSASFSTFKCYGVSPTKLNDLCFTNVYADSFVIRGDEVRQIAPGQTGKIADYNYKLPDDFTGCVIAWNSNNLDSKVGGNYNYLYRLFRKSNLKPFERDISTEIYQAGSTPCNGVEGFNCYFPLQSYGFQPTNGVGYQPYRVVVLSFELLHAPATVCGPKKSTNLVKNKCVNFNFNGLTGTGVLTESNKKFLPFQQFGRDIADTTDAVRDPQTLEILDITPCSFGGVSVITPGTNTSNQVAVLYQGVNCTEVPVAIHADQLTPTWRVYSTGSNVFQTRAGCLIGAEHVNNSYECDIPIGAGICASYQTQTNSPRRARSVASQSIIAYTMSLGAENSVAYSNNSIAIPTNFTISVTTEILPVSMTKTSVDCTMYICGDSTECSNLLLQYGSFCTQLNRALTGIAVEQDKNTQEVFAQVKQIYKTPPIKDFGGFNFSQILPDPSKPSKRSFIEDLLFNKVTLADAGFTKQYGDCLGDIAARDLICAQKFNGLTVLPPLLTDEMIAQYTSALLAGTITSGWTFGAGAALQIPFAMQMAYRFNGCGVTQNVLYENQKLIANQFNSAIGKIQDSLSSTASALGKLQDVVNQNAQALNTLVKQLSSNFGAISSVLNDILSRLDKVEAEVQIDRLITGRLQSLQTYVTQQLIRAAEIRASANLAATKMSECVLGQSKRVDFCGKGCHLMSFPQSAPHGVVFLHVTYVPAQEKNFTTAPAICHDGKAHFPREGVFVSNGTHWFVTQRNFYEPQIITTDNTFVSGNCDVVIGIVNNTVYDPLQPELDSFKEELDKYFKNHTSPDVDLGDISGINASVVNIQKEIDRLNEVAKNLNESLIDLQELGKYEQYIKGGGGSDIDPYKEFGSSYQLLNFLPLDFFPDLNALVDTATALYEEELTGREHCSPHHTAIRQALVCWDELTKLIAWMSSNITSEQVRTIIVNHVNDTWGLKVRQSLWFHLSCLTFGQHTVQEFLVSFGVWIRTPAPYRPPNAPILSTLPEHTVIC

SEQ ID NO: 7293 - protein, 1365 aa, Artificial Sequence
  SARS-CoV-2/Australia/NSW56/2020__EPI_ISL_417408 spike protein (1-1211)(I909C_Y1047C) WhcAg construct
MFVFLVLLPLVSSQCVNLTTRTQLPPAYTNSFTRGVYYPDKVFRSSVLHSTQDLFLPFFSNVTWFHAIHVSGTNGTKRFDNPVLPFNDGVYFASTEKSNIIRGWIFGTTLDSKTQSLLIVNNATNVVIKVCEFQFCNDPFLGVYYHKNNKSWMESEFRVYSSANNCTFEYVSQPFLMDLEGKQGNFKNLREFVFKNIDGYFKIYSKHTPINLVRDLPQGFSALEPLVDLPIGINITRFQTLLALHRSYLTPGDSSSGWTAGAAAYYVGYLQPRTFLLKYNENGTITDAVDCALDPLSETKCTLKSFTVEKGIYQTSNFRVQPTESIVRFPNITNLCPFGEVFNATRFASVYAWNRKRISNCVADYSVLYNSASFSTFKCYGVSPTKLNDLCFTNVYADSFVIRGDEVRQIAPGQTGKIADYNYKLPDDFTGCVIAWNSNNLDSKVGGNYNYLYRLFRKSNLKPFERDISTEIYQAGSTPCNGVEGFNCYFPLQSYGFQPTNGVGYQPYRVVVLSFELLHAPATVCGPKKSTNLVKNKCVNFNFNGLTGTGVLTESNKKFLPFQQFGRDIADTTDAVRDPQTLEILDITPCSFGGVSVITPGTNTSNQVAVLYQDVNCTEVPVAIHADQLTPTWRVYSTGSNVFQTRAGCLIGAEHVNNSYECDIPIGAGICASYQTQTNSPRRARSVASQSIIAYTMSLGAENSVAYSNNSIAIPTNFTISVTTEILPVSMTKTSVDCTMYICGDSTECSNLLLQYGSFCTQLNRALTGIAVEQDKNTQEVFAQVKQIYKTPPIKDFGGFNFSQILPDSSKPSKRSFIEDLLFNKVTLADAGFIKQYGDCLGDIAARDLICAQKFNGLTVLPPLLTDEMIAQYTSALLAGTITSGWTFGAGAALQIPFAMQMAYRFNGCGVTQNVLYENQKLIANQFNSAIGKIQDSLSSTASALGKLQDVVNQNAQALNTLVKQLSSNFGAISSVLNDILSRLDKVEAEVQIDRLITGRLQSLQTYVTQQLIRAAEIRASANLAATKMSECVLGQSKRVDFCGKGCHLMSFPQSAPHGVVFLHVTYVPAQEKNFTTAPAICHDGKAHFPREGVFVSNGTHWFVTQRNFYEPQIITTDNTFVSGNCDVVIGIVNNTVYDPLQPELDSFKEELDKYFKNHTSPDVDLGDISGINASVVNIQKEIDRLNEVAKNLNESLIDLQELGKYEQYIKGGGGSDIDPYKEFGSSYQLLNFLPLDFFPDLNALVDTATALYEEELTGREHCSPHHTAIRQALVCWDELTKLIAWMSSNITSEQVRTIIVNHVNDTWGLKVRQSLWFHLSCLTFGQHTVQEFLVSFGVWIRTPAPYRPPNAPILSTLPEHTVIC

SEQ ID NO: 7294 - protein, 1365 aa, Artificial Sequence
  SARS-CoV-2/Iceland/280/2020__EPI_ISL_417608 spike protein (1-1211)(I909C_Y1047C) WhcAg construct
MFVFLVLLPLVSSQCVNLTTRTQLPPAYTNSFTRGVYYPDKVFRSSVLHSTQDLFLPFFSNVTWFHAIHVSGTNGTKRFDNPVLPFNDGVYFASTEKSNIIRGWIFGTTLDSKTQSLLIVNNATNVVIKVCEFQFCNDPFLGVYYHKNNKSWMESEFRVYSSANNCTFEYVSQPFLMDLEGKQGNFKNLREFVFKNIDGYFKIYSKHTPINLVRDLPQGFSALEPLVDLPIGINITRFQTLLALHRSYLTPGDSSSGWTAGAAAYYVGYLQPRTFLLKYNENGTITDAVDCALDPLSETKCTLKSFTVEKGIYQTSNFRVQPTESIVRFPNITNLCPFGEVFNATRFASVYAWNRKRISNCVADYSVLYNSASFSTFKCYGVSPTKLNDLCFTNVYADSFVIRGDEVRQIAPGQTGKIADYNYKLPDDFTGCVIAWNSNNLDSKVGGNYNYLYRLFRKSNLKPFERDISTEIYQAGSTPCNGVEGFNCYFPLQSYGFQPTNGVGYQPYRVVVLSFELLHAPATVCGPKKSTNLVKNKCVNFNFNGLTGTGVLTESNKKFLPFQQFGRDIADTTDAVRDPQTLEILDITPCSFGGVSVITPGTNTSNQVAVLYQGVNCTEVPVAIHADQLTPTWRVYSTGSNVFQTRAGCLIGAEHVNNSYECDIPIGAGICASYHTQTNSPRRARSVASQSIIAYTMSLGAENSVAYSNNSIAIPTNFTISVTTEILPVSMTKTSVDCTMYICGDSTECSNLLLQYGSFCTQLNRALTGIAVEQDKNTQEVFAQVKQIYKTPPIKDFGGFNFSQILPDPSKPSKRSFIEDLLFNKVTLADAGFIKQYGDCLGDIAARDLICAQKFNGLTVLPPLLTDEMIAQYTSALLAGTITSGWTFGAGAALQIPFAMQMAYRFNGCGVTQNVLYENQKLIANQFNSAIGKIQDSLSSTASALGKLQDVVNQNAQALNTLVKQLSSNFGAISSVLNDILSRLDKVEAEVQIDRLITGRLQSLQTYVTQQLIRAAEIRASANLAATKMSECVLGQSKRVDFCGKGCHLMSFPQSAPHGVVFLHVTYVPAQEKNFTTAPAICHDGKAHFPREGVFVSNGTHWFVTQRNFYEPQIITTDNTFVSGNCDVVIGIVNNTVYDPLQPELDSFKEELDKYFKNHTSPDVDLGDISGINASVVNIQKEIDRLNEVAKNLNESLIDLQELGKYEQYIKGGGGSDIDPYKEFGSSYQLLNFLPLDFFPDLNALVDTATALYEEELTGREHCSPHHTAIRQALVCWDELTKLIAWMSSNITSEQVRTIIVNHVNDTWGLKVRQSLWFHLSCLTFGQHTVQEFLVSFGVWIRTPAPYRPPNAPILSTLPEHTVIC

SEQ ID NO: 7295 - protein, 1365 aa, Artificial Sequence; identical to SEQ ID NO: 7250
  SARS-CoV-2/Iceland/247/2020__EPI_ISL_417575 spike protein (1-1211)(I909C_Y1047C) WhcAg construct

SEQ ID NO: 7296 - protein, 1365 aa, Artificial Sequence
  SARS-CoV-2/Iceland/238/2020__EPI_ISL_417566 spike protein (1-1211)(I909C_Y1047C) WhcAg construct
MFVFLVLLPLVSSQCVNLTTRTQLPPAYTNSFTRGVYYPDKVFRSSVLHSTQDLFLPFFSNVTWFHAIHVSGTNGTKRFDNPVLPFNDGVYFASTEKSNIIRGWIFGTTLDSKTQSLLIVNNATNVVIKVCEFQFCNDPFLGVYYHKNNKSWMESEFRVYSSANNCTFEYVSQPFLMDLEGKQGNFKNLREFVFKNIDGYFKIYSKHTPINLVRDLPQGFSALEPLVDLPIGINITRFQTLLALHRSYLTPGDSSSGWTAGAAAYYVGYLQPRTFLLKYNENGTITDAVDCALDPLSETKCTLKSFTVEKGIYQTSNFRVQPTESIVRFPNITNLCPFGEVFNATRFASVYAWNRKRISNCVADYSVLYNSASFSTFKCYGVSPTKLNDLCFTNVYADSFVIRGDEVRQIAPGQTGKIADYNYKLPDDFTGCVIAWNSNNLDSKVGGNYNYLYRLFRKSNLKPFERDISTEIYQAGSTPCNGVEGFNCYFPLQSYGFQPTNGVGYQPYRVVVLSFELLHAPATVCGPKKSTNLVKNKCVNFNFNGLTGTGVLTESNKKFLPFQQFGRDIADTTDAVRDPQTLEILDITPCSFGGVSVITPGTNTSNQVAVLYQGVNCTEVPVAIHADQLTPTWRVYSTGSNVFQTRAGCLIGAEHVNNSYECDIPIGAGICASYQTQTNSPRRARSVASQSIIAYTMSLGAENSVAYSNNSIAIPTNFTISVTTEILPVSMTKTSVDCTMYICGDSTECSNLLLQYGSFCTQLNRALTGIAVEQDKNTQEVFAQVKQIYKTPPIKDFGGFNFSQILPDPSKPSKRSFIEDLLFNKVTLADVGFIKQYGDCLGDIAARDLICAQKFNGLTVLPPLLTDEMIAQYTSALLAGTITSGWTFGAGAALQIPFAMQMAYRFNGCGVTQNVLYENQKLIANQFNSAIGKIQDSLSSTASALGKLQDVVNQNAQALNTLVKQLSSNFGAISSVLNDILSRLDKVEAEVQIDRLITGRLQSLQTYVTQQLIRAAEIRASANLAATKMSECVLGQSKRVDFCGKGCHLMSFPQSAPHGVVFLHVTYVPAQEKNFTTAPAICHDGKAHFPREGVFVSNGTHWFVTQRNFYEPQIITTDNTFVSGNCDVVIGIVNNTVYDPLQPELDSFKEELDKYFKNHTSPDVDLGDISGINASVVNIQKEIDRLNEVAKNLNESLIDLQELGKYEQYIKGGGGSDIDPYKEFGSSYQLLNFLPLDFFPDLNALVDTATALYEEELTGREHCSPHHTAIRQALVCWDELTKLIAWMSSNITSEQVRTIIVNHVNDTWGLKVRQSLWFHLSCLTFGQHTVQEFLVSFGVWIRTPAPYRPPNAPILSTLPEHTVIC

SEQ ID NO: 7297 - protein, 1365 aa, Artificial Sequence
  SARS-CoV-2/Greece/16/2020__EPI_ISL_418265 spike protein (1-1211)(I909C_Y1047C) WhcAg construct
MFVFLVLLPLVSSQCVNLTTRTQLPPAYTNSFTRGVYYPDKVFRSSVLHSTQDLFLPFFSNVTWFHAIHVSGTNGTKRFDNPVLPFNDGVYFASTEKSNIIRGWIFGTTLDSKTQSLLIVNNATNVVIKVCEFQFCNDPFLGVYYHKNNKSWMESEFRVYSSANNCTFEYVSQPFLMDLEGKQGNFKNLREFVFKNVDGYFKIYSKHTPINLVRDLPQGFSALEPLVDLPIGINITRFQTLLALHRSYLTPGDSSSGWTAGAAAYYVGYLQPRTFLLKYNENGTITDAVDCALDPLSETKCTLKSFTVEKGIYQTSNFRVQPTESIVRFPNITNLCPFGEVFNATRFASVYAWNRKRISNCVADYSVLYNSASFSTFKCYGVSPTKLNDLCFTNVYADSFVIRGDEVRQIAPGQTGKIADYNYKLPDDFTGCVIAWNSNNLDSKVGGNYNYLYRLFRKSNLKPFERDISTEIYQAGSTPCNGVEGFNCYFPLQSYGFQPTNGVGYQPYRVVVLSFELLHAPATVCGPKKSTNLVKNKCVNFNFNGLTGTGVLTESNKKFLPFQQFGRDIADTTDAVRDPQTLEILDITPCSFGGVSVITPGTNTSNQVAVLYQDVNCTEVPVAIHADQLTPTWRVYSTGSNVFQTRAGCLIGAEHVNNSYECDIPIGAGICASYQTQTNSPRRARSVASQSIIAYTMSLGAENSVAYSNNSIAIPTNFTISVTTEILPVSMTKTSVDCTMYICGDSTECSNLLLQYGSFCTQLNRALTGIAVEQDKNTQEVFAQVKQIYKTPPIKDFGGFNFSQILPDPSKPSKRSFIEDLLFNKVTLADAGFIKQYGDCLGDIAARDLICAQKFNGLTVLPPLLTDEMIAQYTSALLAGTITSGWTFGAGAALQIPFAMQMAYRFNGCGVTQNVLYENQKLIANQFNSAIGKIQDSLSSTASALGKLQDVVNQNAQALNTLVKQLSSNFGAISSVLNDILSRLDKVEAEVQIDRLITGRLQSLQTYVTQQLIRAAEIRASANLAATKMSECVLGQSKRVDFCGKGCHLMSFPQSAPHGVVFLHVTYVPAQEKNFTTAPAICHDGKAHFPREGVFVSNGTHWFVTQRNFYEPQIITTDNTFVSGNCDVVIGIVNNTVYDPLQPELDSFKEELDKYFKNHTSPDVDLGDISGINASVVNIQKEIDRLNEVAKNLNESLIDLQELGKYEQYIKGGGGSDIDPYKEFGSSYQLLNFLPLDFFPDLNALVDTATALYEEELTGREHCSPHHTAIRQALVCWDELTKLIAWMSSNITSEQVRTIIVNHVNDTWGLKVRQSLWFHLSCLTFGQHTVQEFLVSFGVWIRTPAPYRPPNAPILSTLPEHTVIC

SEQ ID NO: 7298 - protein, 1365 aa, Artificial Sequence
  SARS-CoV-2/Iceland/319/2020__EPI_ISL_417648 spike protein (1-1211)(I909C_Y1047C) WhcAg construct
MFVFLVLLPLVSSQCVNLTTRTQLPPAYTNSFTRGVYYPDKVFRSSVLHSTQDLFLPFFSNVTWFHAIHVSGTNGTKRFDNPVLPFNDGVYFASTEKSNIIRGWIFGTTLDSKTQSLLIVNNATNVVIKVCEFQFCNDPFLGVYYHKNNKSWMESEFRVYSSANNCTFEYVSQPFLIDLEGKQGNFKNLREFVFKNIDGYFKIYSKHTPINLVRDLPQGFSALEPLVDLPIGINITRFQTLLALHRSYLTPGDSSSGWTAGAAAYYVGYLQPRTFLLKYNENGTITDAVDCALDPLSETKCTLKSFTVEKGIYQTSNFRVQPTESIVRFPNITNLCPFGEVFNATRFASVYAWNRKRISNCVADYSVLYNSASFSTFKCYGVSPTKLNDLCFTNVYADSFVIRGDEVRQIAPGQTGKIADYNYKLPDDFTGCVIAWNSNNLDSKVGGNYNYLYRLFRKSNLKPFERDISTEIYQAGSTPCNGVEGFNCYFPLQSYGFQPTNGVGYQPYRVVVLSFELLHAPATVCGPKKSTNLVKNKCVNFNFNGLTGTGVLTESNKKFLPFQQFGRDIADTTDAVRDPQTLEILDITPCSFGGVSVITPGTNTSNQVAVLYQGVNCTEVPVAIHADQLTPTWRVYSTGSNVFQTRAGCLIGAEHVNNSYECDIPIGAGICASYQTQTNSPRRARSVASQSIIAYTMSLGAENSVAYSNNSIAIPTNFTISVTTEILPVSMTKTSVDCTMYICGDSTECSNLLLQYGSFCTQLNRALTGIAVEQDKNTQEVFAQVKQIYKTPPIKDFGGFNFSQILPDPSKPSKRSFIEDLLFNKVTLADAGFIKQYGDCLGDIAARDLICAQKFNGLTVLPPLLTDEMIAQYTSALLAGTITSGWTFGAGAALQIPFAMQMAYRFNGCGVTQNVLYENQKLIANQFNSAIGKIQDSLSSTASALGKLQDVVNQNAQALNTLVKQLSSNFGAISSVLNDILSRLDKVEAEVQIDRLITGRLQSLQTYVTQQLIRAAEIRASANLAATKMSECVLGQSKRVDFCGKGCHLMSFPQSAPHGVVFLHVTYVPAQEKNFTTAPAICHDGKAHFPREGVFVSNGTHWFVTQRNFYEPQIITTDNTFVSGNCDVVIGIVNNTVYDPLQPELDSFKEELDKYFKNHTSPDVDLGDISGINASVVNIQKEIDRLNEVAKNLNESLIDLQELGKYEQYIKGGGGSDIDPYKEFGSSYQLLNFLPLDFFPDLNALVDTATALYEEELTGREHCSPHHTAIRQALVCWDELTKLIAWMSSNITSEQVRTIIVNHVNDTWGLKVRQSLWFHLSCLTFGQHTVQEFLVSFGVWIRTPAPYRPPNAPILSTLPEHTVIC

SEQ ID NO: 7299 - protein, 1365 aa, Artificial Sequence
  SARS-CoV-2/Congo/94/2020__EPI_ISL_417947 spike protein (1-1211)(I909C_Y1047C) WhcAg construct
MFVFLVLLPLVSSQCVNLTTRTQLPPAYTNSFTRGVYYPDKVFRSSVLHSTQDLFLPFFSNVTWFHAIHVSGTNGTKRFDNPVLPFNDGVYFASTEKSNIIRGWIFGTTLDSKTQSLLIVNNATNVVIKVCEFQFCNDPFLGVYYHKNNKSWMESEFRVYSSANNCTFEYVSQPFLMDLEGKQGNFKNLREFVFKNIDGYFKIYSKHTPINLVRDLPQGFSALEPLVDLPIGINITRFQTLLALHRSYLTPGDSSSGWTAGAAAYYVGYLQPRTFLLKYNENGTITDAVDCALDPLSETKCTLKSFTVEKGIYQTSNFRVQPTESIVRFPNITNLCPFGEVFNATRFASVYAWNRKRISNCVADYSVLYNSASFSTFKCYGVSPTKLNDLCFTNVYADSFVIRGDEVRQIAPGQTGKIADYNYKLPDDFTGCVIAWNSNNLDSKVGGNYNYLYRLFRKSNLKPFERDISTEIYQAGSTPCNGVEGFNCYFPLQSYGFQPTNGVGYQPYRVVVLSFELLHAPATVCGPKKSTNLVKNKCVNFNFNGLTGTGVLTESNKKFLPFQQFGRDIADTTDAVRDPQTLEILDITPCSFGGVSVITPGTNTSNQVAVLYQGVNCTEVPVAIHADQLTPTWRVYSTGSNVFQTRAGCLIGAEHVNNSYECDIPIGAGICASYQTQTNSPRRARSVASQSIIAYTMSLGAENSVAYSNNSIAIPTNFTISVTTEILPVSMTKTSVDCTMYICGDSTECSNLLLQYGSFCTQLNRALTGIAVEQDKNTQEVFAQVKQIYKTPPIKDFGGFNFSQILPDPSKPSKRSFIEDILFNKVTLADAGFIKQYGDCLGDIAARDLICAQKFNGLTVLPPLLTDEMIAQYTSALLAGTITSGWTFGAGAALQIPFAMQMAYRFNGCGVTQNVLYENQKLIANQFNSAIGKIQDSLSSTASALGKLQDVVNQNAQALNTLVKQLSSNFGAISSVLNDILSRLDKVEAEVQIDRLITGRLQSLQTYVTQQLIRAAEIRASANLAATKMSECVLGQSKRVDFCGKGCHLMSFPQSAPHGVVFLHVTYVPAQEKNFTTAPAICHDGKAHFPREGVFVSNGTHWFVTQRNFYEPQIITTDNTFVSGNCDVVIGIVNNTVYDPLQPELDSFKEELDKYFKNHTSPDVDLGDISGINASVVNIQKEIDRLNEVAKNLNESLIDLQELGKYEQYIKGGGGSDIDPYKEFGSSYQLLNFLPLDFFPDLNALVDTATALYEEELTGREHCSPHHTAIRQALVCWDELTKLIAWMSSNITSEQVRTIIVNHVNDTWGLKVRQSLWFHLSCLTFGQHTVQEFLVSFGVWIRTPAPYRPPNAPILSTLPEHTVIC

SEQ ID NO: 7300 - protein, 1365 aa, Artificial Sequence
  SARS-CoV-2/Congo/158/2020__EPI_ISL_417950 spike protein (1-1211)(I909C_Y1047C) WhcAg construct
MFVFLVLLPLVSSQCVNLTTRTQLPPAYTNSFTRGVYYPDKVFRSSVLHSTQDLFLPFFSNVTWFHAIHVSGTNGTKRFDNPVLPFNDGVYFASTEKSNIIRGWIFGTTLDSKTQSLLIVNNATNVVIKVCEFQFCNDPFLGVYYHKNNKSWMESEFRVYSSANNCTFEYVSQPFLMDLEGKQGNFKNLREFVFKNIDGYFKIYSKHTPINLVRDLPQGFSALEPLVDLPIGINITRFQTLLALHRSYLTPGDSSSGWTAGAAAYYVGYLQPRTFLLKYNENGTITDAVDCALDPLSETKCTLKSFTVEKGIYQTSNFRVQPTESIVRFPNITNLCPFGEVFNATRFASVYAWNRKRISNCVADYSVLYNSASFSTFKCYGVSPTKLNDLCFTNVYADSFVIRGDEVRQIAPGQTGKIADYNYKLPDDFTGCVIAWNSNNLDSKVGGNYNYLYRLFRKSNLKPFERDISTEIYQAGSTPCNGVEGFNCYFPLQSYGFQPTNGVGYQPYRVVVLSFELLHAPATVCGPKKSTNLVKNKCVNFNFNGLTGTGVLTESNKKFLPFQQFGRDIADTTDAVRDPQTLEILDITPCSFGGVSVITPGTNTSNQVAVLYQDVNCTEVPVAIHADQLTPTWRVYSTGSNVFQTRAGCLIGAEHVNNSYECDIPIGAGICASYQTQTNSPRRARSVASQSIIAYTMSLGAENSVAYSNNSIAIPTNFTISVTTEILPVSMTKTSVDCTMYICGDSTECSNLLLQYGSFCTQLNRALTGIAVEQDKNTQEVFAQVKQIYKTPPIKDFGGFNFSQILPDPSKPSKRSFIEDLLFNKVTLADAGFIKQYGDCLGDIAARDLICAQKFNGLTVLPPLLTDEMIAQYTSALLAGTITSGWTFGAGAALQIPFAMQMAYRFNGCGVTQNVLYENQKLIANQFNSAIGKIQDSLSSTASALGKLQDVVNQNAQALNTLVKQLSSNFGAISSVLNDILSRLDKVEAEVQIDRLITGRLQSLQTYVTQQLIRAAEIRASANLAATKMSECVLGQSKRVDFCGKGCHLMSFPQSAPHGVVFLHVTYVPAQEKNFTTAPAICHDGKAHFPREGVFVSNGTHWFVTQRNFYEPQIITTDNTFLSGNCDVVIGIVNNTVYDPLQPELDSFKEELDKYFKNHTSPDVDLGDISGINASVVNIQKEIDRLNEVAKNLNESLIDLQELGKYEQYIKGGGGSDIDPYKEFGSSYQLLNFLPLDFFPDLNALVDTATALYEEELTGREHCSPHHTAIRQALVCWDELTKLIAWMSSNITSEQVRTIIVNHVNDTWGLKVRQSLWFHLSCLTFGQHTVQEFLVSFGVWIRTPAPYRPPNAPILSTLPEHTVIC

SEQ ID NO: 7301 - protein, 1365 aa, Artificial Sequence
  SARS-CoV-2/USA/UT-00034/2020__EPI_ISL_417977 spike protein (1-1211)(I909C_Y1047C) WhcAg construct
MFVFLVLLPLVSSQCVNLTTRTQLPPAYTNSFTRGVYYPDKVFRSSVLHSTQDLFLPFFSNVTWFHAIHVSGTNGTKRFDNPVLPFNDGVYFASTEKSNIIRGWIFGTTLDSKTQSLLIVNNATNVVIKVCEFQFCNDPFLGVYYYKNNKSWMESEFRVYSSANNCTFEYVSQPFLMDLEGKQGNFKNLREFVFKNIDGYFKIYSKHTPINLVRDLPQGFSALEPLVDLPIGINITRFQTLLALHRSYLTPGDSSSGWTAGAAAYYVGYLQPRTFLLKYNENGTITDAVDCALDPLSETKCTLKSFTVEKGIYQTSNFRVQPTESIVRFPNITNLCPFGEVFNATRFASVYAWNRKRISNCVADYSVLYNSASFSTFKCYGVSPTKLNDLCFTNVYADSFVIRGDEVRQIAPGQTGKIADYNYKLPDDFTGCVIAWNSNNLDSKVGGNYNYLYRLFRKSNLKPFERDISTEIYQAGSTPCNGVEGFNCYFPLQSYGFQPTNGVGYQPYRVVVLSFELLHAPATVCGPKKSTNLVKNKCVNFNFNGLTGTGVLTESNKKFLPFQQFGRDIADTTDAVRDPQTLEILDITPCSFGGVSVITPGTNTSNQVAVLYQGVNCTEVPVAIHADQLTPTWRVYSTGSNVFQTRAGCLIGAEHVNNSYECDIPIGAGICASYQTQTNSPRRARSVASQSIIAYTMSLGAENSVAYSNNSIAIPTNFTISVTTEILPVSMTKTSVDCTMYICGDSTECSNLLLQYGSFCTQLNRALTGIAVEQDKNTQEVFAQVKQIYKTPPIKDFGGFNFSQILPDPSKPSKRSFIEDLLFNKVTLADAGFIKQYGDCLGDIAARDLICAQKFNGLTVLPPLLTDEMIAQYTSALLAGTITSGWTFGAGAALQIPFAMQMAYRFNGCGVTQNVLYENQKLIANQFNSAIGKIQDSLSSTASALGKLQDVVNQNAQALNTLVKQLSSNFGAISSVLNDILSRLDKVEAEVQIDRLITGRLQSLQTYVTQQLIRAAEIRASANLAATKMSECVLGQSKRVDFCGKGCHLMSFPQSAPHGVVFLHVTYVPAQEKNFTTAPAICHDGKAHFPREGVFVSNGTHWFVTQRNFYEPQIITTDNTFVSGNCDVVIGIVNNTVYDPLQPELDSFKEELDKYFKNHTSPDVDLGDISGINASVVNIQKEIDRLNEVAKNLNESLIDLQELGKYEQYIKGGGGSDIDPYKEFGSSYQLLNFLPLDFFPDLNALVDTATALYEEELTGREHCSPHHTAIRQALVCWDELTKLIAWMSSNITSEQVRTIIVNHVNDTWGLKVRQSLWFHLSCLTFGQHTVQEFLVSFGVWIRTPAPYRPPNAPILSTLPEHTVIC

SEQ ID NO: 7302 - protein, 1365 aa, Artificial Sequence
  SARS-CoV-2/USA/UT-00033/2020__EPI_ISL_417976 spike protein (1-1211)(I909C_Y1047C) WhcAg construct
MFVFLVLLPLVSSQCVNLTTRTQLPPAYTNSFTRGVYYPDKVFRSSVLHSTQDLFLPFFSNVTWFHAIHVSGTNGTKRFDNPVLPFNDGVYFASTEKSNIIRGWIFGTTLDSKTQSLLIVNNATNVVIKVCEFQFCNDPFLGVYYHKNNKSWMESEFRVYSSANNCTFEYVSQPFLMDLEGKQGNFKNLREFVFKNIDGYFKIYSKHTPINLVRDLPQGFSALEPLVDLPIGINITRFQTLLALHRSYLTPGDSSSGLTAGAAAYYVGYLQPRTFLLKYNENGTITDAVDCALDPLSETKCTLKSFTVEKGIYQTSNFRVQPTESIVRFPNITNLCPFGEVFNATRFASVYAWNRKRISNCVADYSVLYNSASFSTFKCYGVSPTKLNDLCFTNVYADSFVIRGDEVRQIAPGQTGKIADYNYKLPDDFTGCVIAWNSNNLDSKVGGNYNYLYRLFRKSNLKPFERDISTEIYQAGSTPCNGVEGFNCYFPLQSYGFQPTNGVGYQPYRVVVLSFELLHAPATVCGPKKSTNLVKNKCVNFNFNGLTGTGVLTESNKKFLPFQQFGRDIADTTDAVRDPQTLEILDITPCSFGGVSVITPGTNTSNQVAVLYQGVNCTEVPVAIHADQLTPTWRVYSTGSNVFQTRAGCLIGAEHVNNSYECDIPIGAGICASYQTQTNSPRRARSVASQSIIAYTMSLGAENSVAYSNNSIAIPTNFTISVTTEILPVSMTKTSVDCTMYICGDSTECSNLLLQYGSFCTQLNRALTGIAVEQDKNTQEVFAQVKQIYKTPPIKDFGGFNFSQILPDPSKPSKRSFIEDLLFNKVTLADAGFIKQYGDCLGDIAARDLICAQKFNGLTVLPPLLTDEMIAQYTSALLAGTITSGWTFGAGAALQIPFAMQMAYRFNGCGVTQNVLYENQKLIANQFNSAIGKIQDSLSSTASALGKLQDVVNQNAQALNTLVKQLSSNFGAISSVLNDILSRLDKVEAEVQIDRLITGRLQSLQTYVTQQLIRAAEIRASANLAATKMSECVLGQSKRVDFCGKGCHLMSFPQSAPHGVVFLHVTYVPAQEKNFTTAPAICHDGKAHFPREGVFVSNGTHWFVTQRNFYEPQIITTDNTFVSGNCDVVIGIVNNTVYDPLQPELDSFKEELDKYFKNHTSPDVDLGDISGINASVVNIQKEIDRLNEVAKNLNESLIDLQELGKYEQYIKGGGGSDIDPYKEFGSSYQLLNFLPLDFFPDLNALVDTATALYEEELTGREHCSPHHTAIRQALVCWDELTKLIAWMSSNITSEQVRTIIVNHVNDTWGLKVRQSLWFHLSCLTFGQHTVQEFLVSFGVWIRTPAPYRPPNAPILSTLPEHTVIC

SEQ ID NO: 7303 - protein, 1365 aa, Artificial Sequence
  SARS-CoV-2/USA/WI-13/2020__EPI_ISL_417516 spike protein (1-1211)(I909C_Y1047C) WhcAg construct
MFVFLVLLPLVSSQCVNLTTRTQLPPAYTNSFTRGVYYPDKVFRSSVLHSTQDLFLPFFSNVTWFHAIHVSGTNGTKRFDNPVLPFNDGVYFASTEKSNIIRGWIFGTTLDSKTQSLLIVNNATNVVIKVCEFQFCNDPFLGVYYHKNNKSWMESEFRVYSSANNCTFEYVSQPFLMDLEGKQGNFKNLREFVFKNIDGYFKIYSKHTPINLVRDLPQGFSALEPLVDLPIGINITRFQTLLALHRSYLTPGDSSSGWTAGAAAYYVGYLQPRTFLLKYNENGTITDAVDCALDPLSETKCTLKSFTVEKGIYQTSNFRVLPTESIVRFPNITNLCPFGEVFNATRFASVYAWNRKRISNCVADYSVLYNSASFSTFKCYGVSPTKLNDLCFTNVYADSFVIRGDEVRQIAPGQTGKIADYNYKLPDDFTGCVIAWNSNNLDSKVGGNYNYLYRLFRKSNLKPFERDISTEIYQAGSTPCNGVEGFNCYFPLQSYGFQPTNGVGYQPYRVVVLSFELLHAPATVCGPKKSTNLVKNKCVNFNFNGLTGTGVLTESNKKFLPFQQFGRDIADTTDAVRDPQTLEILDITPCSFGGVSVITPGTNTSNQVAVLYQGVNCTEVPVAIHADQLTPTWRVYSTGSNVFQTRAGCLIGAEHVNNSYECDIPIGAGICASYQTQTNSPRRARSVASQSIIAYTMSLGAENSVAYSNNSIAIPTNFTISVTTEILPVSMTKTSVDCTMYICGDSTECSNLLLQYGSFCTQLNRALTGIAVEQDKNTQEVFAQVKQIYKTPPIKDFGGFNFSQILPDPSKPSKRSFIEDLLFNKVTLADAGFIKQYGDCLGDIAARDLICAQKFNGLTVLPPLLTDEMIAQYTSALLAGTITSGWTFGAGAALQIPFAMQMAYRFNGCGVTQNVLYENQKLIANQFNSAIGKIQDSLSSTASALGKLQDVVNQNAQALNTLVKQLSSNFGAISSVLNDILSRLDKVEAEVQIDRLITGRLQSLQTYVTQQLIRAAEIRASANLAATKMSECVLGQSKRVDFCGKGCHLMSFPQSAPHGVVFLHVTYVPAQEKNFTTAPAICHDGKAHFPREGVFVSNGTHWFVTQRNFYEPQIITTDNTFVSGNCDVVIGIVNNTVYDPLQPELDSFKEELDKYFKNHTSPDVDLGDISGINASVVNIQKEIDRLNEVAKNLNESLIDLQELGKYEQYIKGGGGSDIDPYKEFGSSYQLLNFLPLDFFPDLNALVDTATALYEEELTGREHCSPHHTAIRQALVCWDELTKLIAWMSSNITSEQVRTIIVNHVNDTWGLKVRQSLWFHLSCLTFGQHTVQEFLVSFGVWIRTPAPYRPPNAPILSTLPEHTVIC

SEQ ID NO: 7304 - protein, 1364 aa, Artificial Sequence
  SARS-CoV-2/India/1-27/2020__EPI_ISL_413522 spike protein (1-1210)(I908C_Y1046C) WhcAg construct
MFVFLVLLPLVSSQCVNLTTRTQLPPAYTNSFTRGVYYPDKVFRSSVLHSTQDLFLPFFSNVTWFHAIHVSGTNGTKRFDNPVLPFNDGVYFASTEKSNIIRGWIFGTTLDSKTQSLLIVNNATNVVIKVCEFQFCNDPFLGVYHKNNKSWMESEFRVYSSANNCTFEYVSQPFLMDLEGKQGNFKNLREFVFKNIDGYFKIYSKHTPINLVRDLPQGFSALEPLVDLPIGINITRFQTLLALHRSYLTPGDSSSGWTAGAAAYYVGYLQPRTFLLKYNENGTITDAVDCALDPLSETKCTLKSFTVEKGIYQTSNFRVQPTESIVRFPNITNLCPFGEVFNATRFASVYAWNRKRISNCVADYSVLYNSASFSTFKCYGVSPTKLNDLCFTNVYADSFVIRGDEVIQIAPGQTGKIADYNYKLPDDFTGCVIAWNSNNLDSKVGGNYNYLYRLFRKSNLKPFERDISTEIYQAGSTPCNGVEGFNCYFPLQSYGFQPTNGVGYQPYRVVVLSFELLHAPATVCGPKKSTNLVKNKCVNFNFNGLTGTGVLTESNKKFLPFQQFGRDIADTTDAVRDPQTLEILDITPCSFGGVSVITPGTNTSNQVAVLYQDVNCTEVPVAIHADQLTPTWRVYSTGSNVFQTRAGCLIGAEHVNNSYECDIPIGAGICASYQTQTNSPRRARSVASQSIIAYTMSLGAENSVAYSNNSIAIPTNFTISVTTEILPVSMTKTSVDCTMYICGDSTECSNLLLQYGSFCTQLNRALTGIAVEQDKNTQEVFAQVKQIYKTPPIKDFGGFNFSQILPDPSKPSKRSFIEDLLFNKVTLADAGFIKQYGDCLGDIAARDLICAQKFNGLTVLPPLLTDEMIAQYTSALLAGTITSGWTFGAGAALQIPFAMQMAYRFNGCGVTQNVLYENQKLIANQFNSAIGKIQDSLSSTASALGKLQDVVNQNAQALNTLVKQLSSNFGAISSVLNDILSRLDKVEAEVQIDRLITGRLQSLQTYVTQQLIRAAEIRASANLAATKMSECVLGQSKRVDFCGKGCHLMSFPQSAPHGVVFLHVTYVPAQEKNFTTAPAICHDGKAHFPREGVFVSNGTHWFVTQRNFYEPQIITTDNTFVSGNCDVVIGIVNNTVYDPLQPELDSFKEELDKYFKNHTSPDVDLGDISGINASVVNIQKEIDRLNEVAKNLNESLIDLQELGKYEQYIKGGGGSDIDPYKEFGSSYQLLNFLPLDFFPDLNALVDTATALYEEELTGREHCSPHHTAIRQALVCWDELTKLIAWMSSNITSEQVRTIIVNHVNDTWGLKVRQSLWFHLSCLTFGQHTVQEFLVSFGVWIRTPAPYRPPNAPILSTLPEHTVIC

SEQ ID NO: 7305 - protein, 1359 aa, Artificial Sequence
  SARS-CoV-2/pangolin/Guangxi/P4L/2017__EPI_ISL_410538 spike protein (1-1205)(I903C_Y1041C) WhcAg construct
MFVFLFVLPLVSSQCVNLTTRTGIPPGYTNSSTRGVYYPDKVFRSSILHLTQDLFLPFFSNVTWFNTINYQGGFKKFDNPVLPFNDGVYFASTEKSNIIRGWIFGTTLDARTQSLLIVNNATNVVIKVCEFQFCTDPFLGVYYHNNNKTWVENEFRVYSSANNCTFEYISQPFLMDLEGKQGNFKNLREFVFKNVDGYFKIYSKHTPIDLVRDLPRGFAALEPLVDLPIGINITRFQTLLALHRSYLTPGNLESGWTTGAAAYYVGYLQQRTFLLSYNQNGTITDAVDCSLDPLSETKCTLKSLTVEKGIYQTSNFRVQPTISIVRFPNITNLCPFGEVFNASKFASVYAWNRKRISNCVADYSVLYNSTSFSTFKCYGVSPTKLNDLCFTNVYADSFVVKGDEVRQIAPGQTGVIADYNYKLPDDFTGCVIAWNSVKQDALTGGNYGYLYRLFRKSKLKPFERDISTEIYQAGSTPCNGQVGLNCYYPLERYGFHPTTGVNYQPFRVVVLSFELLNGPATVCGPKLSTTLVKDKCVNFNFNGLTGTGVLTTSKKQFLPFQQFGRDISDTTDAVRDPQTLEILDITPCSFGGVSVITPGTNTSNQVAVLYQDVNCTEVPMAIHAEQLTPAWRVYSAGANVFQTRAGCLVGAEHVNNSYECDIPVGAGICASYHSMSSLRSVNQRSIIAYTMSLGAENSVAYSNNSIAIPTNFTISVTTEILPVSMTKTSVDCTMYICGDSIECSNLLLQYGSFCTQLNRALTGIAVEQDKNTQEVFAQVKQIYKTPPIKDFGGFNFSQILPDPSKPSKRSFIEDLLFNKVTLADAGFIKQYGDCLGDIAARDLICAQKFNGLTVLPPLLTDEMIAQYTSALLAGTITSGWTFGAGAALQIPFAMQMAYRFNGCGVTQNVLYENQKLIANQFNSAIGKIQDSLSSTASALGKLQDVVNQNAQALNTLVKQLSSNFGAISSVLNDILSRLDKVEAEVQIDRLITGRLQSLQTYVTQQLIRAAEIRASANLAATKMSECVLGQSKRVDFCGKGCHLMSFPQSAPHGVVFLHVTYVPAQEKNFTTAPAICHEGKAHFPREGVFVSNGTHWFITQRNFYEPQIITTDNTFVSGSCDVVIGIVNNTVYDPLQPELDSFKEELDKYFKNHTSPDVDLGDISGINASVVNIQKEIDRLNEVAKNLNESPIDLQELGKYEQYIKGGGGSDIDPYKEFGSSYQLLNFLPLDFFPDLNALVDTATALYEEELTGREHCSPHHTAIRQALVCWDELTKLIAWMSSNITSEQVRTIIVNHVNDTWGLKVRQSLWFHLSCLTFGQHTVQEFLVSFGVWIRTPAPYRPPNAPILSTLPEHTVIC

SEQ ID NO: 7306 - protein, 1359 aa, Artificial Sequence
  SARS-CoV-2/pangolin/Guangxi/P5L/2017__EPI_ISL_410540 spike protein (1-1205)(I903C_Y1041C) WhcAg construct
MFVFLFVLPLVSSQCVNLTTRTGIPPGYTNSSTRGVYYPDKVFRSSILHLTQDLFLPFFSNVTWFNTINYQGGFKKFDNPVLPFNDGVYFASTEKSNIIRGWIFGTTLDARTQSLLIVNNATNVVIKVCEFQFCTDPFLGVYYHNNNKTWVENEFRVYSSANNCTFEYISQPFLMDLEGKQGNFKNLREFVFKNVDGYFKIYSKHTPIDLVRDLPRGFAALEPLVDLPIGINITRFQTLLALHRSYLTPGKLESGWTTGAAAYYVGYLQQRTFLLSYNQNGTITDAVDCSLDPLSETKCTLKSLTVEKGIYQTSNFRVQPTISIVRFPNITNLCPFGEVFNASKFASVYAWNRKRISNCVADYSVLYNSTSFSTFKCYGVSPTKLNDLCFTNVYADSFVVKGDEVRQIAPGQTGVIADYNYKLPDDFTGCVIAWNSVKQDALTGGNYGYLYRLFRKSKLKPFERDISTEIYQAGSTPCNGQVGLNCYYPLERYGFHPTTGVNYQPFRVVVLSFELLNGPATVCGPKLSTTLVKDKCVNFNFNGLTGTGVLTTSKKQFLPFQQFGRDISDTTDAVRDPQTLEILDITPCSFGGVSVITPGTNTSNQVAVLYQDVNCTEVPMAIHAEQLTPAWRVYSAGANVFQTRAGCLVGAEHVNNSYECDIPVGAGICASYHSMSSFRSVNQRSIIAYTMSLGAENSVAYSNNSIAIPTNFTISVTTEILPVSMTKTSVDCTMYICGDSIECSNLLLQYGSFCTQLNRALTGIAVEQDKNTQEVFAQVKQIYKTPPIKDFGGFNFSQILPDPSKPSKRSFIEDLLFNKVTLADAGFIKQYGDCLGDIAARDLICAQKFNGLTVLPPLLTDEMIAQYTSALLAGTITSGWTFGAGAALQIPFAMQMAYRFNGCGVTQNVLYENQKLIANQFNSAIGKIQDSLSSTASALGKLQDVVNQNAQALNTLVKQLSSNFGAISSVLNDILSRLDKVEAEVQIDRLITGRLQSLQTYVTQQLIRAAEIRASANLAATKMSECVLGQSKRVDFCGKGCHLMSFPQSAPHGVVFLHVTYVPAQEKNFTTAPAICHEGKAHFPREGVFVSNGTHWFITQRNFYEPQIITTDNTFVSGSCDVVIGIVNNTVYDPLQPELDSFKEELDKYFKNHTSPDVDLGDISGINASVVNIQKEIDRLNEVAKNLNESLIDLQELGKYEQYIKGGGGSDIDPYKEFGSSYQLLNFLPLDFFPDLNALVDTATALYEEELTGREHCSPHHTAIRQALVCWDELTKLIAWMSSNITSEQVRTIIVNHVNDTWGLKVRQSLWFHLSCLTFGQHTVQEFLVSFGVWIRTPAPYRPPNAPILSTLPEHTVIC

SEQ ID NO: 7307 - protein, 1359 aa, Artificial Sequence
  SARS-CoV-2/pangolin/Guangxi/P5E/2017__EPI_ISL_410541 spike protein (1-1205)(I903C_Y1041C) WhcAg construct
MFVFLFVLPLVSSQCVNLTTRTGIPPGYTNSSTRGVYYPDKVFRSSILHLTQDLFLPFFSNVTWFNTITYQGGSKKFDNPVLPFNDGVYFASTEKSNIIRGWIFGTTLDARTQSLLIVNNATNVVIKVCEFQFCTDPFLGVYYHNNNKTWVENEFRVYSSANNCTFEYISQPFLMDLEGKQGNFKNLREFVFKNVDGYFKIYSKHTPIDLVRDLPRGFAALEPLVDLPIGINITRFQTLLALHRSYLTPGKLESGWTTGAAAYYVGYLQQRTFLLSYNQNGTITDAVDCSLDPLSETKCTLKSLTVEKGIYQTSNFRVQPTISIVRFPNITNLCPFGEVFNASKFASVYAWNRKRISNCVADYSVLYNSTSFSTFKCYGVSPTKLNDLCFTNVYADSFVVKGDEVRQIAPGQTGVIADYNYKLPDDFTGCVIAWNSVKQDALTGDNYGYLYRLFRKSKLKPFERDISTEIYQAGSTPCNGQVGLNCYYPLERYGFHPTTGVNYQPFRVVVLSFELLNGPATVCGPKLSTTLVKDKCVNFNFNGLTGTGVLTTSKKQFLPFQQFGRDISDTTDAVRDPQTLEILDITPCSFGGVSVITPGTNTSNQVAVLYQDVNCTEVPMAIHAEQLTPAWRVYSAGANVFQTRAGCLVGAEHVNNSYECDIPVGAGICASYHSMSSFRSVNQRSIIAYTMSLGAENSVAYSNNSIAIPTNFTISVTTEILPVSMTKTSVDCTMYICGDSIECSNLLLQYGSFCTQLNRALTGIAVEQDKNTQEVFAQVKQIYKTPPIKDFGGFNFSQILPDPSKPSKRSFIEDLLFNKVTLADAGFIKQYGDCLGDIAARDLICAQKFNGLTVLPPLLTDEMIAQYTSALLAGTITSGWTFGAGAALQIPFAMQMAYRFNGCGVTQNVLYENQKLIANQFNSAIGKIQDSLSSTASALGKLQDVVNQNAQALNTLVKQLSSNFGAISSVLNDILSRLDKVEAEVQIDRLITGRLQSLQTYVTQQLIRAAEIRASANLAATKMSECVLGQSKRVDFCGKGCHLMSFPQSAPHGVVFLHVTYVPAQEKNFTTAPAICHEGKAHFPREGVFVSNGTHWFITQRNFYEPQIITTDNTFVSGSCDVVIGIVNNTVYDPLQPELDSFKEELDKYFKNHTSPDVDLGDISGINASVVNIQKEIDRLNEVAKNLNESLIDLQELGKYEQYIKGGGGSDIDPYKEFGSSYQLLNFLPLDFFPDLNALVDTATALYEEELTGREHCSPHHTAIRQALVCWDELTKLIAWMSSNITSEQVRTIIVNHVNDTWGLKVRQSLWFHLSCLTFGQHTVQEFLVSFGVWIRTPAPYRPPNAPILSTLPEHTVIC

SEQ ID NO: 7308 - protein, 1357 aa, Artificial Sequence
  SARS-CoV-2/pangolin/Guangxi/P1E/2017__EPI_ISL_410539 spike protein (1-1203)(I901C_Y1039C) WhcAg construct
MFVFLFVLPLVSSQCVNLTTRTGIQPGYTNSSTRGVYYPDKVFRSSILHLTQDLFLPFFSNVTWFNTINYQGGFKKFDNPVLPFNDGVYFASTEKSNIIRGWIFGTTLDARTQSLLIVNNATNVVIKVCEFQFCTDPFLGVYYHNNNKTWVENEFRVYSSANNCTFEYISQPFLMDLEGKQGNFKNLREFVFKNVDGYFKIYSKHTPIDLVRDLPRGFAALEPLVDLPIGINITRFQTLLALHRSYLTPGKLESGWTTGAAAYYVGYLQQRTFLLSYNQNGTITDAVDCSLDPLSETKCTLKSLTVEKGIYQTSNFRVQPTISIVRFPNITNLCPFGEVFNASKFASVYAWNRKRISNCVADYSVLYNSTSFSTFKCYGVSPTKLNDLCFTNVYADSFVVKGDEVRQIAPGQTGVIADYNYKLPDDFTGCVIAWNSVKQDALTGGNYLYRLFRKSKLKPFERDISTEIYQAGSTPCNGQVGLNCYYPLERYGFHPTTGVNYQPFRVVVLSFELLNGPATVCGPKLSTTLVKDKCVNFNFNGLTGTGVLTTSKKQFLPFQQFGRDISDTTDAVRDPQTLEILDITPCSFGGVSVITPGTNTSNQVAVLYQDVNCTEVPMAIHAEQLTPAWRVYSAGANVFQTRAGCLVGAEHVNNSYECDIPVGAGICASYHSMSSLRSVNQRSIIAYTMSLGAENSVAYSNNSIAIPTNFTISVTTEILPVSMTKTSVDCTMYICGDSIECSNLLLQYGSFCTQLNRALTGIAVEQDKNTQEVFAQVKQIYKTPPIKDFGGFNFSQILPDPSKPSKRSFIEDLLFNKVTLADAGFIKQYGDCLGDIAARDLICAQKFNGLTVLPPLLTDEMIAQYTSALLAGTITSGWTFGAGAALQIPFAMQMAYRFNGCGVTQNVLYENQKLIANQFNSAIGKIQDSLSSTASALGKLQDVVNQNAQALNTLVKQLSSNFGAISSVLNDILSRLDKVEAEVQIDRLITGRLQSLQTYVTQQLIRAAEIRASANLAATKMSECVLGQSKRVDFCGKGCHLMSFPQSAPHGVVFLHVTYVPAQEKNFTTAPAICHEGKAHFPREGVFVSNGTHWFITQRNFYEPQIITTDNTFVSGSCDVVIGIVNNTVYDPLQPELDSFKEELDKYFKNHTSPDVDLGDISGINASVVNIQKEIDRLNEVAKNLNESLIDLQELGKYEQYIKGGGGSDIDPYKEFGSSYQLLNFLPLDFFPDLNALVDTATALYEEELTGREHCSPHHTAIRQALVCWDELTKLIAWMSSNITSEQVRTIIVNHVNDTWGLKVRQSLWFHLSCLTFGQHTVQEFLVSFGVWIRTPAPYRPPNAPILSTLPEHTVIC

SEQ ID NO: 7309 - protein, 1365 aa, Artificial Sequence
  SARS-CoV-2/Wuhan/WIV05/2019__EPI_ISL_402128 spike protein (1-1211)(Q965C_S1003C) WhcAg construct
MFVFLVLLPLVSSQCVNLTTRTQLPPAYTNSFTRGVYYPDKVFRSSVLHSTQDLFLPFFSNVTWFHAIHVSGTNGTKRFDNPVLPFNDGVYFASTEKSNIIRGWIFGTTLDSKTQSLLIVNNATNVVIKVCEFQFCNDPFLGVYYHKNNKSWMESEFRVYSSANNCTFEYVSQPFLMDLEGKQGNFKNLREFVFKNIDGYFKIYSKHTPINLVRDLPQGFSALEPLVDLPIGINITRFQTLLALHRSYLTPGDSSSGWTAGAAAYYVGYLQPRTFLLKYNENGTITDAVDCALDPLSETKCTLKSFTVEKGIYQTSNFRVQPTESIVRFPNITNLCPFGEVFNATRFASVYAWNRKRISNCVADYSVLYNSASFSTFKCYGVSPTKLNDLCFTNVYADSFVIRGDEVRQIAPGQTGKIADYNYKLPDDFTGCVIAWNSNNLDSKVGGNYNYLYRLFRKSNLKPFERDISTEIYQAGSTPCNGVEGFNCYFPLQSYGFQPTNGVGYQPYRVVVLSFELLHAPATVCGPKKSTNLVKNKCVNFNFNGLTGTGVLTESNKKFLPFQQFGRDIADTTDAVRDPQTLEILDITPCSFGGVSVITPGTNTSNQVAVLYQDVNCTEVPVAIHADQLTPTWRVYSTGSNVFQTRAGCLIGAEHVNNSYECDIPIGAGICASYQTQTNSPRRARSVASQSIIAYTMSLGAENSVAYSNNSIAIPTNFTISVTTEILPVSMTKTSVDCTMYICGDSTECSNLLLQYGSFCTQLNRALTGIAVEQDKNTQEVFAQVKQIYKTPPIKDFGGFNFSQILPDPSKPSKRSFIEDLLFNKVTLADAGFIKQYGDCLGDIAARDLICAQKFNGLTVLPPLLTDEMIAQYTSALLAGTITSGWTFGAGAALQIPFAMQMAYRFNGIGVTQNVLYENQKLIANQFNSAIGKIQDSLSSTASALGKLQDVVNQNAQALNTLVKCLSSNFGAISSVLNDILSRLDKVEAEVQIDRLITGRLQCLQTYVTQQLIRAAEIRASANLAATKMSECVLGQSKRVDFCGKGYHLMSFPQSAPHGVVFLHVTYVPAQEKNFTTAPAICHDGKAHFPREGVFVSNGTHWFVTQRNFYEPQIITTDNTFVSGNCDVVIGIVNNTVYDPLQPELDSFKEELDKYFKNHTSPDVDLGDISGINASVVNIQKEIDRLNEVAKNLNESLIDLQELGKYEQYIKGGGGSDIDPYKEFGSSYQLLNFLPLDFFPDLNALVDTATALYEEELTGREHCSPHHTAIRQALVCWDELTKLIAWMSSNITSEQVRTIIVNHVNDTWGLKVRQSLWFHLSCLTFGQHTVQEFLVSFGVWIRTPAPYRPPNAPILSTLPEHTVIC

SEQ ID NO: 7310 - protein, 1361 aa, Artificial Sequence
  SARS-CoV-2/bat/Yunnan/RaTG13/2013__EPI_ISL_402131 spike protein (1-1207)(Q961C_S999C) WhcAg construct
MFVFLVLLPLVSSQCVNLTTRTQLPPAYTNSSTRGVYYPDKVFRSSVLHLTQDLFLPFFSNVTWFHAIHVSGTNGIKRFDNPVLPFNDGVYFASTEKSNIIRGWIFGTTLDSKTQSLLIVNNATNVVIKVCEFQFCNDPFLGVYYHKNNKSWMESEFRVYSSANNCTFEYVSQPFLMDLEGKQGNFKNLREFVFKNIDGYFKIYSKHTPINLVRDLPPGFSALEPLVDLPIGINITRFQTLLALHRSYLTPGDSSSGWTAGAAAYYVGYLQPRTFLLKYNENGTITDAVDCALDPLSETKCTLKSFTVEKGIYQTSNFRVQPTDSIVRFPNITNLCPFGEVFNATTFASVYAWNRKRISNCVADYSVLYNSTSFSTFKCYGVSPTKLNDLCFTNVYADSFVITGDEVRQIAPGQTGKIADYNYKLPDDFTGCVIAWNSKHIDAKEGGNFNYLYRLFRKANLKPFERDISTEIYQAGSKPCNGQTGLNCYYPLYRYGFYPTDGVGHQPYRVVVLSFELLNAPATVCGPKKSTNLVKNKCVNFNFNGLTGTGVLTESNKKFLPFQQFGRDIADTTDAVRDPQTLEILDITPCSFGGVSVITPGTNASNQVAVLYQDVNCTEVPVAIHADQLTPTWRVYSTGSNVFQTRAGCLIGAEHVNNSYECDIPIGAGICASYQTQTNSRSVASQSIIAYTMSLGAENSVAYSNNSIAIPTNFTISVTTEILPVSMTKTSVDCTMYICGDSTECSNLLLQYGSFCTQLNRALTGIAVEQDKNTQEVFAQVKQIYKTPPIKDFGGFNFSQILPDPSKPSKRSFIEDLLFNKVTLADAGFIKQYGDCLGDIAARDLICAQKFNGLTVLPPLLTDEMIAQYTSALLAGTITSGWTFGAGAALQIPFAMQMAYRFNGIGVTQNVLYENQKLIANQFNSAIGKIQDSLSSTASALGKLQDVVNQNAQALNTLVKCLSSNFGAISSVLNDILSRLDKVEAEVQIDRLITGRLQCLQTYVTQQLIRAAEIRASANLAATKMSECVLGQSKRVDFCGKGYHLMSFPQSAPHGVVFLHVTYVPAQEKNFTTAPAICHDGKAHFPREGVFVSNGTHWFVTQRNFYEPQIITTDNTFVSGSCDVVIGIVNNTVYDPLQPELDSFKEELDKYFKNHTSPDVDLGDISGINASVVNIQKEIDRLNEVAKNLNESLIDLQELGKYEQYIKGGGGSDIDPYKEFGSSYQLLNFLPLDFFPDLNALVDTATALYEEELTGREHCSPHHTAIRQALVCWDELTKLIAWMSSNITSEQVRTIIVNHVNDTWGLKVRQSLWFHLSCLTFGQHTVQEFLVSFGVWIRTPAPYRPPNAPILSTLPEHTVIC

SEQ ID NO: 7311 - protein, 1365 aa, Artificial Sequence
  SARS-CoV-2/Wuhan/HBCDC-HB-01/2019__EPI_ISL_402132 spike protein (1-1211)(Q965C_S1003C) WhcAg construct
MFVFLVLLPLVSSQCVNLTTRTQLPPAYTNSITRGVYYPDKVFRSSVLHSTQDLFLPFFSNVTWFHAIHVSGTNGTKRFDNPVLPFNDGVYFASTEKSNIIRGWIFGTTLDSKTQSLLIVNNATNVVIKVCEFQFCNDPFLGVYYHKNNKSWMESEFRVYSSANNCTFEYVSQPFLMDLEGKQGNFKNLREFVFKNIDGYFKIYSKHTPINLVRDLPQGFSALEPLVDLPIGINITRFQTLLALHRSYLTPGDSSSGWTAGAAAYYVGYLQPRTFLLKYNENGTITDAVDCALDPLSETKCTLKSFTVEKGIYQTSNFRVQPTESIVRFPNITNLCPFGEVFNATRFASVYAWNRKRISNCVADYSVLYNSASFSTFKCYGVSPTKLNDLCFTNVYADSFVIRGDEVRQIAPGQTGKIADYNYKLPDDFTGCVIAWNSNNLDSKVGGNYNYLYRLFRKSNLKPFERDISTEIYQAGSTPCNGVEGFNCYFPLQSYGFQPTNGVGYQPYRVVVLSFELLHAPATVCGPKKSTNLVKNKCVNFNFNGLTGTGVLTESNKKFLPFQQFGRDIADTTDAVRDPQTLEILDITPCSFGGVSVITPGTNTSNQVAVLYQDVNCTEVPVAIHADQLTPTWRVYSTGSNVFQTRAGCLIGAEHVNNSYECDIPIGAGICASYQTQTNSPRRARSVASQSIIAYTMSLGAENSVAYSNNSIAIPTNFTISVTTEILPVSMTKTSVDCTMYICGDSTECSNLLLQYGSFCTQLNRALTGIAVEQDKNTQEVFAQVKQIYKTPPIKDFGGFNFSQILPDPSKPSKRSFIEDLLFNKVTLADAGFIKQYGDCLGDIAARDLICAQKFNGLTVLPPLLTDEMIAQYTSALLAGTITSGWTFGAGAALQIPFAMQMAYRFNGIGVTQNVLYENQKLIANQFNSAIGKIQDSLSSTASALGKLQDVVNQNAQALNTLVKCLSSNFGAISSVLNDILSRLDKVEAEVQIDRLITGRLQCLQTYVTQQLIRAAEIRASANLAATKMSECVLGQSKRVDFCGKGYHLMSFPQSAPHGVVFLHVTYVPAQEKNFTTAPAICHDGKAHFPREGVFVSNGTHWFVTQRNFYEPQIITTDNTFVSGNCDVVIGIVNNTVYDPLQPELDSFKEELDKYFKNHTSPDVDLGDISGINASVVNIQKEIDRLNEVAKNLNESLIDLQELGKYEQYIKGGGGSDIDPYKEFGSSYQLLNFLPLDFFPDLNALVDTATALYEEELTGREHCSPHHTAIRQALVCWDELTKLIAWMSSNITSEQVRTIIVNHVNDTWGLKVRQSLWFHLSCLTFGQHTVQEFLVSFGVWIRTPAPYRPPNAPILSTLPEHTVIC

SEQ ID NO: 7312 - protein, 1365 aa, Artificial Sequence
  SARS-CoV-2/Guangdong/20SF028/2020__EPI_ISL_403936 spike protein (1-1211)(Q965C_S1003C) WhcAg construct
MFVFLVLLPLVSSQCVNLTTRTQLPPAYTNSFTRGVYYPDKVFRSSVLYSTQDLFLPFFSNVTWFHAIHVSGTNGTKRFDNPVLPFNDGVYFASTEKSNIIRGWIFGTTLDSKTQSLLIVNNATNVVIKVCEFQFCNDPFLGVYYHKNNKSWMESEFRVYSSANNCTFEYVSQPFLMDLEGKQGNFKNLREFVFKNIDGYFKIYSKHTPINLVRDLPQGFSALEPLVDLPIGINITRFQTLLALHRSYLTPGDSSSGWTAGAAAYYVGYLQPRTFLLKYNENGTITDAVDCALDPLSETKCTLKSFTVEKGIYQTSNFRVQPTESIVRFPNITNLCPFGEVFNATRFASVYAWNRKRISNCVADYSVLYNSASFSTFKCYGVSPTKLNDLCFTNVYADSFVIRGDEVRQIAPGQTGKIADYNYKLPDDFTGCVIAWNSNNLDSKVGGNYNYLYRLFRKSNLKPFERDISTEIYQAGSTPCNGVEGFNCYFPLQSYGFQPTNGVGYQPYRVVVLSFELLHAPATVCGPKKSTNLVKNKCVNFNFNGLTGTGVLTESNKKFLPFQQFGRDIADTTDAVRDPQTLEILDITPCSFGGVSVITPGTNTSNQVAVLYQDVNCTEVPVAIHADQLTPTWRVYSTGSNVFQTRAGCLIGAEHVNNSYECDIPIGAGICASYQTQTNSPRRARSVASQSIIAYTMSLGAENSVAYSNNSIAIPTNFTISVTTEILPVSMTKTSVDCTMYICGDSTECSNLLLQYGSFCTQLNRALTGIAVEQDKNTQEVFAQVKQIYKTPPIKDFGGFNFSQILPDPSKPSKRSFIEDLLFNKVTLADAGFIKQYGDCLGDIAARDLICAQKFNGLTVLPPLLTDEMIAQYTSALLAGTITSGWTFGAGAALQIPFAMQMAYRFNGIGVTQNVLYENQKLIANQFNSAIGKIQDSLSSTASALGKLQDVVNQNAQALNTLVKCLSSNFGAISSVLNDILSRLDKVEAEVQIDRLITGRLQCLQTYVTQQLIRAAEIRASANLAATKMSECVLGQSKRVDFCGKGYHLMSFPQSAPHGVVFLHVTYVPAQEKNFTTAPAICHDGKAHFPREGVFVSNGTHWFVTQRNFYEPQIITTDNTFVSGNCDVVIGIVNNTVYDPLQPELDSFKEELDKYFKNHTSPDVDLGDISGINASVVNIQKEIDRLNEVAKNLNESLIDLQELGKYEQYIKGGGGSDIDPYKEFGSSYQLLNFLPLDFFPDLNALVDTATALYEEELTGREHCSPHHTAIRQALVCWDELTKLIAWMSSNITSEQVRTIIVNHVNDTWGLKVRQSLWFHLSCLTFGQHTVQEFLVSFGVWIRTPAPYRPPNAPILSTLPEHTVIC

SEQ ID NO: 7313 - protein, 1365 aa, Artificial Sequence
  SARS-CoV-2/Shenzhen/SZTH-001/2020__EPI_ISL_406592 spike protein (1-1211)(Q965C_S1003C) WhcAg construct
MFVFLVLLPLVSSQCVNLTTRTQLPPAYTNSFTRGVYYPDKVFRSSVLHSTQDLFLPFFSNVTWFHAIHVSGTNGTKRFDNPVLPFNDGVYFASTEKSNIIRGWIFGTTLDSKTQSLLIVNNATNVVIKVCEFQFCNDPFLGVYYHKNNKSWMESEFRVYSSANNCTFEYVSQPFLMDLEGKQGNFKNLREFVFKNIDGYFKIYSKHTPINLVRDLPQGFSALEPLVDLPIGINITRFQTLLALHRSYLTPGDSSSGWTAGAAAYYVGYLQPRTFLLKYNENGTITDAVDCALDPLSETKCTLKSFTVEKGIYQTSNFRVQPTESIVRFPNITNLCPFGEVFNATRFASVYAWNRKRISNCVADYSVLYNSASFSTFKCYGVSPTKLNDLCFTNVYADSFVIRGDEVRQIAPGQTGKIADYNYKLPDDFTGCVIAWNSNNLDSKVGGNYNYLYRLFRKSNLKPFERDISTEIYQAGSTPCNGVEGFNCYFPLQSYGFQPTNGVGYQPYRVVVLSFELLHAPATVCGPKKSTNLVKNKCVNFNFNGLTGTGVLTESNKKFLPFQQFGRDIADTTDAVRDPQTLEILDITPCSFGGVSVITPGTNTSNQVAVLYQDVNCTEVPVAIHADQLTPTWRVYSTGSNVFQTRAGCLIGAEHVNNSYECDIPIGAGICASYQTQTNSPRRARSVASQSIIAYTMSLGAENSVAYSNNSIAIPTNFTISVTTEILPVSMTKTSVDCTMYICGDSTECSNLLLQYGSFCTQLNRALTGIAVEQDKNTQEVFAQVKQIYKTPPIKDFGGFNFSQILPDPSKPSKRSFIEDLLFNKVTLADAGFIKQYGDCLGDIAARDLICAQKFNGLTVLPPLLTDEMIAQYTSALLAGTITSGWTFGAGAALQIPFAMQMAYRFNGIGVTQNVLYENQKLIANQFNSAIGKIQDSLSSTASALGKLQDVVNQNAQALNTLVKCLSSNFGAISSVLNDILSRLDKVEAEVQIDRLITGRLQCLQTYVTQQLIRAAEIRASANLAATKMSECVLGQSKRVDFCGKGYHLMSFPQSAPHGVVFLHVTYVPAQEKNFTTAPAICHDGKAHFPREGVFVSNGTHWFVTQRNFYEPQIITTDNTFVSGNCDVLIGIVNNTVYDPLQPELDSFKEELDKYFKNHTSPDVDLGDISGINASVVNIQKEIDRLNEVAKNLNESLIDLQELGKYEQYIKGGGGSDIDPYKEFGSSYQLLNFLPLDFFPDLNALVDTATALYEEELTGREHCSPHHTAIRQALVCWDELTKLIAWMSSNITSEQVRTIIVNHVNDTWGLKVRQSLWFHLSCLTFGQHTVQEFLVSFGVWIRTPAPYRPPNAPILSTLPEHTVIC

SEQ ID NO: 7314 - protein, 1365 aa, Artificial Sequence
  SARS-CoV-2/Shenzhen/SZTH-004/2020__EPI_ISL_406595 spike protein (1-1211)(Q965C_S1003C) WhcAg construct
MFVFLVLLPLVSSQCVNLTTRTQLPPAYTNSFTRGVYYPDKVFRSSVLHSTQDLFLPFFSNVTWFHAIHVSGTNGTKRFDNPVLPFNDGVYFASTEKSNIIRGWIFGTTLDSKTQSLLIVNNATNVVIKVCEFQFCNDPFLGVYYHKNNKSWMESEFRVYSSANNCTFEYVSQPFLMDLEGKQGNFKNLREFVFKNIDGYFKIYSKHTPINLVRDLPQGFSALEPLVDLPIGINITRFQTLLALHRSYLTPGDSSSGWTAGAAAYYVGYLQPRTFLLKYNENGTITDAVDCALDPLSETKCTLKSFTVEKGIYQTSNFRVQPTESIVRFPNITNLCPFGEVFNATRFASVYAWDRKRISNCVAYYSVLYNSASFSTFKCYGVSPTKLNDLCFTNVYADSFVIRGDEVRQIAPGQTGKIADYNYKLPDDFTGCVIAWNSNNLDSKVGGNYNYLYRLFRKSNLKPFERDISTEIYQAGSTPCNGVEGFNCYFPLQSYGFQPTNGVGYQPYRVVVLSFELLHAPATVCGPKKSTNLVKNKCVNFNFNGLTGTGVLTESNKKFLPFQQFGRDIADTTDAVRDPQTLEILDITPCSFGGVSVITPGTNTSNQVAVLYQDVNCTEVPVAIHADQLTPTWRVYSTGSNVFQTRAGCLIGAEHVNNSYECDIPIGAGICASYQTQTNSPRRARSVASQSIIAYTMSLGAENSVAYSNNSIAIPTNFTISVTTEILPVSMTKTSVDCTMYICGDSTECSNLLLQYGSFCTQLNRALTGIAVEQDKNTQEVFAQVKQIYKTPPIKDFGGFNFSQILPDPSKPSKRSFIEDLLFNKVTLADAGFIKQYGDCLGDIAARDLICAQKFNGLTVLPPLLTDEMIAQYTSALLAGTITSGWTFGAGAALQIPFAMQMAYRFNGIGVTQNVLYENQKLIANQFNSAIGKIQDSLSSTASALGKLQDVVNQNAQALNTLVKCLSSNFGAISSVLNDILSRLDKVEAEVQIDRLITGRLQCLQTYVTQQLIRAAEIRASANLAATKMSECVLGQSKRVDFCGKGYHLMSFPQSAPHGVVFLHVTYVPAQEKNFTTAPAICHDGKAHFPREGVFVSNGTHWFVTQRNFYEPQIITTDNTFVSGNCDVVIGIVNNTVYDPLQPELDSFKEELDKYFKNHTSPDVDLGDISGINASVVNIQKEIDRLNEVAKNLNESLIDLQELGKYEQYIKGGGGSDIDPYKEFGSSYQLLNFLPLDFFPDLNALVDTATALYEEELTGREHCSPHHTAIRQALVCWDELTKLIAWMSSNITSEQVRTIIVNHVNDTWGLKVRQSLWFHLSCLTFGQHTVQEFLVSFGVWIRTPAPYRPPNAPILSTLPEHTVIC

SEQ ID NO: 7315 - protein, 1365 aa, Artificial Sequence
  SARS-CoV-2/France/IDF0372/2020__EPI_ISL_406596 spike protein (1-1211)(Q965C_S1003C) WhcAg construct
MFVFLVLLPLVSSQCVNLTTRTQLPPAYTNSFTRGVYYPDKVFRSSVLHSTQDLFLPFFSNVTWFHAIHVSGTNGTKRFDNPVLPFNDGVYFASTEKSNIIRGWIFGTTLDSKTQSLLIVNNATNVVIKVCEFQFCNDPFLGVYYHKNNKSWMESEFRVYSSANNCTFEYVSQPFLMDLEGKQGNFKNLREFVFKNIDGYFKIYSKHTPINLVRDLPQGFSALEPLVDLPIGINITRFQTLLALHRSYLTPGDSSSGWTAGAAAYYVGYLQPRTFLLKYNENGTITDAVDCALDPLSETKCTLKSFTVEKGIYQTSNFRVQPTESIVRFPNITNLCPFGEVFNATRFASVYAWNRKRISNCVADYSFLYNSASFSTFKCYGVSPTKLNDLCFTNVYADSFVIRGDEVRQIAPGQTGKIADYNYKLPDDFTGCVIAWNSNNLDSKVGGNYNYLYRLFRKSNLKPFERDISTEIYQAGSTPCNGVEGFNCYFPLQSYGFQPTNGVGYQPYRVVVLSFELLHAPATVCGPKKSTNLVKNKCVNFNFNGLTGTGVLTESNKKFLPFQQFGRDIADTTDAVRDPQTLEILDITPCSFGGVSVITPGTNTSNQVAVLYQDVNCTEVPVAIHADQLTPTWRVYSTGSNVFQTRAGCLIGAEHVNNSYECDIPIGAGICASYQTQTNSPRRARSVASQSIIAYTMSLGAENSVAYSNNSIAIPTNFTISVTTEILPVSMTKTSVDCTMYICGDSTECSNLLLQYGSFCTQLNRALTGIAVEQDKNTQEVFAQVKQIYKTPPIKDFGGFNFSQILPDPSKPSKRSFIEDLLFNKVTLADAGFIKQYGDCLGDIAARDLICAQKFNGLTVLPPLLTDEMIAQYTSALLAGTITSGWTFGAGAALQIPFAMQMAYRFNGIGVTQNVLYENQKLIANQFNSAIGKIQDSLSSTASALGKLQDVVNQNAQALNTLVKCLSSNFGAISSVLNDILSRLDKVEAEVQIDRLITGRLQCLQTYVTQQLIRAAEIRASANLAATKMSECVLGQSKRVDFCGKGYHLMSFPQSAPHGVVFLHVTYVPAQEKNFTTAPAICHDGKAHFPREGVFVSNGTHWFVTQRNFYEPQIITTDNTFVSGNCDVVIGIVNNTVYDPLQPELDSFKEELDKYFKNHTSPDVDLGDISGINASVVNIQKEIDRLNEVAKNLNESLIDLQELGKYEQYIKGGGGSDIDPYKEFGSSYQLLNFLPLDFFPDLNALVDTATALYEEELTGREHCSPHHTAIRQALVCWDELTKLIAWMSSNITSEQVRTIIVNHVNDTWGLKVRQSLWFHLSCLTFGQHTVQEFLVSFGVWIRTPAPYRPPNAPILSTLPEHTVIC

SEQ ID NO: 7316 - protein, 1365 aa, Artificial Sequence
  SARS-CoV-2/Australia/VIC01/2020__EPI_ISL_406844 spike protein (1-1211)(Q965C_S1003C) WhcAg construct
MFVFLVLLPLVSSQCVNLTTRTQLPPAYTNSFTRGVYYPDKVFRSSVLHSTQDLFLPFFSNVTWFHAIHVSGTNGTKRFDNPVLPFNDGVYFASTEKSNIIRGWIFGTTLDSKTQSLLIVNNATNVVIKVCEFQFCNDPFLGVYYHKNNKSWMESEFRVYSSANNCTFEYVSQPFLMDLEGKQGNFKNLREFVFKNIDGYFKIYSKHTPINLVRDLPQGFSALEPLVDLPIGINITRFQTLLALHRRYLTPGDSSSGWTAGAAAYYVGYLQPRTFLLKYNENGTITDAVDCALDPLSETKCTLKSFTVEKGIYQTSNFRVQPTESIVRFPNITNLCPFGEVFNATRFASVYAWNRKRISNCVADYSVLYNSASFSTFKCYGVSPTKLNDLCFTNVYADSFVIRGDEVRQIAPGQTGKIADYNYKLPDDFTGCVIAWNSNNLDSKVGGNYNYLYRLFRKSNLKPFERDISTEIYQAGSTPCNGVEGFNCYFPLQSYGFQPTNGVGYQPYRVVVLSFELLHAPATVCGPKKSTNLVKNKCVNFNFNGLTGTGVLTESNKKFLPFQQFGRDIADTTDAVRDPQTLEILDITPCSFGGVSVITPGTNTSNQVAVLYQDVNCTEVPVAIHADQLTPTWRVYSTGSNVFQTRAGCLIGAEHVNNSYECDIPIGAGICASYQTQTNSPRRARSVASQSIIAYTMSLGAENSVAYSNNSIAIPTNFTISVTTEILPVSMTKTSVDCTMYICGDSTECSNLLLQYGSFCTQLNRALTGIAVEQDKNTQEVFAQVKQIYKTPPIKDFGGFNFSQILPDPSKPSKRSFIEDLLFNKVTLADAGFIKQYGDCLGDIAARDLICAQKFNGLTVLPPLLTDEMIAQYTSALLAGTITSGWTFGAGAALQIPFAMQMAYRFNGIGVTQNVLYENQKLIANQFNSAIGKIQDSLSSTASALGKLQDVVNQNAQALNTLVKCLSSNFGAISSVLNDILSRLDKVEAEVQIDRLITGRLQCLQTYVTQQLIRAAEIRASANLAATKMSECVLGQSKRVDFCGKGYHLMSFPQSAPHGVVFLHVTYVPAQEKNFTTAPAICHDGKAHFPREGVFVSNGTHWFVTQRNFYEPQIITTDNTFVSGNCDVVIGIVNNTVYDPLQPELDSFKEELDKYFKNHTSPDVDLGDISGINASVVNIQKEIDRLNEVAKNLNESLIDLQELGKYEQYIKGGGGSDIDPYKEFGSSYQLLNFLPLDFFPDLNALVDTATALYEEELTGREHCSPHHTAIRQALVCWDELTKLIAWMSSNITSEQVRTIIVNHVNDTWGLKVRQSLWFHLSCLTFGQHTVQEFLVSFGVWIRTPAPYRPPNAPILSTLPEHTVIC

SEQ ID NO: 7317 - protein, 1365 aa, Artificial Sequence
  SARS-CoV-2/Germany/BavPat1/2020__EPI_ISL_406862 spike protein (1-1211)(Q965C_S1003C) WhcAg construct
MFVFLVLLPLVSSQCVNLTTRTQLPPAYTNSFTRGVYYPDKVFRSSVLHSTQDLFLPFFSNVTWFHAIHVSGTNGTKRFDNPVLPFNDGVYFASTEKSNIIRGWIFGTTLDSKTQSLLIVNNATNVVIKVCEFQFCNDPFLGVYYHKNNKSWMESEFRVYSSANNCTFEYVSQPFLMDLEGKQGNFKNLREFVFKNIDGYFKIYSKHTPINLVRDLPQGFSALEPLVDLPIGINITRFQTLLALHRSYLTPGDSSSGWTAGAAAYYVGYLQPRTFLLKYNENGTITDAVDCALDPLSETKCTLKSFTVEKGIYQTSNFRVQPTESIVRFPNITNLCPFGEVFNATRFASVYAWNRKRISNCVADYSVLYNSASFSTFKCYGVSPTKLNDLCFTNVYADSFVIRGDEVRQIAPGQTGKIADYNYKLPDDFTGCVIAWNSNNLDSKVGGNYNYLYRLFRKSNLKPFERDISTEIYQAGSTPCNGVEGFNCYFPLQSYGFQPTNGVGYQPYRVVVLSFELLHAPATVCGPKKSTNLVKNKCVNFNFNGLTGTGVLTESNKKFLPFQQFGRDIADTTDAVRDPQTLEILDITPCSFGGVSVITPGTNTSNQVAVLYQGVNCTEVPVAIHADQLTPTWRVYSTGSNVFQTRAGCLIGAEHVNNSYECDIPIGAGICASYQTQTNSPRRARSVASQSIIAYTMSLGAENSVAYSNNSIAIPTNFTISVTTEILPVSMTKTSVDCTMYICGDSTECSNLLLQYGSFCTQLNRALTGIAVEQDKNTQEVFAQVKQIYKTPPIKDFGGFNFSQILPDPSKPSKRSFIEDLLFNKVTLADAGFIKQYGDCLGDIAARDLICAQKFNGLTVLPPLLTDEMIAQYTSALLAGTITSGWTFGAGAALQIPFAMQMAYRFNGIGVTQNVLYENQKLIANQFNSAIGKIQDSLSSTASALGKLQDVVNQNAQALNTLVKCLSSNFGAISSVLNDILSRLDKVEAEVQIDRLITGRLQCLQTYVTQQLIRAAEIRASANLAATKMSECVLGQSKRVDFCGKGYHLMSFPQSAPHGVVFLHVTYVPAQEKNFTTAPAICHDGKAHFPREGVFVSNGTHWFVTQRNFYEPQIITTDNTFVSGNCDVVIGIVNNTVYDPLQPELDSFKEELDKYFKNHTSPDVDLGDISGINASVVNIQKEIDRLNEVAKNLNESLIDLQELGKYEQYIKGGGGSDIDPYKEFGSSYQLLNFLPLDFFPDLNALVDTATALYEEELTGREHCSPHHTAIRQALVCWDELTKLIAWMSSNITSEQVRTIIVNHVNDTWGLKVRQSLWFHLSCLTFGQHTVQEFLVSFGVWIRTPAPYRPPNAPILSTLPEHTVIC

SEQ ID NO: 7318 - protein, 1365 aa, Artificial Sequence
  SARS-CoV-2/Wuhan/HBCDC-HB-02/2020__EPI_ISL_412978 spike protein (1-1211)(Q965C_S1003C) WhcAg construct
MFVFLVLLPLVSSQCVNLTTRTQLPPAYTNSFTRGVYYPDKVFRSSVLHSTQDLFLPFFSNVTWFHAIHVSGTNGTKRFDNPVLPFNDGVYFASTEKSNIIRGWIFGTTLDSKTQSLLIVNNATNVVIKVCEFQFCNDPFLGVYYHKNNKSWMESEFRVYSSANNCTFEYVSQPFLMDLEGKQGNFKNLREFVFKNIDGYFKIYSKHTPINLVRDLPQGFSALEPLVDLPIGINITRFQTLLALHRSYLTPGDSSSGWTAGAAAYYVGYLQPRTFLLKYNENGTITDAVDCALDPLSETKCTLKSFTVEKGIYQTSNFRVQPTESIVRFPNITNLCPFGEVFNATRFASVYAWNRKRISNCVADYSVLYNSASFSTFKCYGVSPTKLNDLCFTNVYADSFVIRGDEVRQIAPGQTGKIADYNYKLPDDFTGCVIAWNSNNLDSKVGGNYNYLYRLFRKSNLKPFERDISTEIYQAGSTPCNGVEGFNCYFPLQSYGFQPTNGVGYQPYRVVVLSFELLHAPATVCGPKKSTNLVKNKCVNFNFNGLTGTGVLTESNKKFLPFQQFGRDIADTTDAVRDPQTLEILDITPCSFGGVSVITPGTNTSNQVAVLYQDVNCTEVPVAIHADQLTPTWRVYSTGSNVFQTRAGCLIGAEHVNNSYECDIPIGAGICASYQTQTNSPRRARSVASQSIIAYTMSLGAENSVAYSNNSIAIPTNFTISVTTEILPVSMTKTSVDCTMYICGDSTECSNFLLQYGSFCTQLNRALTGIAVEQDKNTQEVFAQVKQIYKTPPIKDFGGFNFSQILPDPSKPSKRSFIEDLLFNKVTLADAGFIKQYGDCLGDIAARDLICAQKFNGLTVLPPLLTDEMIAQYTSALLAGTITSGWTFGAGAALQIPFAMQMAYRFNGIGVTQNVLYENQKLIANQFNSAIGKIQDSLSSTASALGKLQDVVNQNAQALNTLVKCLSSNFGAISSVLNDILSRLDKVEAEVQIDRLITGRLQCLQTYVTQQLIRAAEIRASANLAATKMSECVLGQSKRVDFCGKGYHLMSFPQSAPHGVVFLHVTYVPAQEKNFTTAPAICHDGKAHFPREGVFVSNGTHWFVTQRNFYEPQIITTDNTFVSGNCDVVIGIVNNTVYDPLQPELDSFKEELDKYFKNHTSPDVDLGDISGINASVVNIQKEIDRLNEVAKNLNESLIDLQELGKYEQYIKGGGGSDIDPYKEFGSSYQLLNFLPLDFFPDLNALVDTATALYEEELTGREHCSPHHTAIRQALVCWDELTKLIAWMSSNITSEQVRTIIVNHVNDTWGLKVRQSLWFHLSCLTFGQHTVQEFLVSFGVWIRTPAPYRPPNAPILSTLPEHTVIC

SEQ ID NO: 7319 - protein, 1365 aa, Artificial Sequence
  SARS-CoV-2/Australia/QLD02/2020__EPI_ISL_407896 spike protein (1-1211)(Q965C_S1003C) WhcAg construct
MFVFLVLLPLVSSQCVNLTTRTQLPPAYTNSFTRGVYYPDKVFRSSVLHSTQDLFLPFFSNVTWFHAIHVSGTNGTKRFDNPVLPFNDGVYFASTEKSNIIRGWIFGTTLDSKTQSLLIVNNATNVVIKVCEFQFCNDPFLGVYYHKNNKSWMESEFRVYSSANNCTFEYVSQPFLMDLEGKQGNFKNLREFVFKNIDGYFKIYSKHTPINLVRDLPQGFSALEPLVDLPIGINITRFQTLLALHRSYLTPGDSSSGWTAGAAAYYVGYLQPRTFLLKYNENGTITDAVDCALDPLSETKCTLKSFTVEKGIYQTSNFRVQPTESIVRFPNITNLCPFGEVFNATRFASVYAWNRKRISNCVADYSVLYNSASFSTFKCYGVSPTKLNDLCFTNVYADSFVIRGDEVRQIAPGQTGKIADYNYKLPDDFTGCVIAWNSNNLDSKVGGNYNYLYRLFRKSNLKPFERDISTEIYQAGSTPCNGVEGFNCYFPLQSYGFQPTNGVGYQPYRVVVLSFELLHAPATVCGPKKSTNLVKNKCVNFNFNGLTGTGVLTESNKKFLPFQQFGRDIADTTDAVRDPQTLEILDITPCSFGGVSVITPGTNTSNQVAVLYQDVNCTEVPVAIHADQLTPTWRVYSTGSNVFQTRAGCLIGAEHVNNSYECDIPIGAGICASYQTQTNSPRRARSVASQSIIAYTMSLGAENSVAYSNNSIAIPTNFTISVTTEILPVSMTKTSVDCTMYICGDSTECSNLLLQYGSFCTQLNRALTGIAVEQDKNTQEVFAQVKQIYKTPPIKDFGGFNFSQILPDPSKPSKRSFIEDLLFNKVTLADAGFIKQYGDCLGDIAARDLICAQKFNGLTVLPPLLTDEMIAQYTSALLAGTITSGWTFGAGAALQIPFAMQMAYRFNGIGVTQNVLYENQKLIANQFNSAIGKIQDSLSSTASALGKLQDVVNQNAQALNTLVKCLSSNFGAISSVLNDILSRLDKVEAEVQIDRLITGRLQCLQTYVTQQLIRAAEIRASANLAATKMSECVLGQSKRVDFCGKGYHLMSFPQSAPHGVVFLHVTYVPAQEKNFTTAPAICHDGKAHFPREGVFVSNGTHWFVTQRNFYEPQIITTDNTFVSGNCDVVIGIVNNTVYDPLQLELDSFKEELDKYFKNHTSPDVDLGDISGINASVVNIQKEIDRLNEVAKNLNESLIDLQELGKYEQYIKGGGGSDIDPYKEFGSSYQLLNFLPLDFFPDLNALVDTATALYEEELTGREHCSPHHTAIRQALVCWDELTKLIAWMSSNITSEQVRTIIVNHVNDTWGLKVRQSLWFHLSCLTFGQHTVQEFLVSFGVWIRTPAPYRPPNAPILSTLPEHTVIC

SEQ ID NO: 7320 - protein, 1365 aa, Artificial Sequence
  SARS-CoV-2/India/1-31/2020__EPI_ISL_413523 spike protein (1-1211)(Q965C_S1003C) WhcAg construct
MFVFLVLLPLVSSQCVNLTTRTQLPPAYTNSFTRGVYYPDKVFRSSVLHSTQDLFLPFFSNVTWFHAIHVSGTNGTKRFDNPVLPFNDGVYFASTEKSNIIRGWIFGTTLDSKTQSLLIVNNATNVVIKVCEFQFCNDPFLGVYYHKNNKSWMESEFRVYSSANNCTFEYVSQPFLMDLEGKQGNFKNLREFVFKNIDGYFKIYSKHTPINLVRDLPQGFSALEPLVDLPIGINITRFQTLLALHRSYLTPGDSSSGWTAGAAAYYVGYLQPRTFLLKYNENGTITDAVDCALDPLSETKCTLKSFTVEKGIYQTSNFRVQPTESIVRFPNITNLCPFGEVFNATRFASVYAWNRKRISNCVADYSVLYNSASFSTFKCYGVSPTKLNDLCFTNVYADSFVIRGDEVRQIAPGQTGKIADYNYKLPDDFTGCVIAWNSNNLDSKVGGNYNYLYRLFRKSNLKPFERDISTEIYQAGSTPCNGVEGFNCYFPLQSYGFQPTNGVGYQPYRVVVLSFELLHAPATVCGPKKSTNLVKNKCVNFNFNGLTGTGVLTESNKKFLPFQQFGRDIADTTDAVRDPQTLEILDITPCSFGGVSVITPGTNTSNQVAVLYQDVNCTEVPVAIHADQLTPTWRVYSTGSNVFQTRAGCLIGAEHVNNSYECDIPIGAGICASYQTQTNSPRRARSVASQSIIAYTMSLGAENSVAYSNNSIAIPTNFTISVTTEILPVSMTKTSVDCTMYICGDSTECSNLLLQYGSFCTQLNRALTGIAVEQDKNTQEVFAQVKQIYKTPPIKDFGGFNFSQILPDPSKPSKRSFIEDLLFNKVTLADAGFIKQYGDCLGDIAARDLICAQKFNGLTVLPPLLTDEMIAQYTSALLAGTITSGWTFGAGAALQIPFAMQMAYRFNGIGVTQNVLYENQKLIANQFNSVIGKIQDSLSSTASALGKLQDVVNQNAQALNTLVKCLSSNFGAISSVLNDILSRLDKVEAEVQIDRLITGRLQCLQTYVTQQLIRAAEIRASANLAATKMSECVLGQSKRVDFCGKGYHLMSFPQSAPHGVVFLHVTYVPAQEKNFTTAPAICHDGKAHFPREGVFVSNGTHWFVTQRNFYEPQIITTDNTFVSGNCDVVIGIVNNTVYDPLQPELDSFKEELDKYFKNHTSPDVDLGDISGINASVVNIQKEIDRLNEVAKNLNESLIDLQELGKYEQYIKGGGGSDIDPYKEFGSSYQLLNFLPLDFFPDLNALVDTATALYEEELTGREHCSPHHTAIRQALVCWDELTKLIAWMSSNITSEQVRTIIVNHVNDTWGLKVRQSLWFHLSCLTFGQHTVQEFLVSFGVWIRTPAPYRPPNAPILSTLPEHTVIC

SEQ ID NO: 7321 - protein, 1365 aa, Artificial Sequence
  SARS-CoV-2/Guangdong/GD2020087-P0008/2020__EPI_ISL_413863 spike protein (1-1211)(Q965C_S1003C) WhcAg construct
MFVFLVLLPLVSSQCVNLTTRTQLPPAYTNSFTRGVYYPDKVFRSSVLHSTQDLFLPFFSNVTWFHAIHVSGTNGTKRFDNPVLPFNDGVYFASTEKSNIIRGWIFGTTLDSKTQSLLIVNNATNVVIKVCEFQFCNDPFLGVYYHKNNKSWMESEFRVYSSANNCTFEYVSQPFLMDLEGKQGNFKNLREFVFKNIDGYFKIYSKHTPINLVRDLPQGFSALEPLVDLPIGINITRFQTLLALHRSYLTPGDSSSGWTAGAAAYYVGYLQPRTFLLKYNENGTITDAVDCALDPLSETKCTLKSFTVEKGIYQTSNFRVQPTESIVRFPNITNLCPFGEVFNATRFASVYAWNRKRISNCVADYSVLYNSASFSTFKCYGVSPTKLNDLCFTNVYADSFVIRGDEVREIAPGQTGKIADYNYKLPDDFTGCVIAWNSNNLDSKVGGNYNYLYRLFRKSNLKPFERDISTEIYQAGSTPCNGVEGFNCYFPLQSYGFQPTNGVGYQPYRVVVLSFELLHAPATVCGPKKSTNLVKNKCVNFNFNGLTGTGVLTESNKKFLPFQQFGRDIADTTDAVRDPQTLEILDITPCSFGGVSVITPGTNTSNQVAVLYQDVNCTEVPVAIHADQLTPTWRVYSTGSNVFQTRAGCLIGAEHVNNSYECDIPIGAGICASYQTQTNSPRRARSVASQSIIAYTMSLGAENSVAYSNNSIAIPTNFTISVTTEILPVSMTKTSVDCTMYICGDSTECSNLLLQYGSFCTQLNRALTGIAVEQDKNTQEVFAQVKQIYKTPPIKDFGGFNFSQILPDPSKPSKRSFIEDLLFNKVTLADAGFIKQYGDCLGDIAARDLICAQKFNGLTVLPPLLTDEMIAQYTSALLAGTITSGWTFGAGAALQIPFAMQMAYRFNGIGVTQNVLYENQKLIANQFNSAIGKIQDSLSSTASALGKLQDVVNQNAQALNTLVKCLSSNFGAISSVLNDILSRLDKVEAEVQIDRLITGRLQCLQTYVTQQLIRAAEIRASANLAATKMSECVLGQSKRVDFCGKGYHLMSFPQSAPHGVVFLHVTYVPAQEKNFTTAPAICHDGKAHFPREGVFVSNGTHWFVTQRNFYEPQIITTDNTFVSGNCDVVIGIVNNTVYDPLQPELDSFKEELDKYFKNHTSPDVDLGDISGINASVVNIQKEIDRLNEVAKNLNESLIDLQELGKYEQYIKGGGGSDIDPYKEFGSSYQLLNFLPLDFFPDLNALVDTATALYEEELTGREHCSPHHTAIRQALVCWDELTKLIAWMSSNITSEQVRTIIVNHVNDTWGLKVRQSLWFHLSCLTFGQHTVQEFLVSFGVWIRTPAPYRPPNAPILSTLPEHTVIC

SEQ ID NO: 7322 - protein, 1365 aa, Artificial Sequence
  SARS-CoV-2/Sweden/01/2020__EPI_ISL_411951 spike protein (1-1211)(Q965C_S1003C) WhcAg construct
MFVFLVLLPLVSSQCVNLTTRTQLPPAYTNSFTRGVYYPDKVFRSSVLHSTQDLFLPFFSNVTWFHAIHVSGTNGTKRFDNPVLPFNDGVYFASTEKSNIIRGWIFGTTLDSKTQSLLIVNNATNVVIKVCEFQFCNDPFLGVYYHKNNKSWMESEFRVYSSANNCTFEYVSQPFLMDLEGKQGNFKNLREFVFKNIDGYFKIYSKHTPINLVRDLPQGFSALEPLVDLPIGINITRFQTLLALHRSYLTPGDSSSGWTAGAAAYYVGYLQPRTFLLKYNENGTITDAVDCALDPLSETKCTLKSFTVEKGIYQTSNFRVQPTESIVRFPNITNLCPFGEVFNATRFASVYAWNRKRISNCVADYSVLYNSASFSTFKCYGVSPTKLNDLCFTNVYADSFVIRGDEVRQIAPGQTGKIADYNYKLPDDFTGCVIAWNSNNLDSKVGGNYNYLYRLFRKSNLKPFERDISTEIYQAGSTPCNGVEGFNCYFPLQSYGFQPTNGVGYQPYRVVVLSFELLHAPATVCGPKKSTNLVKNKCVNFNFNGLTGTGVLTESNKKFLPFQQFGRDIADTTDAVRDPQTLEILDITPCSFGGVSVITPGTNTSNQVAVLYQDVNCTEVPVAIHADQLTPTWRVYSTGSNVFQTRAGCLIGAEHVNNSYECDIPIGAGICASYQTQTNSPRRARSVASQSIIAYTMSLGAENSVAYSNNSIAIPTNFTISVTTEILPVSMTKTSVDCTMYICGDSTECSNLLLQYGSFCTQLNRALTGIAVEQDKNTQEVFAQVKQIYKTPPIKDCGGFNFSQILPDPSKPSKRSFIEDLLFNKVTLADAGFIKQYGDCLGDIAARDLICAQKFNGLTVLPPLLTDEMIAQYTSALLAGTITSGWTFGAGAALQIPFAMQMAYRFNGIGVTQNVLYENQKLIANQFNSAIGKIQDSLSSTASALGKLQDVVNQNAQALNTLVKCLSSNFGAISSVLNDILSRLDKVEAEVQIDRLITGRLQCLQTYVTQQLIRAAEIRASANLAATKMSECVLGQSKRVDFCGKGYHLMSFPQSAPHGVVFLHVTYVPAQEKNFTTAPAICHDGKAHFPREGVFVSNGTHWFVTQRNFYEPQIITTDNTFVSGNCDVVIGIVNNTVYDPLQPELDSFKEELDKYFKNHTSPDVDLGDISGINASVVNIQKEIDRLNEVAKNLNESLIDLQELGKYEQYIKGGGGSDIDPYKEFGSSYQLLNFLPLDFFPDLNALVDTATALYEEELTGREHCSPHHTAIRQALVCWDELTKLIAWMSSNITSEQVRTIIVNHVNDTWGLKVRQSLWFHLSCLTFGQHTVQEFLVSFGVWIRTPAPYRPPNAPILSTLPEHTVIC

SEQ ID NO: 7323 - protein, 1365 aa, Artificial Sequence
  SARS-CoV-2/Tianmen/HBCDC-HB-07/2020__EPI_ISL_412983 spike protein (1-1211)(Q965C_S1003C) WhcAg construct
MFVFLVLLPLVSSQCVNLTTRTQLPPAYTNSFTRGVYYPDKVFRSSVLHSTQDLFLPFFSNVTWFHAIHVSGTNGTKRFDNPVLPFNDGVYFASTEKSNIIRGWIFGTTLDSKTQSLLIVNNATNVVIKVCEFQFCNDPFLGVYYHKNNKSWMESEFRVYSSANNCTFEYVSQPFLMDLEGKQGNFKNLREFVFKNIDGYFKIYSKHTPINLVRDLPQGFSALEPLVDLPIGINITRFQTLLALHRSYLTPGDSSSGWTAGAAAYYVGYLQPRTFLLKYNENGTITDAVDCALDPLSETKCTLKSFTVEKGIYQTSNFRVQPTESIVRFPNITNLCPFGEVFNATRFASVYAWNRKRISNCVADYSVLYNSASFSTFKCYGVSPTKLNDLCFTNVYADSFVIRGDEVRQIAPGQTGKIADYNYKLPDDFTGCVIAWNSNNLDSKVGGNYNYLYRLFRKSNLKPFERDISTEIYQAGSTPCNGVEGFNCYFPLQSYGFQPTNGVGYQPYRVVVLSFELLHAPATVCGPKKSTNLVKNKCVNFNFNGLTGTGVLTESNKKFLPFQQFGRDIADTTDAVRDPQTLEILDITPCSFGGVSVITPGTNTSNQVAVLYQDLNCTEVPVAIHADQLTPTWRVYSTGSNVFQTRAGCLIGAEHVNNSYECDIPIGAGICASYQTQTNSPRRARSVASQSIIAYTMSLGAENSVAYSNNSIAIPTNFTISVTTEILPVSMTKTSVDCTMYICGDSTECSNLLLQYGSFCTQLNRALTGIAVEQDKNTQEVFAQVKQIYKTPPIKDFGGFNFSQILPDPSKPSKRSFIEDLLFNKVTLADAGFIKQYGDCLGDIAARDLICAQKFNGLTVLPPLLTDEMIAQYTSALLAGTITSGWTFGAGAALQIPFAMQMAYRFNGIGVTQNVLYENQKLIANQFNSAIGKIQDSLSSTASALGKLQDVVNQNAQALNTLVKCLSSNFGAISSVLNDILSRLDKVEAEVQIDRLITGRLQCLQTYVTQQLIRAAEIRASANLAATKMSECVLGQSKRVDFCGKGYHLMSFPQSAPHGVVFLHVTYVPAQEKNFTTAPAICHDGKAHFPREGVFVSNGTHWFVTQRNFYEPQIITTDNTFVSGNCDVVIGIVNNTVYDPLQPELDSFKEELDKYFKNHTSPDVDLGDISGINASVVNIQKEIDRLNEVAKNLNESLIDLQELGKYEQYIKGGGGSDIDPYKEFGSSYQLLNFLPLDFFPDLNALVDTATALYEEELTGREHCSPHHTAIRQALVCWDELTKLIAWMSSNITSEQVRTIIVNHVNDTWGLKVRQSLWFHLSCLTFGQHTVQEFLVSFGVWIRTPAPYRPPNAPILSTLPEHTVIC

SEQ ID NO: 7324 - protein, 1365 aa, Artificial Sequence
  SARS-CoV-2/Hong Kong/case42_VM20002493/2020__EPI_ISL_414527 spike protein (1-1211)(Q965C_S1003C) WhcAg construct
MFVFLVLLPLVSSQCVNLTTRTQLPPAYTNSFTRGVYYPDKVFRSSVLHSTQDLFLPFFSNVTWFHAIHVSGTNGTKRFDNPVLPFNDGVYFASTEKSNIIRGWIFGTTLDSKTQSLLIVNNATNVVIKVCEFQFCNDPFLGVYYHKNNKSWMESEFRVYSSANNCTFEYVSQPFLMDLEGKQGNFKNLREFVFKNIDGYFKIYSKHTPINLVRDLPQGFSALEPLVDLPIGINITRFQTLLALHRSYLTPGDSSSGWTAGAAAYYVGYLQPRTFLLKYNENGTITDAVDCALDPLSETKCTLKSFTVEKGIYQTSNFRVQPTESIVRFPNITNLCPFGEVFNATRFASVYAWNRKRISNCVADYSVLYNSASFSTFKCYGVSPTKLNDLCFTNVYADSFVIRGDEVRQIAPGQTGKIADYNYKLPDDFTGCVIAWNSNNLDSKVGGNYNYLYRLFRKSNLKPFERDISTEIYQAGSTPCNGVEGFNCYFPLQSYGFQPTNGVGYQPYRVVVLSFELLHAPATVCGPKKSTNLVKNKCVNFNFNGLTGTGVLTESNKKFLPFQQFGRDIADTTDAVRDPQTLEILDITPCSFGGVSVITPGTNTSNQVAVLYQDVNCTEVPVAIHADQLTPTWRVYSTGSNVFQTRAGCLIGAEHVNNSYECDIPIGAGICASYQTQTNSPRRARSVASQSIIAYTMSLGAENSVAYSNNSIAIPTNFAISVTTEILPVSMTKTSVDCTMYICGDSTECSNLLLQYGSFCTQLNRALTGIAVEQDKNTQEVFAQVKQIYKTPPIKDFGGFNFSQILPDPSKPSKRSFIEDLLFNKVTLADAGFIKQYGDCLGDIAARDLICAQKFNGLTVLPPLLTDEMIAQYTSALLAGTITSGWTFGAGAALQIPFAMQMAYRFNGIGVTQNVLYENQKLIANQFNSAIGKIQDSLSSTASALGKLQDVVNQNAQALNTLVKCLSSNFGAISSVLNDILSRLDKVEAEVQIDRLITGRLQCLQTYVTQQLIRAAEIRASANLAATKMSECVLGQSKRVDFCGKGYHLMSFPQSAPHGVVFLHVTYVPAQEKNFTTAPAICHDGKAHFPREGVFVSNGTHWFVTQRNFYEPQIITTDNTFVSGNCDVVIGIVNNTVYDPLQPELDSFKEELDKYFKNHTSPDVDLGDISGINASVVNIQKEIDRLNEVAKNLNESLIDLQELGKYEQYIKGGGGSDIDPYKEFGSSYQLLNFLPLDFFPDLNALVDTATALYEEELTGREHCSPHHTAIRQALVCWDELTKLIAWMSSNITSEQVRTIIVNHVNDTWGLKVRQSLWFHLSCLTFGQHTVQEFLVSFGVWIRTPAPYRPPNAPILSTLPEHTVIC

SEQ ID NO: 7325 - protein, 1365 aa, Artificial Sequence
  SARS-CoV-2/USA/CruiseA-23/2020__EPI_ISL_414482 spike protein (1-1211)(Q965C_S1003C) WhcAg construct
MFVFLVLLPLVSSQCVNLTTRTQLPPAYTNSFTRGVYYPDKVFRSSVLHSTQDLFLPFFSNVTWFHAIHVSGTNGTKRFDNPVLPFNDGVYFASTEKSNIIRGWIFGTTLDSKTQSLLIVNNATNVVIKVCEFQFCNDPFLGVYYHKNNKSWMESEFRVYSSANNCTFEYVSQPFLMDLEVKQGNFKNLREFVFKNIDGYFKIYSKHTPINLVRDLPQGFSALEPLVDLPIGINITRFQTLLALHRSYLTPGDSSSGWTAGAAAYYVGYLQPRTFLLKYNENGTITDAVDCALDPLSETKCTLKSFTVEKGIYQTSNFRVQPTESIVRFPNITNLCPFGEVFNATRFASVYAWNRKRISNCVADYSVLYNSASFSTFKCYGVSPTKLNDLCFTNVYADSFVIRGDEVRQIAPGQTGKIADYNYKLPDDFTGCVIAWNSNNLDSKVGGNYNYLYRLFRKSNLKPFERDISTEIYQAGSTPCNGVEGFNCYFPLQSYGFQPTNGVGYQPYRVVVLSFELLHAPATVCGPKKSTNLVKNKCVNFNFNGLTGTGVLTESNKKFLPFQQFGRDIADTTDAVRDPQTLEILDITPCSFGGVSVITPGTNTSNQVAVLYQDVNCTEVPVAIHADQLTPTWRVYSTGSNVFQTRAGCLIGAEHVNNSYECDIPIGAGICASYQTQTNSPRRARSVASQSIIAYTMSLGAENSVAYSNNSIAIPTNFTISVTTEILPVSMTKTSVDCTMYICGDSTECSNLLLQYGSFCTQLNRALTGIAVEQDKNTQEVFAQVKQIYKTPPIKDFGGFNFSQILPDPSKPSKRSFIEDLLFNKVTLADAGFIKQYGDCLGDIAARDLICAQKFNGLTVLPPLLTDEMIAQYTSALLAGTITSGWTFGAGAALQIPFAMQMAYRFNGIGVTQNVLYENQKLIANQFNSAIGKIQDSLSSTASALGKLQDVVNQNAQALNTLVKCLSSNFGAISSVLNDILSRLDKVEAEVQIDRLITGRLQCLQTYVTQQLIRAAEIRASANLAATKMSECVLGQSKRVDFCGKGYHLMSFPQSAPHGVVFLHVTYVPAQEKNFTTAPAICHDGKAHFPREGVFVSNGTHWFVTQRNFYEPQIITTDNTFVSGNCDVVIGIVNNTVYDPLQPELDSFKEELDKYFKNHTSPDVDLGDISGINASVVNIQKEIDRLNEVAKNLNESLIDLQELGKYEQYIKGGGGSDIDPYKEFGSSYQLLNFLPLDFFPDLNALVDTATALYEEELTGREHCSPHHTAIRQALVCWDELTKLIAWMSSNITSEQVRTIIVNHVNDTWGLKVRQSLWFHLSCLTFGQHTVQEFLVSFGVWIRTPAPYRPPNAPILSTLPEHTVIC

SEQ ID NO: 7326 - protein, 1365 aa, Artificial Sequence
  SARS-CoV-2/Hong Kong/case85_VM20002868/2020__EPI_ISL_414519 spike protein (1-1211)(Q965C_S1003C) WhcAg construct
MFVFLVLVPLVSSQCVNLTTRTQLPPAYTNSFTRGVYYPDKVFRSSVLHSTQDLFLPFFSNVTWFHAIHVSGTNGTKRFDNPVLPFNDGVYFASTEKSNIIRGWIFGTTLDSKTQSLLIVNNATNVVIKVCEFQFCNDPFLGVYYHKNNKSWMESEFRVYSSANNCTFEYVSQPFLMDLEGKQGNFKNLREFVFKNIDGYFKIYSKHTPINLVRDLPQGFSALEPLVDLPIGINITRFQTLLALHRSYLTPGDSSSGWTAGAAAYYVGYLQPRTFLLKYNENGTITDAVDCALDPLSETKCTLKSFTVEKGIYQTSNFRVQPTESIVRFPNITNLCPFGEVFNATRFASVYAWNRKRISNCVADYSVLYNSASFSTFKCYGVSPTKLNDLCFTNVYADSFVIRGDEVRQIAPGQTGKIADYNYKLPDDFTGCVIAWNSNNLDSKVGGNYNYLYRLFRKSNLKPFERDISTEIYQAGSTPCNGVEGFNCYFPLQSYGFQPTNGVGYQPYRVVVLSFELLHAPATVCGPKKSTNLVKNKCVNFNFNGLTGTGVLTESNKKFLPFQQFGRDIADTTDAVRDPQTLEILDITPCSFGGVSVITPGTNTSNQVAVLYQDVNCTEVPVAIHADQLTPTWRVYSTGSNVFQTRAGCLIGAEHVNNSYECDIPIGAGICASYQTQTNSPRRARSVASQSIIAYTMSLGAENSVAYSNNSIAIPTNFTISVTTEILPVSMTKTSVDCTMYICGDSTECSNLLLQYGSFCTQLNRALTGIAVEQDKNTQEVFAQVKQIYKTPPIKDFGGFNFSQILPDPSKPSKRSFIEDLLFNKVTLADAGFIKQYGDCLGDIAARDLICAQKFNGLTVLPPLLTDEMIAQYTSALLAGTITSGWTFGAGAALQIPFAMQMAYRFNGIGVTQNVLYENQKLIANQFNSAIGKIQDSLSSTASALGKLQDVVNQNAQALNTLVKCLSSNFGAISSVLNDILSRLDKVEAEVQIDRLITGRLQCLQTYVTQQLIRAAEIRASANLAATKMSECVLGQSKRVDFCGKGYHLMSFPQSAPHGVVFLHVTYVPAQEKNFTTAPAICHDGKAHFPREGVFVSNGTHWFVTQRNFYEPQIITTDNTFVSGNCDVVIGIVNNTVYDPLQPELDSFKEELDKYFKNHTSPDVDLGDISGINASVVNIQKEIDRLNEVAKNLNESLIDLQELGKYEQYIKGGGGSDIDPYKEFGSSYQLLNFLPLDFFPDLNALVDTATALYEEELTGREHCSPHHTAIRQALVCWDELTKLIAWMSSNITSEQVRTIIVNHVNDTWGLKVRQSLWFHLSCLTFGQHTVQEFLVSFGVWIRTPAPYRPPNAPILSTLPEHTVIC

SEQ ID NO: 7327 - protein, 1365 aa, Artificial Sequence; identical to SEQ ID NO: 7317
  SARS-CoV-2/England/200990660/2020__EPI_ISL_414523 spike protein (1-1211)(Q965C_S1003C) WhcAg construct

SEQ ID NO: 7328 - protein, 1365 aa, Artificial Sequence
  SARS-CoV-2/Australia/NSW09/2020__EPI_ISL_413595 spike protein (1-1211)(Q965C_S1003C) WhcAg construct
MFVFLVLLPLVSSQCVNLTTRTQLPPAYTNSFTRGVYYPDKVFRSSVLHSTQDLFLPFFSNVTWFHAIHVSGTNGTKRFDNPVLPFNDGVYFASTEKSNIIRGWIFGTTLDSKTQSLLIVNNATNVVIKVCEFQFCNDPFLGVYYHKNNKSWMESEFRVYSSANNCTFEYVSQPFLMDLEGKQGNFKNLREFVFKNIDGYFKIYSKHTPINLVRDLPQGFSALEPLVDLPIGINITRFQTLLALHRSYLTPGDSSSGWTAGAAAYYVGYLQPRTFLLKYNENGTITDAVDCALDPLSETKCTLKSFTVEKGIYQTSNFRVQPTESIVRFPNITNLCPFGEVFNATRFASVYAWNRKRISNCVADYSVLYNSASFSTFKCYGVSPTKLNDLCFTNVYADSFVIRGDEVRQIAPGQTGKIADYNYKLPDDFTGCVIAWNSNNLDSKVGGNYNYLYRLFRKSNLKPFERDISTEIYQAGSTPCNGVEGFNCYFPLQSYGFQPTNGVGYQPYRVVVLSFELLHAPATVCGPKKSTNLVKNKCVNFNFNGLTGTGVLTESNKKFLPFQQFGRDIADTTDAVRDPQTLEILDITPCSFGGVSVITPGTNTSNQVAVLYQDVNCTEVPVAIHADQLTPTWRVYSTGSNVFQTRAGCLIGAEHVNNSYECDIPIGAGICASYQTQTNSPRRARSVASQSIIAYTMSLGAENSVAYSNNSIAIPTNFTISVTTEILPVSMTKTSVDCTMYICGDSTECSNLLLQYGSFCTQLNRALTGIAVEQDKNTQEVFAQVKQIYKTPPIKDFGGFNFSQILPDPSKPSKRSFIEDLLFNKVTLADAGFIKQYGDCLGDIAARDLICAQKFNGLTVLPPLLTDEMIAQYTSALLAGTITSGWTFGAGAALQIPFAMQMAYRFNGIGVTQNVLYENQKLIANQFNSAIGKIQDSLSFTASALGKLQDVVNQNAQALNTLVKCLSSNFGAISSVLNDILSRLDKVEAEVQIDRLITGRLQCLQTYVTQQLIRAAEIRASANLAATKMSECVLGQSKRVDFCGKGYHLMSFPQSAPHGVVFLHVTYVPAQEKNFTTAPAICHDGKAHFPREGVFVSNGTHWFVTQRNFYEPQIITTDNTFVSGNCDVVIGIVNNTVYDPLQPELDSFKEELDKYFKNHTSPDVDLGDISGINASVVNIQKEIDRLNEVAKNLNESLIDLQELGKYEQYIKGGGGSDIDPYKEFGSSYQLLNFLPLDFFPDLNALVDTATALYEEELTGREHCSPHHTAIRQALVCWDELTKLIAWMSSNITSEQVRTIIVNHVNDTWGLKVRQSLWFHLSCLTFGQHTVQEFLVSFGVWIRTPAPYRPPNAPILSTLPEHTVIC

SEQ ID NO: 7329 - protein, 1365 aa, Artificial Sequence; identical to SEQ ID NO: 7309
  SARS-CoV-2/Australia/NSW10/2020__EPI_ISL_413596 spike protein (1-1211)(Q965C_S1003C) WhcAg construct

SEQ ID NO: 7330 - protein, 1365 aa, Artificial Sequence
  SARS-CoV-2/Switzerland/1000477797/2020__EPI_ISL_413023 spike protein (1-1211)(Q965C_S1003C) WhcAg construct
MFVFLVLLPLVSSQCVNLTTRTQLPPAYTNSFTRGVYYPDKVFRSSVLHSTQDLFLPFFSNVTWFHAIHVSGTNGTKRFDNPVLPFNDGVYFASTEKSNIIRGWIFGTTLDSKTQSLLIVNNATNVVIKVCEFQFCNDPFLGVYYHKNNKSWMESEFRVYSSANNCTFEYVSQPFLMDLEGKQGNFKNLREFVFKNIDGYFNIYSKHTPINLVRDLPQGFSALEPLVDLPIGINITRFQTLLALHRSYLTPGDSSSGWTAGAAAYYVGYLQPRTFLLKYNENGTITDAVDCALDPLSETKCTLKSFTVEKGIYQTSNFRVQPTESIVRFPNITNLCPFGEVFNATRFASVYAWNRKRISNCVADYSVLYNSASFSTFKCYGVSPTKLNDLCFTNVYADSFVIRGDEVRQIAPGQTGKIADYNYKLPDDFTGCVIAWNSNNLDSKVGGNYNYLYRLFRKSNLKPFERDISTEIYQAGSTPCNGVEGFNCYFPLQSYGFQPTNGVGYQPYRVVVLSFELLHAPATVCGPKKSTNLVKNKCVNFNFNGLTGTGVLTESNKKFLPFQQFGRDIADTTDAVRDPQTLEILDITPCSFGGVSVITPGTNTSNQVAVLYQGVNCTEVPVAIHADQLTPTWRVYSTGSNVFQTRAGCLIGAEHVNNSYECDIPIGAGICASYQTQTNSPRRARSVASQSIIAYTMSLGAENSVAYSNNSIAIPTNFTISVTTEILPVSMTKTSVDCTMYICGDSTECSNLLLQYGSFCTQLNRALTGIAVEQDKNTQEVFAQVKQIYKTPPIKDFGGFNFSQILPDPSKPSKRSFIEDLLFNKVTLADAGFIKQYGDCLGDIAARDLICAQKFNGLTVLPPLLTDEMIAQYTSALLAGTITSGWTFGAGAALQIPFAMQMAYRFNGIGVTQNVLYENQKLIANQFNSAIGKIQDSLSSTASALGKLQDVVNQNAQALNTLVKCLSSNFGAISSVLNDILSRLDKVEAEVQIDRLITGRLQCLQTYVTQQLIRAAEIRASANLAATKMSECVLGQSKRVDFCGKGYHLMSFPQSAPHGVVFLHVTYVPAQEKNFTTAPAICHDGKAHFPREGVFVSNGTHWFVTQRNFYEPQIITTDNTFVSGNCDVVIGIVNNTVYDPLQPELDSFKEELDKYFKNHTSPDVDLGDISGINASVVNIQKEIDRLNEVAKNLNESLIDLQELGKYEQYIKGGGGSDIDPYKEFGSSYQLLNFLPLDFFPDLNALVDTATALYEEELTGREHCSPHHTAIRQALVCWDELTKLIAWMSSNITSEQVRTIIVNHVNDTWGLKVRQSLWFHLSCLTFGQHTVQEFLVSFGVWIRTPAPYRPPNAPILSTLPEHTVIC

SEQ ID NO: 7331 - protein, 1365 aa, Artificial Sequence
  SARS-CoV-2/Belgium/BA-02291/2020__EPI_ISL_415159 spike protein (1-1211)(Q965C_S1003C) WhcAg construct
MFVFLVLLPLVSSQCVNLTTRTQLPPAYTNSFTRGVYYPDKVFRSSVLHSTQDLFLPFFSNVTWFHAIHVSGTNGTKRFDNPVLPFNDGVYFASTEKSNIIRGWIFGTTLDSKTQSLLIVNNATNVVIKVCEFQFCNDPFLGVYYHKNNKSWMESEFRVYSSANNCTFEYVSQPFLMDLEGKQGNFKNLREFVFKNIDGYFKIYSKHTPINLVRDLPQGFSALEPLVDLPIGINITRFQTLLALHRSYLTPGDSSSGWTAGAAAYYVGYLQPRTFLLKYNENGTITDAVDCALDPLSETKCTLKSFTVEKGIYQTSNFRVQPTESIVRFPNITNLCPFGEVFNATRFASVYAWNRKRISNCVADYSVLYNSASFSTFKCYGVSPTKLNDLCFTNVYADSFVIRGDEVRQIAPGQTGKIADYNYKLPDDFTGCVIAWNSNNLDSKVGGNYNYLYRLFRRSNLKPFERDISTEIYQAGSTPCNGVEGFNCYFPLQSYGFQPTNGVGYQPYRVVVLSFELLPAPATVCGPKKSTNLVKNKCVNFNFNGLTGTGVLTESNKKFLPFQQFGRDIADTTDAVRDPQTLEILDITPCSFGGVSVITPGTNTSNQVAVLYQGVNCTEVPVAIHADQLTPTWRVYSTGSNVFQTRAGCLIGAEHVNNSYECDIPIGAGICASYQTQTNSPRRARSVASQSIIAYTMSLGAENSVAYSNNSIAIPTNFTISVTTEILPVSMTKTSVDCTMYICGDSTECSNLLLQYGSFCTQLNRALTGIAVEQDKNTQEVFAQVKQIYKTPPIKDFGGFNFSQILPDPSKPSKRSFIEDLLFNKVTLADAGFIKQYGDCLGDIAARDLICAQKFNGLTVLPPLLTDEMIAQYTSALLAGTITSGWTFGAGAALQIPFAMQMAYRFNGIGVTQNVLYENQKLIANQFNSAIGKIQDSLSSAAPALGKLQDVVNQNAQALNTLVKCLSSNFGAISSVLNDILSRLDKVEAEVQIDRLITGRLQCLQTYVTQQLIRAAEIRASANLAATKMSECVLGQSKRVDFCGKGYHLMSFPQSAPHGVVFLHVTYVPAQEKNFTTAPAICHDGKAHFPREGVFVSNGTHWFVTQRNFYEPQIITTDNTFVSGNCDVVIGIVNNTVYDPLQPELDSFKEELDKYFKNHTSPDVDLGDISGINASVVNIQKEIDRLNEVAKNLNESLIDLQELGKYEQYIKGGGGSDIDPYKEFGSSYQLLNFLPLDFFPDLNALVDTATALYEEELTGREHCSPHHTAIRQALVCWDELTKLIAWMSSNITSEQVRTIIVNHVNDTWGLKVRQSLWFHLSCLTFGQHTVQEFLVSFGVWIRTPAPYRPPNAPILSTLPEHTVIC

SEQ ID NO: 7332 - protein, 1365 aa, Artificial Sequence
  SARS-CoV-2/USA/WA8-UW5/2020__EPI_ISL_413486 spike protein (1-1211)(Q965C_S1003C) WhcAg construct
MFVFLVLLPLVSSQCVNLTTRTQLPPAYTNSFTRGVYYPDKVFRSSVLHSTQDLFLPFFSNVTWFHAIHVSGTNGTKRFDNPVLPFNDGVYFASTEKSNIIRGWIFGTTLDSKTQSLLIVNNATNVVIKVCEFQFCNDPFLGVYYHKNNKSWMESEFRVYSSANNCTFEYVSQPFLMDLEGKQGNFKNLREFVFKNIDGYFKIYSKHTPINLVRDLPQGFSALEPLVDLPIGINITRFQTLLALHRSYLTPGDSSSGWTAGAAAYYVGYLQPRTFLLKYNENGTITDAVDCALDPLSETKCTLKSFTVEKGIYQTSNFRVQPTESIVRFPNITNLCPFGEVFNATRFASVYAWNRKRISNCVADYSVLYNSASFSTFKCYGVSPTKLNDLCFTNVYADSFVIRGDEVRQIAPGQTGKIADYNYKLPDDFTGCVIAWNSNNLDSKVGGNYNYLYRLFRKSNLKPFERDISTEIYQAGSTPCNGVEGFNCYFPLQSYGFQPTNGVGYQPYRVVVLSFELLHAPATVCGPKKSTNLVKNKCVNFNFNGLTGTGVLTESNKKFLPFQQFGRDIADTTDAVRDPQTLEILDITPCSFGGVSVITPGTNTSNQVAVLYQDVNCTEVPVAIHADQLTPTWRVYSTGSNVFQTRAGCLIGAEYVNNSYECDIPIGAGICASYQTQTNSPRRARSVASQSIIAYTMSLGAENSVAYSNNSIAIPTNFTISVTTEILPVSMTKTSVDCTMYICGDSTECSNLLLQYGSFCTQLNRALTGIAVEQDKNTQEVFAQVKQIYKTPPIKDFGGFNFSQILPDPSKPSKRSFIEDLLFNKVTLADAGFIKQYGDCLGDIAARDLICAQKFNGLTVLPPLLTDEMIAQYTSALLAGTITSGWTFGAGAALQIPFAMQMAYRFNGIGVTQNVLYENQKLIANQFNSAIGKIQDSLSSTASALGKLQDVVNQNAQALNTLVKCLSSNFGAISSVLNDILSRLDKVEAEVQIDRLITGRLQCLQTYVTQQLIRAAEIRASANLAATKMSECVLGQSKRVDFCGKGYHLMSFPQSAPHGVVFLHVTYVPAQEKNFTTAPAICHDGKAHFPREGVFVSNGTHWFVTQRNFYEPQIITTDNTFVSGNCDVVIGIVNNTVYDPLQPELDSFKEELDKYFKNHTSPDVDLGDISGINASVVNIQKEIDRLNEVAKNLNESLIDLQELGKYEQYIKGGGGSDIDPYKEFGSSYQLLNFLPLDFFPDLNALVDTATALYEEELTGREHCSPHHTAIRQALVCWDELTKLIAWMSSNITSEQVRTIIVNHVNDTWGLKVRQSLWFHLSCLTFGQHTVQEFLVSFGVWIRTPAPYRPPNAPILSTLPEHTVIC

SEQ ID NO: 7333 - protein, 1365 aa, Artificial Sequence
  SARS-CoV-2/England/20102000506/2020__EPI_ISL_415147 spike protein (1-1211)(Q965C_S1003C) WhcAg construct
MFVFLVLLPLVSSQCVNLTTRTQLPPAYTNSFTRGVYYPDKVFRSSVLHSTQDLFLPFFSNVTWFHAIHVSGTNGTKRFDNPVLPFNDGVYFASTEKSNIIRGWIFGTTLDSKTQSLLIVNNATNVVIKVCEFQFCNDPFLGVYYHKNNKSWMESEFRVYSSANNCTFEYVSQPFLMDLEGKQGNFKNLREFVFKNIDGYFKIYSKHTPINLVRDLPQGFSALEPLVDLPIGINITRFQTLLALHRSYLTPGDSSSGWTAGAAAYYVGYLQPRTFLLKYNENGTITDAVDCALDPLSETKCTLKSFTVEKGIYQTSNFRVQPTESIVRFPNITNLCPFGEVFNATRFASVYAWNRKRISNCVADYSVLYNSASFSTFKCYGVSPTKLNDLCFTNVYADSFVIRGDEVRQIAPGQTGKIADYNYKLPDDFTGCVIAWNSNNLDSKVGGNYNYLYRLFRKSNLKPFERDISTEIYQAGSTPCNGVEGFNCYFPLQSYGFQPTNGVGYQPYRVVVLSFELLHAPATVCGPKKSTNLVKNKCVNFNFNGLTGTGVLTESNKKFLPFQQFGRDIADTTDAVRDPQTLEILDITPCSFGGVSVITPGTNTSNQVAVLYQGVNCTEVPVAIHADQLTPTWRVYSTGSNVFQTRAGCLIGAEHVNNSYECDIPIGAGICASYQTQTNSPRRARSVASQSIIAYTMSLGAENSVAYSNNSIAIPTNFTISVTTEILPVSMTKTSVDCTMYICGDSTECSNLLLQYGSFCTQLNRALTGIAVEQDKNTQEVFAQVKQIYKTPPIKDFGGFNFSQILPDPSKPSKRSFIEDLLFNKVTLADAGFIKQYGYCLGDIAARDLICAQKFNGLTVLPPLLTDEMIAQYTSALLAGTITSGWTFGAGAALQIPFAMQMAYRFNGIGVTQNVLYENQKLIANQFNSAIGKIQDSLSSTASALGKLQDVVNQNAQALNTLVKCLSSNFGAISSVLNDILSRLDKVEAEVQIDRLITGRLQCLQTYVTQQLIRAAEIRASANLAATKMSECVLGQSKRVDFCGKGYHLMSFPQSAPHGVVFLHVTYVPAQEKNFTTAPAICHDGKAHFPREGVFVSNGTHWFVTQRNFYEPQIITTDNTFVSGNCDVVIGIVNNTVYDPLQPELDSFKEELDKYFKNHTSPDVDLGDISGINASVVNIQKEIDRLNEVAKNLNESLIDLQELGKYEQYIKGGGGSDIDPYKEFGSSYQLLNFLPLDFFPDLNALVDTATALYEEELTGREHCSPHHTAIRQALVCWDELTKLIAWMSSNITSEQVRTIIVNHVNDTWGLKVRQSLWFHLSCLTFGQHTVQEFLVSFGVWIRTPAPYRPPNAPILSTLPEHTVIC

SEQ ID NO: 7334 - protein, 1365 aa, Artificial Sequence
  SARS-CoV-2/Belgium/VAG-03013/2020__EPI_ISL_415155 spike protein (1-1211)(Q965C_S1003C) WhcAg construct
MFVFLVLLPLVSSQCVNLTTRTQLPPAYTNSFTRGVYYPDKVFRSSVLHSTQDLFLPFFSNVTWFHAIHVSGTNGTKRFDNPVLPFNDGVYFASTEKSNIIRGWIFGTTLDSKTQSLLIVNNATNVVIKVCEFQFCNDPFLGVYYHKNNKSWMESEFRVYSSANNCTFEYVSQPFLMDLEGKQGNFKNLREFVFKNIDGYFKIYSKHTPINLVRDLPQGFSALEPLVDLPIGINITRFQTLLALHRSYLTPGDSSSGWTAGAAAYYVGYLQPRTFLLKYNENGTITDAVDCALDPLSETKCTLKSFTVEKGIYQTSNFRVQPTESIVRFPNITNLCPFGEVFNATRFASVYAWNRKRISNCVADYSVLYNSASFSTFKCYGVSPTKLNDLCFTNVYADSFVIRGDEVRQIAPGQTGKIADYNYKLPDDFTGCVIAWNSNNLDSKVGGNYNYLYRLFRKSNLKPFERDISTEIYQAGSTPCNGVEGFNCYFPLQSYGFQPTNGVGYQPYRVVVLSFELLHAPATVCGPKKSTNLVKNKCVNFNFNGLTGTGVLTESNKKFLPFQQFGRDIADTTDAVRDPQTLEILDITPCSFGGVSVITPGTNTSNQVAVLYQGVNCTEVPVAIHADQLTPTWRVYSTGSNVFQTRAGCLIGAEHVNNSYECDIPIGAGICASYQTQTNSPRRARSVASQSIIAYTMSLGAENSVAYSNNSIAIPTNFTISVTTEILPVSMTKTSVDCTMYICGDSTECSNLLLQYGSFCTQLNRALTGIAVEQDKNTQEVFAQVKQIYKTPPIKDFGGFNFSQILPDPSKPSKRSFIEDLLFNKVTLADAGFIKQYGDCLGDIAARDLICAQKFNGLTVLPPLLTDEMIAQYTSALLAGTITSGWTFGAGAALQIPFAMQMAYRFNGIGVTQNVLYENQKLIANQFNSAIGKIQDSLSSTATALGKLQDVVNQNAQALNTLVKCLSSNFGAISSVLNDILSRLDKVEAEVQIDRLITGRLQCLQTYVTQQLIRAAEIRASANLAATKMSECVLGQSKRVDFCGKGYHLMSFPQSAPHGVVFLHVTYVPAQEKNFTTAPAICHDGKAHFPREGVFVSNGTHWFVTQRNFYEPQIITTDNTFVSGNCDVVIGIVNNTVYDPLQPELDSFKEELDKYFKNHTSPDVDLGDISGINASVVNIQKEIDRLNEVAKNLNESLIDLQELGKYEQYIKGGGGSDIDPYKEFGSSYQLLNFLPLDFFPDLNALVDTATALYEEELTGREHCSPHHTAIRQALVCWDELTKLIAWMSSNITSEQVRTIIVNHVNDTWGLKVRQSLWFHLSCLTFGQHTVQEFLVSFGVWIRTPAPYRPPNAPILSTLPEHTVIC

SEQ ID NO: 7335 - protein, 1365 aa, Artificial Sequence
  SARS-CoV-2/Belgium/BC-03016/2020__EPI_ISL_415157 spike protein (1-1211)(Q965C_S1003C) WhcAg construct
MFVFLVLLPLVSSQCVNLTTRTQLPPAYTNSFTRGVYYPDKVFRSSVLHSTQDLFLPFFSNVTWFHAIHVSGTNGTKRFDNPVLPFNDGVYFASTEKSNIIRGWIFGTTLDSKTQSLLIVNNATNVVIKVCEFQFCNDPFLGVYYHKNNKSWMESEFRVYSSANNCTFEYVSQPFLMDLEGKQGNFKNLREFVFKNIDGYFKIYSKHTPINLVRDLPQGFSALEPLVDLPIGINITRFQTLLALHRSYLTPGDSSSGWTAGAAAYYVGYLQPRTFLLKYNENGTITDAVDCALDPLSETKCTLKSFTVEKGIYQTSNFRVQPTESIVRFPNITNLCPFGEVFNATRFASVYAWNRKRISNCVADYSVLYNSASFSTFKCYGVSPTKLNDLCFTNVYADSFVIRGDEVRQIAPGQTGKIADYNYKLPDDFTGCVIAWNSNNLDSKVGGNYNYLYRLFRKSNLKPFERDISTEIYQAGSTPCNGVEGFNCYFPLQSYGFQPTNGVGYQPYRVVVLSFELLHAPATVCGPKKSTNLVKNKCVNFNFNGLTGTGVLTESNKKFLPFQQFGRDIADTTDAVRDPQTLEILDITPCSFGGVSVITPGTNTSNQVAVLYQGVNCTEVPVAIHADQLTPTWRVYSTGSNVFQTRAGCLIGAEHVNNSYECDIPIGAGICASYQTQTNSPRRARSVASQSIIAYTMSLGAENSVAYSNNSIAIPTNFTISVTTEILPVSMTKTSVDCTMYICGDSTECSNLLLQYGSFCTQLNRALTGIAVEQDKNTQEVFAQVKQIYKTPPIKDFGGFNFSQILPDPSKPSKRSFIEDLLFNKVTLADAGFIKQYGDCLGDIAARDLICAQKFNGLTVLPPLLTDEMIAQYTSALLAGTITSGWTFGAGAALQIPFAMQMAYRFNGIGVTQNVLYENQKLIANQFNSAIGKIQDSLSSTAPALGKLQDVVNQNAQALNTLVKCLSSNFGAISSVLNDILSRLDKVEAEVQIDRLITGRLQCLQTYVTQQLIRAAEIRASANLAATKMSECVLGQSKRVDFCGKGYHLMSFPQSAPHGVVFLHVTYVPAQEKNFTTAPAICHDGKAHFPREGVFVSNGTHWFVTQRNFYEPQIITTDNTFVSGNCDVVIGIVNNTVYDPLQPELDSFKEELDKYFKNHTSPDVDLGDISGINASVVNIQKEIDRLNEVAKNLNESLIDLQELGKYEQYIKGGGGSDIDPYKEFGSSYQLLNFLPLDFFPDLNALVDTATALYEEELTGREHCSPHHTAIRQALVCWDELTKLIAWMSSNITSEQVRTIIVNHVNDTWGLKVRQSLWFHLSCLTFGQHTVQEFLVSFGVWIRTPAPYRPPNAPILSTLPEHTVIC

SEQ ID NO: 7336 - protein, 1365 aa, Artificial Sequence
  SARS-CoV-2/Germany/BavPat3/2020__EPI_ISL_414521 spike protein (1-1211)(Q965C_S1003C) WhcAg construct
MFVFLVLLPLVSSQCVNLTTRTQLPPAYTNSFTRGVYYPDKVFRSSVLHSTQDLFLPFFSNVTWFHAIHVSGTNGTKRFDNPVLPFNDGVYFASTEKSNIIRGWIFGTTLDSKTQSLLIVNNATNVVIKVCEFQFCNDPFLGVYYHKNNKSWMESEFRVYSSANNCTFEYVSQPFLMDLEGKQGNFKNLREFVFKNIDGYFKIYSKHTPINLVRDLPQGFSALEPLVDLPIGINITRFQTLLALHRSYLTPGDSSSGWTAGAAAYYVGYLQPRTFLLKYNENGTITDAVDCALDPLSETKCTLKSFTVEKGIYQTSNFRVQPTESIVRFPNITNLCPFGEVFNATRFASVYAWNRKRISNCVADYSVLYNSASFSTFKCYGVSPTKLNDLCFTNVYADSFVIRGDEVRQIAPGQTGKIADYNYKLPDDFTGCVIAWNSNNLDSKVGGNYNYLYRLFRKSNLKPFERDISTEIYQAGSTPCNGVEGFNCYFPLQSYGFQPTNGVGYQPYRVVVLSFELLHAPATVCGPKKSTNLVKNKCVNFNFNGLTGTGVLTESNKKFLPFQQFGRDIADTTDAVRDPQTLEILDITPCSFGGVSVITPGTNTSNQVAVLYQDVNCTEVPVAIHADQLTPTWRVYSTGSNVFQTRAGCLIGAEHVNNSYECDIPIGAGICASYQTQTNSPRRARSVASQSIIAYTMSLGAENSVAYSNNSIAIPTNFTISVTTEILPVSMTKTSVDCTMYICGDSTECSNLLLQYGSFCTQLNRALTGIAVEQDKNTQQVFAQVKQIYKTPPIKDFGGFNFSQILPDPSKPSKRSFIEDLLFNKVTLADAGFIKQYGDCLGDIAARDLICAQKFNGLTVLPPLLTDEMIAQYTSALLAGTITSGWTFGAGAALQIPFAMQMAYRFNGIGVTQNVLYENQKLIANQFNSAIGKIQDSLSSTASALGKLQDVVNQNAQALNTLVKCLSSNFGAISSVLNDILSRLDKVEAEVQIDRLITGRLQCLQTYVTQQLIRAAEIRASANLAATKMSECVLGQSKRVDFCGKGYHLMSFPQSAPHGVVFLHVTYVPAQEKNFTTAPAICHDGKAHFPREGVFVSNGTHWFVTQRNFYEPQIITTDNTFVSGNCDVVIGIVNNTVYDPLQPELDSFKEELDKYFKNHTSPDVDLGDISGINASVVNIQKEIDRLNEVAKNLNESLIDLQELGKYEQYIKGGGGSDIDPYKEFGSSYQLLNFLPLDFFPDLNALVDTATALYEEELTGREHCSPHHTAIRQALVCWDELTKLIAWMSSNITSEQVRTIIVNHVNDTWGLKVRQSLWFHLSCLTFGQHTVQEFLVSFGVWIRTPAPYRPPNAPILSTLPEHTVIC

SEQ ID NO: 7337 - protein, 1365 aa, Artificial Sequence
  SARS-CoV-2/France/HF1805/2020__EPI_ISL_414628 spike protein (1-1211)(Q965C_S1003C) WhcAg construct
MFVFLVLLPLVSSQCVNLTTRTQLPPAYTNSFTRGVYYPDKVFRSSVLHSTQDLFLPFFSNVTWFHAIHVSGTNGTKRFDNPVLPFNDGVYFASTEKSNIIRGWIFGTTLDSKTQSLLIVNNATNVVIKVCEFQFCNDPFLGVYYHKNNKSWMESEFRVYSSANNCTFEYVSQPFLMDLEGKQGNFKNLREFVFKNIDGYFKIYSKHTPINLVRDLPQGFSALEPLVDLPIGINITRFQTLLALHRSYLTPGDSSSGWTAGAAAYYVGYLQPRTFLLKYNENGTITDAVDCALDPLSETKCTLKSFTVEKGIYQTSNFRVQPTESIVRFPNITNLCPFGEVFNATRFASVYAWNRKRISNCVADYSVLYNSASFSTFKCYGVSPTKLNDLCFTNVYADSFVIRGDEVRQIAPGQTGKIADYNYKLPDDFTGCVIAWNSNNLDSKVGGNYNYLYRLFRKSNLKPFERDISTEIYQAGSTPCNGVEGFNCYFPLQSYGFQPTNGVGYQPYRVVVLSFELLHAPATVCGPKKSTNLVKNKCVNFNFNGLTGTGVLTESNKKFLPFQQFGRDIADTTDAVRDPQTLEILDITPCSFGGVSVITPGTNTSNQVAVLYQGVNCTEVPVAIHADQLTPTWRVYSTGSNVFQTRAGCLIGAEHVNNSYECDIPIGAGICASYQTQTNSPRRARSVASQSIIAYTMSLGAENSVAYSNNSIAIPTNFTISVTTEILPVSMTKTSVDCTMYICGDSTECSNLLLQYGSFCTQLNRALTGIAVEQDKNTQEVFAQVKQIYKTPPIKDFGGFNFSQILPDPSKPSKRSFIEDLLFNKVTLADAGFIKQYGDCLGDIAARDLICAQKFNGLTVLPPLLTDEMIAQYTSALLAGTITSGWTFGAGAALQIPFAMQMAYRFNGIGVTQNVLYENQKLIANQFNSAIGKIQDSLSSTASALGKLQDVVNQNAQALNTLVKCLSSNFGAISSVLNDILSRLDKVEAEVQIDRLITGRLQCLQTYVTQQLIRAAEIRASANLAATKMSECVLGQSKRVDFCGKGYHLMSFPQSAPHGVVFLHVTYVPAQEKNFTTAPAICHDGKAHFPREGVFVSNGTHWFVTQRNFYEPQIITTDNTFVSGNCDVVIGVVNNTVYDPLQPELDSFKEELDKYFKNHTSPDVDLGDISGINASVVNIQKEIDRLNEVAKNLNESLIDLQELGKYEQYIKGGGGSDIDPYKEFGSSYQLLNFLPLDFFPDLNALVDTATALYEEELTGREHCSPHHTAIRQALVCWDELTKLIAWMSSNITSEQVRTIIVNHVNDTWGLKVRQSLWFHLSCLTFGQHTVQEFLVSFGVWIRTPAPYRPPNAPILSTLPEHTVIC

SEQ ID NO: 7338 - protein, 1365 aa, Artificial Sequence
  SARS-CoV-2/Netherlands/ZuidHolland_9/2020__EPI_ISL_414445 spike protein (1-1211)(Q965C_S1003C) WhcAg construct
MFVFLVLLPLVSSQCVNLTTRTQLPPAYTNSFTRGVYYPDKVFRSSVLHSTQDLFLPFFSNVTWFHAIHVSGTNGTKRFDNPVLPFNDGVYFASTEKSNIIRGWIFGTTLDSKTQSLLIVNNATNVVIKVCEFQFCNDPFLGVYYHKNNKSWMESEFRVYSSANNCTFEYVSQPFLMDLEGKQGNFKNLREFVFKNIDGYFKIYSKHTPINLVRDLPQGFSALEPLVDLPIGINITRFQTLLALHRSYLTPGDSSSGWTAGAAAYYVGYLQPRTFLLKYNENGTITDAVDCALDPLSETKCTLKSFTVEKGIYQTSNFRVQPTESIVRFPNITNLCPFGEVFNATRFASVYAWNRKRISNCVADYSVLYNSASFSTFKCYGVSPTKLNDLCFTNVYADSFVIRGDEVRQIAPGQTGKIADYNYKLPDDFTGCVIAWNSNNLDSKVGGNYNYLYRLFRKSNLKPFERDISTEIYQAGSTPCNGVEGFNCYFPLQSYGFQPTNGVGYQPYRVVVLSFELLHAPATVCGPKKSTNLVKNKCVNFNFNGLTGTGVLTESNKKFLPFQQFGRDIADTTDAVRDPQTLEILDITPCSFGGVSVITPGTNTSNQVAVLYQGVNCTEVPVAIHADQLTPTWRVYSTGSNVFQTRAGCLIGAEHVNNSYECDIPIGAGICASYQTQTNSPRRARSVASQSIIAYTMSLGAENSVAYSNNSIAIPTNFTISVTTEILPVSMTKTSVDCTMYICGDSTECSNLLLQYGSFCTQLNRALTGIAVEQDKNTQEVFAQVKQIYKTPPIKDFGGFNFSQILPDPSKPSKRSFIEDLLFNKVTLADAGFIKQYGDCLGDIAARDLICVQKFNGLTVLPPLLTDEMIAQYTSALLAGTITSGWTFGAGAALQIPFAMQMAYRFNGIGVTQNVLYENQKLIANQFNSAIGKIQDSLSSTASALGKLQDVVNQNAQALNTLVKCLSSNFGAISSVLNDILSRLDKVEAEVQIDRLITGRLQCLQTYVTQQLIRAAEIRASANLAATKMSECVLGQSKRVDFCGKGYHLMSFPQSAPHGVVFLHVTYVPAQEKNFTTAPAICHDGKAHFPREGVFVSNGTHWFVTQRNFYEPQIITTDNTFVSGNCDVVIGIVNNTVYDPLQPELDSFKEELDKYFKNHTSPDVDLGDISGINASVVNIQKEIDRLNEVAKNLNESLIDLQELGKYEQYIKGGGGSDIDPYKEFGSSYQLLNFLPLDFFPDLNALVDTATALYEEELTGREHCSPHHTAIRQALVCWDELTKLIAWMSSNITSEQVRTIIVNHVNDTWGLKVRQSLWFHLSCLTFGQHTVQEFLVSFGVWIRTPAPYRPPNAPILSTLPEHTVIC

SEQ ID NO: 7339 - protein, 1365 aa, Artificial Sequence
  SARS-CoV-2/Finland/FIN03032020A/2020__EPI_ISL_413602 spike protein (1-1211)(Q965C_S1003C) WhcAg construct
MFVFLVLLPLVSSQCVNLTTRTQLPPAYTNSFTRGVYYPDKVFRSSVLHSTQDLFLPFFSNVTWFHAIHVSGTNGTKRFDNPVLPFNDGVYFASTEKSNIIRGWIFGTTLDSKTQSLLIVNNATNVVIKVCEFQFCNDPFLGVYYHKNNKSWMESEFRVYSSANNCTFEYVSQPFLMDLEGKQGNFKNLREFVFKNIDGYFKIYSKHTPINLVRDLPQGFSALEPLVDLPIGINITRFQTLLALHRSYLTPGDSSSGWTAGAAAYYVGYLQPRTFLLKYNENGTITDAVDCALDPLSETKCTLKSFTVEKGIYQTSNFRVQPTESIVRFPNITNLCPFGEVFNATRFASVYAWNRKRISNCVADYSVLYNSASFSTFKCYGVSPTKLNDLCFTNVYADSFVIRGDEVRQIAPGQTGKIADYNYKLPDDFTGCVISWNSNNLDSKVGGNYNYLYRLFRKSNLKPFERDISTEIYQAGSTPCNGVEGFNCYFPLQSYGFQPTNGVGYQPYRVVVLSFELLHAPATVCGPKKSTNLVKNKCVNFNFNGLTGTGVLTESNKKFLPFQQFGRDIADTTDAVRDPQTLEILDITPCSFGGVSVITPGTNTSNQVAVLYQGVNCTEVPVAIHADQLTPTWRVYSTGSNVFQTRAGCLIGAEHVNNSYECDIPIGAGICASYQTQTNSPRRARSVASQSIIAYTMSLGAENSVAYSNNSIAIPTNFTISVTTEILPVSMTKTSVDCTMYICGDSTECSNLLLQYGSFCTQLNRALTGIAVEQDKNTQEVFAQVKQIYKTPPIKDFGGFNFSQILPDPSKPSKRSFIEDLLFNKVTLADAGFIKQYGDCLGDIAARDLICAQKFNGLTVLPPLLTDEMIAQYTSALLAGTITSGWTFGAGAALQIPFAMQMAYRFNGIGVTQNVLYENQKLIANQFNSAIGKIQDSLSSTASALGKLQDVVNQNAQALNTLVKCLSSNFGAISSVLNDILSRLDKVEAEVQIDRLITGRLQCLQTYVTQQLIRAAEIRASANLAATKMSECVLGQSKRVDFCGKGYHLMSFPQSAPHGVVFLHVTYVPAQEKNFTTAPAICHDGKAHFPREGVFVSNGTHWFVTQRNFYEPQIITTDNTFVSGNCDVVIGIVNNTVYDPLQPELDSFKEELDKYFKNHTSPDVDLGDISGINASVVNIQKEIDRLNEVAKNLNESLIDLQELGKYEQYIKGGGGSDIDPYKEFGSSYQLLNFLPLDFFPDLNALVDTATALYEEELTGREHCSPHHTAIRQALVCWDELTKLIAWMSSNITSEQVRTIIVNHVNDTWGLKVRQSLWFHLSCLTFGQHTVQEFLVSFGVWIRTPAPYRPPNAPILSTLPEHTVIC

SEQ ID NO: 7340 - protein, 1365 aa, Artificial Sequence
  SARS-CoV-2/France/GE1977/2020__EPI_ISL_414632 spike protein (1-1211)(Q965C_S1003C) WhcAg construct
MFVFLVLLPLVSSQCVNLTTRTQLPPAYTNSFTRGVYYPDKVFRSSVLHSTQDLFLPFFSNVTWFHAIHVSGTNGTKRFDNPVLPFNDGVYFASTEKSNIIRGWIFGTTLDSKTQSLLIVNNATNVVIKVCEFQFCNDPFLGVYYHKNNKSWMESEFRVYSSANNCTFEYVSQPFLMDLEGKQGNFKNLREFVFKNIDGYFKIYSKHTPINLVRDLPQGFSALEPLVDLPIGINITRFQTLLALHRSYLTPGDSSSGWTAGAAAYYVGYLQPRTFLLKYNENGTITDAVDCALDPLSETKCTLKSFTVEKGIYQTSNFRVQPTESIVRFPNITNLCPFGEVFNATRFASVYAWNRKRISNCVADYSVLYNSASFSTFKCYGVSPTKLNDLCFTNVYADSFVIRGDEVRQIAPGQTGKIADYNYKLPDDFTGCVIAWNSNNLDSKVGGNYNYLYRLFRKSNLKPFERDISTEIYQAGSTPCNGVEGFNCYFPLQSYGFQPTNGVGYQPYRVVVLSFELLHAPATVCGPKKSTNLVKNKCVNFNFNGLTGTGVLTESNKKFLPFQQFGRDIADTTDAVRDPQTLEILDITPCSFGGVSVITPGTNTSNQVAVLYQGVNCTEVPVAIHADQLTPTWRVYSTGSNVFQTRAGCLIGAEHVNNSYECDIPIGAGICASYQTQTNSPRRARSVASQSIIAYTMSLGAENSVAYSNNSIAIPTNFTISVTTEILPVSMTKTSVDCTMYICGDSTECSNLLLQYGSFCTQLNRALTGIAVEQDKNTQEVFAQVKQIYKTPPIKDFGGFNFSQILPDPSKPSKRSFIEDLLFNKVTLADAGFIKQYGDCLGDIAARDLICAQKFNGLTVLPPLLTDEMIAQYTSALLAGTITSGWTFGAGAALQIPFAMQMAYRFNGIGVTQNVLYENQKLIANQFNSAIGKIQDSLFSTASALGKLQDVVNQNAQALNTLVKCLSSNFGAISSVLNDILSRLDKVEAEVQIDRLITGRLQCLQTYVTQQLIRAAEIRASANLAATKMSECVLGQSKRVDFCGKGYHLMSFPQSAPHGVVFLHVTYVPAQEKNFTTAPAICHDGKAHFPREGVFVSNGTHWFVTQRNFYEPQIITTDNTFVSGNCDVVIGIVNNTVYDPLQPELDSFKEELDKYFKNHTSPDVDLGDISGINASVVNIQKEIDRLNEVAKNLNESLIDLQELGKYEQYIKGGGGSDIDPYKEFGSSYQLLNFLPLDFFPDLNALVDTATALYEEELTGREHCSPHHTAIRQALVCWDELTKLIAWMSSNITSEQVRTIIVNHVNDTWGLKVRQSLWFHLSCLTFGQHTVQEFLVSFGVWIRTPAPYRPPNAPILSTLPEHTVIC

SEQ ID NO: 7341 - protein, 1365 aa, Artificial Sequence
  SARS-CoV-2/Finland/FIN-313/2020__EPI_ISL_414641 spike protein (1-1211)(Q965C_S1003C) WhcAg construct
MFVFLVLLPLVSSQCVNLTTRTQLPPAYTNSFTRGVYYPDKVFRSSVLHSTQDLFLPFFSNVTWFHAIHVSGTNGTKRFDNPVLPFNDGVYFASTEKSNIIRGWIFGTTLDSKTQSLLIVNNATNVVIKVCEFQFCNDPFLGVYYHKNNKSWMESEFRVYSSANNCTFEYVSQPFLMDLEGKQGNFKNLREFVFKNIDGYFKIYSKHTPINLVRDLPQGFSALEPLVDLPIGINITRFKTLLALHRSYLTPGDSSSGWTAGAAAYYVGYLQPRTFLLKYNENGTITDAVDCALDPLSETKCTLKSFTVEKGIYQTSNFRVQPTESIVRFPNITNLCPFGEVFNATRFASVYAWNRKRISNCVADYSVLYNSASFSTFKCYGVSPTKLNDLCFTNVYADSFVIRGDEVRQIAPGQTGKIADYNYKLPDDFTGCVIAWNSNNLDSKVGGNYNYLYRLFRKSNLKPFERDISTEIYQAGSTPCNGVEGFNCYFPLQSYGFQPTNGVGYQPYRVVVLSFELLHAPATVCGPKKSTNLVKNKCVNFNFNGLTGTGVLTESNKKFLPFQQFGRDIADTTDAVRDPQTLEILDITPCSFGGVSVITPGTNTSNQVAVLYQGVNCTEVPVAIHADQLTPTWRVYSTGSNVFQTRAGCLIGAEHVNNSYECDIPIGAGICASYQTQTNSPRRARSVASQSIIAYTMSLGAENSVAYSNNSIAIPTNFTISVTTEILPVSMTKTSVDCTMYICGDSTECSNLLLQYGSFCTQLNRALTGIAVEQDKNTQEVFAQVKQIYKTPPIKDFGGFNFSQILPDPSKPSKRSFIEDLLFNKVTLADAGFIKQYGDCLGDIAARDLICAQKFNGLTVLPPLLTDEMIAQYTSALLAGTITSGWTFGAGAALQIPFAMQMAYRFNGIGVTQNVLYENQKLIANQFNSAIGKIQDSLSSTASALGKLQDVVNQNAQALNTLVKCLSSNFGAISSVLNDILSRLDKVEAEVQIDRLITGRLQCLQTYVTQQLIRAAEIRASANLAATKMSECVLGQSKRVDFCGKGYHLMSFPQSAPHGVVFLHVTYVPAQEKNFTTAPAICHDGKAHFPREGVFVSNGTHWFVTQRNFYEPQIITTDNTFVSGNCDVVIGIVNNTVYDPLQPELDSFKEELDKYFKNHTSPDVDLGDISGINASVVNIQKEIDRLNEVAKNLNESLIDLQELGKYEQYIKGGGGSDIDPYKEFGSSYQLLNFLPLDFFPDLNALVDTATALYEEELTGREHCSPHHTAIRQALVCWDELTKLIAWMSSNITSEQVRTIIVNHVNDTWGLKVRQSLWFHLSCLTFGQHTVQEFLVSFGVWIRTPAPYRPPNAPILSTLPEHTVIC

SEQ ID NO: 7342 - protein, 1365 aa, Artificial Sequence
  SARS-CoV-2/Netherlands/ZuidHolland_2/2020__EPI_ISL_414556 spike protein (1-1211)(Q965C_S1003C) WhcAg construct
MFVFLVLLPLVSSQCVNLTTRTQLPPAYTNSFTRGVYYPDKVFRSSVLHSTQDLFLPFFSNVTWFHAIHVSGTNGTKRFDNPVLPFNDGVYFASTEKSNIIRGWIFGTTLDSKTQSLLIVNNATNVVIKVCEFQFCNDPFLGVYYHKNNKSWMESEFRVYSSANNCTFEYVSQPFLMDLEGKQGNFKNLREFVFKNIDGYFKIYSKHTPINLVRDLPQGFSALEPLVDLPIGINITRFQTLLALHRSYLTPGDSSSGWTAGAAAYYVGYLQPRTFLLKYNENGTITDAVDCALDPLSETKCTLKSFTVEKGIYQTSNFRVQPTESIVRFPNITNLCPFGEVFNATRFASVYAWNRKRISNCVADYSVLYNSASFSTFKCYGVSPTKLNDLCFTNVYADSFVIRGDEVRQIAPGQTGKIADYNYKLPDDFTGCVIAWNSNNLDSKVGGNYNYLYRLFRKSNLKPFERDISTEIYQAGSTPCNGVEGFNCYFPLQSYGFQPTNGVGYQPYRVVVLSFELLHAPATVCGPKKSTNLVKNKCVNFNFNGLTGTGVLTESNKKFLPFQQFGRDIADTTDAVRDPQTLEILDITPCSFGGVSVITPGTNTSNQVAVLYQGVNCTEVPVAIHADQLTPTWRVYSTGSNVFQTRAGCLIGAEHVNNSYECDIPIGAGICASYQTQTNSPRRARSVASQSIIAYTMSLGAENSVAYSNNSIAIPTNFTISVTTEILPVSMTKTSVDCTMYICGDSTECSNLLLQYGSFCTQLNRALTGIALEQDKNTQEVFAQVKQIYKTPPIKDFGGFNFSQILPDPSKPSKRSFIEDLLFNKVTLADAGFIKQYGDCLGDIAARDLICAQKFNGLTVLPPLLTDEMIAQYTSALLAGTITSGWTFGAGAALQIPFAMQMAYRFNGIGVTQNVLYENQKLIANQFNSAIGKIQDSLSSTASALGKLQDVVNQNAQALNTLVKCLSSNFGAISSVLNDILSRLDKVEAEVQIDRLITGRLQCLQTYVTQQLIRAAEIRASANLAATKMSECVLGQSKRVDFCGKGYHLMSFPQSAPHGVVFLHVTYVPAQEKNFTTAPAICHDGKAHFPREGVFVSNGTHWFVTQRNFYEPQIITTDNTFVSGNCDVVIGIVNNTVYDPLQPELDSFKEELDKYFKNHTSPDVDLGDISGINASVVNIQKEIDRLNEVAKNLNESLIDLQELGKYEQYIKGGGGSDIDPYKEFGSSYQLLNFLPLDFFPDLNALVDTATALYEEELTGREHCSPHHTAIRQALVCWDELTKLIAWMSSNITSEQVRTIIVNHVNDTWGLKVRQSLWFHLSCLTFGQHTVQEFLVSFGVWIRTPAPYRPPNAPILSTLPEHTVIC

SEQ ID NO: 7343 - protein, 1365 aa, Artificial Sequence
  SARS-CoV-2/USA/WA-UW31/2020__EPI_ISL_414618 spike protein (1-1211)(Q965C_S1003C) WhcAg construct
MFVFLVLLPLVSSQCVNLTTRTQLPPAYTNSFTRGVYYPDKVFRSSVLHSTQDLFLPFFSNVTWFHAIHVSGTNGTKRFDNPVLPFNDGVYFASTEKSNIIRGWIFGTTLDSKTQSLLIVNNATNVVIKVCEFQFCNDPFLGVYYHKNNKSWMESEFRVYSSANNCTFEYVSQPFLMDLEGKQGNFKNLREFVFKNIDGYFKIYSKHTPINLVRDLPQGFSALEPLVDLPIGINITRFQTLLALHRSYLTPGDSSSGWTAGAAAYYVGYLQPRTFLLKYNENGTITDAVDCALDPLSETKCTLKSFTVEKGIYQTSNFRVQPTESIVRFPNITNLCPFGEVFNATRFASVYAWNRKRISNCVADYSVLYNSASFSTFKCYGVSPTKLNDLCFTNVYADSFVIRGDEVRQIAPGQTGKIADYNYKLPDDFTGCVIAWNSNNLDSKVGGNYNYLYRLFRKSNLKPFERDISTEIYQAGSTPCNGAEGFNCYFPLQSYGFQPTNGVGYQPYRVVVLSFELLHAPATVCGPKKSTNLVKNKCVNFNFNGLTGTGVLTESNKKFLPFQQFGRDIADTTDAVRDPQTLEILDITPCSFGGVSVITPGTNTSNQVAVLYQDVNCTEVPVAIHADQLTPTWRVYSTGSNVFQTRAGCLIGAEHVNNSYECDIPIGAGICASYQTQTNSPRRARSVASQSIIAYTMSLGAENSVAYSNNSIAIPTNFTISVTTEILPVSMTKTSVDCTMYICGDSTECSNLLLQYGSFCTQLNRALTGIAVEQDKNTQEVFAQVKQIYKTPPIKDFGGFNFSQILPDPSKPSKRSFIEDLLFNKVTLADAGFIKQYGDCLGDIAARDLICAQKFNGLTVLPPLLTDEMIAQYTSALLAGTITSGWTFGAGAALQIPFAMQMAYRFNGIGVTQNVLYENQKLIANQFNSAIGKIQDSLSSTASALGKLQDVVNQNAQALNTLVKCLSSNFGAISSVLNDILSRLDKVEAEVQIDRLITGRLQCLQTYVTQQLIRAAEIRASANLAATKMSECVLGQSKRVDFCGKGYHLMSFPQSAPHGVVFLHVTYVPAQEKNFTTAPAICHDGKAHFPREGVFVSNGTHWFVTQRNFYEPQIITTDNTFVSGNCDVVIGIVNNTVYDPLQPELDSFKEELDKYFKNHTSPDVDLGDISGINASVVNIQKEIDRLNEVAKNLNESLIDLQELGKYEQYIKGGGGSDIDPYKEFGSSYQLLNFLPLDFFPDLNALVDTATALYEEELTGREHCSPHHTAIRQALVCWDELTKLIAWMSSNITSEQVRTIIVNHVNDTWGLKVRQSLWFHLSCLTFGQHTVQEFLVSFGVWIRTPAPYRPPNAPILSTLPEHTVIC

SEQ ID NO: 7344 - protein, 1365 aa, Artificial Sequence
  SARS-CoV-2/South Korea/SNU01/2020__EPI_ISL_411929 spike protein (1-1211)(Q965C_S1003C) WhcAg construct
MFVFLVLLPLVSSQCVNLTTRTQLPPAYTNSFTRGVYYPDKVFRSSVLHSTQDLFLPFFSNVTWFHAIHVSGTNGTKRFDNPVLPFNDGVYFASTEKSNIIRGWIFGTTLDSKTQSLLIVNNATNVVIKVCEFQFCNDPFLGVYYHKNNKSWMESEFRVYSSANNCTFEYVSQPFLMDLEGKQGNFKNLREFVFKNIDGYFKIYSKHTPINLVRDLPQGFWALEPLVDLPIGINITRFQTLLALHRSYLTPGDSSSGWTAGAAAYYVGYLQPRTFLLKYNENGTITDAVDCALDPLSETKCTLKSFTVEKGIYQTSNFRVQPTESIVRFPNITNLCPFGEVFNATRFASVYAWNRKRISNCVADYSVLYNSASFSTFKCYGVSPTKLNDLCFTNVYADSFVIRGDEVRQIAPGQTGKIADYNYKLPDDFTGCVIAWNSNNLDSKVGGNYNYLYRLFRKSNLKPFERDISTEIYQAGSTPCNGVEGFNCYFPLQSYGFQPTNGVGYQPYRVVVLSFELLHAPATVCGPKKSTNLVKNKCVNFNFNGLTGTGVLTESNKKFLPFQQFGRDIADTTDAVRDPQTLEILDITPCSFGGVSVITPGTNTSNQVAVLYQDVNCTEVPVAIHADQLTPTWRVYSTGSNVFQTRAGCLIGAEHVNNSYECDIPIGAGICASYQTQTNSPRRARSVASQSIIAYTMSLGAENSVAYSNNSIAIPTNFTISVTTEILPVSMTKTSVDCTMYICGDSTECSNLLLQYGSFCTQLNRALTGIAVEQDKNTQEVFAQVKQIYKTPPIKDFGGFNFSQILPDPSKPSKRSFIEDLLFNKVTLADAGFIKQYGDCLGDIAARDLICAQKFNGLTVLPPLLTDEMIAQYTSALLAGTITSGWTFGAGAALQIPFAMQMAYRFNGIGVTQNVLYENQKLIANQFNSAIGKIQDSLSSTASALGKLQDVVNQNAQALNTLVKCLSSNFGAISSVLNDILSRLDKVEAEVQIDRLITGRLQCLQTYVTQQLIRAAEIRASANLAATKMSECVLGQSKRVDFCGKGYHLMSFPQSAPHGVVFLHVTYVPAQEKNFTTAPAICHDGKAHFPREGVFVSNGTHWFVTQRNFYEPQIITTDNTFVSGNCDVVIGIVNNTVYDPLQPELDSFKEELDKYFKNHTSPDVDLGDISGINASVVNIQKEIDRLNEVAKNLNESLIDLQELGKYEQYIKGGGGSDIDPYKEFGSSYQLLNFLPLDFFPDLNALVDTATALYEEELTGREHCSPHHTAIRQALVCWDELTKLIAWMSSNITSEQVRTIIVNHVNDTWGLKVRQSLWFHLSCLTFGQHTVQEFLVSFGVWIRTPAPYRPPNAPILSTLPEHTVIC

SEQ ID NO: 7345 - protein, 1365 aa, Artificial Sequence
  SARS-CoV-2/China/WF0004/2020__EPI_ISL_413694 spike protein (1-1211)(Q965C_S1003C) WhcAg construct
MFVFLVLLPLVSSQCVNLTTRTQLPPAYTNSFTRGVYYPDKVFRSSVLHSTQDLFLPFFSNVTWFHAIHVSGTNGTKRFDNPVLPFNDGVYFASTEKSNIIRGWIFGTTLDSKTQSLLIVNNATNVVIKVCEFQFCNDPFLGVYYHKNNKSWTESEFRVYSSANNCTFEYVSQPFLMDLEGKQGNFKNLREFVFKNIDGYFKIYSKHTPINLVRDLPQGFSALEPLVDLPIGINITRFQTLLALHRSYLTPGDSSSGWTAGAAAYYVGYLQPRTFLLKYNENGTITDAVDCALDPLSETKCTLKSFTVEKGIYQTSNFRVQPTESIVRFPNITNLCPFGEVFNATRFASVYAWNRKRISNCVADYSVLYNSASFSTFKCYGVSPTKLNDLCFTNVYADSFVIRGDEVRQIAPGQTGKIADYNYKLPDDFTGCVIAWNSNNLDSKVGGNYNYLYRLFRKSNLKPFERDISTEIYQAGSTPCNGVEGFNCYFPLQSYGFQPTNGVGYQPYRVVVLSFELLHAPATVCGPKKSTNLVKNKCVNFNFNGLTGTGVLTESNKKFLPFQQFGRDIADTTDAVRDPQTLEILDITPCSFGGVSVITPGTNTSNQVAVLYQDVNCTEVPVAIHADQLTPTWRVYSTGSNVFQTRAGCLIGAEHVNNSYECDIPIGAGICASYQTQTNSPRRARSVASQSIIAYTMSLGAENSVAYSNNSIAIPTNFTISVTTEILPVSMTKTSVDCTMYICGDSTECSNLLLQYGSFCTQLNRALTGIAVEQDKNTQEVFAQVKQIYKTPPIKDFGGFNFSQILPDPSKPSKRSFIEDLLFNKVTLADAGFIKQYGDCLGDIAARDLICAQKFNGLTVLPPLLTDEMIAQYTSALLAGTITSGWTFGAGAALQIPFAMQMAYRFNGIGVTQNVLYENQKLIANQFNSAIGKIQDSLSSTASALGKLQDVVNQNAQALNTLVKCLSSNFGAISSVLNDILSRLDKVEAEVQIDRLITGRLQCLQTYVTQQLIRAAEIRASANLAATKMSECVLGQSKRFDFCGKGYHLMSFPQSAPHGVVFLHVTYVPAQEKNFTTAPAICHDGKAHFPREGVFVSNGTHWFVTQRNFYEPQIITTDNTFVSGNCDVVIGIVNNTVYDPLQPELDSFKEELDKYFKNHTSPDVDLGDISGINASVVNIQKEIDRLNEVAKNLNESLIDLQELGKYEQYIKGGGGSDIDPYKEFGSSYQLLNFLPLDFFPDLNALVDTATALYEEELTGREHCSPHHTAIRQALVCWDELTKLIAWMSSNITSEQVRTIIVNHVNDTWGLKVRQSLWFHLSCLTFGQHTVQEFLVSFGVWIRTPAPYRPPNAPILSTLPEHTVIC

SEQ ID NO: 7346 - protein, 1365 aa, Artificial Sequence
  SARS-CoV-2/China/WF0028/2020__EPI_ISL_413791 spike protein (1-1211)(Q965C_S1003C) WhcAg construct
MFVFLVLLPLVSSQCVNLTTRTQLPPAYTNSFTRGVYYPDKVFRSSVLHSTQDLFLPFFSNVTWFHAIHVSGTNGTKRFDNPVLPFNDGVYFASTEKSNIIRGWIFGTTLDSKTQSLLIVNNATNVVIKVCEFQFCNDPFLGVYYHKNNKSWMESEFRVYSSANNCTFEYVSQPFLMDLEGKQGNFKNLREFVFKNIDGYFKIYSKHTPINLVRDLPQGFSALEPLVDLPIGINITRFQTLLALHRSYLTPGDSSSGWTAGAAAYYVGYLQPRTFLLKYNENGTITDAVDCALDPLSETKCTLKSFTVEKGIYQTSNFRVQPTESIVRFPNITNLCPFGEVFNATRFASVYAWNRKRISNCVADYSVLYNSASFSTFKCYGVSPTKLNDLCFTNVYADSFVIRGDEVRQIAPGQTGKIADYNYKLPDDFTGCVIAWNSNNLDSKVGGNYNYLYRLFRKSNLKPFERDISTEIYQAGSTPCNGVEGFNCYFPLQSYGFQPTNGVGYQPYRVVVLSFELLHAPATVCGPKKSTNLVKNKCVNFNFNGLTGTGVLTESNKKFLPFQQFGRDIADTTDAVRDPQTLEILDITPCSFGGVSVITPGTNTSNQVAVLYQDVNCTEVPVAIHADQLTPTWRVYSTGSNVFQTRAGCLIGAEHVNNSYECDIPIGAGICASYQTQTNSPRRARSVASQSIIAYTMSLGAENSVAYSNNSIAIPTNFTISVTTEILPVSMTKTSVDCTMYICGDSTECSNLLLQYGSFCTQLNRALTGIAVEQDKNTQEVFAQVKQIYKTPPIKDFGGFNFSQILPDPSKPSKRSFIEDLLFNKVTLADAGFIKQYGDCLGDIAARDLICAQKFNGLTVLPPLLTDEMIAQYTSALLAGTITSGWTFGAGAALQIPFAMQMAYRFNGIGVTQNVLYENQKLIANQFNSAIGKIQDSLSSTASALGKLQDVVNQNAQALNTLVKCLSSNFGAISSVLNDILSRLDKVEAEVQIDRLITGRLQCLQTYVTQQLIRAAEIRASANLAATKMSECVLGQSKRVDFCGKGYHLMSFPQSAPHGVVFLHVTYVPAQEKNFTTAPAICHDGKAHFPREGVFVSNGTHWFVTQRNFYEPQIITTDNTFVSGNCDVVIGIVNNTVYDPLQPELESFKEELDKYFKNHTSPDVDLGDISGINASVVNIQKEIDRLNEVAKNLNESLIDLQELGKYEQYIKGGGGSDIDPYKEFGSSYQLLNFLPLDFFPDLNALVDTATALYEEELTGREHCSPHHTAIRQALVCWDELTKLIAWMSSNITSEQVRTIIVNHVNDTWGLKVRQSLWFHLSCLTFGQHTVQEFLVSFGVWIRTPAPYRPPNAPILSTLPEHTVIC

SEQ ID NO: 7347 - protein, 1365 aa, Artificial Sequence
  SARS-CoV-2/2019-nCoV/USA-CruiseA-18/2020__MT159716.1 spike protein (1-1211)(Q965C_S1003C) WhcAg construct
MFVFLVLLPLVSSQCVNLTTRTQLPPAYTNSFTRGVYYPDKVFRSSVLHSTQDLFLPFFSNVTWFHAIHVSGTNGTKRFDNPVLPFNDGVYFASTEKSNIIRGWIFGTTLDSKTQSLLIVNNATNVVIKVCEFQFCNDPFLGVYYHKNNKSWMESELRVYSSANNCTFEYVSQPFLMDLEGKQGNFKNLREFVFKNIDGYFKIYSKHTPINLVRDLPQGFSALEPLVDLPIGINITRFQTLLALHRSYLTPGDSSSGWTAGAAAYYVGYLQPRTFLLKYNENGTITDAVDCALDPLSETKCTLKSFTVEKGIYQTSNFRVQPTESIVRFPNITNLCPFGEVFNATRFASVYAWNRKRISNCVADYSVLYNSASFSTFKCYGVSPTKLNDLCFTNVYADSFVIRGDEVRQIAPGQTGKIADYNYKLPDDFTGCVIAWNSNNLDSKVGGNYNYLYRLFRKSNLKPFERDISTEIYQAGSTPCNGVEGFNCYFPLQSYGFQPTNGVGYQPYRVVVLSFELLHAPATVCGPKKSTNLVKNKCVNFNFNGLTGTGVLTESNKKFLPFQQFGRDIADTTDAVRDPQTLEILDITPCSFGGVSVITPGTNTSNQVAVLYQDVNCTEVPVAIHADQLTPTWRVYSTGSNVFQTRAGCLIGAEHVNNSYECDIPIGAGICASYQTQTNSPRRARSVASQSIIAYTMSLGAENSVAYSNNSIAIPTNFTISVTTEILPVSMTKTSVDCTMYICGDSTECSNLLLQYGSFCTQLNRALTGIAVEQDKNTQEVFAQVKQIYKTPPIKDFGGFNFSQILPDPSKPSKRSFIEDLLFNKVTLADAGFIKQYGDCLGDIAARDLICAQKFNGLTVLPPLLTDEMIAQYTSALLAGTITSGWTFGAGAALQIPFAMQMAYRFNGIGVTQNVLYENQKLIANQFNSAIGKIQDSLSSTASALGKLQDVVNQNAQALNTLVKCLSSNFGAISSVLNDILSRLDKVEAEVQIDRLITGRLQCLQTYVTQQLIRAAEIRASANLAATKMSECVLGQSKRVDFCGKGYHLMSFPQSAPHGVVFLHVTYVPAQEKNFTTAPAICHDGKAHFPREGVFVSNGTHWFVTQRNFYEPQIITTDNTFVSGNCDVVIGIVNNTVYDPLQPELDSFKEELDKYFKNHTSPDVDLGDISGINASVVNIQKEIDRLNEVAKNLNESLIDLQELGKYEQYIKGGGGSDIDPYKEFGSSYQLLNFLPLDFFPDLNALVDTATALYEEELTGREHCSPHHTAIRQALVCWDELTKLIAWMSSNITSEQVRTIIVNHVNDTWGLKVRQSLWFHLSCLTFGQHTVQEFLVSFGVWIRTPAPYRPPNAPILSTLPEHTVIC

SEQ ID NO: 7348 - protein, 1365 aa, Artificial Sequence
  SARS-CoV-2/SARS-CoV-2/Yunnan-01/human/2020/CHN__MT049951.1 spike protein (1-1211)(Q965C_S1003C) WhcAg construct
MFVFLVLLPLVSSQCVNLTTRTQLPPANTNSFTRGVYYPDKVFRSSVLHSTQDLFLPFFSNVTWFHAIHVSGTNGTKRFDNPVLPFNDGVYFASTEKSNIIRGWIFGTTLDSKTQSLLIVNNATNVVIKVCEFQFCNDPFLGVYYHKNNKSWMESEFRVYSSANNCTFEYVSQPFLMDLEGKQGNFKNLREFVFKNIDGYFKIYSKHTPINLVRDLPQGFSALEPLVDLPIGINITRFQTLLALHRSYLTPGDSSSGWTAGAAAYYVGYLQPRTFLLKYNENGTITDAVDCALDPLSETKCTLKSFTVEKGIYQTSNFRVQPTESIVRFPNITNLCPFGEVFNATRFASVYAWNRKRISNCVADYSVLYNSASFSTFKCYGVSPTKLNDLCFTNVYADSFVIRGDEVRQIAPGQTGKIADYNYKLPDDFTGCVIAWNSNNLDSKVGGNYNYLYRLFRKSNLKPFERDISTEIYQAGSTPCNGVEGFNCYFPLQSYGFQPTNGVGYQPYRVVVLSFELLHAPATVCGPKKSTNLVKNKCVNFNFNGLTGTGVLTESNKKFLPFQQFGRDIADTTDAVRDPQTLEILDITPCSFGGVSVITPGTNTSNQVAVLYQDVNCTEVPVAIHADQLTPTWRVYSTGSNVFQTRAGCLIGAEHVNNSYECDIPIGAGICASYQTQTNSPRRARSVASQSIIAYTMSLGAENSVAYSNNSIAIPTNFTISVTTEILPVSMTKTSVDCTMYICGDSTECSNLLLQYGSFCTQLNRALTGIAVEQDKNTQEVFAQVKQIYKTPPIKDFGGFNFSQILPDPSKPSKRSFIEDLLFNKVTLADAGFIKQYGDCLGDIAARDLICAQKFNGLTVLPPLLTDEMIAQYTSALLAGTITSGWTFGAGAALQIPFAMQMAYRFNGIGVTQNVLYENQKLIANQFNSAIGKIQDSLSSTASALGKLQDVVNQNAQALNTLVKCLSSNFGAISSVLNDILSRLDKVEAEVQIDRLITGRLQCLQTYVTQQLIRAAEIRASANLAATKMSECVLGQSKRVDFCGKGYHLMSFPQSAPHGVVFLHVTYVPAQEKNFTTAPAICHDGKAHFPREGVFVSNGTHWFVTQRNFYEPQIITTDNTFVSGNCDVVIGIVNNTVYDPLQPELDSFKEELDKYFKNHTSPDVDLGDISGINASVVNIQKEIDRLNEVAKNLNESLIDLQELGKYEQYIKGGGGSDIDPYKEFGSSYQLLNFLPLDFFPDLNALVDTATALYEEELTGREHCSPHHTAIRQALVCWDELTKLIAWMSSNITSEQVRTIIVNHVNDTWGLKVRQSLWFHLSCLTFGQHTVQEFLVSFGVWIRTPAPYRPPNAPILSTLPEHTVIC

SEQ ID NO: 7349 - protein, 1365 aa, Artificial Sequence
  SARS-CoV-2/USA/WA-UW292/2020__EPI_ISL_418077 spike protein (1-1211)(Q965C_S1003C) WhcAg construct
MFVFLVLLPLVSSQCVNLTTRTQLPPAYTNSFTRGVYYPDKVFRSSVLHSTQDLFLPFFSNVTWFHAIHVSGTNGTKRFDNPVLPFNDGVYFASTEKSNIIRGWIFGTTLDSKTQSLLIVNNATNVVIKVCEFQFCNDPFLGVYYHKNNKSWMESEFRVYSSANNCTFEYVSQPFLMDLEGKQGNFKNLREFVFKNIDGYFKIYSKHTPINLVRDLPQGFSALEPLVDLPIGINITRFQTLLALHRSYLTPGDSSSGWTAGAAAYYVGYLQPRTFLLKYNENGTITDAVDCALDPLSETKCTLKSFTVEKGIYQTSNFRVQPTESIVRFPNITNLCPFGEVFNATRFASVYAWNRKRISNCVADYSVLYNSASFSTFKCYGVSPTKLNDLCFTNVYADSFVIRGDEVRQIAPGQTGKIADYNYKLPDDFTGCVIAWNSNNLDSKVGGNYNYLYRLFRKSNLKPFERDISTEIYQASSTPCNGVEGFNCYFPLQSYGFQPTNGVGYQPYRVVVLSFELLHAPATVCGPKKSTNLVKNKCVNFNFNGLTGTGVLTESNKKFLPFQQFGRDIADTTDAVRDPQTLEILDITPCSFGGVSVITPGTNTSNQVAVLYQDVNCTEVPVAIHADQLTPTWRVYSTGSNVFQTRAGCLIGAEHVNNSYECDIPIGAGICASYQTQTNSPRRARSVASQSIIAYTMSLGAENSVAYSNNSIAIPTNFTISVTTEILPVSMTKTSVDCTMYICGDSTECSNLLLQYGSFCTQLNRALTGIAVEQDKNTQEVFAQVKQIYKTPPIKDFGGFNFSQILPDPSKPSKRSFIEDLLFNKVTLADAGFIKQYGDCLGDIAARDLICAQKFNGLTVLPPLLTDEMIAQYTSALLAGTITSGWTFGAGAALQIPFAMQMAYRFNGIGVTQNVLYENQKLIANQFNSAIGKIQDSLSSTASALGKLQDVVNQNAQALNTLVKCLSSNFGAISSVLNDILSRLDKVEAEVQIDRLITGRLQCLQTYVTQQLIRAAEIRASANLAATKMSECVLGQSKRVDFCGKGYHLMSFPQSAPHGVVFLHVTYVPAQEKNFTTAPAICHDGKAHFPREGVFVSNGTHWFVTQRNFYEPQIITTDNTFVSGNCDVVIGIVNNTVYDPLQPELDSFKEELDKYFKNHTSPDVDLGDISGINASVVNIQKEIDRLNEVAKNLNESLIDLQELGKYEQYIKGGGGSDIDPYKEFGSSYQLLNFLPLDFFPDLNALVDTATALYEEELTGREHCSPHHTAIRQALVCWDELTKLIAWMSSNITSEQVRTIIVNHVNDTWGLKVRQSLWFHLSCLTFGQHTVQEFLVSFGVWIRTPAPYRPPNAPILSTLPEHTVIC

SEQ ID NO: 7350 - protein, 1365 aa, Artificial Sequence
  SARS-CoV-2/Iceland/192/2020__EPI_ISL_417819 spike protein (1-1211)(Q965C_S1003C) WhcAg construct
MFVFFVLLPLVSSQCVNLTTRTQLPPAYTNSFTRGVYYPDKVFRSSVLHSTQDLFLPFFSNVTWFHAIHVSGTNGTKRFDNPVLPFNDGVYFASTEKSNIIRGWIFGTTLDSKTQSLLIVNNATNVVIKVCEFQFCNDPFLGVYYHKNNKSWMESEFRVYSSANNCTFEYVSQPFLMDLEGKQGNFKNLREFVFKNIDGYFKIYSKHTPINLVRDLPQGFSALEPLVDLPIGINITRFQTLLALHRSYLTPGDSSSGWTAGAAAYYVGYLQPRTFLLKYNENGTITDAVDCALDPLSETKCTLKSFTVEKGIYQTSNFRVQPTESIVRFPNITNLCPFGEVFNATRFASVYAWNRKRISNCVADYSVLYNSASFSTFKCYGVSPTKLNDLCFTNVYADSFVIRGDEVRQIAPGQTGKIADYNYKLPDDFTGCVIAWNSNNLDSKVGGNYNYLYRLFRKSNLKPFERDISTEIYQAGSTPCNGVEGFNCYFPLQSYGFQPTNGVGYQPYRVVVLSFELLHAPATVCGPKKSTNLVKNKCVNFNFNGLTGTGVLTESNKKFLPFQQFGRDIADTTDAVRDPQTLEILDITPCSFGGVSVITPGTNTSNQVAVLYQGVNCTEVPVAIHADQLTPTWRVYSTGSNVFQTRAGCLIGAEHVNNSYECDIPIGAGICASYQTQTNSPRRARSVASQSIIAYTMSLGAENSVAYSNNSIAIPTNFTISVTTEILPVSMTKTSVDCTMYICGDSTECSNLLLQYGSFCTQLNRALTGIAVEQDKNTQEVFAQVKQIYKTPPIKDFGGFNFSQILPDPSKPSKRSFIEDLLFNKVTLADAGFIKQYGDCLGDIAARDLICAQKFNGLTVLPPLLTDEMIAQYTSALLAGTITSGWTFGAGAALQIPFAMQMAYRFNGIGVTQNVLYENQKLIANQFNSAIGKIQDSLSSTASALGKLQDVVNQNAQALNTLVKCLSSNFGAISSVLNDILSRLDKVEAEVQIDRLITGRLQCLQTYVTQQLIRAAEIRASANLAATKMSECVLGQSKRVDFCGKGYHLMSFPQSAPHGVVFLHVTYVPAQEKNFTTAPAICHDGKAHFPREGVFVSNGTHWFVTQRNFYEPQIITTDNTFVSGNCDVVIGIVNNTVYDPLQPELDSFKEELDKYFKNHTSPDVDLGDISGINASVVNIQKEIDRLNEVAKNLNESLIDLQELGKYEQYIKGGGGSDIDPYKEFGSSYQLLNFLPLDFFPDLNALVDTATALYEEELTGREHCSPHHTAIRQALVCWDELTKLIAWMSSNITSEQVRTIIVNHVNDTWGLKVRQSLWFHLSCLTFGQHTVQEFLVSFGVWIRTPAPYRPPNAPILSTLPEHTVIC

SEQ ID NO: 7351 - protein, 1365 aa, Artificial Sequence
  SARS-CoV-2/Belgium/ULG-6939/2020__EPI_ISL_417020 spike protein (1-1211)(Q965C_S1003C) WhcAg construct
MFVFLVLLPLVSSQCVNLTTRTQLPPAYTNSFTRGVYYPDKVFRSSVLHSTQDLFLPFFSNVTWFHAIHVSGTNGTKRFDNPVLPFNDGVYFASTEKSNIIRGWIFGTTLDSKTQSLLIVNNATNVVIKVCEFQFCNDPFLGVYYHKNNKSWMESEFRVYSSANNCTFEYVSQPFLMDLEGKQGNFKNLREFVFKNIDGYFKIYSKHTPINLVRDLPQGFSALEPLVDLPIGINITRFQTLLALHRSYLTPGDSSSGWTAGAAAYYVGYLQPRTFLLKYNENGTITDAVDCALDPLSETKCTLKSFTVEKGIYQTSNFRVQPTESIVRFPNITNLCPFGEVFNATRFASVYAWNRKRISNCVADYSVLYNSASFSTFKCYGVSPTKLNDLCFTNVYADSFVIRGDEVRQIAPGQTGKIADYNYKLPDDFTGCVIAWNSNNLDSKVGGNYNYLYRLFRKSNLKPFERDISTEIYQAGSTPCNGVEGFNCYFPLQSYGFQPTNGVGYQPYRVVVLSFELLHAPATVCGPKKSTNLVKNKCVNFNFNGLTGTGVLTESNKKFLPFQQFGRDIADTTDAVRDPQTLEILDITPCSFGGVSVITPGTNTSNQVAVLYQGVNCTEVPVAIHADQLTPTWRVYSTGSNVFQTRAGCLIGAEHVNNSYECDIPIGAGICASYQTQTNSPRRARSVASQSIIAYTMSLGAENSVVYSNNSIAIPTNFTISVTTEILPVSMTKTSVDCTMYICGDSTECSNLLLQYGSFCTQLNRALTGIAVEQDKNTQEVFAQVKQIYKTPPIKDFGGFNFSQILPDPSKPSKRSFIEDLLFNKVTLADAGFIKQYGDCLGDIAARDLICAQKFNGLTVLPPLLTDEMIAQYTSALLAGTITSGWTFGAGAALQIPFAMQMAYRFNGIGVTQNVLYENQKLIANQFNSAIGKIQDSLSSTASALGKLQDVVNQNAQALNTLVKCLSSNFGAISSVLNDILSRLDKVEAEVQIDRLITGRLQCLQTYVTQQLIRAAEIRASANLAATKMSECVLGQSKRVDFCGKGYHLMSFPQSAPHGVVFLHVTYVPAQEKNFTTAPAICHDGKAHFPREGVFVSNGTHWFVTQRNFYEPQIITTDNTFVSGNCDVVIGIVNNTVYDPLQPELDSFKEELDKYFKNHTSPDVDLGDISGINASVVNIQKEIDRLNEVAKNLNESLIDLQELGKYEQYIKGGGGSDIDPYKEFGSSYQLLNFLPLDFFPDLNALVDTATALYEEELTGREHCSPHHTAIRQALVCWDELTKLIAWMSSNITSEQVRTIIVNHVNDTWGLKVRQSLWFHLSCLTFGQHTVQEFLVSFGVWIRTPAPYRPPNAPILSTLPEHTVIC

SEQ ID NO: 7352 - protein, 1365 aa, Artificial Sequence
  SARS-CoV-2/France/HF2496/2020__EPI_ISL_418231 spike protein (1-1211)(Q965C_S1003C) WhcAg construct
MFVFLVLLPLVSSQCVNLTTRTQLPPAYTNSFTRGVYYPDKVFRSSVLHSTQDLFLPFFSNVTWFHAIHVSGTNGTKRFDNPVLPFNDGVYFASTEKSNIIRGWIFGTTLDSKTQSLLIVNNATNVVIKVCEFQFCNDPFLGVYYHKNNKSWMESEFRVYSSANNCTFEYVSQPFLMDLEGKQGNFKNLREFVFKNIDGYFKIYSKHTPINLVRDLPQGFSALEPLVDLPIGINITRFQTLLALHRSYLTPGDSSSGWTAGAAAYYVGYLQPRTFLLKYNENGTITDAVDCALDPLSETKCTLKSFTVEKGIYQTSNFRVQPTESIVRFPNITNLCPFGEVFNATRFASVYAWNRKRISNCVADYSVLYNSASFSTFKCYGVSPTKLNDLCFTNVYADSFVIRGDEVRQIAPGQTGKIADYNYKLPDDFTGCVIAWNSNNLDSKVGGNYNYLYRLFRKSNLKPFERDISTEIYQAGSTPCNGVEGFNCYFPLQSYGFQPTNGVGYQPYRVVVLSFELLHAPATVCGPKKSTNLVKNKCVNFNFNGLTGTGVLTESNKKFLPFQQFGRDIADTTDAVRDPQTLEILDITPCSFGGVSVITPGTNTSNQVAVLYQGVNCTEVPVAIHADQLTPTWRVYSTGSNVFQTRAGCLIGAEHVNNSYECDIPIGAGICASYQTQTNSPRRARSVASQSIIAYTMSLGAENSVAYSNNSIAIPTNFTISVTTEILPVSMTKTSVDCTMYICGDSTECSNLLLQYGSFCTQLNRALTGIAVEQDKNTQEVFAQVKQIYKTPPIKDFGGFNFSQILPDPSKPSKRSFIEDLLFNKVTLADAGFIKQYGDCLGDIVARDLICAQKFNGLTVLPPLLTDEMIAQYTSALLAGTITSGWTFGAGAALQIPFAMQMAYRFNGIGVTQNVLYENQKLIANQFNSAIGKIQDSLSSTASALGKLQDVVNQNAQALNTLVKCLSSNFGAISSVLNDILSRLDKVEAEVQIDRLITGRLQCLQTYVTQQLIRAAEIRASANLAATKMSECVLGQSKRVDFCGKGYHLMSFPQSAPHGVVFLHVTYVPAQEKNFTTAPAICHDGKAHFPREGVFVSNGTHWFVTQRNFYEPQIITTDNTFVSGNCDVVIGIVNNTVYDPLQPELDSFKEELDKYFKNHTSPDVDLGDISGINASVVNIQKEIDRLNEVAKNLNESLIDLQELGKYEQYIKGGGGSDIDPYKEFGSSYQLLNFLPLDFFPDLNALVDTATALYEEELTGREHCSPHHTAIRQALVCWDELTKLIAWMSSNITSEQVRTIIVNHVNDTWGLKVRQSLWFHLSCLTFGQHTVQEFLVSFGVWIRTPAPYRPPNAPILSTLPEHTVIC

SEQ ID NO: 7353 - protein, 1365 aa, Artificial Sequence
  SARS-CoV-2/USA/WA-UW291/2020__EPI_ISL_418076 spike protein (1-1211)(Q965C_S1003C) WhcAg construct
MFVFLVLLPLVSSQCVNLTTRTQLPPAYTNSFTRGVYYPDKVFRSSVLHSTQDLFLPFFSNVTWFHAIHVSGTNGTKRFDNPVLPFNDGVYFASTEKSNIIRGWIFGTTLDSKTQSLLIVNNATNVVIKVCEFQFCNDPFLGVYYHKNNKSWMESEFRVYSSANNCTFEYVSQPFLMDLEGKQGNFKNLREFVFKNIDGYFKIYSKHTPINLVRDLPQGFSALEPLVDLPIGINITRFQTLLALHRSYLTPGDSSSGWTAGAAAYYVGYLQPRTFLLKYNENGTITDAVDCALDPLSETKCTLKSFTVEKGIYQTSNFRVQPTESIVRFPNITNLCPFGEVFNATRFASVYAWNRKRISNCVADYSVLYNSASFSTFKCYGVSPTKLNDLCFTNVYADSFVIRGDEVRQIAPGQTGKIADYNYKLPDDFTGCVIAWNSNNLDSKVGGNYNYLYRLFRKSNLKPFERDISTEIYQAGSTPCNGVEGFNCYFPLQSYGFQPTNGVGYQPYRVVVLSFELLHAPATVCGPKKSTNLVKNKCVNFNFNGLTGTGVLTESNKKFLPFQQFGRDIADTTDAVRDPQTLEILDITPCSFGGVSVITPGTNTSNQVAVLYQGVNCTEVPVAIHADQLTPTWRVYSTGSNVFQTRAGCLIGAEHVNNSYECDIPIGAGICASYQTQTNSPRRARSVASQSIIAYTMSLGAENSVAYSNNSIAIPTNFTISVTTEILPVSMTKTSVDCTMYICGDSTECSNLLLQYGSFCTQLNRALTGIAVEQDKNTQEVFAQVKQIYKTPPIKDFGGFNFSQILPDPSKPSKRSFIEDLLFNKVTLADAGFIKQYGDCLGDIAARDLICAQKFNGLTVLPPLLTDEMIAQYTSALLAGTITSGWTFGAGAALQIPFAMQMAYRFNGIGVTQNVLYENQKLIANQFNSAIGKIQYSLSSTASALGKLQDVVNQNAQALNTLVKCLSSNFGAISSVLNDILSRLDKVEAEVQIDRLITGRLQCLQTYVTQQLIRAAEIRASANLAATKMSECVLGQSKRVDFCGKGYHLMSFPQSAPHGVVFLHVTYVPAQEKNFTTAPAICHDGKAHFPREGVFVSNGTHWFVTQRNFYEPQIITTDNTFVSGNCDVVIGIVNNTVYDPLQPELDSFKEELDKYFKNHTSPDVDLGDISGINASVVNIQKEIDRLNEVAKNLNESLIDLQELGKYEQYIKGGGGSDIDPYKEFGSSYQLLNFLPLDFFPDLNALVDTATALYEEELTGREHCSPHHTAIRQALVCWDELTKLIAWMSSNITSEQVRTIIVNHVNDTWGLKVRQSLWFHLSCLTFGQHTVQEFLVSFGVWIRTPAPYRPPNAPILSTLPEHTVIC

SEQ ID NO: 7354 - protein, 1365 aa, Artificial Sequence; identical to SEQ ID NO: 7317
  SARS-CoV-2/Portugal/PT0034/2020__EPI_ISL_418019 spike protein (1-1211)(Q965C_S1003C) WhcAg construct

SEQ ID NO: 7355 - protein, 1365 aa, Artificial Sequence
  SARS-CoV-2/Iceland/202/2020__EPI_ISL_417750 spike protein (1-1211)(Q965C_S1003C) WhcAg construct
MFVFLVLLPLVSSQCVNLTTRTQLPPAYTNSFTRGVYYPDKVFRSSVLHSTQDLFLPFFSNVTWFHAIHVSGTNGTKRFDNPVLPFNDGVYFASTEKSNIIRGWIFGTTLDSKTQSLLIVNNATNVVIKVCEFQFCNDPFLGVYYHKNNKSWMESEFRVYSSANNCTFEYVSQPFLMDLEGKQGNFKNLREFVFKNIDGYFKIYSKHTPINLVRDLPQGFSALEPLVDLPIGINITRFQTLLALHRSYLTPGDSSSGWTAGAAAYYVGYLQPRTFLLKYNENGTITDAVDCALDPLSETKCTLKSFTVEKGIYQTSNFRVQPTESIVRFPNITNLCPFGEVFNATRFASVYAWNRKRISNCVADYSVLYNSASFSTFKCYGVSPTKLNDLCFTNVYADSFVIRGDEVRQIAPGQTGKIADYNYKLPDDFTGCVIAWNSNNLDSKVGGNYNYLYRLFRKSNLKPFERDISTEIYQAGSTPCNGVEGFNCYFPLQSYGFQPTNGVGYQPYRVVVLSFELLHAPATVCGPKKSTNLVKNKCVNFNFNGLTGTGVLTESNKKFLPFQQFGRDIADTTDAVRDPQTLEILDITPCSFGGVSVITPGTNTSNQVAVLYQDVNCTEVPVAIHADQLTPTWRVYSTGSNVFQTRAGCLIGAEHVNNSYECDIPIGAGICASYQTQTNSPRRARSVASQSIIAYTMSLGAENSVAYSNNSIAIPTNFTISVTTEILPVSMTKTSVDCTMYICGDSTECSNLLLQYGSFCTQLNRALTGIAVEQDKNTQEVFAQVKQIYKTPPIKDFGGFNFSQILPDPSKPSKRSFIEDLLFNKVTLADAGFIKQYGDCLGDIAARDLICAQKFNGLTVLPPLLTDEMIAQYTSALLAGTITSGWTFGAGAALQIPFAMQMAYRFNGIGVTQNVLYENQKLIANQFNSAIGKIQDSLSSTASALGKLQDVVNQNAQALNTLVKCLSSNFGAISSVLNDILSRLDKVEAEVQIDRLITGRLQCLQTYVTQQLIRAAEIRASANLAATKMSECVLGQSKRVDFCGKGYHLMSFPQSAPHGVVFLHVTYVPAQEKNFTTAPAICHDGKAHFPREGVFVSNGTHWFVTQRNFYEPQIITTDNTFVSGNCDVVIGIVNNTVYDPLQPELDSFKEELDKYFKNHTSPDVDLGDIPGINASVVNIQKEIDRLNEVAKNLNESLIDLQELGKYEQYIKGGGGSDIDPYKEFGSSYQLLNFLPLDFFPDLNALVDTATALYEEELTGREHCSPHHTAIRQALVCWDELTKLIAWMSSNITSEQVRTIIVNHVNDTWGLKVRQSLWFHLSCLTFGQHTVQEFLVSFGVWIRTPAPYRPPNAPILSTLPEHTVIC

SEQ ID NO: 7356 - protein, 1365 aa, Artificial Sequence
  SARS-CoV-2/USA/WA-UW261/2020__EPI_ISL_418046 spike protein (1-1211)(Q965C_S1003C) WhcAg construct
MFVFLVLLPLVSSQCVNLTTRTQLPPAYTNSFTRGVYYPDKVFRSSVLHSTQDLFLPFFSNVTWFHAIHVSGTNGTKRFDNPVLPFNDGVYFASTEKSNIIRGWIFGTTLDSKTQSLLIVNNATNVVIKVCEFQFCNDPFLGVYYHKNNKSWMESEFRVYSSANNCTFEYVSQPFLMDLEGKQGNFKNLREFVFKNIDGYFKIYSKHTPINLVRDLPQGFSALEPLVDLPIGINITRFQTLLALHRSYLTPGDSSSGWTAGAAAYYVGYLQPRTFLLKYNENGTITDAVDCALDPLSETKCTLKSFTVEKGIYQTSNFRVQPTESIVRFPNITNLCPFGEVFNATRFTSVYAWNRKRISNCVADYSVLYNSASFSTFKCYGVSPTKLNDLCFTNVYADSFVIRGDEVRQIAPGQTGKIADYNYKLPDDFTGCVIAWNSNNLDSKVGGNYNYLYRLFRKSNLKPFERDISTEIYQAGSTPCNGVEGFNCYFPLQSYGFQPTNGVGYQPYRVVVLSFELLHAPATVCGPKKSTNLVKNKCVNFNFNGLTGTGVLTESNKKFLPFQQFGRDIADTTDAVRDPQTLEILDITPCSFGGVSVITPGTNTSNQVAVLYQDVNCTEVPVAIHADQLTPTWRVYSTGSNVFQTRAGCLIGAEHVNNSYECDIPIGAGICASYQTQTNSPRRARSVASQSIIAYTMSLGAENSVAYSNNSIAIPTNFTISVTTEILPVSMTKTSVDCTMYICGDSTECSNLLLQYGSFCTQLNRALTGIAVEQDKNTQEVFAQVKQIYKTPPIKDFGGFNFSQILPDPSKPSKRSFIEDLLFNKVTLADAGFIKQYGDCLGDIAARDLICAQKFNGLTVLPPLLTDEMIAQYTSALLAGTITSGWTFGAGAALQIPFAMQMAYRFNGIGVTQNVLYENQKLIANQFNSAIGKIQDSLSSTASALGKLQDVVNQNAQALNTLVKCLSSNFGAISSVLNDILSRLDKVEAEVQIDRLITGRLQCLQTYVTQQLIRAAEIRASANLAATKMSECVLGQSKRVDFCGKGYHLMSFPQSAPHGVVFLHVTYVPAQEKNFTTAPAICHDGKAHFPREGVFVSNGTHWFVTQRNFYEPQIITTDNTFVSGNCDVVIGIVNNTVYDPLQPELDSFKEELDKYFKNHTSPDVDLGDISGINASVVNIQKEIDRLNEVAKNLNESLIDLQELGKYEQYIKGGGGSDIDPYKEFGSSYQLLNFLPLDFFPDLNALVDTATALYEEELTGREHCSPHHTAIRQALVCWDELTKLIAWMSSNITSEQVRTIIVNHVNDTWGLKVRQSLWFHLSCLTFGQHTVQEFLVSFGVWIRTPAPYRPPNAPILSTLPEHTVIC

SEQ ID NO: 7357 - protein, 1365 aa, Artificial Sequence
  SARS-CoV-2/Portugal/PT0035/2020__EPI_ISL_418020 spike protein (1-1211)(Q965C_S1003C) WhcAg construct
MFVFLVLLPLVSSQCVNLTTRTQLPPAYTNSFTRGVYYPDKVFRSSVLHSTQDLFLPFFSNVTWFHAIHVSGTNGTKRFDNPVLPFNDGVYFASTEKSNIIRGWIFGTTLDSKTQSLLIVNNATNVVIKVCEFQFCNDPFLGVYYHKNNKSWMESEFRVYSSANNCTFEYVSQPFLMDLEGKQGNFKNLREFVFKNIDGYFKIYSKHTPINLVRDLPQGFSALEPLVDLPIGINITRFQTLLALHRSYLTPGDSSSGWTAGAAAYYVGYLQPRTFLLKYNENGTITDAVDCALDPLSETKCTLKSFTVEKGIYQTSNFRVQPTESIVRFPNITNLCPFGEVFNATRFASVYAWNRKRISNCVADYSVLYNSASFSTFKCYGVSPTKLNDLCFTNVYADSFVIRGDEVRQIAPGQTGKIADYNYKLPDDFTGCVIAWNSNNLDSKVGGNYNYLYRLFRKSNLKPFERDISTEIYQAGSTPCNGVEGFNCYFPLQSYGFQPTNGVGYQPYRVVVLSFELLHAPATVCGPKKSTNLVKNKCVNFNFNGLTGTGVLTESNKKFLPFQQFGRDIADTTDAVRDPQTLEILDITPCSFGGVSVITPGTNTSNQVAVLYQDVNCTEVPVAIHADQLTPTWRVYSTGSNVFQTRAGCLIGAEHVNNSYECDIPIGAGICASYQTQTNSPRRARSVASQSIIAYTMSLGAENSVAYSNNSIAIPTNFTISVTTEILPVSMTKTSVDCTMYICGDSTECSNLLLQYGSFCTQLNRALTGIAVEQDKNTQEVFAQVKQIYKTPPIKDFGGFNFSQILPDPSKPSKRSFIEDLLFNKVTLADAGFIKQYGDCLGDISARDLICAQKFNGLTVLPPLLTDEMIAQYTSALLAGTITSGWTFGAGAALQIPFAMQMAYRFNGIGVTQNVLYENQKLIANQFNSAIGKIQDSLSSTASALGKLQDVVNQNAQALNTLVKCLSSNFGAISSVLNDILSRLDKVEAEVQIDRLITGRLQCLQTYVTQQLIRAAEIRASANLAATKMSECVLGQSKRVDFCGKGYHLMSFPQSAPHGVVFLHVTYVPAQEKNFTTAPAICHDGKAHFPREGVFVSNGTHWFVTQRNFYEPQIITTDNTFVSGNCDVVIGIVNNTVYDPLQPELDSFKEELDKYFKNHTSPDVDLGDISGINASVVNIQKEIDRLNEVAKNLNESLIDLQELGKYEQYIKGGGGSDIDPYKEFGSSYQLLNFLPLDFFPDLNALVDTATALYEEELTGREHCSPHHTAIRQALVCWDELTKLIAWMSSNITSEQVRTIIVNHVNDTWGLKVRQSLWFHLSCLTFGQHTVQEFLVSFGVWIRTPAPYRPPNAPILSTLPEHTVIC

SEQ ID NO: 7358 - protein, 1365 aa, Artificial Sequence
  SARS-CoV-2/USA/NY-NYUMC7/2020__EPI_ISL_418192 spike protein (1-1211)(Q965C_S1003C) WhcAg construct
MFVFLVLLPLVSSQCVNLTTRTQLPPAYTNSFTRGVYYPDKVFRSSVLHSTQDLFLPFFSNVTWFHAIHVSGTNGTKRFDNPVLPFNDGVYFASTEKSNIIRGWIFGTTLDSKTQSLLIVNNATNVVIKVCEFQFCNDPFLGVYHHKNNKSWMESEFRVYSSANNCTFEYVSQPFLMDLEGKQGNFKNLREFVFKNIDGYFKIYSKHTPINLVRDLPQGFSALEPLVDLPIGINITRFQTLLALHRSYLTPGDSSSGWTAGAAAYYVGYLQPRTFLLKYNENGTITDAVDCALDPLSETKCTLKSFTVEKGIYQTSNFRVQPTESIVRFPNITNLCPFGEVFNATRFASVYAWNRKRISNCVADYSVLYNSASFSTFKCYGVSPTKLNDLCFTNVYADSFVIRGDEVRQIAPGQTGKIADYNYKLPDDFTGCVIAWNSNNLDSKVGGNYNYLYRLFRKSNLKPFERDISTEIYQAGSTPCNGVEGFNCYFPLQSYGFQPTNGVGYQPYRVVVLSFELLHAPATVCGPKKSTNLVKNKCVNFNFNGLTGTGVLTESNKKFLPFQQFGRDIADTTDAVRDPQTLEILDITPCSFGGVSVITPGTNTSNQVAVLYQGVNCTEVPVAIHADQLTPTWRVYSTGSNVFQTRAGCLIGAEHVNNSYECDIPIGAGICASYQTQTNSPRRARSVASQSIIAYTMSLGAENSVAYSNNSIAIPTNFTISVTTEILPVSMTKTSVDCTMYICGDSTECSNLLLQYGSFCTQLNRALTGIAVEQDKNTQEVFAQVKQIYKTPPIKDFGGFNFSQILPDPSKPSKRSFIEDLLFNKVTLADAGFIKQYGDCLGDIAARDLICAQKFNGLTVLPPLLTDEMIAQYTSALLAGTITSGWTFGAGAALQIPFAMQMAYRFNGIGVTQNVLYENQKLIANQFNSAIGKIQDSLSSTASALGKLQDVVNQNAQALNTLVKCLSSNFGAISSVLNDILSRLDKVEAEVQIDRLITGRLQCLQTYVTQQLIRAAEIRASANLAATKMSECVLGQSKRVDFCGKGYHLMSFPQSAPHGVVFLHVTYVPAQEKNFTTAPAICHDGKAHFPREGVFVSNGTHWFVTQRNFYEPQIITTDNTFVSGNCDVVIGIVNNTVYDPLQPELDSFKEELDKYFKNHTSPDVDLGDISGINASVVNIQKEIDRLNEVAKNLNESLIDLQELGKYEQYIKGGGGSDIDPYKEFGSSYQLLNFLPLDFFPDLNALVDTATALYEEELTGREHCSPHHTAIRQALVCWDELTKLIAWMSSNITSEQVRTIIVNHVNDTWGLKVRQSLWFHLSCLTFGQHTVQEFLVSFGVWIRTPAPYRPPNAPILSTLPEHTVIC

SEQ ID NO: 7359 - protein, 1365 aa, Artificial Sequence
  SARS-CoV-2/Iceland/189/2020__EPI_ISL_417709 spike protein (1-1211)(Q965C_S1003C) WhcAg construct
MFVFLVLLPLVSSQCVNLTTRTQLPPAYTNSFTRGVYYPDKVFRSSVLHSTQDLFLPFFSNVTWFHAIHVSGTNGTKRFDNPVLPFNDGVYFASTEKSNIIRGWIFGTTLDSKTQSLLIVNNATNVVIKVCEFQFCNDPFLGVYYHKNNKSWMESEFRVYSSANNCTFEYVSQPFLMDLEGKQGNFKNLREFVFKNIDGYFKIYSKHTPINLVRDLPQGFSALEPLVDLPIGINITRFQTLLALHRSYLTPGDSSSGWTAGAAAYYVGYLQPRTFLLKYNENGTITDAVDCALDPLSETKCTLKSFTVEKGIYQTSNFRVQPTESIVRFPNITNLCPFGEVFNATRFASVYAWNRKRISNCVADYSVLYNSASFSTFKCYGVSPTKLNDLCFTNVYADSFVIRGDEVRQIAPGQTGKIADYNYKLPDDFTGCVIAWNSNNLDSKVGGNYNYLYRLFRKSNLKPFERDISTEIYQAGSTPCNGVEGFNCYFPLQSYGFQPTNGVGYQPYRVVVLSFELLHAPATVCGPKKSTNLVKNKCVNFNFNGLTGTGVLTESNKKFLPFQQFGRDIADTTDAVRDPQTLEILDITPCSFGGVSVITPGTNTSNQVAVLYQGVNCTEVPVAIHADQLTPTWRVYSTGSNVFQTRAGCLIGAEHVNNSYECDIPIGAGICASYQTQTNSPRRARSVASQSIIAYTMSLGAENSVAYSNNSIAIPTNFTISVTTEILPVSMTKTSVDCTMYICGDSTECSNLLLQYGSFCTQLNRALTGIAVEQDKNTQEVFAQVKQIYKTPPIKDFGGFNFSQILPDPSKPSKRSFIEDLLFNKVTLADAGFTKQYGDCLGDIAARDLICAQKFNGLTVLPPLLTDEMIAQYTSALLAGTITSGWTFGAGAALQIPFAMQMAYRFNGIGVTQNVLYENQKLIANQFNSAIGKIQDSLSSTASALGKLQDVVNQNAQALNTLVKCLSSNFGAISSVLNDILSRLDKVEAEVQIDRLITGRLQCLQTYVTQQLIRAAEIRASANLAATKMSECVLGQSKRVDFCGKGYHLMSFPQSAPHGVVFLHVTYVPAQEKNFTTAPAICHDGKAHFPREGVFVSNGTHWFVTQRNFYEPQIITTDNTFVSGNCDVVIGIVNNTVYDPLQPELDSFKEELDKYFKNHTSPDVDLGDISGINASVVNIQKEIDRLNEVAKNLNESLIDLQELGKYEQYIKGGGGSDIDPYKEFGSSYQLLNFLPLDFFPDLNALVDTATALYEEELTGREHCSPHHTAIRQALVCWDELTKLIAWMSSNITSEQVRTIIVNHVNDTWGLKVRQSLWFHLSCLTFGQHTVQEFLVSFGVWIRTPAPYRPPNAPILSTLPEHTVIC

SEQ ID NO: 7360 - protein, 1365 aa, Artificial Sequence
  SARS-CoV-2/Australia/NSW56/2020__EPI_ISL_417408 spike protein (1-1211)(Q965C_S1003C) WhcAg construct
MFVFLVLLPLVSSQCVNLTTRTQLPPAYTNSFTRGVYYPDKVFRSSVLHSTQDLFLPFFSNVTWFHAIHVSGTNGTKRFDNPVLPFNDGVYFASTEKSNIIRGWIFGTTLDSKTQSLLIVNNATNVVIKVCEFQFCNDPFLGVYYHKNNKSWMESEFRVYSSANNCTFEYVSQPFLMDLEGKQGNFKNLREFVFKNIDGYFKIYSKHTPINLVRDLPQGFSALEPLVDLPIGINITRFQTLLALHRSYLTPGDSSSGWTAGAAAYYVGYLQPRTFLLKYNENGTITDAVDCALDPLSETKCTLKSFTVEKGIYQTSNFRVQPTESIVRFPNITNLCPFGEVFNATRFASVYAWNRKRISNCVADYSVLYNSASFSTFKCYGVSPTKLNDLCFTNVYADSFVIRGDEVRQIAPGQTGKIADYNYKLPDDFTGCVIAWNSNNLDSKVGGNYNYLYRLFRKSNLKPFERDISTEIYQAGSTPCNGVEGFNCYFPLQSYGFQPTNGVGYQPYRVVVLSFELLHAPATVCGPKKSTNLVKNKCVNFNFNGLTGTGVLTESNKKFLPFQQFGRDIADTTDAVRDPQTLEILDITPCSFGGVSVITPGTNTSNQVAVLYQDVNCTEVPVAIHADQLTPTWRVYSTGSNVFQTRAGCLIGAEHVNNSYECDIPIGAGICASYQTQTNSPRRARSVASQSIIAYTMSLGAENSVAYSNNSIAIPTNFTISVTTEILPVSMTKTSVDCTMYICGDSTECSNLLLQYGSFCTQLNRALTGIAVEQDKNTQEVFAQVKQIYKTPPIKDFGGFNFSQILPDSSKPSKRSFIEDLLFNKVTLADAGFIKQYGDCLGDIAARDLICAQKFNGLTVLPPLLTDEMIAQYTSALLAGTITSGWTFGAGAALQIPFAMQMAYRFNGIGVTQNVLYENQKLIANQFNSAIGKIQDSLSSTASALGKLQDVVNQNAQALNTLVKCLSSNFGAISSVLNDILSRLDKVEAEVQIDRLITGRLQCLQTYVTQQLIRAAEIRASANLAATKMSECVLGQSKRVDFCGKGYHLMSFPQSAPHGVVFLHVTYVPAQEKNFTTAPAICHDGKAHFPREGVFVSNGTHWFVTQRNFYEPQIITTDNTFVSGNCDVVIGIVNNTVYDPLQPELDSFKEELDKYFKNHTSPDVDLGDISGINASVVNIQKEIDRLNEVAKNLNESLIDLQELGKYEQYIKGGGGSDIDPYKEFGSSYQLLNFLPLDFFPDLNALVDTATALYEEELTGREHCSPHHTAIRQALVCWDELTKLIAWMSSNITSEQVRTIIVNHVNDTWGLKVRQSLWFHLSCLTFGQHTVQEFLVSFGVWIRTPAPYRPPNAPILSTLPEHTVIC

SEQ ID NO: 7361 - protein, 1365 aa, Artificial Sequence
  SARS-CoV-2/Iceland/280/2020__EPI_ISL_417608 spike protein (1-1211)(Q965C_S1003C) WhcAg construct
MFVFLVLLPLVSSQCVNLTTRTQLPPAYTNSFTRGVYYPDKVFRSSVLHSTQDLFLPFFSNVTWFHAIHVSGTNGTKRFDNPVLPFNDGVYFASTEKSNIIRGWIFGTTLDSKTQSLLIVNNATNVVIKVCEFQFCNDPFLGVYYHKNNKSWMESEFRVYSSANNCTFEYVSQPFLMDLEGKQGNFKNLREFVFKNIDGYFKIYSKHTPINLVRDLPQGFSALEPLVDLPIGINITRFQTLLALHRSYLTPGDSSSGWTAGAAAYYVGYLQPRTFLLKYNENGTITDAVDCALDPLSETKCTLKSFTVEKGIYQTSNFRVQPTESIVRFPNITNLCPFGEVFNATRFASVYAWNRKRISNCVADYSVLYNSASFSTFKCYGVSPTKLNDLCFTNVYADSFVIRGDEVRQIAPGQTGKIADYNYKLPDDFTGCVIAWNSNNLDSKVGGNYNYLYRLFRKSNLKPFERDISTEIYQAGSTPCNGVEGFNCYFPLQSYGFQPTNGVGYQPYRVVVLSFELLHAPATVCGPKKSTNLVKNKCVNFNFNGLTGTGVLTESNKKFLPFQQFGRDIADTTDAVRDPQTLEILDITPCSFGGVSVITPGTNTSNQVAVLYQGVNCTEVPVAIHADQLTPTWRVYSTGSNVFQTRAGCLIGAEHVNNSYECDIPIGAGICASYHTQTNSPRRARSVASQSIIAYTMSLGAENSVAYSNNSIAIPTNFTISVTTEILPVSMTKTSVDCTMYICGDSTECSNLLLQYGSFCTQLNRALTGIAVEQDKNTQEVFAQVKQIYKTPPIKDFGGFNFSQILPDPSKPSKRSFIEDLLFNKVTLADAGFIKQYGDCLGDIAARDLICAQKFNGLTVLPPLLTDEMIAQYTSALLAGTITSGWTFGAGAALQIPFAMQMAYRFNGIGVTQNVLYENQKLIANQFNSAIGKIQDSLSSTASALGKLQDVVNQNAQALNTLVKCLSSNFGAISSVLNDILSRLDKVEAEVQIDRLITGRLQCLQTYVTQQLIRAAEIRASANLAATKMSECVLGQSKRVDFCGKGYHLMSFPQSAPHGVVFLHVTYVPAQEKNFTTAPAICHDGKAHFPREGVFVSNGTHWFVTQRNFYEPQIITTDNTFVSGNCDVVIGIVNNTVYDPLQPELDSFKEELDKYFKNHTSPDVDLGDISGINASVVNIQKEIDRLNEVAKNLNESLIDLQELGKYEQYIKGGGGSDIDPYKEFGSSYQLLNFLPLDFFPDLNALVDTATALYEEELTGREHCSPHHTAIRQALVCWDELTKLIAWMSSNITSEQVRTIIVNHVNDTWGLKVRQSLWFHLSCLTFGQHTVQEFLVSFGVWIRTPAPYRPPNAPILSTLPEHTVIC

SEQ ID NO: 7362 - protein, 1365 aa, Artificial Sequence; identical to SEQ ID NO: 7317
  SARS-CoV-2/Iceland/247/2020__EPI_ISL_417575 spike protein (1-1211)(Q965C_S1003C) WhcAg construct

SEQ ID NO: 7363 - protein, 1365 aa, Artificial Sequence
  SARS-CoV-2/Iceland/238/2020__EPI_ISL_417566 spike protein (1-1211)(Q965C_S1003C) WhcAg construct
MFVFLVLLPLVSSQCVNLTTRTQLPPAYTNSFTRGVYYPDKVFRSSVLHSTQDLFLPFFSNVTWFHAIHVSGTNGTKRFDNPVLPFNDGVYFASTEKSNIIRGWIFGTTLDSKTQSLLIVNNATNVVIKVCEFQFCNDPFLGVYYHKNNKSWMESEFRVYSSANNCTFEYVSQPFLMDLEGKQGNFKNLREFVFKNIDGYFKIYSKHTPINLVRDLPQGFSALEPLVDLPIGINITRFQTLLALHRSYLTPGDSSSGWTAGAAAYYVGYLQPRTFLLKYNENGTITDAVDCALDPLSETKCTLKSFTVEKGIYQTSNFRVQPTESIVRFPNITNLCPFGEVFNATRFASVYAWNRKRISNCVADYSVLYNSASFSTFKCYGVSPTKLNDLCFTNVYADSFVIRGDEVRQIAPGQTGKIADYNYKLPDDFTGCVIAWNSNNLDSKVGGNYNYLYRLFRKSNLKPFERDISTEIYQAGSTPCNGVEGFNCYFPLQSYGFQPTNGVGYQPYRVVVLSFELLHAPATVCGPKKSTNLVKNKCVNFNFNGLTGTGVLTESNKKFLPFQQFGRDIADTTDAVRDPQTLEILDITPCSFGGVSVITPGTNTSNQVAVLYQGVNCTEVPVAIHADQLTPTWRVYSTGSNVFQTRAGCLIGAEHVNNSYECDIPIGAGICASYQTQTNSPRRARSVASQSIIAYTMSLGAENSVAYSNNSIAIPTNFTISVTTEILPVSMTKTSVDCTMYICGDSTECSNLLLQYGSFCTQLNRALTGIAVEQDKNTQEVFAQVKQIYKTPPIKDFGGFNFSQILPDPSKPSKRSFIEDLLFNKVTLADVGFIKQYGDCLGDIAARDLICAQKFNGLTVLPPLLTDEMIAQYTSALLAGTITSGWTFGAGAALQIPFAMQMAYRFNGIGVTQNVLYENQKLIANQFNSAIGKIQDSLSSTASALGKLQDVVNQNAQALNTLVKCLSSNFGAISSVLNDILSRLDKVEAEVQIDRLITGRLQCLQTYVTQQLIRAAEIRASANLAATKMSECVLGQSKRVDFCGKGYHLMSFPQSAPHGVVFLHVTYVPAQEKNFTTAPAICHDGKAHFPREGVFVSNGTHWFVTQRNFYEPQIITTDNTFVSGNCDVVIGIVNNTVYDPLQPELDSFKEELDKYFKNHTSPDVDLGDISGINASVVNIQKEIDRLNEVAKNLNESLIDLQELGKYEQYIKGGGGSDIDPYKEFGSSYQLLNFLPLDFFPDLNALVDTATALYEEELTGREHCSPHHTAIRQALVCWDELTKLIAWMSSNITSEQVRTIIVNHVNDTWGLKVRQSLWFHLSCLTFGQHTVQEFLVSFGVWIRTPAPYRPPNAPILSTLPEHTVIC

SEQ ID NO: 7364 - protein, 1365 aa, Artificial Sequence
  SARS-CoV-2/Greece/16/2020__EPI_ISL_418265 spike protein (1-1211)(Q965C_S1003C) WhcAg construct
MFVFLVLLPLVSSQCVNLTTRTQLPPAYTNSFTRGVYYPDKVFRSSVLHSTQDLFLPFFSNVTWFHAIHVSGTNGTKRFDNPVLPFNDGVYFASTEKSNIIRGWIFGTTLDSKTQSLLIVNNATNVVIKVCEFQFCNDPFLGVYYHKNNKSWMESEFRVYSSANNCTFEYVSQPFLMDLEGKQGNFKNLREFVFKNVDGYFKIYSKHTPINLVRDLPQGFSALEPLVDLPIGINITRFQTLLALHRSYLTPGDSSSGWTAGAAAYYVGYLQPRTFLLKYNENGTITDAVDCALDPLSETKCTLKSFTVEKGIYQTSNFRVQPTESIVRFPNITNLCPFGEVFNATRFASVYAWNRKRISNCVADYSVLYNSASFSTFKCYGVSPTKLNDLCFTNVYADSFVIRGDEVRQIAPGQTGKIADYNYKLPDDFTGCVIAWNSNNLDSKVGGNYNYLYRLFRKSNLKPFERDISTEIYQAGSTPCNGVEGFNCYFPLQSYGFQPTNGVGYQPYRVVVLSFELLHAPATVCGPKKSTNLVKNKCVNFNFNGLTGTGVLTESNKKFLPFQQFGRDIADTTDAVRDPQTLEILDITPCSFGGVSVITPGTNTSNQVAVLYQDVNCTEVPVAIHADQLTPTWRVYSTGSNVFQTRAGCLIGAEHVNNSYECDIPIGAGICASYQTQTNSPRRARSVASQSIIAYTMSLGAENSVAYSNNSIAIPTNFTISVTTEILPVSMTKTSVDCTMYICGDSTECSNLLLQYGSFCTQLNRALTGIAVEQDKNTQEVFAQVKQIYKTPPIKDFGGFNFSQILPDPSKPSKRSFIEDLLFNKVTLADAGFIKQYGDCLGDIAARDLICAQKFNGLTVLPPLLTDEMIAQYTSALLAGTITSGWTFGAGAALQIPFAMQMAYRFNGIGVTQNVLYENQKLIANQFNSAIGKIQDSLSSTASALGKLQDVVNQNAQALNTLVKCLSSNFGAISSVLNDILSRLDKVEAEVQIDRLITGRLQCLQTYVTQQLIRAAEIRASANLAATKMSECVLGQSKRVDFCGKGYHLMSFPQSAPHGVVFLHVTYVPAQEKNFTTAPAICHDGKAHFPREGVFVSNGTHWFVTQRNFYEPQIITTDNTFVSGNCDVVIGIVNNTVYDPLQPELDSFKEELDKYFKNHTSPDVDLGDISGINASVVNIQKEIDRLNEVAKNLNESLIDLQELGKYEQYIKGGGGSDIDPYKEFGSSYQLLNFLPLDFFPDLNALVDTATALYEEELTGREHCSPHHTAIRQALVCWDELTKLIAWMSSNITSEQVRTIIVNHVNDTWGLKVRQSLWFHLSCLTFGQHTVQEFLVSFGVWIRTPAPYRPPNAPILSTLPEHTVIC

SEQ ID NO: 7365 - protein, 1365 aa, Artificial Sequence
  SARS-CoV-2/Iceland/319/2020__EPI_ISL_417648 spike protein (1-1211)(Q965C_S1003C) WhcAg construct
MFVFLVLLPLVSSQCVNLTTRTQLPPAYTNSFTRGVYYPDKVFRSSVLHSTQDLFLPFFSNVTWFHAIHVSGTNGTKRFDNPVLPFNDGVYFASTEKSNIIRGWIFGTTLDSKTQSLLIVNNATNVVIKVCEFQFCNDPFLGVYYHKNNKSWMESEFRVYSSANNCTFEYVSQPFLIDLEGKQGNFKNLREFVFKNIDGYFKIYSKHTPINLVRDLPQGFSALEPLVDLPIGINITRFQTLLALHRSYLTPGDSSSGWTAGAAAYYVGYLQPRTFLLKYNENGTITDAVDCALDPLSETKCTLKSFTVEKGIYQTSNFRVQPTESIVRFPNITNLCPFGEVFNATRFASVYAWNRKRISNCVADYSVLYNSASFSTFKCYGVSPTKLNDLCFTNVYADSFVIRGDEVRQIAPGQTGKIADYNYKLPDDFTGCVIAWNSNNLDSKVGGNYNYLYRLFRKSNLKPFERDISTEIYQAGSTPCNGVEGFNCYFPLQSYGFQPTNGVGYQPYRVVVLSFELLHAPATVCGPKKSTNLVKNKCVNFNFNGLTGTGVLTESNKKFLPFQQFGRDIADTTDAVRDPQTLEILDITPCSFGGVSVITPGTNTSNQVAVLYQGVNCTEVPVAIHADQLTPTWRVYSTGSNVFQTRAGCLIGAEHVNNSYECDIPIGAGICASYQTQTNSPRRARSVASQSIIAYTMSLGAENSVAYSNNSIAIPTNFTISVTTEILPVSMTKTSVDCTMYICGDSTECSNLLLQYGSFCTQLNRALTGIAVEQDKNTQEVFAQVKQIYKTPPIKDFGGFNFSQILPDPSKPSKRSFIEDLLFNKVTLADAGFIKQYGDCLGDIAARDLICAQKFNGLTVLPPLLTDEMIAQYTSALLAGTITSGWTFGAGAALQIPFAMQMAYRFNGIGVTQNVLYENQKLIANQFNSAIGKIQDSLSSTASALGKLQDVVNQNAQALNTLVKCLSSNFGAISSVLNDILSRLDKVEAEVQIDRLITGRLQCLQTYVTQQLIRAAEIRASANLAATKMSECVLGQSKRVDFCGKGYHLMSFPQSAPHGVVFLHVTYVPAQEKNFTTAPAICHDGKAHFPREGVFVSNGTHWFVTQRNFYEPQIITTDNTFVSGNCDVVIGIVNNTVYDPLQPELDSFKEELDKYFKNHTSPDVDLGDISGINASVVNIQKEIDRLNEVAKNLNESLIDLQELGKYEQYIKGGGGSDIDPYKEFGSSYQLLNFLPLDFFPDLNALVDTATALYEEELTGREHCSPHHTAIRQALVCWDELTKLIAWMSSNITSEQVRTIIVNHVNDTWGLKVRQSLWFHLSCLTFGQHTVQEFLVSFGVWIRTPAPYRPPNAPILSTLPEHTVIC

SEQ ID NO: 7366 - protein, 1365 aa, Artificial Sequence
  SARS-CoV-2/Congo/94/2020__EPI_ISL_417947 spike protein (1-1211)(Q965C_S1003C) WhcAg construct
MFVFLVLLPLVSSQCVNLTTRTQLPPAYTNSFTRGVYYPDKVFRSSVLHSTQDLFLPFFSNVTWFHAIHVSGTNGTKRFDNPVLPFNDGVYFASTEKSNIIRGWIFGTTLDSKTQSLLIVNNATNVVIKVCEFQFCNDPFLGVYYHKNNKSWMESEFRVYSSANNCTFEYVSQPFLMDLEGKQGNFKNLREFVFKNIDGYFKIYSKHTPINLVRDLPQGFSALEPLVDLPIGINITRFQTLLALHRSYLTPGDSSSGWTAGAAAYYVGYLQPRTFLLKYNENGTITDAVDCALDPLSETKCTLKSFTVEKGIYQTSNFRVQPTESIVRFPNITNLCPFGEVFNATRFASVYAWNRKRISNCVADYSVLYNSASFSTFKCYGVSPTKLNDLCFTNVYADSFVIRGDEVRQIAPGQTGKIADYNYKLPDDFTGCVIAWNSNNLDSKVGGNYNYLYRLFRKSNLKPFERDISTEIYQAGSTPCNGVEGFNCYFPLQSYGFQPTNGVGYQPYRVVVLSFELLHAPATVCGPKKSTNLVKNKCVNFNFNGLTGTGVLTESNKKFLPFQQFGRDIADTTDAVRDPQTLEILDITPCSFGGVSVITPGTNTSNQVAVLYQGVNCTEVPVAIHADQLTPTWRVYSTGSNVFQTRAGCLIGAEHVNNSYECDIPIGAGICASYQTQTNSPRRARSVASQSIIAYTMSLGAENSVAYSNNSIAIPTNFTISVTTEILPVSMTKTSVDCTMYICGDSTECSNLLLQYGSFCTQLNRALTGIAVEQDKNTQEVFAQVKQIYKTPPIKDFGGFNFSQILPDPSKPSKRSFIEDILFNKVTLADAGFIKQYGDCLGDIAARDLICAQKFNGLTVLPPLLTDEMIAQYTSALLAGTITSGWTFGAGAALQIPFAMQMAYRFNGIGVTQNVLYENQKLIANQFNSAIGKIQDSLSSTASALGKLQDVVNQNAQALNTLVKCLSSNFGAISSVLNDILSRLDKVEAEVQIDRLITGRLQCLQTYVTQQLIRAAEIRASANLAATKMSECVLGQSKRVDFCGKGYHLMSFPQSAPHGVVFLHVTYVPAQEKNFTTAPAICHDGKAHFPREGVFVSNGTHWFVTQRNFYEPQIITTDNTFVSGNCDVVIGIVNNTVYDPLQPELDSFKEELDKYFKNHTSPDVDLGDISGINASVVNIQKEIDRLNEVAKNLNESLIDLQELGKYEQYIKGGGGSDIDPYKEFGSSYQLLNFLPLDFFPDLNALVDTATALYEEELTGREHCSPHHTAIRQALVCWDELTKLIAWMSSNITSEQVRTIIVNHVNDTWGLKVRQSLWFHLSCLTFGQHTVQEFLVSFGVWIRTPAPYRPPNAPILSTLPEHTVIC

SEQ ID NO: 7367 - protein, 1365 aa, Artificial Sequence
  SARS-CoV-2/Congo/158/2020__EPI_ISL_417950 spike protein (1-1211)(Q965C_S1003C) WhcAg construct
MFVFLVLLPLVSSQCVNLTTRTQLPPAYTNSFTRGVYYPDKVFRSSVLHSTQDLFLPFFSNVTWFHAIHVSGTNGTKRFDNPVLPFNDGVYFASTEKSNIIRGWIFGTTLDSKTQSLLIVNNATNVVIKVCEFQFCNDPFLGVYYHKNNKSWMESEFRVYSSANNCTFEYVSQPFLMDLEGKQGNFKNLREFVFKNIDGYFKIYSKHTPINLVRDLPQGFSALEPLVDLPIGINITRFQTLLALHRSYLTPGDSSSGWTAGAAAYYVGYLQPRTFLLKYNENGTITDAVDCALDPLSETKCTLKSFTVEKGIYQTSNFRVQPTESIVRFPNITNLCPFGEVFNATRFASVYAWNRKRISNCVADYSVLYNSASFSTFKCYGVSPTKLNDLCFTNVYADSFVIRGDEVRQIAPGQTGKIADYNYKLPDDFTGCVIAWNSNNLDSKVGGNYNYLYRLFRKSNLKPFERDISTEIYQAGSTPCNGVEGFNCYFPLQSYGFQPTNGVGYQPYRVVVLSFELLHAPATVCGPKKSTNLVKNKCVNFNFNGLTGTGVLTESNKKFLPFQQFGRDIADTTDAVRDPQTLEILDITPCSFGGVSVITPGTNTSNQVAVLYQDVNCTEVPVAIHADQLTPTWRVYSTGSNVFQTRAGCLIGAEHVNNSYECDIPIGAGICASYQTQTNSPRRARSVASQSIIAYTMSLGAENSVAYSNNSIAIPTNFTISVTTEILPVSMTKTSVDCTMYICGDSTECSNLLLQYGSFCTQLNRALTGIAVEQDKNTQEVFAQVKQIYKTPPIKDFGGFNFSQILPDPSKPSKRSFIEDLLFNKVTLADAGFIKQYGDCLGDIAARDLICAQKFNGLTVLPPLLTDEMIAQYTSALLAGTITSGWTFGAGAALQIPFAMQMAYRFNGIGVTQNVLYENQKLIANQFNSAIGKIQDSLSSTASALGKLQDVVNQNAQALNTLVKCLSSNFGAISSVLNDILSRLDKVEAEVQIDRLITGRLQCLQTYVTQQLIRAAEIRASANLAATKMSECVLGQSKRVDFCGKGYHLMSFPQSAPHGVVFLHVTYVPAQEKNFTTAPAICHDGKAHFPREGVFVSNGTHWFVTQRNFYEPQIITTDNTFLSGNCDVVIGIVNNTVYDPLQPELDSFKEELDKYFKNHTSPDVDLGDISGINASVVNIQKEIDRLNEVAKNLNESLIDLQELGKYEQYIKGGGGSDIDPYKEFGSSYQLLNFLPLDFFPDLNALVDTATALYEEELTGREHCSPHHTAIRQALVCWDELTKLIAWMSSNITSEQVRTIIVNHVNDTWGLKVRQSLWFHLSCLTFGQHTVQEFLVSFGVWIRTPAPYRPPNAPILSTLPEHTVIC

SEQ ID NO: 7368 - protein, 1365 aa, Artificial Sequence
  SARS-CoV-2/USA/UT-00034/2020__EPI_ISL_417977 spike protein (1-1211)(Q965C_S1003C) WhcAg construct
MFVFLVLLPLVSSQCVNLTTRTQLPPAYTNSFTRGVYYPDKVFRSSVLHSTQDLFLPFFSNVTWFHAIHVSGTNGTKRFDNPVLPFNDGVYFASTEKSNIIRGWIFGTTLDSKTQSLLIVNNATNVVIKVCEFQFCNDPFLGVYYYKNNKSWMESEFRVYSSANNCTFEYVSQPFLMDLEGKQGNFKNLREFVFKNIDGYFKIYSKHTPINLVRDLPQGFSALEPLVDLPIGINITRFQTLLALHRSYLTPGDSSSGWTAGAAAYYVGYLQPRTFLLKYNENGTITDAVDCALDPLSETKCTLKSFTVEKGIYQTSNFRVQPTESIVRFPNITNLCPFGEVFNATRFASVYAWNRKRISNCVADYSVLYNSASFSTFKCYGVSPTKLNDLCFTNVYADSFVIRGDEVRQIAPGQTGKIADYNYKLPDDFTGCVIAWNSNNLDSKVGGNYNYLYRLFRKSNLKPFERDISTEIYQAGSTPCNGVEGFNCYFPLQSYGFQPTNGVGYQPYRVVVLSFELLHAPATVCGPKKSTNLVKNKCVNFNFNGLTGTGVLTESNKKFLPFQQFGRDIADTTDAVRDPQTLEILDITPCSFGGVSVITPGTNTSNQVAVLYQGVNCTEVPVAIHADQLTPTWRVYSTGSNVFQTRAGCLIGAEHVNNSYECDIPIGAGICASYQTQTNSPRRARSVASQSIIAYTMSLGAENSVAYSNNSIAIPTNFTISVTTEILPVSMTKTSVDCTMYICGDSTECSNLLLQYGSFCTQLNRALTGIAVEQDKNTQEVFAQVKQIYKTPPIKDFGGFNFSQILPDPSKPSKRSFIEDLLFNKVTLADAGFIKQYGDCLGDIAARDLICAQKFNGLTVLPPLLTDEMIAQYTSALLAGTITSGWTFGAGAALQIPFAMQMAYRFNGIGVTQNVLYENQKLIANQFNSAIGKIQDSLSSTASALGKLQDVVNQNAQALNTLVKCLSSNFGAISSVLNDILSRLDKVEAEVQIDRLITGRLQCLQTYVTQQLIRAAEIRASANLAATKMSECVLGQSKRVDFCGKGYHLMSFPQSAPHGVVFLHVTYVPAQEKNFTTAPAICHDGKAHFPREGVFVSNGTHWFVTQRNFYEPQIITTDNTFVSGNCDVVIGIVNNTVYDPLQPELDSFKEELDKYFKNHTSPDVDLGDISGINASVVNIQKEIDRLNEVAKNLNESLIDLQELGKYEQYIKGGGGSDIDPYKEFGSSYQLLNFLPLDFFPDLNALVDTATALYEEELTGREHCSPHHTAIRQALVCWDELTKLIAWMSSNITSEQVRTIIVNHVNDTWGLKVRQSLWFHLSCLTFGQHTVQEFLVSFGVWIRTPAPYRPPNAPILSTLPEHTVIC

SEQ ID NO: 7369 - protein, 1365 aa, Artificial Sequence
  SARS-CoV-2/USA/UT-00033/2020__EPI_ISL_417976 spike protein (1-1211)(Q965C_S1003C) WhcAg construct
MFVFLVLLPLVSSQCVNLTTRTQLPPAYTNSFTRGVYYPDKVFRSSVLHSTQDLFLPFFSNVTWFHAIHVSGTNGTKRFDNPVLPFNDGVYFASTEKSNIIRGWIFGTTLDSKTQSLLIVNNATNVVIKVCEFQFCNDPFLGVYYHKNNKSWMESEFRVYSSANNCTFEYVSQPFLMDLEGKQGNFKNLREFVFKNIDGYFKIYSKHTPINLVRDLPQGFSALEPLVDLPIGINITRFQTLLALHRSYLTPGDSSSGLTAGAAAYYVGYLQPRTFLLKYNENGTITDAVDCALDPLSETKCTLKSFTVEKGIYQTSNFRVQPTESIVRFPNITNLCPFGEVFNATRFASVYAWNRKRISNCVADYSVLYNSASFSTFKCYGVSPTKLNDLCFTNVYADSFVIRGDEVRQIAPGQTGKIADYNYKLPDDFTGCVIAWNSNNLDSKVGGNYNYLYRLFRKSNLKPFERDISTEIYQAGSTPCNGVEGFNCYFPLQSYGFQPTNGVGYQPYRVVVLSFELLHAPATVCGPKKSTNLVKNKCVNFNFNGLTGTGVLTESNKKFLPFQQFGRDIADTTDAVRDPQTLEILDITPCSFGGVSVITPGTNTSNQVAVLYQGVNCTEVPVAIHADQLTPTWRVYSTGSNVFQTRAGCLIGAEHVNNSYECDIPIGAGICASYQTQTNSPRRARSVASQSIIAYTMSLGAENSVAYSNNSIAIPTNFTISVTTEILPVSMTKTSVDCTMYICGDSTECSNLLLQYGSFCTQLNRALTGIAVEQDKNTQEVFAQVKQIYKTPPIKDFGGFNFSQILPDPSKPSKRSFIEDLLFNKVTLADAGFIKQYGDCLGDIAARDLICAQKFNGLTVLPPLLTDEMIAQYTSALLAGTITSGWTFGAGAALQIPFAMQMAYRFNGIGVTQNVLYENQKLIANQFNSAIGKIQDSLSSTASALGKLQDVVNQNAQALNTLVKCLSSNFGAISSVLNDILSRLDKVEAEVQIDRLITGRLQCLQTYVTQQLIRAAEIRASANLAATKMSECVLGQSKRVDFCGKGYHLMSFPQSAPHGVVFLHVTYVPAQEKNFTTAPAICHDGKAHFPREGVFVSNGTHWFVTQRNFYEPQIITTDNTFVSGNCDVVIGIVNNTVYDPLQPELDSFKEELDKYFKNHTSPDVDLGDISGINASVVNIQKEIDRLNEVAKNLNESLIDLQELGKYEQYIKGGGGSDIDPYKEFGSSYQLLNFLPLDFFPDLNALVDTATALYEEELTGREHCSPHHTAIRQALVCWDELTKLIAWMSSNITSEQVRTIIVNHVNDTWGLKVRQSLWFHLSCLTFGQHTVQEFLVSFGVWIRTPAPYRPPNAPILSTLPEHTVIC

SEQ ID NO: 7370 - protein, 1365 aa, Artificial Sequence
  SARS-CoV-2/USA/WI-13/2020__EPI_ISL_417516 spike protein (1-1211)(Q965C_S1003C) WhcAg construct
MFVFLVLLPLVSSQCVNLTTRTQLPPAYTNSFTRGVYYPDKVFRSSVLHSTQDLFLPFFSNVTWFHAIHVSGTNGTKRFDNPVLPFNDGVYFASTEKSNIIRGWIFGTTLDSKTQSLLIVNNATNVVIKVCEFQFCNDPFLGVYYHKNNKSWMESEFRVYSSANNCTFEYVSQPFLMDLEGKQGNFKNLREFVFKNIDGYFKIYSKHTPINLVRDLPQGFSALEPLVDLPIGINITRFQTLLALHRSYLTPGDSSSGWTAGAAAYYVGYLQPRTFLLKYNENGTITDAVDCALDPLSETKCTLKSFTVEKGIYQTSNFRVLPTESIVRFPNITNLCPFGEVFNATRFASVYAWNRKRISNCVADYSVLYNSASFSTFKCYGVSPTKLNDLCFTNVYADSFVIRGDEVRQIAPGQTGKIADYNYKLPDDFTGCVIAWNSNNLDSKVGGNYNYLYRLFRKSNLKPFERDISTEIYQAGSTPCNGVEGFNCYFPLQSYGFQPTNGVGYQPYRVVVLSFELLHAPATVCGPKKSTNLVKNKCVNFNFNGLTGTGVLTESNKKFLPFQQFGRDIADTTDAVRDPQTLEILDITPCSFGGVSVITPGTNTSNQVAVLYQGVNCTEVPVAIHADQLTPTWRVYSTGSNVFQTRAGCLIGAEHVNNSYECDIPIGAGICASYQTQTNSPRRARSVASQSIIAYTMSLGAENSVAYSNNSIAIPTNFTISVTTEILPVSMTKTSVDCTMYICGDSTECSNLLLQYGSFCTQLNRALTGIAVEQDKNTQEVFAQVKQIYKTPPIKDFGGFNFSQILPDPSKPSKRSFIEDLLFNKVTLADAGFIKQYGDCLGDIAARDLICAQKFNGLTVLPPLLTDEMIAQYTSALLAGTITSGWTFGAGAALQIPFAMQMAYRFNGIGVTQNVLYENQKLIANQFNSAIGKIQDSLSSTASALGKLQDVVNQNAQALNTLVKCLSSNFGAISSVLNDILSRLDKVEAEVQIDRLITGRLQCLQTYVTQQLIRAAEIRASANLAATKMSECVLGQSKRVDFCGKGYHLMSFPQSAPHGVVFLHVTYVPAQEKNFTTAPAICHDGKAHFPREGVFVSNGTHWFVTQRNFYEPQIITTDNTFVSGNCDVVIGIVNNTVYDPLQPELDSFKEELDKYFKNHTSPDVDLGDISGINASVVNIQKEIDRLNEVAKNLNESLIDLQELGKYEQYIKGGGGSDIDPYKEFGSSYQLLNFLPLDFFPDLNALVDTATALYEEELTGREHCSPHHTAIRQALVCWDELTKLIAWMSSNITSEQVRTIIVNHVNDTWGLKVRQSLWFHLSCLTFGQHTVQEFLVSFGVWIRTPAPYRPPNAPILSTLPEHTVIC

SEQ ID NO: 7371 - protein, 1364 aa, Artificial Sequence
  SARS-CoV-2/India/1-27/2020__EPI_ISL_413522 spike protein (1-1210)(Q964C_S1002C) WhcAg construct
MFVFLVLLPLVSSQCVNLTTRTQLPPAYTNSFTRGVYYPDKVFRSSVLHSTQDLFLPFFSNVTWFHAIHVSGTNGTKRFDNPVLPFNDGVYFASTEKSNIIRGWIFGTTLDSKTQSLLIVNNATNVVIKVCEFQFCNDPFLGVYHKNNKSWMESEFRVYSSANNCTFEYVSQPFLMDLEGKQGNFKNLREFVFKNIDGYFKIYSKHTPINLVRDLPQGFSALEPLVDLPIGINITRFQTLLALHRSYLTPGDSSSGWTAGAAAYYVGYLQPRTFLLKYNENGTITDAVDCALDPLSETKCTLKSFTVEKGIYQTSNFRVQPTESIVRFPNITNLCPFGEVFNATRFASVYAWNRKRISNCVADYSVLYNSASFSTFKCYGVSPTKLNDLCFTNVYADSFVIRGDEVIQIAPGQTGKIADYNYKLPDDFTGCVIAWNSNNLDSKVGGNYNYLYRLFRKSNLKPFERDISTEIYQAGSTPCNGVEGFNCYFPLQSYGFQPTNGVGYQPYRVVVLSFELLHAPATVCGPKKSTNLVKNKCVNFNFNGLTGTGVLTESNKKFLPFQQFGRDIADTTDAVRDPQTLEILDITPCSFGGVSVITPGTNTSNQVAVLYQDVNCTEVPVAIHADQLTPTWRVYSTGSNVFQTRAGCLIGAEHVNNSYECDIPIGAGICASYQTQTNSPRRARSVASQSIIAYTMSLGAENSVAYSNNSIAIPTNFTISVTTEILPVSMTKTSVDCTMYICGDSTECSNLLLQYGSFCTQLNRALTGIAVEQDKNTQEVFAQVKQIYKTPPIKDFGGFNFSQILPDPSKPSKRSFIEDLLFNKVTLADAGFIKQYGDCLGDIAARDLICAQKFNGLTVLPPLLTDEMIAQYTSALLAGTITSGWTFGAGAALQIPFAMQMAYRFNGIGVTQNVLYENQKLIANQFNSAIGKIQDSLSSTASALGKLQDVVNQNAQALNTLVKCLSSNFGAISSVLNDILSRLDKVEAEVQIDRLITGRLQCLQTYVTQQLIRAAEIRASANLAATKMSECVLGQSKRVDFCGKGYHLMSFPQSAPHGVVFLHVTYVPAQEKNFTTAPAICHDGKAHFPREGVFVSNGTHWFVTQRNFYEPQIITTDNTFVSGNCDVVIGIVNNTVYDPLQPELDSFKEELDKYFKNHTSPDVDLGDISGINASVVNIQKEIDRLNEVAKNLNESLIDLQELGKYEQYIKGGGGSDIDPYKEFGSSYQLLNFLPLDFFPDLNALVDTATALYEEELTGREHCSPHHTAIRQALVCWDELTKLIAWMSSNITSEQVRTIIVNHVNDTWGLKVRQSLWFHLSCLTFGQHTVQEFLVSFGVWIRTPAPYRPPNAPILSTLPEHTVIC

SEQ ID NO: 7372 - protein, 1359 aa, Artificial Sequence
  SARS-CoV-2/pangolin/Guangxi/P4L/2017__EPI_ISL_410538 spike protein (1-1205)(Q959C_S997C) WhcAg construct
MFVFLFVLPLVSSQCVNLTTRTGIPPGYTNSSTRGVYYPDKVFRSSILHLTQDLFLPFFSNVTWFNTINYQGGFKKFDNPVLPFNDGVYFASTEKSNIIRGWIFGTTLDARTQSLLIVNNATNVVIKVCEFQFCTDPFLGVYYHNNNKTWVENEFRVYSSANNCTFEYISQPFLMDLEGKQGNFKNLREFVFKNVDGYFKIYSKHTPIDLVRDLPRGFAALEPLVDLPIGINITRFQTLLALHRSYLTPGNLESGWTTGAAAYYVGYLQQRTFLLSYNQNGTITDAVDCSLDPLSETKCTLKSLTVEKGIYQTSNFRVQPTISIVRFPNITNLCPFGEVFNASKFASVYAWNRKRISNCVADYSVLYNSTSFSTFKCYGVSPTKLNDLCFTNVYADSFVVKGDEVRQIAPGQTGVIADYNYKLPDDFTGCVIAWNSVKQDALTGGNYGYLYRLFRKSKLKPFERDISTEIYQAGSTPCNGQVGLNCYYPLERYGFHPTTGVNYQPFRVVVLSFELLNGPATVCGPKLSTTLVKDKCVNFNFNGLTGTGVLTTSKKQFLPFQQFGRDISDTTDAVRDPQTLEILDITPCSFGGVSVITPGTNTSNQVAVLYQDVNCTEVPMAIHAEQLTPAWRVYSAGANVFQTRAGCLVGAEHVNNSYECDIPVGAGICASYHSMSSLRSVNQRSIIAYTMSLGAENSVAYSNNSIAIPTNFTISVTTEILPVSMTKTSVDCTMYICGDSIECSNLLLQYGSFCTQLNRALTGIAVEQDKNTQEVFAQVKQIYKTPPIKDFGGFNFSQILPDPSKPSKRSFIEDLLFNKVTLADAGFIKQYGDCLGDIAARDLICAQKFNGLTVLPPLLTDEMIAQYTSALLAGTITSGWTFGAGAALQIPFAMQMAYRFNGIGVTQNVLYENQKLIANQFNSAIGKIQDSLSSTASALGKLQDVVNQNAQALNTLVKCLSSNFGAISSVLNDILSRLDKVEAEVQIDRLITGRLQCLQTYVTQQLIRAAEIRASANLAATKMSECVLGQSKRVDFCGKGYHLMSFPQSAPHGVVFLHVTYVPAQEKNFTTAPAICHEGKAHFPREGVFVSNGTHWFITQRNFYEPQIITTDNTFVSGSCDVVIGIVNNTVYDPLQPELDSFKEELDKYFKNHTSPDVDLGDISGINASVVNIQKEIDRLNEVAKNLNESPIDLQELGKYEQYIKGGGGSDIDPYKEFGSSYQLLNFLPLDFFPDLNALVDTATALYEEELTGREHCSPHHTAIRQALVCWDELTKLIAWMSSNITSEQVRTIIVNHVNDTWGLKVRQSLWFHLSCLTFGQHTVQEFLVSFGVWIRTPAPYRPPNAPILSTLPEHTVIC

SEQ ID NO: 7373 - protein, 1359 aa, Artificial Sequence
  SARS-CoV-2/pangolin/Guangxi/P5L/2017__EPI_ISL_410540 spike protein (1-1205)(Q959C_S997C) WhcAg construct
MFVFLFVLPLVSSQCVNLTTRTGIPPGYTNSSTRGVYYPDKVFRSSILHLTQDLFLPFFSNVTWFNTINYQGGFKKFDNPVLPFNDGVYFASTEKSNIIRGWIFGTTLDARTQSLLIVNNATNVVIKVCEFQFCTDPFLGVYYHNNNKTWVENEFRVYSSANNCTFEYISQPFLMDLEGKQGNFKNLREFVFKNVDGYFKIYSKHTPIDLVRDLPRGFAALEPLVDLPIGINITRFQTLLALHRSYLTPGKLESGWTTGAAAYYVGYLQQRTFLLSYNQNGTITDAVDCSLDPLSETKCTLKSLTVEKGIYQTSNFRVQPTISIVRFPNITNLCPFGEVFNASKFASVYAWNRKRISNCVADYSVLYNSTSFSTFKCYGVSPTKLNDLCFTNVYADSFVVKGDEVRQIAPGQTGVIADYNYKLPDDFTGCVIAWNSVKQDALTGGNYGYLYRLFRKSKLKPFERDISTEIYQAGSTPCNGQVGLNCYYPLERYGFHPTTGVNYQPFRVVVLSFELLNGPATVCGPKLSTTLVKDKCVNFNFNGLTGTGVLTTSKKQFLPFQQFGRDISDTTDAVRDPQTLEILDITPCSFGGVSVITPGTNTSNQVAVLYQDVNCTEVPMAIHAEQLTPAWRVYSAGANVFQTRAGCLVGAEHVNNSYECDIPVGAGICASYHSMSSFRSVNQRSIIAYTMSLGAENSVAYSNNSIAIPTNFTISVTTEILPVSMTKTSVDCTMYICGDSIECSNLLLQYGSFCTQLNRALTGIAVEQDKNTQEVFAQVKQIYKTPPIKDFGGFNFSQILPDPSKPSKRSFIEDLLFNKVTLADAGFIKQYGDCLGDIAARDLICAQKFNGLTVLPPLLTDEMIAQYTSALLAGTITSGWTFGAGAALQIPFAMQMAYRFNGIGVTQNVLYENQKLIANQFNSAIGKIQDSLSSTASALGKLQDVVNQNAQALNTLVKCLSSNFGAISSVLNDILSRLDKVEAEVQIDRLITGRLQCLQTYVTQQLIRAAEIRASANLAATKMSECVLGQSKRVDFCGKGYHLMSFPQSAPHGVVFLHVTYVPAQEKNFTTAPAICHEGKAHFPREGVFVSNGTHWFITQRNFYEPQIITTDNTFVSGSCDVVIGIVNNTVYDPLQPELDSFKEELDKYFKNHTSPDVDLGDISGINASVVNIQKEIDRLNEVAKNLNESLIDLQELGKYEQYIKGGGGSDIDPYKEFGSSYQLLNFLPLDFFPDLNALVDTATALYEEELTGREHCSPHHTAIRQALVCWDELTKLIAWMSSNITSEQVRTIIVNHVNDTWGLKVRQSLWFHLSCLTFGQHTVQEFLVSFGVWIRTPAPYRPPNAPILSTLPEHTVIC

SEQ ID NO: 7374 - protein, 1359 aa, Artificial Sequence
  SARS-CoV-2/pangolin/Guangxi/P5E/2017__EPI_ISL_410541 spike protein (1-1205)(Q959C_S997C) WhcAg construct
MFVFLFVLPLVSSQCVNLTTRTGIPPGYTNSSTRGVYYPDKVFRSSILHLTQDLFLPFFSNVTWFNTITYQGGSKKFDNPVLPFNDGVYFASTEKSNIIRGWIFGTTLDARTQSLLIVNNATNVVIKVCEFQFCTDPFLGVYYHNNNKTWVENEFRVYSSANNCTFEYISQPFLMDLEGKQGNFKNLREFVFKNVDGYFKIYSKHTPIDLVRDLPRGFAALEPLVDLPIGINITRFQTLLALHRSYLTPGKLESGWTTGAAAYYVGYLQQRTFLLSYNQNGTITDAVDCSLDPLSETKCTLKSLTVEKGIYQTSNFRVQPTISIVRFPNITNLCPFGEVFNASKFASVYAWNRKRISNCVADYSVLYNSTSFSTFKCYGVSPTKLNDLCFTNVYADSFVVKGDEVRQIAPGQTGVIADYNYKLPDDFTGCVIAWNSVKQDALTGDNYGYLYRLFRKSKLKPFERDISTEIYQAGSTPCNGQVGLNCYYPLERYGFHPTTGVNYQPFRVVVLSFELLNGPATVCGPKLSTTLVKDKCVNFNFNGLTGTGVLTTSKKQFLPFQQFGRDISDTTDAVRDPQTLEILDITPCSFGGVSVITPGTNTSNQVAVLYQDVNCTEVPMAIHAEQLTPAWRVYSAGANVFQTRAGCLVGAEHVNNSYECDIPVGAGICASYHSMSSFRSVNQRSIIAYTMSLGAENSVAYSNNSIAIPTNFTISVTTEILPVSMTKTSVDCTMYICGDSIECSNLLLQYGSFCTQLNRALTGIAVEQDKNTQEVFAQVKQIYKTPPIKDFGGFNFSQILPDPSKPSKRSFIEDLLFNKVTLADAGFIKQYGDCLGDIAARDLICAQKFNGLTVLPPLLTDEMIAQYTSALLAGTITSGWTFGAGAALQIPFAMQMAYRFNGIGVTQNVLYENQKLIANQFNSAIGKIQDSLSSTASALGKLQDVVNQNAQALNTLVKCLSSNFGAISSVLNDILSRLDKVEAEVQIDRLITGRLQCLQTYVTQQLIRAAEIRASANLAATKMSECVLGQSKRVDFCGKGYHLMSFPQSAPHGVVFLHVTYVPAQEKNFTTAPAICHEGKAHFPREGVFVSNGTHWFITQRNFYEPQIITTDNTFVSGSCDVVIGIVNNTVYDPLQPELDSFKEELDKYFKNHTSPDVDLGDISGINASVVNIQKEIDRLNEVAKNLNESLIDLQELGKYEQYIKGGGGSDIDPYKEFGSSYQLLNFLPLDFFPDLNALVDTATALYEEELTGREHCSPHHTAIRQALVCWDELTKLIAWMSSNITSEQVRTIIVNHVNDTWGLKVRQSLWFHLSCLTFGQHTVQEFLVSFGVWIRTPAPYRPPNAPILSTLPEHTVIC

SEQ ID NO: 7375 - protein, 1357 aa, Artificial Sequence
  SARS-CoV-2/pangolin/Guangxi/P1E/2017__EPI_ISL_410539 spike protein (1-1203)(Q957C_S995C) WhcAg construct
MFVFLFVLPLVSSQCVNLTTRTGIQPGYTNSSTRGVYYPDKVFRSSILHLTQDLFLPFFSNVTWFNTINYQGGFKKFDNPVLPFNDGVYFASTEKSNIIRGWIFGTTLDARTQSLLIVNNATNVVIKVCEFQFCTDPFLGVYYHNNNKTWVENEFRVYSSANNCTFEYISQPFLMDLEGKQGNFKNLREFVFKNVDGYFKIYSKHTPIDLVRDLPRGFAALEPLVDLPIGINITRFQTLLALHRSYLTPGKLESGWTTGAAAYYVGYLQQRTFLLSYNQNGTITDAVDCSLDPLSETKCTLKSLTVEKGIYQTSNFRVQPTISIVRFPNITNLCPFGEVFNASKFASVYAWNRKRISNCVADYSVLYNSTSFSTFKCYGVSPTKLNDLCFTNVYADSFVVKGDEVRQIAPGQTGVIADYNYKLPDDFTGCVIAWNSVKQDALTGGNYLYRLFRKSKLKPFERDISTEIYQAGSTPCNGQVGLNCYYPLERYGFHPTTGVNYQPFRVVVLSFELLNGPATVCGPKLSTTLVKDKCVNFNFNGLTGTGVLTTSKKQFLPFQQFGRDISDTTDAVRDPQTLEILDITPCSFGGVSVITPGTNTSNQVAVLYQDVNCTEVPMAIHAEQLTPAWRVYSAGANVFQTRAGCLVGAEHVNNSYECDIPVGAGICASYHSMSSLRSVNQRSIIAYTMSLGAENSVAYSNNSIAIPTNFTISVTTEILPVSMTKTSVDCTMYICGDSIECSNLLLQYGSFCTQLNRALTGIAVEQDKNTQEVFAQVKQIYKTPPIKDFGGFNFSQILPDPSKPSKRSFIEDLLFNKVTLADAGFIKQYGDCLGDIAARDLICAQKFNGLTVLPPLLTDEMIAQYTSALLAGTITSGWTFGAGAALQIPFAMQMAYRFNGIGVTQNVLYENQKLIANQFNSAIGKIQDSLSSTASALGKLQDVVNQNAQALNTLVKCLSSNFGAISSVLNDILSRLDKVEAEVQIDRLITGRLQCLQTYVTQQLIRAAEIRASANLAATKMSECVLGQSKRVDFCGKGYHLMSFPQSAPHGVVFLHVTYVPAQEKNFTTAPAICHEGKAHFPREGVFVSNGTHWFITQRNFYEPQIITTDNTFVSGSCDVVIGIVNNTVYDPLQPELDSFKEELDKYFKNHTSPDVDLGDISGINASVVNIQKEIDRLNEVAKNLNESLIDLQELGKYEQYIKGGGGSDIDPYKEFGSSYQLLNFLPLDFFPDLNALVDTATALYEEELTGREHCSPHHTAIRQALVCWDELTKLIAWMSSNITSEQVRTIIVNHVNDTWGLKVRQSLWFHLSCLTFGQHTVQEFLVSFGVWIRTPAPYRPPNAPILSTLPEHTVIC

SEQ ID NO: 7376 - protein, 1365 aa, Artificial Sequence
  SARS-CoV-2/Wuhan/WIV05/2019__EPI_ISL_402128 spike protein (1-1211)(F970C_G999C) WhcAg construct
MFVFLVLLPLVSSQCVNLTTRTQLPPAYTNSFTRGVYYPDKVFRSSVLHSTQDLFLPFFSNVTWFHAIHVSGTNGTKRFDNPVLPFNDGVYFASTEKSNIIRGWIFGTTLDSKTQSLLIVNNATNVVIKVCEFQFCNDPFLGVYYHKNNKSWMESEFRVYSSANNCTFEYVSQPFLMDLEGKQGNFKNLREFVFKNIDGYFKIYSKHTPINLVRDLPQGFSALEPLVDLPIGINITRFQTLLALHRSYLTPGDSSSGWTAGAAAYYVGYLQPRTFLLKYNENGTITDAVDCALDPLSETKCTLKSFTVEKGIYQTSNFRVQPTESIVRFPNITNLCPFGEVFNATRFASVYAWNRKRISNCVADYSVLYNSASFSTFKCYGVSPTKLNDLCFTNVYADSFVIRGDEVRQIAPGQTGKIADYNYKLPDDFTGCVIAWNSNNLDSKVGGNYNYLYRLFRKSNLKPFERDISTEIYQAGSTPCNGVEGFNCYFPLQSYGFQPTNGVGYQPYRVVVLSFELLHAPATVCGPKKSTNLVKNKCVNFNFNGLTGTGVLTESNKKFLPFQQFGRDIADTTDAVRDPQTLEILDITPCSFGGVSVITPGTNTSNQVAVLYQDVNCTEVPVAIHADQLTPTWRVYSTGSNVFQTRAGCLIGAEHVNNSYECDIPIGAGICASYQTQTNSPRRARSVASQSIIAYTMSLGAENSVAYSNNSIAIPTNFTISVTTEILPVSMTKTSVDCTMYICGDSTECSNLLLQYGSFCTQLNRALTGIAVEQDKNTQEVFAQVKQIYKTPPIKDFGGFNFSQILPDPSKPSKRSFIEDLLFNKVTLADAGFIKQYGDCLGDIAARDLICAQKFNGLTVLPPLLTDEMIAQYTSALLAGTITSGWTFGAGAALQIPFAMQMAYRFNGIGVTQNVLYENQKLIANQFNSAIGKIQDSLSSTASALGKLQDVVNQNAQALNTLVKQLSSNCGAISSVLNDILSRLDKVEAEVQIDRLITCRLQSLQTYVTQQLIRAAEIRASANLAATKMSECVLGQSKRVDFCGKGYHLMSFPQSAPHGVVFLHVTYVPAQEKNFTTAPAICHDGKAHFPREGVFVSNGTHWFVTQRNFYEPQIITTDNTFVSGNCDVVIGIVNNTVYDPLQPELDSFKEELDKYFKNHTSPDVDLGDISGINASVVNIQKEIDRLNEVAKNLNESLIDLQELGKYEQYIKGGGGSDIDPYKEFGSSYQLLNFLPLDFFPDLNALVDTATALYEEELTGREHCSPHHTAIRQALVCWDELTKLIAWMSSNITSEQVRTIIVNHVNDTWGLKVRQSLWFHLSCLTFGQHTVQEFLVSFGVWIRTPAPYRPPNAPILSTLPEHTVIC

SEQ ID NO: 7377 - protein, 1361 aa, Artificial Sequence
  SARS-CoV-2/bat/Yunnan/RaTG13/2013__EPI_ISL_402131 spike protein (1-1207)(F966C_G995C) WhcAg construct
MFVFLVLLPLVSSQCVNLTTRTQLPPAYTNSSTRGVYYPDKVFRSSVLHLTQDLFLPFFSNVTWFHAIHVSGTNGIKRFDNPVLPFNDGVYFASTEKSNIIRGWIFGTTLDSKTQSLLIVNNATNVVIKVCEFQFCNDPFLGVYYHKNNKSWMESEFRVYSSANNCTFEYVSQPFLMDLEGKQGNFKNLREFVFKNIDGYFKIYSKHTPINLVRDLPPGFSALEPLVDLPIGINITRFQTLLALHRSYLTPGDSSSGWTAGAAAYYVGYLQPRTFLLKYNENGTITDAVDCALDPLSETKCTLKSFTVEKGIYQTSNFRVQPTDSIVRFPNITNLCPFGEVFNATTFASVYAWNRKRISNCVADYSVLYNSTSFSTFKCYGVSPTKLNDLCFTNVYADSFVITGDEVRQIAPGQTGKIADYNYKLPDDFTGCVIAWNSKHIDAKEGGNFNYLYRLFRKANLKPFERDISTEIYQAGSKPCNGQTGLNCYYPLYRYGFYPTDGVGHQPYRVVVLSFELLNAPATVCGPKKSTNLVKNKCVNFNFNGLTGTGVLTESNKKFLPFQQFGRDIADTTDAVRDPQTLEILDITPCSFGGVSVITPGTNASNQVAVLYQDVNCTEVPVAIHADQLTPTWRVYSTGSNVFQTRAGCLIGAEHVNNSYECDIPIGAGICASYQTQTNSRSVASQSIIAYTMSLGAENSVAYSNNSIAIPTNFTISVTTEILPVSMTKTSVDCTMYICGDSTECSNLLLQYGSFCTQLNRALTGIAVEQDKNTQEVFAQVKQIYKTPPIKDFGGFNFSQILPDPSKPSKRSFIEDLLFNKVTLADAGFIKQYGDCLGDIAARDLICAQKFNGLTVLPPLLTDEMIAQYTSALLAGTITSGWTFGAGAALQIPFAMQMAYRFNGIGVTQNVLYENQKLIANQFNSAIGKIQDSLSSTASALGKLQDVVNQNAQALNTLVKQLSSNCGAISSVLNDILSRLDKVEAEVQIDRLITCRLQSLQTYVTQQLIRAAEIRASANLAATKMSECVLGQSKRVDFCGKGYHLMSFPQSAPHGVVFLHVTYVPAQEKNFTTAPAICHDGKAHFPREGVFVSNGTHWFVTQRNFYEPQIITTDNTFVSGSCDVVIGIVNNTVYDPLQPELDSFKEELDKYFKNHTSPDVDLGDISGINASVVNIQKEIDRLNEVAKNLNESLIDLQELGKYEQYIKGGGGSDIDPYKEFGSSYQLLNFLPLDFFPDLNALVDTATALYEEELTGREHCSPHHTAIRQALVCWDELTKLIAWMSSNITSEQVRTIIVNHVNDTWGLKVRQSLWFHLSCLTFGQHTVQEFLVSFGVWIRTPAPYRPPNAPILSTLPEHTVIC

SEQ ID NO: 7378 - protein, 1365 aa, Artificial Sequence
  SARS-CoV-2/Wuhan/HBCDC-HB-01/2019__EPI_ISL_402132 spike protein (1-1211)(F970C_G999C) WhcAg construct
MFVFLVLLPLVSSQCVNLTTRTQLPPAYTNSITRGVYYPDKVFRSSVLHSTQDLFLPFFSNVTWFHAIHVSGTNGTKRFDNPVLPFNDGVYFASTEKSNIIRGWIFGTTLDSKTQSLLIVNNATNVVIKVCEFQFCNDPFLGVYYHKNNKSWMESEFRVYSSANNCTFEYVSQPFLMDLEGKQGNFKNLREFVFKNIDGYFKIYSKHTPINLVRDLPQGFSALEPLVDLPIGINITRFQTLLALHRSYLTPGDSSSGWTAGAAAYYVGYLQPRTFLLKYNENGTITDAVDCALDPLSETKCTLKSFTVEKGIYQTSNFRVQPTESIVRFPNITNLCPFGEVFNATRFASVYAWNRKRISNCVADYSVLYNSASFSTFKCYGVSPTKLNDLCFTNVYADSFVIRGDEVRQIAPGQTGKIADYNYKLPDDFTGCVIAWNSNNLDSKVGGNYNYLYRLFRKSNLKPFERDISTEIYQAGSTPCNGVEGFNCYFPLQSYGFQPTNGVGYQPYRVVVLSFELLHAPATVCGPKKSTNLVKNKCVNFNFNGLTGTGVLTESNKKFLPFQQFGRDIADTTDAVRDPQTLEILDITPCSFGGVSVITPGTNTSNQVAVLYQDVNCTEVPVAIHADQLTPTWRVYSTGSNVFQTRAGCLIGAEHVNNSYECDIPIGAGICASYQTQTNSPRRARSVASQSIIAYTMSLGAENSVAYSNNSIAIPTNFTISVTTEILPVSMTKTSVDCTMYICGDSTECSNLLLQYGSFCTQLNRALTGIAVEQDKNTQEVFAQVKQIYKTPPIKDFGGFNFSQILPDPSKPSKRSFIEDLLFNKVTLADAGFIKQYGDCLGDIAARDLICAQKFNGLTVLPPLLTDEMIAQYTSALLAGTITSGWTFGAGAALQIPFAMQMAYRFNGIGVTQNVLYENQKLIANQFNSAIGKIQDSLSSTASALGKLQDVVNQNAQALNTLVKQLSSNCGAISSVLNDILSRLDKVEAEVQIDRLITCRLQSLQTYVTQQLIRAAEIRASANLAATKMSECVLGQSKRVDFCGKGYHLMSFPQSAPHGVVFLHVTYVPAQEKNFTTAPAICHDGKAHFPREGVFVSNGTHWFVTQRNFYEPQIITTDNTFVSGNCDVVIGIVNNTVYDPLQPELDSFKEELDKYFKNHTSPDVDLGDISGINASVVNIQKEIDRLNEVAKNLNESLIDLQELGKYEQYIKGGGGSDIDPYKEFGSSYQLLNFLPLDFFPDLNALVDTATALYEEELTGREHCSPHHTAIRQALVCWDELTKLIAWMSSNITSEQVRTIIVNHVNDTWGLKVRQSLWFHLSCLTFGQHTVQEFLVSFGVWIRTPAPYRPPNAPILSTLPEHTVIC

SEQ ID NO: 7379 - protein, 1365 aa, Artificial Sequence
  SARS-CoV-2/Guangdong/20SF028/2020__EPI_ISL_403936 spike protein (1-1211)(F970C_G999C) WhcAg construct
MFVFLVLLPLVSSQCVNLTTRTQLPPAYTNSFTRGVYYPDKVFRSSVLYSTQDLFLPFFSNVTWFHAIHVSGTNGTKRFDNPVLPFNDGVYFASTEKSNIIRGWIFGTTLDSKTQSLLIVNNATNVVIKVCEFQFCNDPFLGVYYHKNNKSWMESEFRVYSSANNCTFEYVSQPFLMDLEGKQGNFKNLREFVFKNIDGYFKIYSKHTPINLVRDLPQGFSALEPLVDLPIGINITRFQTLLALHRSYLTPGDSSSGWTAGAAAYYVGYLQPRTFLLKYNENGTITDAVDCALDPLSETKCTLKSFTVEKGIYQTSNFRVQPTESIVRFPNITNLCPFGEVFNATRFASVYAWNRKRISNCVADYSVLYNSASFSTFKCYGVSPTKLNDLCFTNVYADSFVIRGDEVRQIAPGQTGKIADYNYKLPDDFTGCVIAWNSNNLDSKVGGNYNYLYRLFRKSNLKPFERDISTEIYQAGSTPCNGVEGFNCYFPLQSYGFQPTNGVGYQPYRVVVLSFELLHAPATVCGPKKSTNLVKNKCVNFNFNGLTGTGVLTESNKKFLPFQQFGRDIADTTDAVRDPQTLEILDITPCSFGGVSVITPGTNTSNQVAVLYQDVNCTEVPVAIHADQLTPTWRVYSTGSNVFQTRAGCLIGAEHVNNSYECDIPIGAGICASYQTQTNSPRRARSVASQSIIAYTMSLGAENSVAYSNNSIAIPTNFTISVTTEILPVSMTKTSVDCTMYICGDSTECSNLLLQYGSFCTQLNRALTGIAVEQDKNTQEVFAQVKQIYKTPPIKDFGGFNFSQILPDPSKPSKRSFIEDLLFNKVTLADAGFIKQYGDCLGDIAARDLICAQKFNGLTVLPPLLTDEMIAQYTSALLAGTITSGWTFGAGAALQIPFAMQMAYRFNGIGVTQNVLYENQKLIANQFNSAIGKIQDSLSSTASALGKLQDVVNQNAQALNTLVKQLSSNCGAISSVLNDILSRLDKVEAEVQIDRLITCRLQSLQTYVTQQLIRAAEIRASANLAATKMSECVLGQSKRVDFCGKGYHLMSFPQSAPHGVVFLHVTYVPAQEKNFTTAPAICHDGKAHFPREGVFVSNGTHWFVTQRNFYEPQIITTDNTFVSGNCDVVIGIVNNTVYDPLQPELDSFKEELDKYFKNHTSPDVDLGDISGINASVVNIQKEIDRLNEVAKNLNESLIDLQELGKYEQYIKGGGGSDIDPYKEFGSSYQLLNFLPLDFFPDLNALVDTATALYEEELTGREHCSPHHTAIRQALVCWDELTKLIAWMSSNITSEQVRTIIVNHVNDTWGLKVRQSLWFHLSCLTFGQHTVQEFLVSFGVWIRTPAPYRPPNAPILSTLPEHTVIC

SEQ ID NO: 7380 - protein, 1365 aa, Artificial Sequence
  SARS-CoV-2/Shenzhen/SZTH-001/2020__EPI_ISL_406592 spike protein (1-1211)(F970C_G999C) WhcAg construct
MFVFLVLLPLVSSQCVNLTTRTQLPPAYTNSFTRGVYYPDKVFRSSVLHSTQDLFLPFFSNVTWFHAIHVSGTNGTKRFDNPVLPFNDGVYFASTEKSNIIRGWIFGTTLDSKTQSLLIVNNATNVVIKVCEFQFCNDPFLGVYYHKNNKSWMESEFRVYSSANNCTFEYVSQPFLMDLEGKQGNFKNLREFVFKNIDGYFKIYSKHTPINLVRDLPQGFSALEPLVDLPIGINITRFQTLLALHRSYLTPGDSSSGWTAGAAAYYVGYLQPRTFLLKYNENGTITDAVDCALDPLSETKCTLKSFTVEKGIYQTSNFRVQPTESIVRFPNITNLCPFGEVFNATRFASVYAWNRKRISNCVADYSVLYNSASFSTFKCYGVSPTKLNDLCFTNVYADSFVIRGDEVRQIAPGQTGKIADYNYKLPDDFTGCVIAWNSNNLDSKVGGNYNYLYRLFRKSNLKPFERDISTEIYQAGSTPCNGVEGFNCYFPLQSYGFQPTNGVGYQPYRVVVLSFELLHAPATVCGPKKSTNLVKNKCVNFNFNGLTGTGVLTESNKKFLPFQQFGRDIADTTDAVRDPQTLEILDITPCSFGGVSVITPGTNTSNQVAVLYQDVNCTEVPVAIHADQLTPTWRVYSTGSNVFQTRAGCLIGAEHVNNSYECDIPIGAGICASYQTQTNSPRRARSVASQSIIAYTMSLGAENSVAYSNNSIAIPTNFTISVTTEILPVSMTKTSVDCTMYICGDSTECSNLLLQYGSFCTQLNRALTGIAVEQDKNTQEVFAQVKQIYKTPPIKDFGGFNFSQILPDPSKPSKRSFIEDLLFNKVTLADAGFIKQYGDCLGDIAARDLICAQKFNGLTVLPPLLTDEMIAQYTSALLAGTITSGWTFGAGAALQIPFAMQMAYRFNGIGVTQNVLYENQKLIANQFNSAIGKIQDSLSSTASALGKLQDVVNQNAQALNTLVKQLSSNCGAISSVLNDILSRLDKVEAEVQIDRLITCRLQSLQTYVTQQLIRAAEIRASANLAATKMSECVLGQSKRVDFCGKGYHLMSFPQSAPHGVVFLHVTYVPAQEKNFTTAPAICHDGKAHFPREGVFVSNGTHWFVTQRNFYEPQIITTDNTFVSGNCDVLIGIVNNTVYDPLQPELDSFKEELDKYFKNHTSPDVDLGDISGINASVVNIQKEIDRLNEVAKNLNESLIDLQELGKYEQYIKGGGGSDIDPYKEFGSSYQLLNFLPLDFFPDLNALVDTATALYEEELTGREHCSPHHTAIRQALVCWDELTKLIAWMSSNITSEQVRTIIVNHVNDTWGLKVRQSLWFHLSCLTFGQHTVQEFLVSFGVWIRTPAPYRPPNAPILSTLPEHTVIC

SEQ ID NO: 7381 - protein, 1365 aa, Artificial Sequence
  SARS-CoV-2/Shenzhen/SZTH-004/2020__EPI_ISL_406595 spike protein (1-1211)(F970C_G999C) WhcAg construct
MFVFLVLLPLVSSQCVNLTTRTQLPPAYTNSFTRGVYYPDKVFRSSVLHSTQDLFLPFFSNVTWFHAIHVSGTNGTKRFDNPVLPFNDGVYFASTEKSNIIRGWIFGTTLDSKTQSLLIVNNATNVVIKVCEFQFCNDPFLGVYYHKNNKSWMESEFRVYSSANNCTFEYVSQPFLMDLEGKQGNFKNLREFVFKNIDGYFKIYSKHTPINLVRDLPQGFSALEPLVDLPIGINITRFQTLLALHRSYLTPGDSSSGWTAGAAAYYVGYLQPRTFLLKYNENGTITDAVDCALDPLSETKCTLKSFTVEKGIYQTSNFRVQPTESIVRFPNITNLCPFGEVFNATRFASVYAWDRKRISNCVAYYSVLYNSASFSTFKCYGVSPTKLNDLCFTNVYADSFVIRGDEVRQIAPGQTGKIADYNYKLPDDFTGCVIAWNSNNLDSKVGGNYNYLYRLFRKSNLKPFERDISTEIYQAGSTPCNGVEGFNCYFPLQSYGFQPTNGVGYQPYRVVVLSFELLHAPATVCGPKKSTNLVKNKCVNFNFNGLTGTGVLTESNKKFLPFQQFGRDIADTTDAVRDPQTLEILDITPCSFGGVSVITPGTNTSNQVAVLYQDVNCTEVPVAIHADQLTPTWRVYSTGSNVFQTRAGCLIGAEHVNNSYECDIPIGAGICASYQTQTNSPRRARSVASQSIIAYTMSLGAENSVAYSNNSIAIPTNFTISVTTEILPVSMTKTSVDCTMYICGDSTECSNLLLQYGSFCTQLNRALTGIAVEQDKNTQEVFAQVKQIYKTPPIKDFGGFNFSQILPDPSKPSKRSFIEDLLFNKVTLADAGFIKQYGDCLGDIAARDLICAQKFNGLTVLPPLLTDEMIAQYTSALLAGTITSGWTFGAGAALQIPFAMQMAYRFNGIGVTQNVLYENQKLIANQFNSAIGKIQDSLSSTASALGKLQDVVNQNAQALNTLVKQLSSNCGAISSVLNDILSRLDKVEAEVQIDRLITCRLQSLQTYVTQQLIRAAEIRASANLAATKMSECVLGQSKRVDFCGKGYHLMSFPQSAPHGVVFLHVTYVPAQEKNFTTAPAICHDGKAHFPREGVFVSNGTHWFVTQRNFYEPQIITTDNTFVSGNCDVVIGIVNNTVYDPLQPELDSFKEELDKYFKNHTSPDVDLGDISGINASVVNIQKEIDRLNEVAKNLNESLIDLQELGKYEQYIKGGGGSDIDPYKEFGSSYQLLNFLPLDFFPDLNALVDTATALYEEELTGREHCSPHHTAIRQALVCWDELTKLIAWMSSNITSEQVRTIIVNHVNDTWGLKVRQSLWFHLSCLTFGQHTVQEFLVSFGVWIRTPAPYRPPNAPILSTLPEHTVIC

SEQ ID NO: 7382 - protein, 1365 aa, Artificial Sequence
  SARS-CoV-2/France/IDF0372/2020__EPI_ISL_406596 spike protein (1-1211)(F970C_G999C) WhcAg construct
MFVFLVLLPLVSSQCVNLTTRTQLPPAYTNSFTRGVYYPDKVFRSSVLHSTQDLFLPFFSNVTWFHAIHVSGTNGTKRFDNPVLPFNDGVYFASTEKSNIIRGWIFGTTLDSKTQSLLIVNNATNVVIKVCEFQFCNDPFLGVYYHKNNKSWMESEFRVYSSANNCTFEYVSQPFLMDLEGKQGNFKNLREFVFKNIDGYFKIYSKHTPINLVRDLPQGFSALEPLVDLPIGINITRFQTLLALHRSYLTPGDSSSGWTAGAAAYYVGYLQPRTFLLKYNENGTITDAVDCALDPLSETKCTLKSFTVEKGIYQTSNFRVQPTESIVRFPNITNLCPFGEVFNATRFASVYAWNRKRISNCVADYSFLYNSASFSTFKCYGVSPTKLNDLCFTNVYADSFVIRGDEVRQIAPGQTGKIADYNYKLPDDFTGCVIAWNSNNLDSKVGGNYNYLYRLFRKSNLKPFERDISTEIYQAGSTPCNGVEGFNCYFPLQSYGFQPTNGVGYQPYRVVVLSFELLHAPATVCGPKKSTNLVKNKCVNFNFNGLTGTGVLTESNKKFLPFQQFGRDIADTTDAVRDPQTLEILDITPCSFGGVSVITPGTNTSNQVAVLYQDVNCTEVPVAIHADQLTPTWRVYSTGSNVFQTRAGCLIGAEHVNNSYECDIPIGAGICASYQTQTNSPRRARSVASQSIIAYTMSLGAENSVAYSNNSIAIPTNFTISVTTEILPVSMTKTSVDCTMYICGDSTECSNLLLQYGSFCTQLNRALTGIAVEQDKNTQEVFAQVKQIYKTPPIKDFGGFNFSQILPDPSKPSKRSFIEDLLFNKVTLADAGFIKQYGDCLGDIAARDLICAQKFNGLTVLPPLLTDEMIAQYTSALLAGTITSGWTFGAGAALQIPFAMQMAYRFNGIGVTQNVLYENQKLIANQFNSAIGKIQDSLSSTASALGKLQDVVNQNAQALNTLVKQLSSNCGAISSVLNDILSRLDKVEAEVQIDRLITCRLQSLQTYVTQQLIRAAEIRASANLAATKMSECVLGQSKRVDFCGKGYHLMSFPQSAPHGVVFLHVTYVPAQEKNFTTAPAICHDGKAHFPREGVFVSNGTHWFVTQRNFYEPQIITTDNTFVSGNCDVVIGIVNNTVYDPLQPELDSFKEELDKYFKNHTSPDVDLGDISGINASVVNIQKEIDRLNEVAKNLNESLIDLQELGKYEQYIKGGGGSDIDPYKEFGSSYQLLNFLPLDFFPDLNALVDTATALYEEELTGREHCSPHHTAIRQALVCWDELTKLIAWMSSNITSEQVRTIIVNHVNDTWGLKVRQSLWFHLSCLTFGQHTVQEFLVSFGVWIRTPAPYRPPNAPILSTLPEHTVIC

SEQ ID NO: 7383 - protein, 1365 aa, Artificial Sequence
  SARS-CoV-2/Australia/VIC01/2020__EPI_ISL_406844 spike protein (1-1211)(F970C_G999C) WhcAg construct
MFVFLVLLPLVSSQCVNLTTRTQLPPAYTNSFTRGVYYPDKVFRSSVLHSTQDLFLPFFSNVTWFHAIHVSGTNGTKRFDNPVLPFNDGVYFASTEKSNIIRGWIFGTTLDSKTQSLLIVNNATNVVIKVCEFQFCNDPFLGVYYHKNNKSWMESEFRVYSSANNCTFEYVSQPFLMDLEGKQGNFKNLREFVFKNIDGYFKIYSKHTPINLVRDLPQGFSALEPLVDLPIGINITRFQTLLALHRRYLTPGDSSSGWTAGAAAYYVGYLQPRTFLLKYNENGTITDAVDCALDPLSETKCTLKSFTVEKGIYQTSNFRVQPTESIVRFPNITNLCPFGEVFNATRFASVYAWNRKRISNCVADYSVLYNSASFSTFKCYGVSPTKLNDLCFTNVYADSFVIRGDEVRQIAPGQTGKIADYNYKLPDDFTGCVIAWNSNNLDSKVGGNYNYLYRLFRKSNLKPFERDISTEIYQAGSTPCNGVEGFNCYFPLQSYGFQPTNGVGYQPYRVVVLSFELLHAPATVCGPKKSTNLVKNKCVNFNFNGLTGTGVLTESNKKFLPFQQFGRDIADTTDAVRDPQTLEILDITPCSFGGVSVITPGTNTSNQVAVLYQDVNCTEVPVAIHADQLTPTWRVYSTGSNVFQTRAGCLIGAEHVNNSYECDIPIGAGICASYQTQTNSPRRARSVASQSIIAYTMSLGAENSVAYSNNSIAIPTNFTISVTTEILPVSMTKTSVDCTMYICGDSTECSNLLLQYGSFCTQLNRALTGIAVEQDKNTQEVFAQVKQIYKTPPIKDFGGFNFSQILPDPSKPSKRSFIEDLLFNKVTLADAGFIKQYGDCLGDIAARDLICAQKFNGLTVLPPLLTDEMIAQYTSALLAGTITSGWTFGAGAALQIPFAMQMAYRFNGIGVTQNVLYENQKLIANQFNSAIGKIQDSLSSTASALGKLQDVVNQNAQALNTLVKQLSSNCGAISSVLNDILSRLDKVEAEVQIDRLITCRLQSLQTYVTQQLIRAAEIRASANLAATKMSECVLGQSKRVDFCGKGYHLMSFPQSAPHGVVFLHVTYVPAQEKNFTTAPAICHDGKAHFPREGVFVSNGTHWFVTQRNFYEPQIITTDNTFVSGNCDVVIGIVNNTVYDPLQPELDSFKEELDKYFKNHTSPDVDLGDISGINASVVNIQKEIDRLNEVAKNLNESLIDLQELGKYEQYIKGGGGSDIDPYKEFGSSYQLLNFLPLDFFPDLNALVDTATALYEEELTGREHCSPHHTAIRQALVCWDELTKLIAWMSSNITSEQVRTIIVNHVNDTWGLKVRQSLWFHLSCLTFGQHTVQEFLVSFGVWIRTPAPYRPPNAPILSTLPEHTVIC

SEQ ID NO: 7384 - protein, 1365 aa, Artificial Sequence
  SARS-CoV-2/Germany/BavPat1/2020__EPI_ISL_406862 spike protein (1-1211)(F970C_G999C) WhcAg construct
MFVFLVLLPLVSSQCVNLTTRTQLPPAYTNSFTRGVYYPDKVFRSSVLHSTQDLFLPFFSNVTWFHAIHVSGTNGTKRFDNPVLPFNDGVYFASTEKSNIIRGWIFGTTLDSKTQSLLIVNNATNVVIKVCEFQFCNDPFLGVYYHKNNKSWMESEFRVYSSANNCTFEYVSQPFLMDLEGKQGNFKNLREFVFKNIDGYFKIYSKHTPINLVRDLPQGFSALEPLVDLPIGINITRFQTLLALHRSYLTPGDSSSGWTAGAAAYYVGYLQPRTFLLKYNENGTITDAVDCALDPLSETKCTLKSFTVEKGIYQTSNFRVQPTESIVRFPNITNLCPFGEVFNATRFASVYAWNRKRISNCVADYSVLYNSASFSTFKCYGVSPTKLNDLCFTNVYADSFVIRGDEVRQIAPGQTGKIADYNYKLPDDFTGCVIAWNSNNLDSKVGGNYNYLYRLFRKSNLKPFERDISTEIYQAGSTPCNGVEGFNCYFPLQSYGFQPTNGVGYQPYRVVVLSFELLHAPATVCGPKKSTNLVKNKCVNFNFNGLTGTGVLTESNKKFLPFQQFGRDIADTTDAVRDPQTLEILDITPCSFGGVSVITPGTNTSNQVAVLYQGVNCTEVPVAIHADQLTPTWRVYSTGSNVFQTRAGCLIGAEHVNNSYECDIPIGAGICASYQTQTNSPRRARSVASQSIIAYTMSLGAENSVAYSNNSIAIPTNFTISVTTEILPVSMTKTSVDCTMYICGDSTECSNLLLQYGSFCTQLNRALTGIAVEQDKNTQEVFAQVKQIYKTPPIKDFGGFNFSQILPDPSKPSKRSFIEDLLFNKVTLADAGFIKQYGDCLGDIAARDLICAQKFNGLTVLPPLLTDEMIAQYTSALLAGTITSGWTFGAGAALQIPFAMQMAYRFNGIGVTQNVLYENQKLIANQFNSAIGKIQDSLSSTASALGKLQDVVNQNAQALNTLVKQLSSNCGAISSVLNDILSRLDKVEAEVQIDRLITCRLQSLQTYVTQQLIRAAEIRASANLAATKMSECVLGQSKRVDFCGKGYHLMSFPQSAPHGVVFLHVTYVPAQEKNFTTAPAICHDGKAHFPREGVFVSNGTHWFVTQRNFYEPQIITTDNTFVSGNCDVVIGIVNNTVYDPLQPELDSFKEELDKYFKNHTSPDVDLGDISGINASVVNIQKEIDRLNEVAKNLNESLIDLQELGKYEQYIKGGGGSDIDPYKEFGSSYQLLNFLPLDFFPDLNALVDTATALYEEELTGREHCSPHHTAIRQALVCWDELTKLIAWMSSNITSEQVRTIIVNHVNDTWGLKVRQSLWFHLSCLTFGQHTVQEFLVSFGVWIRTPAPYRPPNAPILSTLPEHTVIC

SEQ ID NO: 7385 - protein, 1365 aa, Artificial Sequence
  SARS-CoV-2/Wuhan/HBCDC-HB-02/2020__EPI_ISL_412978 spike protein (1-1211)(F970C_G999C) WhcAg construct
MFVFLVLLPLVSSQCVNLTTRTQLPPAYTNSFTRGVYYPDKVFRSSVLHSTQDLFLPFFSNVTWFHAIHVSGTNGTKRFDNPVLPFNDGVYFASTEKSNIIRGWIFGTTLDSKTQSLLIVNNATNVVIKVCEFQFCNDPFLGVYYHKNNKSWMESEFRVYSSANNCTFEYVSQPFLMDLEGKQGNFKNLREFVFKNIDGYFKIYSKHTPINLVRDLPQGFSALEPLVDLPIGINITRFQTLLALHRSYLTPGDSSSGWTAGAAAYYVGYLQPRTFLLKYNENGTITDAVDCALDPLSETKCTLKSFTVEKGIYQTSNFRVQPTESIVRFPNITNLCPFGEVFNATRFASVYAWNRKRISNCVADYSVLYNSASFSTFKCYGVSPTKLNDLCFTNVYADSFVIRGDEVRQIAPGQTGKIADYNYKLPDDFTGCVIAWNSNNLDSKVGGNYNYLYRLFRKSNLKPFERDISTEIYQAGSTPCNGVEGFNCYFPLQSYGFQPTNGVGYQPYRVVVLSFELLHAPATVCGPKKSTNLVKNKCVNFNFNGLTGTGVLTESNKKFLPFQQFGRDIADTTDAVRDPQTLEILDITPCSFGGVSVITPGTNTSNQVAVLYQDVNCTEVPVAIHADQLTPTWRVYSTGSNVFQTRAGCLIGAEHVNNSYECDIPIGAGICASYQTQTNSPRRARSVASQSIIAYTMSLGAENSVAYSNNSIAIPTNFTISVTTEILPVSMTKTSVDCTMYICGDSTECSNFLLQYGSFCTQLNRALTGIAVEQDKNTQEVFAQVKQIYKTPPIKDFGGFNFSQILPDPSKPSKRSFIEDLLFNKVTLADAGFIKQYGDCLGDIAARDLICAQKFNGLTVLPPLLTDEMIAQYTSALLAGTITSGWTFGAGAALQIPFAMQMAYRFNGIGVTQNVLYENQKLIANQFNSAIGKIQDSLSSTASALGKLQDVVNQNAQALNTLVKQLSSNCGAISSVLNDILSRLDKVEAEVQIDRLITCRLQSLQTYVTQQLIRAAEIRASANLAATKMSECVLGQSKRVDFCGKGYHLMSFPQSAPHGVVFLHVTYVPAQEKNFTTAPAICHDGKAHFPREGVFVSNGTHWFVTQRNFYEPQIITTDNTFVSGNCDVVIGIVNNTVYDPLQPELDSFKEELDKYFKNHTSPDVDLGDISGINASVVNIQKEIDRLNEVAKNLNESLIDLQELGKYEQYIKGGGGSDIDPYKEFGSSYQLLNFLPLDFFPDLNALVDTATALYEEELTGREHCSPHHTAIRQALVCWDELTKLIAWMSSNITSEQVRTIIVNHVNDTWGLKVRQSLWFHLSCLTFGQHTVQEFLVSFGVWIRTPAPYRPPNAPILSTLPEHTVIC

SEQ ID NO: 7386 - protein, 1365 aa, Artificial Sequence
  SARS-CoV-2/Australia/QLD02/2020__EPI_ISL_407896 spike protein (1-1211)(F970C_G999C) WhcAg construct
MFVFLVLLPLVSSQCVNLTTRTQLPPAYTNSFTRGVYYPDKVFRSSVLHSTQDLFLPFFSNVTWFHAIHVSGTNGTKRFDNPVLPFNDGVYFASTEKSNIIRGWIFGTTLDSKTQSLLIVNNATNVVIKVCEFQFCNDPFLGVYYHKNNKSWMESEFRVYSSANNCTFEYVSQPFLMDLEGKQGNFKNLREFVFKNIDGYFKIYSKHTPINLVRDLPQGFSALEPLVDLPIGINITRFQTLLALHRSYLTPGDSSSGWTAGAAAYYVGYLQPRTFLLKYNENGTITDAVDCALDPLSETKCTLKSFTVEKGIYQTSNFRVQPTESIVRFPNITNLCPFGEVFNATRFASVYAWNRKRISNCVADYSVLYNSASFSTFKCYGVSPTKLNDLCFTNVYADSFVIRGDEVRQIAPGQTGKIADYNYKLPDDFTGCVIAWNSNNLDSKVGGNYNYLYRLFRKSNLKPFERDISTEIYQAGSTPCNGVEGFNCYFPLQSYGFQPTNGVGYQPYRVVVLSFELLHAPATVCGPKKSTNLVKNKCVNFNFNGLTGTGVLTESNKKFLPFQQFGRDIADTTDAVRDPQTLEILDITPCSFGGVSVITPGTNTSNQVAVLYQDVNCTEVPVAIHADQLTPTWRVYSTGSNVFQTRAGCLIGAEHVNNSYECDIPIGAGICASYQTQTNSPRRARSVASQSIIAYTMSLGAENSVAYSNNSIAIPTNFTISVTTEILPVSMTKTSVDCTMYICGDSTECSNLLLQYGSFCTQLNRALTGIAVEQDKNTQEVFAQVKQIYKTPPIKDFGGFNFSQILPDPSKPSKRSFIEDLLFNKVTLADAGFIKQYGDCLGDIAARDLICAQKFNGLTVLPPLLTDEMIAQYTSALLAGTITSGWTFGAGAALQIPFAMQMAYRFNGIGVTQNVLYENQKLIANQFNSAIGKIQDSLSSTASALGKLQDVVNQNAQALNTLVKQLSSNCGAISSVLNDILSRLDKVEAEVQIDRLITCRLQSLQTYVTQQLIRAAEIRASANLAATKMSECVLGQSKRVDFCGKGYHLMSFPQSAPHGVVFLHVTYVPAQEKNFTTAPAICHDGKAHFPREGVFVSNGTHWFVTQRNFYEPQIITTDNTFVSGNCDVVIGIVNNTVYDPLQLELDSFKEELDKYFKNHTSPDVDLGDISGINASVVNIQKEIDRLNEVAKNLNESLIDLQELGKYEQYIKGGGGSDIDPYKEFGSSYQLLNFLPLDFFPDLNALVDTATALYEEELTGREHCSPHHTAIRQALVCWDELTKLIAWMSSNITSEQVRTIIVNHVNDTWGLKVRQSLWFHLSCLTFGQHTVQEFLVSFGVWIRTPAPYRPPNAPILSTLPEHTVIC

SEQ ID NO: 7387 - protein, 1365 aa, Artificial Sequence
  SARS-CoV-2/India/1-31/2020__EPI_ISL_413523 spike protein (1-1211)(F970C_G999C) WhcAg construct
MFVFLVLLPLVSSQCVNLTTRTQLPPAYTNSFTRGVYYPDKVFRSSVLHSTQDLFLPFFSNVTWFHAIHVSGTNGTKRFDNPVLPFNDGVYFASTEKSNIIRGWIFGTTLDSKTQSLLIVNNATNVVIKVCEFQFCNDPFLGVYYHKNNKSWMESEFRVYSSANNCTFEYVSQPFLMDLEGKQGNFKNLREFVFKNIDGYFKIYSKHTPINLVRDLPQGFSALEPLVDLPIGINITRFQTLLALHRSYLTPGDSSSGWTAGAAAYYVGYLQPRTFLLKYNENGTITDAVDCALDPLSETKCTLKSFTVEKGIYQTSNFRVQPTESIVRFPNITNLCPFGEVFNATRFASVYAWNRKRISNCVADYSVLYNSASFSTFKCYGVSPTKLNDLCFTNVYADSFVIRGDEVRQIAPGQTGKIADYNYKLPDDFTGCVIAWNSNNLDSKVGGNYNYLYRLFRKSNLKPFERDISTEIYQAGSTPCNGVEGFNCYFPLQSYGFQPTNGVGYQPYRVVVLSFELLHAPATVCGPKKSTNLVKNKCVNFNFNGLTGTGVLTESNKKFLPFQQFGRDIADTTDAVRDPQTLEILDITPCSFGGVSVITPGTNTSNQVAVLYQDVNCTEVPVAIHADQLTPTWRVYSTGSNVFQTRAGCLIGAEHVNNSYECDIPIGAGICASYQTQTNSPRRARSVASQSIIAYTMSLGAENSVAYSNNSIAIPTNFTISVTTEILPVSMTKTSVDCTMYICGDSTECSNLLLQYGSFCTQLNRALTGIAVEQDKNTQEVFAQVKQIYKTPPIKDFGGFNFSQILPDPSKPSKRSFIEDLLFNKVTLADAGFIKQYGDCLGDIAARDLICAQKFNGLTVLPPLLTDEMIAQYTSALLAGTITSGWTFGAGAALQIPFAMQMAYRFNGIGVTQNVLYENQKLIANQFNSVIGKIQDSLSSTASALGKLQDVVNQNAQALNTLVKQLSSNCGAISSVLNDILSRLDKVEAEVQIDRLITCRLQSLQTYVTQQLIRAAEIRASANLAATKMSECVLGQSKRVDFCGKGYHLMSFPQSAPHGVVFLHVTYVPAQEKNFTTAPAICHDGKAHFPREGVFVSNGTHWFVTQRNFYEPQIITTDNTFVSGNCDVVIGIVNNTVYDPLQPELDSFKEELDKYFKNHTSPDVDLGDISGINASVVNIQKEIDRLNEVAKNLNESLIDLQELGKYEQYIKGGGGSDIDPYKEFGSSYQLLNFLPLDFFPDLNALVDTATALYEEELTGREHCSPHHTAIRQALVCWDELTKLIAWMSSNITSEQVRTIIVNHVNDTWGLKVRQSLWFHLSCLTFGQHTVQEFLVSFGVWIRTPAPYRPPNAPILSTLPEHTVIC

SEQ ID NO: 7388 - protein, 1365 aa, Artificial Sequence
  SARS-CoV-2/Guangdong/GD2020087-P0008/2020__EPI_ISL_413863 spike protein (1-1211)(F970C_G999C) WhcAg construct
MFVFLVLLPLVSSQCVNLTTRTQLPPAYTNSFTRGVYYPDKVFRSSVLHSTQDLFLPFFSNVTWFHAIHVSGTNGTKRFDNPVLPFNDGVYFASTEKSNIIRGWIFGTTLDSKTQSLLIVNNATNVVIKVCEFQFCNDPFLGVYYHKNNKSWMESEFRVYSSANNCTFEYVSQPFLMDLEGKQGNFKNLREFVFKNIDGYFKIYSKHTPINLVRDLPQGFSALEPLVDLPIGINITRFQTLLALHRSYLTPGDSSSGWTAGAAAYYVGYLQPRTFLLKYNENGTITDAVDCALDPLSETKCTLKSFTVEKGIYQTSNFRVQPTESIVRFPNITNLCPFGEVFNATRFASVYAWNRKRISNCVADYSVLYNSASFSTFKCYGVSPTKLNDLCFTNVYADSFVIRGDEVREIAPGQTGKIADYNYKLPDDFTGCVIAWNSNNLDSKVGGNYNYLYRLFRKSNLKPFERDISTEIYQAGSTPCNGVEGFNCYFPLQSYGFQPTNGVGYQPYRVVVLSFELLHAPATVCGPKKSTNLVKNKCVNFNFNGLTGTGVLTESNKKFLPFQQFGRDIADTTDAVRDPQTLEILDITPCSFGGVSVITPGTNTSNQVAVLYQDVNCTEVPVAIHADQLTPTWRVYSTGSNVFQTRAGCLIGAEHVNNSYECDIPIGAGICASYQTQTNSPRRARSVASQSIIAYTMSLGAENSVAYSNNSIAIPTNFTISVTTEILPVSMTKTSVDCTMYICGDSTECSNLLLQYGSFCTQLNRALTGIAVEQDKNTQEVFAQVKQIYKTPPIKDFGGFNFSQILPDPSKPSKRSFIEDLLFNKVTLADAGFIKQYGDCLGDIAARDLICAQKFNGLTVLPPLLTDEMIAQYTSALLAGTITSGWTFGAGAALQIPFAMQMAYRFNGIGVTQNVLYENQKLIANQFNSAIGKIQDSLSSTASALGKLQDVVNQNAQALNTLVKQLSSNCGAISSVLNDILSRLDKVEAEVQIDRLITCRLQSLQTYVTQQLIRAAEIRASANLAATKMSECVLGQSKRVDFCGKGYHLMSFPQSAPHGVVFLHVTYVPAQEKNFTTAPAICHDGKAHFPREGVFVSNGTHWFVTQRNFYEPQIITTDNTFVSGNCDVVIGIVNNTVYDPLQPELDSFKEELDKYFKNHTSPDVDLGDISGINASVVNIQKEIDRLNEVAKNLNESLIDLQELGKYEQYIKGGGGSDIDPYKEFGSSYQLLNFLPLDFFPDLNALVDTATALYEEELTGREHCSPHHTAIRQALVCWDELTKLIAWMSSNITSEQVRTIIVNHVNDTWGLKVRQSLWFHLSCLTFGQHTVQEFLVSFGVWIRTPAPYRPPNAPILSTLPEHTVIC

SEQ ID NO: 7389 - protein, 1365 aa, Artificial Sequence
  SARS-CoV-2/Sweden/01/2020__EPI_ISL_411951 spike protein (1-1211)(F970C_G999C) WhcAg construct
MFVFLVLLPLVSSQCVNLTTRTQLPPAYTNSFTRGVYYPDKVFRSSVLHSTQDLFLPFFSNVTWFHAIHVSGTNGTKRFDNPVLPFNDGVYFASTEKSNIIRGWIFGTTLDSKTQSLLIVNNATNVVIKVCEFQFCNDPFLGVYYHKNNKSWMESEFRVYSSANNCTFEYVSQPFLMDLEGKQGNFKNLREFVFKNIDGYFKIYSKHTPINLVRDLPQGFSALEPLVDLPIGINITRFQTLLALHRSYLTPGDSSSGWTAGAAAYYVGYLQPRTFLLKYNENGTITDAVDCALDPLSETKCTLKSFTVEKGIYQTSNFRVQPTESIVRFPNITNLCPFGEVFNATRFASVYAWNRKRISNCVADYSVLYNSASFSTFKCYGVSPTKLNDLCFTNVYADSFVIRGDEVRQIAPGQTGKIADYNYKLPDDFTGCVIAWNSNNLDSKVGGNYNYLYRLFRKSNLKPFERDISTEIYQAGSTPCNGVEGFNCYFPLQSYGFQPTNGVGYQPYRVVVLSFELLHAPATVCGPKKSTNLVKNKCVNFNFNGLTGTGVLTESNKKFLPFQQFGRDIADTTDAVRDPQTLEILDITPCSFGGVSVITPGTNTSNQVAVLYQDVNCTEVPVAIHADQLTPTWRVYSTGSNVFQTRAGCLIGAEHVNNSYECDIPIGAGICASYQTQTNSPRRARSVASQSIIAYTMSLGAENSVAYSNNSIAIPTNFTISVTTEILPVSMTKTSVDCTMYICGDSTECSNLLLQYGSFCTQLNRALTGIAVEQDKNTQEVFAQVKQIYKTPPIKDCGGFNFSQILPDPSKPSKRSFIEDLLFNKVTLADAGFIKQYGDCLGDIAARDLICAQKFNGLTVLPPLLTDEMIAQYTSALLAGTITSGWTFGAGAALQIPFAMQMAYRFNGIGVTQNVLYENQKLIANQFNSAIGKIQDSLSSTASALGKLQDVVNQNAQALNTLVKQLSSNCGAISSVLNDILSRLDKVEAEVQIDRLITCRLQSLQTYVTQQLIRAAEIRASANLAATKMSECVLGQSKRVDFCGKGYHLMSFPQSAPHGVVFLHVTYVPAQEKNFTTAPAICHDGKAHFPREGVFVSNGTHWFVTQRNFYEPQIITTDNTFVSGNCDVVIGIVNNTVYDPLQPELDSFKEELDKYFKNHTSPDVDLGDISGINASVVNIQKEIDRLNEVAKNLNESLIDLQELGKYEQYIKGGGGSDIDPYKEFGSSYQLLNFLPLDFFPDLNALVDTATALYEEELTGREHCSPHHTAIRQALVCWDELTKLIAWMSSNITSEQVRTIIVNHVNDTWGLKVRQSLWFHLSCLTFGQHTVQEFLVSFGVWIRTPAPYRPPNAPILSTLPEHTVIC

SEQ ID NO: 7390 - protein, 1365 aa, Artificial Sequence
  SARS-CoV-2/Tianmen/HBCDC-HB-07/2020__EPI_ISL_412983 spike protein (1-1211)(F970C_G999C) WhcAg construct
MFVFLVLLPLVSSQCVNLTTRTQLPPAYTNSFTRGVYYPDKVFRSSVLHSTQDLFLPFFSNVTWFHAIHVSGTNGTKRFDNPVLPFNDGVYFASTEKSNIIRGWIFGTTLDSKTQSLLIVNNATNVVIKVCEFQFCNDPFLGVYYHKNNKSWMESEFRVYSSANNCTFEYVSQPFLMDLEGKQGNFKNLREFVFKNIDGYFKIYSKHTPINLVRDLPQGFSALEPLVDLPIGINITRFQTLLALHRSYLTPGDSSSGWTAGAAAYYVGYLQPRTFLLKYNENGTITDAVDCALDPLSETKCTLKSFTVEKGIYQTSNFRVQPTESIVRFPNITNLCPFGEVFNATRFASVYAWNRKRISNCVADYSVLYNSASFSTFKCYGVSPTKLNDLCFTNVYADSFVIRGDEVRQIAPGQTGKIADYNYKLPDDFTGCVIAWNSNNLDSKVGGNYNYLYRLFRKSNLKPFERDISTEIYQAGSTPCNGVEGFNCYFPLQSYGFQPTNGVGYQPYRVVVLSFELLHAPATVCGPKKSTNLVKNKCVNFNFNGLTGTGVLTESNKKFLPFQQFGRDIADTTDAVRDPQTLEILDITPCSFGGVSVITPGTNTSNQVAVLYQDLNCTEVPVAIHADQLTPTWRVYSTGSNVFQTRAGCLIGAEHVNNSYECDIPIGAGICASYQTQTNSPRRARSVASQSIIAYTMSLGAENSVAYSNNSIAIPTNFTISVTTEILPVSMTKTSVDCTMYICGDSTECSNLLLQYGSFCTQLNRALTGIAVEQDKNTQEVFAQVKQIYKTPPIKDFGGFNFSQILPDPSKPSKRSFIEDLLFNKVTLADAGFIKQYGDCLGDIAARDLICAQKFNGLTVLPPLLTDEMIAQYTSALLAGTITSGWTFGAGAALQIPFAMQMAYRFNGIGVTQNVLYENQKLIANQFNSAIGKIQDSLSSTASALGKLQDVVNQNAQALNTLVKQLSSNCGAISSVLNDILSRLDKVEAEVQIDRLITCRLQSLQTYVTQQLIRAAEIRASANLAATKMSECVLGQSKRVDFCGKGYHLMSFPQSAPHGVVFLHVTYVPAQEKNFTTAPAICHDGKAHFPREGVFVSNGTHWFVTQRNFYEPQIITTDNTFVSGNCDVVIGIVNNTVYDPLQPELDSFKEELDKYFKNHTSPDVDLGDISGINASVVNIQKEIDRLNEVAKNLNESLIDLQELGKYEQYIKGGGGSDIDPYKEFGSSYQLLNFLPLDFFPDLNALVDTATALYEEELTGREHCSPHHTAIRQALVCWDELTKLIAWMSSNITSEQVRTIIVNHVNDTWGLKVRQSLWFHLSCLTFGQHTVQEFLVSFGVWIRTPAPYRPPNAPILSTLPEHTVIC

SEQ ID NO: 7391 - protein, 1365 aa, Artificial Sequence
  SARS-CoV-2/Hong Kong/case42_VM20002493/2020__EPI_ISL_414527 spike protein (1-1211)(F970C_G999C) WhcAg construct
MFVFLVLLPLVSSQCVNLTTRTQLPPAYTNSFTRGVYYPDKVFRSSVLHSTQDLFLPFFSNVTWFHAIHVSGTNGTKRFDNPVLPFNDGVYFASTEKSNIIRGWIFGTTLDSKTQSLLIVNNATNVVIKVCEFQFCNDPFLGVYYHKNNKSWMESEFRVYSSANNCTFEYVSQPFLMDLEGKQGNFKNLREFVFKNIDGYFKIYSKHTPINLVRDLPQGFSALEPLVDLPIGINITRFQTLLALHRSYLTPGDSSSGWTAGAAAYYVGYLQPRTFLLKYNENGTITDAVDCALDPLSETKCTLKSFTVEKGIYQTSNFRVQPTESIVRFPNITNLCPFGEVFNATRFASVYAWNRKRISNCVADYSVLYNSASFSTFKCYGVSPTKLNDLCFTNVYADSFVIRGDEVRQIAPGQTGKIADYNYKLPDDFTGCVIAWNSNNLDSKVGGNYNYLYRLFRKSNLKPFERDISTEIYQAGSTPCNGVEGFNCYFPLQSYGFQPTNGVGYQPYRVVVLSFELLHAPATVCGPKKSTNLVKNKCVNFNFNGLTGTGVLTESNKKFLPFQQFGRDIADTTDAVRDPQTLEILDITPCSFGGVSVITPGTNTSNQVAVLYQDVNCTEVPVAIHADQLTPTWRVYSTGSNVFQTRAGCLIGAEHVNNSYECDIPIGAGICASYQTQTNSPRRARSVASQSIIAYTMSLGAENSVAYSNNSIAIPTNFAISVTTEILPVSMTKTSVDCTMYICGDSTECSNLLLQYGSFCTQLNRALTGIAVEQDKNTQEVFAQVKQIYKTPPIKDFGGFNFSQILPDPSKPSKRSFIEDLLFNKVTLADAGFIKQYGDCLGDIAARDLICAQKFNGLTVLPPLLTDEMIAQYTSALLAGTITSGWTFGAGAALQIPFAMQMAYRFNGIGVTQNVLYENQKLIANQFNSAIGKIQDSLSSTASALGKLQDVVNQNAQALNTLVKQLSSNCGAISSVLNDILSRLDKVEAEVQIDRLITCRLQSLQTYVTQQLIRAAEIRASANLAATKMSECVLGQSKRVDFCGKGYHLMSFPQSAPHGVVFLHVTYVPAQEKNFTTAPAICHDGKAHFPREGVFVSNGTHWFVTQRNFYEPQIITTDNTFVSGNCDVVIGIVNNTVYDPLQPELDSFKEELDKYFKNHTSPDVDLGDISGINASVVNIQKEIDRLNEVAKNLNESLIDLQELGKYEQYIKGGGGSDIDPYKEFGSSYQLLNFLPLDFFPDLNALVDTATALYEEELTGREHCSPHHTAIRQALVCWDELTKLIAWMSSNITSEQVRTIIVNHVNDTWGLKVRQSLWFHLSCLTFGQHTVQEFLVSFGVWIRTPAPYRPPNAPILSTLPEHTVIC

SEQ ID NO: 7392 - protein, 1365 aa, Artificial Sequence
  SARS-CoV-2/USA/CruiseA-23/2020__EPI_ISL_414482 spike protein (1-1211)(F970C_G999C) WhcAg construct
MFVFLVLLPLVSSQCVNLTTRTQLPPAYTNSFTRGVYYPDKVFRSSVLHSTQDLFLPFFSNVTWFHAIHVSGTNGTKRFDNPVLPFNDGVYFASTEKSNIIRGWIFGTTLDSKTQSLLIVNNATNVVIKVCEFQFCNDPFLGVYYHKNNKSWMESEFRVYSSANNCTFEYVSQPFLMDLEVKQGNFKNLREFVFKNIDGYFKIYSKHTPINLVRDLPQGFSALEPLVDLPIGINITRFQTLLALHRSYLTPGDSSSGWTAGAAAYYVGYLQPRTFLLKYNENGTITDAVDCALDPLSETKCTLKSFTVEKGIYQTSNFRVQPTESIVRFPNITNLCPFGEVFNATRFASVYAWNRKRISNCVADYSVLYNSASFSTFKCYGVSPTKLNDLCFTNVYADSFVIRGDEVRQIAPGQTGKIADYNYKLPDDFTGCVIAWNSNNLDSKVGGNYNYLYRLFRKSNLKPFERDISTEIYQAGSTPCNGVEGFNCYFPLQSYGFQPTNGVGYQPYRVVVLSFELLHAPATVCGPKKSTNLVKNKCVNFNFNGLTGTGVLTESNKKFLPFQQFGRDIADTTDAVRDPQTLEILDITPCSFGGVSVITPGTNTSNQVAVLYQDVNCTEVPVAIHADQLTPTWRVYSTGSNVFQTRAGCLIGAEHVNNSYECDIPIGAGICASYQTQTNSPRRARSVASQSIIAYTMSLGAENSVAYSNNSIAIPTNFTISVTTEILPVSMTKTSVDCTMYICGDSTECSNLLLQYGSFCTQLNRALTGIAVEQDKNTQEVFAQVKQIYKTPPIKDFGGFNFSQILPDPSKPSKRSFIEDLLFNKVTLADAGFIKQYGDCLGDIAARDLICAQKFNGLTVLPPLLTDEMIAQYTSALLAGTITSGWTFGAGAALQIPFAMQMAYRFNGIGVTQNVLYENQKLIANQFNSAIGKIQDSLSSTASALGKLQDVVNQNAQALNTLVKQLSSNCGAISSVLNDILSRLDKVEAEVQIDRLITCRLQSLQTYVTQQLIRAAEIRASANLAATKMSECVLGQSKRVDFCGKGYHLMSFPQSAPHGVVFLHVTYVPAQEKNFTTAPAICHDGKAHFPREGVFVSNGTHWFVTQRNFYEPQIITTDNTFVSGNCDVVIGIVNNTVYDPLQPELDSFKEELDKYFKNHTSPDVDLGDISGINASVVNIQKEIDRLNEVAKNLNESLIDLQELGKYEQYIKGGGGSDIDPYKEFGSSYQLLNFLPLDFFPDLNALVDTATALYEEELTGREHCSPHHTAIRQALVCWDELTKLIAWMSSNITSEQVRTIIVNHVNDTWGLKVRQSLWFHLSCLTFGQHTVQEFLVSFGVWIRTPAPYRPPNAPILSTLPEHTVIC

SEQ ID NO: 7393 - protein, 1365 aa, Artificial Sequence
  SARS-CoV-2/Hong Kong/case85_VM20002868/2020__EPI_ISL_414519 spike protein (1-1211)(F970C_G999C) WhcAg construct
MFVFLVLVPLVSSQCVNLTTRTQLPPAYTNSFTRGVYYPDKVFRSSVLHSTQDLFLPFFSNVTWFHAIHVSGTNGTKRFDNPVLPFNDGVYFASTEKSNIIRGWIFGTTLDSKTQSLLIVNNATNVVIKVCEFQFCNDPFLGVYYHKNNKSWMESEFRVYSSANNCTFEYVSQPFLMDLEGKQGNFKNLREFVFKNIDGYFKIYSKHTPINLVRDLPQGFSALEPLVDLPIGINITRFQTLLALHRSYLTPGDSSSGWTAGAAAYYVGYLQPRTFLLKYNENGTITDAVDCALDPLSETKCTLKSFTVEKGIYQTSNFRVQPTESIVRFPNITNLCPFGEVFNATRFASVYAWNRKRISNCVADYSVLYNSASFSTFKCYGVSPTKLNDLCFTNVYADSFVIRGDEVRQIAPGQTGKIADYNYKLPDDFTGCVIAWNSNNLDSKVGGNYNYLYRLFRKSNLKPFERDISTEIYQAGSTPCNGVEGFNCYFPLQSYGFQPTNGVGYQPYRVVVLSFELLHAPATVCGPKKSTNLVKNKCVNFNFNGLTGTGVLTESNKKFLPFQQFGRDIADTTDAVRDPQTLEILDITPCSFGGVSVITPGTNTSNQVAVLYQDVNCTEVPVAIHADQLTPTWRVYSTGSNVFQTRAGCLIGAEHVNNSYECDIPIGAGICASYQTQTNSPRRARSVASQSIIAYTMSLGAENSVAYSNNSIAIPTNFTISVTTEILPVSMTKTSVDCTMYICGDSTECSNLLLQYGSFCTQLNRALTGIAVEQDKNTQEVFAQVKQIYKTPPIKDFGGFNFSQILPDPSKPSKRSFIEDLLFNKVTLADAGFIKQYGDCLGDIAARDLICAQKFNGLTVLPPLLTDEMIAQYTSALLAGTITSGWTFGAGAALQIPFAMQMAYRFNGIGVTQNVLYENQKLIANQFNSAIGKIQDSLSSTASALGKLQDVVNQNAQALNTLVKQLSSNCGAISSVLNDILSRLDKVEAEVQIDRLITCRLQSLQTYVTQQLIRAAEIRASANLAATKMSECVLGQSKRVDFCGKGYHLMSFPQSAPHGVVFLHVTYVPAQEKNFTTAPAICHDGKAHFPREGVFVSNGTHWFVTQRNFYEPQIITTDNTFVSGNCDVVIGIVNNTVYDPLQPELDSFKEELDKYFKNHTSPDVDLGDISGINASVVNIQKEIDRLNEVAKNLNESLIDLQELGKYEQYIKGGGGSDIDPYKEFGSSYQLLNFLPLDFFPDLNALVDTATALYEEELTGREHCSPHHTAIRQALVCWDELTKLIAWMSSNITSEQVRTIIVNHVNDTWGLKVRQSLWFHLSCLTFGQHTVQEFLVSFGVWIRTPAPYRPPNAPILSTLPEHTVIC

SEQ ID NO: 7394 - protein, 1365 aa, Artificial Sequence; identical to SEQ ID NO: 7384
  SARS-CoV-2/England/200990660/2020__EPI_ISL_414523 spike protein (1-1211)(F970C_G999C) WhcAg construct

SEQ ID NO: 7395 - protein, 1365 aa, Artificial Sequence
  SARS-CoV-2/Australia/NSW09/2020__EPI_ISL_413595 spike protein (1-1211)(F970C_G999C) WhcAg construct
MFVFLVLLPLVSSQCVNLTTRTQLPPAYTNSFTRGVYYPDKVFRSSVLHSTQDLFLPFFSNVTWFHAIHVSGTNGTKRFDNPVLPFNDGVYFASTEKSNIIRGWIFGTTLDSKTQSLLIVNNATNVVIKVCEFQFCNDPFLGVYYHKNNKSWMESEFRVYSSANNCTFEYVSQPFLMDLEGKQGNFKNLREFVFKNIDGYFKIYSKHTPINLVRDLPQGFSALEPLVDLPIGINITRFQTLLALHRSYLTPGDSSSGWTAGAAAYYVGYLQPRTFLLKYNENGTITDAVDCALDPLSETKCTLKSFTVEKGIYQTSNFRVQPTESIVRFPNITNLCPFGEVFNATRFASVYAWNRKRISNCVADYSVLYNSASFSTFKCYGVSPTKLNDLCFTNVYADSFVIRGDEVRQIAPGQTGKIADYNYKLPDDFTGCVIAWNSNNLDSKVGGNYNYLYRLFRKSNLKPFERDISTEIYQAGSTPCNGVEGFNCYFPLQSYGFQPTNGVGYQPYRVVVLSFELLHAPATVCGPKKSTNLVKNKCVNFNFNGLTGTGVLTESNKKFLPFQQFGRDIADTTDAVRDPQTLEILDITPCSFGGVSVITPGTNTSNQVAVLYQDVNCTEVPVAIHADQLTPTWRVYSTGSNVFQTRAGCLIGAEHVNNSYECDIPIGAGICASYQTQTNSPRRARSVASQSIIAYTMSLGAENSVAYSNNSIAIPTNFTISVTTEILPVSMTKTSVDCTMYICGDSTECSNLLLQYGSFCTQLNRALTGIAVEQDKNTQEVFAQVKQIYKTPPIKDFGGFNFSQILPDPSKPSKRSFIEDLLFNKVTLADAGFIKQYGDCLGDIAARDLICAQKFNGLTVLPPLLTDEMIAQYTSALLAGTITSGWTFGAGAALQIPFAMQMAYRFNGIGVTQNVLYENQKLIANQFNSAIGKIQDSLSFTASALGKLQDVVNQNAQALNTLVKQLSSNCGAISSVLNDILSRLDKVEAEVQIDRLITCRLQSLQTYVTQQLIRAAEIRASANLAATKMSECVLGQSKRVDFCGKGYHLMSFPQSAPHGVVFLHVTYVPAQEKNFTTAPAICHDGKAHFPREGVFVSNGTHWFVTQRNFYEPQIITTDNTFVSGNCDVVIGIVNNTVYDPLQPELDSFKEELDKYFKNHTSPDVDLGDISGINASVVNIQKEIDRLNEVAKNLNESLIDLQELGKYEQYIKGGGGSDIDPYKEFGSSYQLLNFLPLDFFPDLNALVDTATALYEEELTGREHCSPHHTAIRQALVCWDELTKLIAWMSSNITSEQVRTIIVNHVNDTWGLKVRQSLWFHLSCLTFGQHTVQEFLVSFGVWIRTPAPYRPPNAPILSTLPEHTVIC

SEQ ID NO: 7396 - protein, 1365 aa, Artificial Sequence; identical to SEQ ID NO: 7376
  SARS-CoV-2/Australia/NSW10/2020__EPI_ISL_413596 spike protein (1-1211)(F970C_G999C) WhcAg construct

SEQ ID NO: 7397 - protein, 1365 aa, Artificial Sequence
  SARS-CoV-2/Switzerland/1000477797/2020__EPI_ISL_413023 spike protein (1-1211)(F970C_G999C) WhcAg construct
MFVFLVLLPLVSSQCVNLTTRTQLPPAYTNSFTRGVYYPDKVFRSSVLHSTQDLFLPFFSNVTWFHAIHVSGTNGTKRFDNPVLPFNDGVYFASTEKSNIIRGWIFGTTLDSKTQSLLIVNNATNVVIKVCEFQFCNDPFLGVYYHKNNKSWMESEFRVYSSANNCTFEYVSQPFLMDLEGKQGNFKNLREFVFKNIDGYFNIYSKHTPINLVRDLPQGFSALEPLVDLPIGINITRFQTLLALHRSYLTPGDSSSGWTAGAAAYYVGYLQPRTFLLKYNENGTITDAVDCALDPLSETKCTLKSFTVEKGIYQTSNFRVQPTESIVRFPNITNLCPFGEVFNATRFASVYAWNRKRISNCVADYSVLYNSASFSTFKCYGVSPTKLNDLCFTNVYADSFVIRGDEVRQIAPGQTGKIADYNYKLPDDFTGCVIAWNSNNLDSKVGGNYNYLYRLFRKSNLKPFERDISTEIYQAGSTPCNGVEGFNCYFPLQSYGFQPTNGVGYQPYRVVVLSFELLHAPATVCGPKKSTNLVKNKCVNFNFNGLTGTGVLTESNKKFLPFQQFGRDIADTTDAVRDPQTLEILDITPCSFGGVSVITPGTNTSNQVAVLYQGVNCTEVPVAIHADQLTPTWRVYSTGSNVFQTRAGCLIGAEHVNNSYECDIPIGAGICASYQTQTNSPRRARSVASQSIIAYTMSLGAENSVAYSNNSIAIPTNFTISVTTEILPVSMTKTSVDCTMYICGDSTECSNLLLQYGSFCTQLNRALTGIAVEQDKNTQEVFAQVKQIYKTPPIKDFGGFNFSQILPDPSKPSKRSFIEDLLFNKVTLADAGFIKQYGDCLGDIAARDLICAQKFNGLTVLPPLLTDEMIAQYTSALLAGTITSGWTFGAGAALQIPFAMQMAYRFNGIGVTQNVLYENQKLIANQFNSAIGKIQDSLSSTASALGKLQDVVNQNAQALNTLVKQLSSNCGAISSVLNDILSRLDKVEAEVQIDRLITCRLQSLQTYVTQQLIRAAEIRASANLAATKMSECVLGQSKRVDFCGKGYHLMSFPQSAPHGVVFLHVTYVPAQEKNFTTAPAICHDGKAHFPREGVFVSNGTHWFVTQRNFYEPQIITTDNTFVSGNCDVVIGIVNNTVYDPLQPELDSFKEELDKYFKNHTSPDVDLGDISGINASVVNIQKEIDRLNEVAKNLNESLIDLQELGKYEQYIKGGGGSDIDPYKEFGSSYQLLNFLPLDFFPDLNALVDTATALYEEELTGREHCSPHHTAIRQALVCWDELTKLIAWMSSNITSEQVRTIIVNHVNDTWGLKVRQSLWFHLSCLTFGQHTVQEFLVSFGVWIRTPAPYRPPNAPILSTLPEHTVIC

SEQ ID NO: 7398 - protein, 1365 aa, Artificial Sequence
  SARS-CoV-2/Belgium/BA-02291/2020__EPI_ISL_415159 spike protein (1-1211)(F970C_G999C) WhcAg construct
MFVFLVLLPLVSSQCVNLTTRTQLPPAYTNSFTRGVYYPDKVFRSSVLHSTQDLFLPFFSNVTWFHAIHVSGTNGTKRFDNPVLPFNDGVYFASTEKSNIIRGWIFGTTLDSKTQSLLIVNNATNVVIKVCEFQFCNDPFLGVYYHKNNKSWMESEFRVYSSANNCTFEYVSQPFLMDLEGKQGNFKNLREFVFKNIDGYFKIYSKHTPINLVRDLPQGFSALEPLVDLPIGINITRFQTLLALHRSYLTPGDSSSGWTAGAAAYYVGYLQPRTFLLKYNENGTITDAVDCALDPLSETKCTLKSFTVEKGIYQTSNFRVQPTESIVRFPNITNLCPFGEVFNATRFASVYAWNRKRISNCVADYSVLYNSASFSTFKCYGVSPTKLNDLCFTNVYADSFVIRGDEVRQIAPGQTGKIADYNYKLPDDFTGCVIAWNSNNLDSKVGGNYNYLYRLFRRSNLKPFERDISTEIYQAGSTPCNGVEGFNCYFPLQSYGFQPTNGVGYQPYRVVVLSFELLPAPATVCGPKKSTNLVKNKCVNFNFNGLTGTGVLTESNKKFLPFQQFGRDIADTTDAVRDPQTLEILDITPCSFGGVSVITPGTNTSNQVAVLYQGVNCTEVPVAIHADQLTPTWRVYSTGSNVFQTRAGCLIGAEHVNNSYECDIPIGAGICASYQTQTNSPRRARSVASQSIIAYTMSLGAENSVAYSNNSIAIPTNFTISVTTEILPVSMTKTSVDCTMYICGDSTECSNLLLQYGSFCTQLNRALTGIAVEQDKNTQEVFAQVKQIYKTPPIKDFGGFNFSQILPDPSKPSKRSFIEDLLFNKVTLADAGFIKQYGDCLGDIAARDLICAQKFNGLTVLPPLLTDEMIAQYTSALLAGTITSGWTFGAGAALQIPFAMQMAYRFNGIGVTQNVLYENQKLIANQFNSAIGKIQDSLSSAAPALGKLQDVVNQNAQALNTLVKQLSSNCGAISSVLNDILSRLDKVEAEVQIDRLITCRLQSLQTYVTQQLIRAAEIRASANLAATKMSECVLGQSKRVDFCGKGYHLMSFPQSAPHGVVFLHVTYVPAQEKNFTTAPAICHDGKAHFPREGVFVSNGTHWFVTQRNFYEPQIITTDNTFVSGNCDVVIGIVNNTVYDPLQPELDSFKEELDKYFKNHTSPDVDLGDISGINASVVNIQKEIDRLNEVAKNLNESLIDLQELGKYEQYIKGGGGSDIDPYKEFGSSYQLLNFLPLDFFPDLNALVDTATALYEEELTGREHCSPHHTAIRQALVCWDELTKLIAWMSSNITSEQVRTIIVNHVNDTWGLKVRQSLWFHLSCLTFGQHTVQEFLVSFGVWIRTPAPYRPPNAPILSTLPEHTVIC

SEQ ID NO: 7399 - protein, 1365 aa, Artificial Sequence
  SARS-CoV-2/USA/WA8-UW5/2020__EPI_ISL_413486 spike protein (1-1211)(F970C_G999C) WhcAg construct
MFVFLVLLPLVSSQCVNLTTRTQLPPAYTNSFTRGVYYPDKVFRSSVLHSTQDLFLPFFSNVTWFHAIHVSGTNGTKRFDNPVLPFNDGVYFASTEKSNIIRGWIFGTTLDSKTQSLLIVNNATNVVIKVCEFQFCNDPFLGVYYHKNNKSWMESEFRVYSSANNCTFEYVSQPFLMDLEGKQGNFKNLREFVFKNIDGYFKIYSKHTPINLVRDLPQGFSALEPLVDLPIGINITRFQTLLALHRSYLTPGDSSSGWTAGAAAYYVGYLQPRTFLLKYNENGTITDAVDCALDPLSETKCTLKSFTVEKGIYQTSNFRVQPTESIVRFPNITNLCPFGEVFNATRFASVYAWNRKRISNCVADYSVLYNSASFSTFKCYGVSPTKLNDLCFTNVYADSFVIRGDEVRQIAPGQTGKIADYNYKLPDDFTGCVIAWNSNNLDSKVGGNYNYLYRLFRKSNLKPFERDISTEIYQAGSTPCNGVEGFNCYFPLQSYGFQPTNGVGYQPYRVVVLSFELLHAPATVCGPKKSTNLVKNKCVNFNFNGLTGTGVLTESNKKFLPFQQFGRDIADTTDAVRDPQTLEILDITPCSFGGVSVITPGTNTSNQVAVLYQDVNCTEVPVAIHADQLTPTWRVYSTGSNVFQTRAGCLIGAEYVNNSYECDIPIGAGICASYQTQTNSPRRARSVASQSIIAYTMSLGAENSVAYSNNSIAIPTNFTISVTTEILPVSMTKTSVDCTMYICGDSTECSNLLLQYGSFCTQLNRALTGIAVEQDKNTQEVFAQVKQIYKTPPIKDFGGFNFSQILPDPSKPSKRSFIEDLLFNKVTLADAGFIKQYGDCLGDIAARDLICAQKFNGLTVLPPLLTDEMIAQYTSALLAGTITSGWTFGAGAALQIPFAMQMAYRFNGIGVTQNVLYENQKLIANQFNSAIGKIQDSLSSTASALGKLQDVVNQNAQALNTLVKQLSSNCGAISSVLNDILSRLDKVEAEVQIDRLITCRLQSLQTYVTQQLIRAAEIRASANLAATKMSECVLGQSKRVDFCGKGYHLMSFPQSAPHGVVFLHVTYVPAQEKNFTTAPAICHDGKAHFPREGVFVSNGTHWFVTQRNFYEPQIITTDNTFVSGNCDVVIGIVNNTVYDPLQPELDSFKEELDKYFKNHTSPDVDLGDISGINASVVNIQKEIDRLNEVAKNLNESLIDLQELGKYEQYIKGGGGSDIDPYKEFGSSYQLLNFLPLDFFPDLNALVDTATALYEEELTGREHCSPHHTAIRQALVCWDELTKLIAWMSSNITSEQVRTIIVNHVNDTWGLKVRQSLWFHLSCLTFGQHTVQEFLVSFGVWIRTPAPYRPPNAPILSTLPEHTVIC

SEQ ID NO: 7400 - protein, 1365 aa, Artificial Sequence
  SARS-CoV-2/England/20102000506/2020__EPI_ISL_415147 spike protein (1-1211)(F970C_G999C) WhcAg construct
MFVFLVLLPLVSSQCVNLTTRTQLPPAYTNSFTRGVYYPDKVFRSSVLHSTQDLFLPFFSNVTWFHAIHVSGTNGTKRFDNPVLPFNDGVYFASTEKSNIIRGWIFGTTLDSKTQSLLIVNNATNVVIKVCEFQFCNDPFLGVYYHKNNKSWMESEFRVYSSANNCTFEYVSQPFLMDLEGKQGNFKNLREFVFKNIDGYFKIYSKHTPINLVRDLPQGFSALEPLVDLPIGINITRFQTLLALHRSYLTPGDSSSGWTAGAAAYYVGYLQPRTFLLKYNENGTITDAVDCALDPLSETKCTLKSFTVEKGIYQTSNFRVQPTESIVRFPNITNLCPFGEVFNATRFASVYAWNRKRISNCVADYSVLYNSASFSTFKCYGVSPTKLNDLCFTNVYADSFVIRGDEVRQIAPGQTGKIADYNYKLPDDFTGCVIAWNSNNLDSKVGGNYNYLYRLFRKSNLKPFERDISTEIYQAGSTPCNGVEGFNCYFPLQSYGFQPTNGVGYQPYRVVVLSFELLHAPATVCGPKKSTNLVKNKCVNFNFNGLTGTGVLTESNKKFLPFQQFGRDIADTTDAVRDPQTLEILDITPCSFGGVSVITPGTNTSNQVAVLYQGVNCTEVPVAIHADQLTPTWRVYSTGSNVFQTRAGCLIGAEHVNNSYECDIPIGAGICASYQTQTNSPRRARSVASQSIIAYTMSLGAENSVAYSNNSIAIPTNFTISVTTEILPVSMTKTSVDCTMYICGDSTECSNLLLQYGSFCTQLNRALTGIAVEQDKNTQEVFAQVKQIYKTPPIKDFGGFNFSQILPDPSKPSKRSFIEDLLFNKVTLADAGFIKQYGYCLGDIAARDLICAQKFNGLTVLPPLLTDEMIAQYTSALLAGTITSGWTFGAGAALQIPFAMQMAYRFNGIGVTQNVLYENQKLIANQFNSAIGKIQDSLSSTASALGKLQDVVNQNAQALNTLVKQLSSNCGAISSVLNDILSRLDKVEAEVQIDRLITCRLQSLQTYVTQQLIRAAEIRASANLAATKMSECVLGQSKRVDFCGKGYHLMSFPQSAPHGVVFLHVTYVPAQEKNFTTAPAICHDGKAHFPREGVFVSNGTHWFVTQRNFYEPQIITTDNTFVSGNCDVVIGIVNNTVYDPLQPELDSFKEELDKYFKNHTSPDVDLGDISGINASVVNIQKEIDRLNEVAKNLNESLIDLQELGKYEQYIKGGGGSDIDPYKEFGSSYQLLNFLPLDFFPDLNALVDTATALYEEELTGREHCSPHHTAIRQALVCWDELTKLIAWMSSNITSEQVRTIIVNHVNDTWGLKVRQSLWFHLSCLTFGQHTVQEFLVSFGVWIRTPAPYRPPNAPILSTLPEHTVIC

SEQ ID NO: 7401 - protein, 1365 aa, Artificial Sequence
  SARS-CoV-2/Belgium/VAG-03013/2020__EPI_ISL_415155 spike protein (1-1211)(F970C_G999C) WhcAg construct
MFVFLVLLPLVSSQCVNLTTRTQLPPAYTNSFTRGVYYPDKVFRSSVLHSTQDLFLPFFSNVTWFHAIHVSGTNGTKRFDNPVLPFNDGVYFASTEKSNIIRGWIFGTTLDSKTQSLLIVNNATNVVIKVCEFQFCNDPFLGVYYHKNNKSWMESEFRVYSSANNCTFEYVSQPFLMDLEGKQGNFKNLREFVFKNIDGYFKIYSKHTPINLVRDLPQGFSALEPLVDLPIGINITRFQTLLALHRSYLTPGDSSSGWTAGAAAYYVGYLQPRTFLLKYNENGTITDAVDCALDPLSETKCTLKSFTVEKGIYQTSNFRVQPTESIVRFPNITNLCPFGEVFNATRFASVYAWNRKRISNCVADYSVLYNSASFSTFKCYGVSPTKLNDLCFTNVYADSFVIRGDEVRQIAPGQTGKIADYNYKLPDDFTGCVIAWNSNNLDSKVGGNYNYLYRLFRKSNLKPFERDISTEIYQAGSTPCNGVEGFNCYFPLQSYGFQPTNGVGYQPYRVVVLSFELLHAPATVCGPKKSTNLVKNKCVNFNFNGLTGTGVLTESNKKFLPFQQFGRDIADTTDAVRDPQTLEILDITPCSFGGVSVITPGTNTSNQVAVLYQGVNCTEVPVAIHADQLTPTWRVYSTGSNVFQTRAGCLIGAEHVNNSYECDIPIGAGICASYQTQTNSPRRARSVASQSIIAYTMSLGAENSVAYSNNSIAIPTNFTISVTTEILPVSMTKTSVDCTMYICGDSTECSNLLLQYGSFCTQLNRALTGIAVEQDKNTQEVFAQVKQIYKTPPIKDFGGFNFSQILPDPSKPSKRSFIEDLLFNKVTLADAGFIKQYGDCLGDIAARDLICAQKFNGLTVLPPLLTDEMIAQYTSALLAGTITSGWTFGAGAALQIPFAMQMAYRFNGIGVTQNVLYENQKLIANQFNSAIGKIQDSLSSTATALGKLQDVVNQNAQALNTLVKQLSSNCGAISSVLNDILSRLDKVEAEVQIDRLITCRLQSLQTYVTQQLIRAAEIRASANLAATKMSECVLGQSKRVDFCGKGYHLMSFPQSAPHGVVFLHVTYVPAQEKNFTTAPAICHDGKAHFPREGVFVSNGTHWFVTQRNFYEPQIITTDNTFVSGNCDVVIGIVNNTVYDPLQPELDSFKEELDKYFKNHTSPDVDLGDISGINASVVNIQKEIDRLNEVAKNLNESLIDLQELGKYEQYIKGGGGSDIDPYKEFGSSYQLLNFLPLDFFPDLNALVDTATALYEEELTGREHCSPHHTAIRQALVCWDELTKLIAWMSSNITSEQVRTIIVNHVNDTWGLKVRQSLWFHLSCLTFGQHTVQEFLVSFGVWIRTPAPYRPPNAPILSTLPEHTVIC

SEQ ID NO: 7402 - protein, 1365 aa, Artificial Sequence
  SARS-CoV-2/Belgium/BC-03016/2020__EPI_ISL_415157 spike protein (1-1211)(F970C_G999C) WhcAg construct
MFVFLVLLPLVSSQCVNLTTRTQLPPAYTNSFTRGVYYPDKVFRSSVLHSTQDLFLPFFSNVTWFHAIHVSGTNGTKRFDNPVLPFNDGVYFASTEKSNIIRGWIFGTTLDSKTQSLLIVNNATNVVIKVCEFQFCNDPFLGVYYHKNNKSWMESEFRVYSSANNCTFEYVSQPFLMDLEGKQGNFKNLREFVFKNIDGYFKIYSKHTPINLVRDLPQGFSALEPLVDLPIGINITRFQTLLALHRSYLTPGDSSSGWTAGAAAYYVGYLQPRTFLLKYNENGTITDAVDCALDPLSETKCTLKSFTVEKGIYQTSNFRVQPTESIVRFPNITNLCPFGEVFNATRFASVYAWNRKRISNCVADYSVLYNSASFSTFKCYGVSPTKLNDLCFTNVYADSFVIRGDEVRQIAPGQTGKIADYNYKLPDDFTGCVIAWNSNNLDSKVGGNYNYLYRLFRKSNLKPFERDISTEIYQAGSTPCNGVEGFNCYFPLQSYGFQPTNGVGYQPYRVVVLSFELLHAPATVCGPKKSTNLVKNKCVNFNFNGLTGTGVLTESNKKFLPFQQFGRDIADTTDAVRDPQTLEILDITPCSFGGVSVITPGTNTSNQVAVLYQGVNCTEVPVAIHADQLTPTWRVYSTGSNVFQTRAGCLIGAEHVNNSYECDIPIGAGICASYQTQTNSPRRARSVASQSIIAYTMSLGAENSVAYSNNSIAIPTNFTISVTTEILPVSMTKTSVDCTMYICGDSTECSNLLLQYGSFCTQLNRALTGIAVEQDKNTQEVFAQVKQIYKTPPIKDFGGFNFSQILPDPSKPSKRSFIEDLLFNKVTLADAGFIKQYGDCLGDIAARDLICAQKFNGLTVLPPLLTDEMIAQYTSALLAGTITSGWTFGAGAALQIPFAMQMAYRFNGIGVTQNVLYENQKLIANQFNSAIGKIQDSLSSTAPALGKLQDVVNQNAQALNTLVKQLSSNCGAISSVLNDILSRLDKVEAEVQIDRLITCRLQSLQTYVTQQLIRAAEIRASANLAATKMSECVLGQSKRVDFCGKGYHLMSFPQSAPHGVVFLHVTYVPAQEKNFTTAPAICHDGKAHFPREGVFVSNGTHWFVTQRNFYEPQIITTDNTFVSGNCDVVIGIVNNTVYDPLQPELDSFKEELDKYFKNHTSPDVDLGDISGINASVVNIQKEIDRLNEVAKNLNESLIDLQELGKYEQYIKGGGGSDIDPYKEFGSSYQLLNFLPLDFFPDLNALVDTATALYEEELTGREHCSPHHTAIRQALVCWDELTKLIAWMSSNITSEQVRTIIVNHVNDTWGLKVRQSLWFHLSCLTFGQHTVQEFLVSFGVWIRTPAPYRPPNAPILSTLPEHTVIC

SEQ ID NO: 7403 - protein, 1365 aa, Artificial Sequence
  SARS-CoV-2/Germany/BavPat3/2020__EPI_ISL_414521 spike protein (1-1211)(F970C_G999C) WhcAg construct
MFVFLVLLPLVSSQCVNLTTRTQLPPAYTNSFTRGVYYPDKVFRSSVLHSTQDLFLPFFSNVTWFHAIHVSGTNGTKRFDNPVLPFNDGVYFASTEKSNIIRGWIFGTTLDSKTQSLLIVNNATNVVIKVCEFQFCNDPFLGVYYHKNNKSWMESEFRVYSSANNCTFEYVSQPFLMDLEGKQGNFKNLREFVFKNIDGYFKIYSKHTPINLVRDLPQGFSALEPLVDLPIGINITRFQTLLALHRSYLTPGDSSSGWTAGAAAYYVGYLQPRTFLLKYNENGTITDAVDCALDPLSETKCTLKSFTVEKGIYQTSNFRVQPTESIVRFPNITNLCPFGEVFNATRFASVYAWNRKRISNCVADYSVLYNSASFSTFKCYGVSPTKLNDLCFTNVYADSFVIRGDEVRQIAPGQTGKIADYNYKLPDDFTGCVIAWNSNNLDSKVGGNYNYLYRLFRKSNLKPFERDISTEIYQAGSTPCNGVEGFNCYFPLQSYGFQPTNGVGYQPYRVVVLSFELLHAPATVCGPKKSTNLVKNKCVNFNFNGLTGTGVLTESNKKFLPFQQFGRDIADTTDAVRDPQTLEILDITPCSFGGVSVITPGTNTSNQVAVLYQDVNCTEVPVAIHADQLTPTWRVYSTGSNVFQTRAGCLIGAEHVNNSYECDIPIGAGICASYQTQTNSPRRARSVASQSIIAYTMSLGAENSVAYSNNSIAIPTNFTISVTTEILPVSMTKTSVDCTMYICGDSTECSNLLLQYGSFCTQLNRALTGIAVEQDKNTQQVFAQVKQIYKTPPIKDFGGFNFSQILPDPSKPSKRSFIEDLLFNKVTLADAGFIKQYGDCLGDIAARDLICAQKFNGLTVLPPLLTDEMIAQYTSALLAGTITSGWTFGAGAALQIPFAMQMAYRFNGIGVTQNVLYENQKLIANQFNSAIGKIQDSLSSTASALGKLQDVVNQNAQALNTLVKQLSSNCGAISSVLNDILSRLDKVEAEVQIDRLITCRLQSLQTYVTQQLIRAAEIRASANLAATKMSECVLGQSKRVDFCGKGYHLMSFPQSAPHGVVFLHVTYVPAQEKNFTTAPAICHDGKAHFPREGVFVSNGTHWFVTQRNFYEPQIITTDNTFVSGNCDVVIGIVNNTVYDPLQPELDSFKEELDKYFKNHTSPDVDLGDISGINASVVNIQKEIDRLNEVAKNLNESLIDLQELGKYEQYIKGGGGSDIDPYKEFGSSYQLLNFLPLDFFPDLNALVDTATALYEEELTGREHCSPHHTAIRQALVCWDELTKLIAWMSSNITSEQVRTIIVNHVNDTWGLKVRQSLWFHLSCLTFGQHTVQEFLVSFGVWIRTPAPYRPPNAPILSTLPEHTVIC

SEQ ID NO: 7404 - protein, 1365 aa, Artificial Sequence
  SARS-CoV-2/France/HF1805/2020__EPI_ISL_414628 spike protein (1-1211)(F970C_G999C) WhcAg construct
MFVFLVLLPLVSSQCVNLTTRTQLPPAYTNSFTRGVYYPDKVFRSSVLHSTQDLFLPFFSNVTWFHAIHVSGTNGTKRFDNPVLPFNDGVYFASTEKSNIIRGWIFGTTLDSKTQSLLIVNNATNVVIKVCEFQFCNDPFLGVYYHKNNKSWMESEFRVYSSANNCTFEYVSQPFLMDLEGKQGNFKNLREFVFKNIDGYFKIYSKHTPINLVRDLPQGFSALEPLVDLPIGINITRFQTLLALHRSYLTPGDSSSGWTAGAAAYYVGYLQPRTFLLKYNENGTITDAVDCALDPLSETKCTLKSFTVEKGIYQTSNFRVQPTESIVRFPNITNLCPFGEVFNATRFASVYAWNRKRISNCVADYSVLYNSASFSTFKCYGVSPTKLNDLCFTNVYADSFVIRGDEVRQIAPGQTGKIADYNYKLPDDFTGCVIAWNSNNLDSKVGGNYNYLYRLFRKSNLKPFERDISTEIYQAGSTPCNGVEGFNCYFPLQSYGFQPTNGVGYQPYRVVVLSFELLHAPATVCGPKKSTNLVKNKCVNFNFNGLTGTGVLTESNKKFLPFQQFGRDIADTTDAVRDPQTLEILDITPCSFGGVSVITPGTNTSNQVAVLYQGVNCTEVPVAIHADQLTPTWRVYSTGSNVFQTRAGCLIGAEHVNNSYECDIPIGAGICASYQTQTNSPRRARSVASQSIIAYTMSLGAENSVAYSNNSIAIPTNFTISVTTEILPVSMTKTSVDCTMYICGDSTECSNLLLQYGSFCTQLNRALTGIAVEQDKNTQEVFAQVKQIYKTPPIKDFGGFNFSQILPDPSKPSKRSFIEDLLFNKVTLADAGFIKQYGDCLGDIAARDLICAQKFNGLTVLPPLLTDEMIAQYTSALLAGTITSGWTFGAGAALQIPFAMQMAYRFNGIGVTQNVLYENQKLIANQFNSAIGKIQDSLSSTASALGKLQDVVNQNAQALNTLVKQLSSNCGAISSVLNDILSRLDKVEAEVQIDRLITCRLQSLQTYVTQQLIRAAEIRASANLAATKMSECVLGQSKRVDFCGKGYHLMSFPQSAPHGVVFLHVTYVPAQEKNFTTAPAICHDGKAHFPREGVFVSNGTHWFVTQRNFYEPQIITTDNTFVSGNCDVVIGVVNNTVYDPLQPELDSFKEELDKYFKNHTSPDVDLGDISGINASVVNIQKEIDRLNEVAKNLNESLIDLQELGKYEQYIKGGGGSDIDPYKEFGSSYQLLNFLPLDFFPDLNALVDTATALYEEELTGREHCSPHHTAIRQALVCWDELTKLIAWMSSNITSEQVRTIIVNHVNDTWGLKVRQSLWFHLSCLTFGQHTVQEFLVSFGVWIRTPAPYRPPNAPILSTLPEHTVIC

SEQ ID NO: 7405 - protein, 1365 aa, Artificial Sequence
  SARS-CoV-2/Netherlands/ZuidHolland_9/2020__EPI_ISL_414445 spike protein (1-1211)(F970C_G999C) WhcAg construct
MFVFLVLLPLVSSQCVNLTTRTQLPPAYTNSFTRGVYYPDKVFRSSVLHSTQDLFLPFFSNVTWFHAIHVSGTNGTKRFDNPVLPFNDGVYFASTEKSNIIRGWIFGTTLDSKTQSLLIVNNATNVVIKVCEFQFCNDPFLGVYYHKNNKSWMESEFRVYSSANNCTFEYVSQPFLMDLEGKQGNFKNLREFVFKNIDGYFKIYSKHTPINLVRDLPQGFSALEPLVDLPIGINITRFQTLLALHRSYLTPGDSSSGWTAGAAAYYVGYLQPRTFLLKYNENGTITDAVDCALDPLSETKCTLKSFTVEKGIYQTSNFRVQPTESIVRFPNITNLCPFGEVFNATRFASVYAWNRKRISNCVADYSVLYNSASFSTFKCYGVSPTKLNDLCFTNVYADSFVIRGDEVRQIAPGQTGKIADYNYKLPDDFTGCVIAWNSNNLDSKVGGNYNYLYRLFRKSNLKPFERDISTEIYQAGSTPCNGVEGFNCYFPLQSYGFQPTNGVGYQPYRVVVLSFELLHAPATVCGPKKSTNLVKNKCVNFNFNGLTGTGVLTESNKKFLPFQQFGRDIADTTDAVRDPQTLEILDITPCSFGGVSVITPGTNTSNQVAVLYQGVNCTEVPVAIHADQLTPTWRVYSTGSNVFQTRAGCLIGAEHVNNSYECDIPIGAGICASYQTQTNSPRRARSVASQSIIAYTMSLGAENSVAYSNNSIAIPTNFTISVTTEILPVSMTKTSVDCTMYICGDSTECSNLLLQYGSFCTQLNRALTGIAVEQDKNTQEVFAQVKQIYKTPPIKDFGGFNFSQILPDPSKPSKRSFIEDLLFNKVTLADAGFIKQYGDCLGDIAARDLICVQKFNGLTVLPPLLTDEMIAQYTSALLAGTITSGWTFGAGAALQIPFAMQMAYRFNGIGVTQNVLYENQKLIANQFNSAIGKIQDSLSSTASALGKLQDVVNQNAQALNTLVKQLSSNCGAISSVLNDILSRLDKVEAEVQIDRLITCRLQSLQTYVTQQLIRAAEIRASANLAATKMSECVLGQSKRVDFCGKGYHLMSFPQSAPHGVVFLHVTYVPAQEKNFTTAPAICHDGKAHFPREGVFVSNGTHWFVTQRNFYEPQIITTDNTFVSGNCDVVIGIVNNTVYDPLQPELDSFKEELDKYFKNHTSPDVDLGDISGINASVVNIQKEIDRLNEVAKNLNESLIDLQELGKYEQYIKGGGGSDIDPYKEFGSSYQLLNFLPLDFFPDLNALVDTATALYEEELTGREHCSPHHTAIRQALVCWDELTKLIAWMSSNITSEQVRTIIVNHVNDTWGLKVRQSLWFHLSCLTFGQHTVQEFLVSFGVWIRTPAPYRPPNAPILSTLPEHTVIC

SEQ ID NO: 7406 - protein, 1365 aa, Artificial Sequence
  SARS-CoV-2/Finland/FIN03032020A/2020__EPI_ISL_413602 spike protein (1-1211)(F970C_G999C) WhcAg construct
MFVFLVLLPLVSSQCVNLTTRTQLPPAYTNSFTRGVYYPDKVFRSSVLHSTQDLFLPFFSNVTWFHAIHVSGTNGTKRFDNPVLPFNDGVYFASTEKSNIIRGWIFGTTLDSKTQSLLIVNNATNVVIKVCEFQFCNDPFLGVYYHKNNKSWMESEFRVYSSANNCTFEYVSQPFLMDLEGKQGNFKNLREFVFKNIDGYFKIYSKHTPINLVRDLPQGFSALEPLVDLPIGINITRFQTLLALHRSYLTPGDSSSGWTAGAAAYYVGYLQPRTFLLKYNENGTITDAVDCALDPLSETKCTLKSFTVEKGIYQTSNFRVQPTESIVRFPNITNLCPFGEVFNATRFASVYAWNRKRISNCVADYSVLYNSASFSTFKCYGVSPTKLNDLCFTNVYADSFVIRGDEVRQIAPGQTGKIADYNYKLPDDFTGCVISWNSNNLDSKVGGNYNYLYRLFRKSNLKPFERDISTEIYQAGSTPCNGVEGFNCYFPLQSYGFQPTNGVGYQPYRVVVLSFELLHAPATVCGPKKSTNLVKNKCVNFNFNGLTGTGVLTESNKKFLPFQQFGRDIADTTDAVRDPQTLEILDITPCSFGGVSVITPGTNTSNQVAVLYQGVNCTEVPVAIHADQLTPTWRVYSTGSNVFQTRAGCLIGAEHVNNSYECDIPIGAGICASYQTQTNSPRRARSVASQSIIAYTMSLGAENSVAYSNNSIAIPTNFTISVTTEILPVSMTKTSVDCTMYICGDSTECSNLLLQYGSFCTQLNRALTGIAVEQDKNTQEVFAQVKQIYKTPPIKDFGGFNFSQILPDPSKPSKRSFIEDLLFNKVTLADAGFIKQYGDCLGDIAARDLICAQKFNGLTVLPPLLTDEMIAQYTSALLAGTITSGWTFGAGAALQIPFAMQMAYRFNGIGVTQNVLYENQKLIANQFNSAIGKIQDSLSSTASALGKLQDVVNQNAQALNTLVKQLSSNCGAISSVLNDILSRLDKVEAEVQIDRLITCRLQSLQTYVTQQLIRAAEIRASANLAATKMSECVLGQSKRVDFCGKGYHLMSFPQSAPHGVVFLHVTYVPAQEKNFTTAPAICHDGKAHFPREGVFVSNGTHWFVTQRNFYEPQIITTDNTFVSGNCDVVIGIVNNTVYDPLQPELDSFKEELDKYFKNHTSPDVDLGDISGINASVVNIQKEIDRLNEVAKNLNESLIDLQELGKYEQYIKGGGGSDIDPYKEFGSSYQLLNFLPLDFFPDLNALVDTATALYEEELTGREHCSPHHTAIRQALVCWDELTKLIAWMSSNITSEQVRTIIVNHVNDTWGLKVRQSLWFHLSCLTFGQHTVQEFLVSFGVWIRTPAPYRPPNAPILSTLPEHTVIC

SEQ ID NO: 7407 - protein, 1365 aa, Artificial Sequence
  SARS-CoV-2/France/GE1977/2020__EPI_ISL_414632 spike protein (1-1211)(F970C_G999C) WhcAg construct
MFVFLVLLPLVSSQCVNLTTRTQLPPAYTNSFTRGVYYPDKVFRSSVLHSTQDLFLPFFSNVTWFHAIHVSGTNGTKRFDNPVLPFNDGVYFASTEKSNIIRGWIFGTTLDSKTQSLLIVNNATNVVIKVCEFQFCNDPFLGVYYHKNNKSWMESEFRVYSSANNCTFEYVSQPFLMDLEGKQGNFKNLREFVFKNIDGYFKIYSKHTPINLVRDLPQGFSALEPLVDLPIGINITRFQTLLALHRSYLTPGDSSSGWTAGAAAYYVGYLQPRTFLLKYNENGTITDAVDCALDPLSETKCTLKSFTVEKGIYQTSNFRVQPTESIVRFPNITNLCPFGEVFNATRFASVYAWNRKRISNCVADYSVLYNSASFSTFKCYGVSPTKLNDLCFTNVYADSFVIRGDEVRQIAPGQTGKIADYNYKLPDDFTGCVIAWNSNNLDSKVGGNYNYLYRLFRKSNLKPFERDISTEIYQAGSTPCNGVEGFNCYFPLQSYGFQPTNGVGYQPYRVVVLSFELLHAPATVCGPKKSTNLVKNKCVNFNFNGLTGTGVLTESNKKFLPFQQFGRDIADTTDAVRDPQTLEILDITPCSFGGVSVITPGTNTSNQVAVLYQGVNCTEVPVAIHADQLTPTWRVYSTGSNVFQTRAGCLIGAEHVNNSYECDIPIGAGICASYQTQTNSPRRARSVASQSIIAYTMSLGAENSVAYSNNSIAIPTNFTISVTTEILPVSMTKTSVDCTMYICGDSTECSNLLLQYGSFCTQLNRALTGIAVEQDKNTQEVFAQVKQIYKTPPIKDFGGFNFSQILPDPSKPSKRSFIEDLLFNKVTLADAGFIKQYGDCLGDIAARDLICAQKFNGLTVLPPLLTDEMIAQYTSALLAGTITSGWTFGAGAALQIPFAMQMAYRFNGIGVTQNVLYENQKLIANQFNSAIGKIQDSLFSTASALGKLQDVVNQNAQALNTLVKQLSSNCGAISSVLNDILSRLDKVEAEVQIDRLITCRLQSLQTYVTQQLIRAAEIRASANLAATKMSECVLGQSKRVDFCGKGYHLMSFPQSAPHGVVFLHVTYVPAQEKNFTTAPAICHDGKAHFPREGVFVSNGTHWFVTQRNFYEPQIITTDNTFVSGNCDVVIGIVNNTVYDPLQPELDSFKEELDKYFKNHTSPDVDLGDISGINASVVNIQKEIDRLNEVAKNLNESLIDLQELGKYEQYIKGGGGSDIDPYKEFGSSYQLLNFLPLDFFPDLNALVDTATALYEEELTGREHCSPHHTAIRQALVCWDELTKLIAWMSSNITSEQVRTIIVNHVNDTWGLKVRQSLWFHLSCLTFGQHTVQEFLVSFGVWIRTPAPYRPPNAPILSTLPEHTVIC

SEQ ID NO: 7408 - protein, 1365 aa, Artificial Sequence
  SARS-CoV-2/Finland/FIN-313/2020__EPI_ISL_414641 spike protein (1-1211)(F970C_G999C) WhcAg construct
MFVFLVLLPLVSSQCVNLTTRTQLPPAYTNSFTRGVYYPDKVFRSSVLHSTQDLFLPFFSNVTWFHAIHVSGTNGTKRFDNPVLPFNDGVYFASTEKSNIIRGWIFGTTLDSKTQSLLIVNNATNVVIKVCEFQFCNDPFLGVYYHKNNKSWMESEFRVYSSANNCTFEYVSQPFLMDLEGKQGNFKNLREFVFKNIDGYFKIYSKHTPINLVRDLPQGFSALEPLVDLPIGINITRFKTLLALHRSYLTPGDSSSGWTAGAAAYYVGYLQPRTFLLKYNENGTITDAVDCALDPLSETKCTLKSFTVEKGIYQTSNFRVQPTESIVRFPNITNLCPFGEVFNATRFASVYAWNRKRISNCVADYSVLYNSASFSTFKCYGVSPTKLNDLCFTNVYADSFVIRGDEVRQIAPGQTGKIADYNYKLPDDFTGCVIAWNSNNLDSKVGGNYNYLYRLFRKSNLKPFERDISTEIYQAGSTPCNGVEGFNCYFPLQSYGFQPTNGVGYQPYRVVVLSFELLHAPATVCGPKKSTNLVKNKCVNFNFNGLTGTGVLTESNKKFLPFQQFGRDIADTTDAVRDPQTLEILDITPCSFGGVSVITPGTNTSNQVAVLYQGVNCTEVPVAIHADQLTPTWRVYSTGSNVFQTRAGCLIGAEHVNNSYECDIPIGAGICASYQTQTNSPRRARSVASQSIIAYTMSLGAENSVAYSNNSIAIPTNFTISVTTEILPVSMTKTSVDCTMYICGDSTECSNLLLQYGSFCTQLNRALTGIAVEQDKNTQEVFAQVKQIYKTPPIKDFGGFNFSQILPDPSKPSKRSFIEDLLFNKVTLADAGFIKQYGDCLGDIAARDLICAQKFNGLTVLPPLLTDEMIAQYTSALLAGTITSGWTFGAGAALQIPFAMQMAYRFNGIGVTQNVLYENQKLIANQFNSAIGKIQDSLSSTASALGKLQDVVNQNAQALNTLVKQLSSNCGAISSVLNDILSRLDKVEAEVQIDRLITCRLQSLQTYVTQQLIRAAEIRASANLAATKMSECVLGQSKRVDFCGKGYHLMSFPQSAPHGVVFLHVTYVPAQEKNFTTAPAICHDGKAHFPREGVFVSNGTHWFVTQRNFYEPQIITTDNTFVSGNCDVVIGIVNNTVYDPLQPELDSFKEELDKYFKNHTSPDVDLGDISGINASVVNIQKEIDRLNEVAKNLNESLIDLQELGKYEQYIKGGGGSDIDPYKEFGSSYQLLNFLPLDFFPDLNALVDTATALYEEELTGREHCSPHHTAIRQALVCWDELTKLIAWMSSNITSEQVRTIIVNHVNDTWGLKVRQSLWFHLSCLTFGQHTVQEFLVSFGVWIRTPAPYRPPNAPILSTLPEHTVIC

SEQ ID NO: 7409 - protein, 1365 aa, Artificial Sequence
  SARS-CoV-2/Netherlands/ZuidHolland_2/2020__EPI_ISL_414556 spike protein (1-1211)(F970C_G999C) WhcAg construct
MFVFLVLLPLVSSQCVNLTTRTQLPPAYTNSFTRGVYYPDKVFRSSVLHSTQDLFLPFFSNVTWFHAIHVSGTNGTKRFDNPVLPFNDGVYFASTEKSNIIRGWIFGTTLDSKTQSLLIVNNATNVVIKVCEFQFCNDPFLGVYYHKNNKSWMESEFRVYSSANNCTFEYVSQPFLMDLEGKQGNFKNLREFVFKNIDGYFKIYSKHTPINLVRDLPQGFSALEPLVDLPIGINITRFQTLLALHRSYLTPGDSSSGWTAGAAAYYVGYLQPRTFLLKYNENGTITDAVDCALDPLSETKCTLKSFTVEKGIYQTSNFRVQPTESIVRFPNITNLCPFGEVFNATRFASVYAWNRKRISNCVADYSVLYNSASFSTFKCYGVSPTKLNDLCFTNVYADSFVIRGDEVRQIAPGQTGKIADYNYKLPDDFTGCVIAWNSNNLDSKVGGNYNYLYRLFRKSNLKPFERDISTEIYQAGSTPCNGVEGFNCYFPLQSYGFQPTNGVGYQPYRVVVLSFELLHAPATVCGPKKSTNLVKNKCVNFNFNGLTGTGVLTESNKKFLPFQQFGRDIADTTDAVRDPQTLEILDITPCSFGGVSVITPGTNTSNQVAVLYQGVNCTEVPVAIHADQLTPTWRVYSTGSNVFQTRAGCLIGAEHVNNSYECDIPIGAGICASYQTQTNSPRRARSVASQSIIAYTMSLGAENSVAYSNNSIAIPTNFTISVTTEILPVSMTKTSVDCTMYICGDSTECSNLLLQYGSFCTQLNRALTGIALEQDKNTQEVFAQVKQIYKTPPIKDFGGFNFSQILPDPSKPSKRSFIEDLLFNKVTLADAGFIKQYGDCLGDIAARDLICAQKFNGLTVLPPLLTDEMIAQYTSALLAGTITSGWTFGAGAALQIPFAMQMAYRFNGIGVTQNVLYENQKLIANQFNSAIGKIQDSLSSTASALGKLQDVVNQNAQALNTLVKQLSSNCGAISSVLNDILSRLDKVEAEVQIDRLITCRLQSLQTYVTQQLIRAAEIRASANLAATKMSECVLGQSKRVDFCGKGYHLMSFPQSAPHGVVFLHVTYVPAQEKNFTTAPAICHDGKAHFPREGVFVSNGTHWFVTQRNFYEPQIITTDNTFVSGNCDVVIGIVNNTVYDPLQPELDSFKEELDKYFKNHTSPDVDLGDISGINASVVNIQKEIDRLNEVAKNLNESLIDLQELGKYEQYIKGGGGSDIDPYKEFGSSYQLLNFLPLDFFPDLNALVDTATALYEEELTGREHCSPHHTAIRQALVCWDELTKLIAWMSSNITSEQVRTIIVNHVNDTWGLKVRQSLWFHLSCLTFGQHTVQEFLVSFGVWIRTPAPYRPPNAPILSTLPEHTVIC

SEQ ID NO: 7410 - protein, 1365 aa, Artificial Sequence
  SARS-CoV-2/USA/WA-UW31/2020__EPI_ISL_414618 spike protein (1-1211)(F970C_G999C) WhcAg construct
MFVFLVLLPLVSSQCVNLTTRTQLPPAYTNSFTRGVYYPDKVFRSSVLHSTQDLFLPFFSNVTWFHAIHVSGTNGTKRFDNPVLPFNDGVYFASTEKSNIIRGWIFGTTLDSKTQSLLIVNNATNVVIKVCEFQFCNDPFLGVYYHKNNKSWMESEFRVYSSANNCTFEYVSQPFLMDLEGKQGNFKNLREFVFKNIDGYFKIYSKHTPINLVRDLPQGFSALEPLVDLPIGINITRFQTLLALHRSYLTPGDSSSGWTAGAAAYYVGYLQPRTFLLKYNENGTITDAVDCALDPLSETKCTLKSFTVEKGIYQTSNFRVQPTESIVRFPNITNLCPFGEVFNATRFASVYAWNRKRISNCVADYSVLYNSASFSTFKCYGVSPTKLNDLCFTNVYADSFVIRGDEVRQIAPGQTGKIADYNYKLPDDFTGCVIAWNSNNLDSKVGGNYNYLYRLFRKSNLKPFERDISTEIYQAGSTPCNGAEGFNCYFPLQSYGFQPTNGVGYQPYRVVVLSFELLHAPATVCGPKKSTNLVKNKCVNFNFNGLTGTGVLTESNKKFLPFQQFGRDIADTTDAVRDPQTLEILDITPCSFGGVSVITPGTNTSNQVAVLYQDVNCTEVPVAIHADQLTPTWRVYSTGSNVFQTRAGCLIGAEHVNNSYECDIPIGAGICASYQTQTNSPRRARSVASQSIIAYTMSLGAENSVAYSNNSIAIPTNFTISVTTEILPVSMTKTSVDCTMYICGDSTECSNLLLQYGSFCTQLNRALTGIAVEQDKNTQEVFAQVKQIYKTPPIKDFGGFNFSQILPDPSKPSKRSFIEDLLFNKVTLADAGFIKQYGDCLGDIAARDLICAQKFNGLTVLPPLLTDEMIAQYTSALLAGTITSGWTFGAGAALQIPFAMQMAYRFNGIGVTQNVLYENQKLIANQFNSAIGKIQDSLSSTASALGKLQDVVNQNAQALNTLVKQLSSNCGAISSVLNDILSRLDKVEAEVQIDRLITCRLQSLQTYVTQQLIRAAEIRASANLAATKMSECVLGQSKRVDFCGKGYHLMSFPQSAPHGVVFLHVTYVPAQEKNFTTAPAICHDGKAHFPREGVFVSNGTHWFVTQRNFYEPQIITTDNTFVSGNCDVVIGIVNNTVYDPLQPELDSFKEELDKYFKNHTSPDVDLGDISGINASVVNIQKEIDRLNEVAKNLNESLIDLQELGKYEQYIKGGGGSDIDPYKEFGSSYQLLNFLPLDFFPDLNALVDTATALYEEELTGREHCSPHHTAIRQALVCWDELTKLIAWMSSNITSEQVRTIIVNHVNDTWGLKVRQSLWFHLSCLTFGQHTVQEFLVSFGVWIRTPAPYRPPNAPILSTLPEHTVIC

SEQ ID NO: 7411 - protein, 1365 aa, Artificial Sequence
  SARS-CoV-2/South Korea/SNU01/2020__EPI_ISL_411929 spike protein (1-1211)(F970C_G999C) WhcAg construct
MFVFLVLLPLVSSQCVNLTTRTQLPPAYTNSFTRGVYYPDKVFRSSVLHSTQDLFLPFFSNVTWFHAIHVSGTNGTKRFDNPVLPFNDGVYFASTEKSNIIRGWIFGTTLDSKTQSLLIVNNATNVVIKVCEFQFCNDPFLGVYYHKNNKSWMESEFRVYSSANNCTFEYVSQPFLMDLEGKQGNFKNLREFVFKNIDGYFKIYSKHTPINLVRDLPQGFWALEPLVDLPIGINITRFQTLLALHRSYLTPGDSSSGWTAGAAAYYVGYLQPRTFLLKYNENGTITDAVDCALDPLSETKCTLKSFTVEKGIYQTSNFRVQPTESIVRFPNITNLCPFGEVFNATRFASVYAWNRKRISNCVADYSVLYNSASFSTFKCYGVSPTKLNDLCFTNVYADSFVIRGDEVRQIAPGQTGKIADYNYKLPDDFTGCVIAWNSNNLDSKVGGNYNYLYRLFRKSNLKPFERDISTEIYQAGSTPCNGVEGFNCYFPLQSYGFQPTNGVGYQPYRVVVLSFELLHAPATVCGPKKSTNLVKNKCVNFNFNGLTGTGVLTESNKKFLPFQQFGRDIADTTDAVRDPQTLEILDITPCSFGGVSVITPGTNTSNQVAVLYQDVNCTEVPVAIHADQLTPTWRVYSTGSNVFQTRAGCLIGAEHVNNSYECDIPIGAGICASYQTQTNSPRRARSVASQSIIAYTMSLGAENSVAYSNNSIAIPTNFTISVTTEILPVSMTKTSVDCTMYICGDSTECSNLLLQYGSFCTQLNRALTGIAVEQDKNTQEVFAQVKQIYKTPPIKDFGGFNFSQILPDPSKPSKRSFIEDLLFNKVTLADAGFIKQYGDCLGDIAARDLICAQKFNGLTVLPPLLTDEMIAQYTSALLAGTITSGWTFGAGAALQIPFAMQMAYRFNGIGVTQNVLYENQKLIANQFNSAIGKIQDSLSSTASALGKLQDVVNQNAQALNTLVKQLSSNCGAISSVLNDILSRLDKVEAEVQIDRLITCRLQSLQTYVTQQLIRAAEIRASANLAATKMSECVLGQSKRVDFCGKGYHLMSFPQSAPHGVVFLHVTYVPAQEKNFTTAPAICHDGKAHFPREGVFVSNGTHWFVTQRNFYEPQIITTDNTFVSGNCDVVIGIVNNTVYDPLQPELDSFKEELDKYFKNHTSPDVDLGDISGINASVVNIQKEIDRLNEVAKNLNESLIDLQELGKYEQYIKGGGGSDIDPYKEFGSSYQLLNFLPLDFFPDLNALVDTATALYEEELTGREHCSPHHTAIRQALVCWDELTKLIAWMSSNITSEQVRTIIVNHVNDTWGLKVRQSLWFHLSCLTFGQHTVQEFLVSFGVWIRTPAPYRPPNAPILSTLPEHTVIC

SEQ ID NO: 7412 - protein, 1365 aa, Artificial Sequence
  SARS-CoV-2/China/WF0004/2020__EPI_ISL_413694 spike protein (1-1211)(F970C_G999C) WhcAg construct
MFVFLVLLPLVSSQCVNLTTRTQLPPAYTNSFTRGVYYPDKVFRSSVLHSTQDLFLPFFSNVTWFHAIHVSGTNGTKRFDNPVLPFNDGVYFASTEKSNIIRGWIFGTTLDSKTQSLLIVNNATNVVIKVCEFQFCNDPFLGVYYHKNNKSWTESEFRVYSSANNCTFEYVSQPFLMDLEGKQGNFKNLREFVFKNIDGYFKIYSKHTPINLVRDLPQGFSALEPLVDLPIGINITRFQTLLALHRSYLTPGDSSSGWTAGAAAYYVGYLQPRTFLLKYNENGTITDAVDCALDPLSETKCTLKSFTVEKGIYQTSNFRVQPTESIVRFPNITNLCPFGEVFNATRFASVYAWNRKRISNCVADYSVLYNSASFSTFKCYGVSPTKLNDLCFTNVYADSFVIRGDEVRQIAPGQTGKIADYNYKLPDDFTGCVIAWNSNNLDSKVGGNYNYLYRLFRKSNLKPFERDISTEIYQAGSTPCNGVEGFNCYFPLQSYGFQPTNGVGYQPYRVVVLSFELLHAPATVCGPKKSTNLVKNKCVNFNFNGLTGTGVLTESNKKFLPFQQFGRDIADTTDAVRDPQTLEILDITPCSFGGVSVITPGTNTSNQVAVLYQDVNCTEVPVAIHADQLTPTWRVYSTGSNVFQTRAGCLIGAEHVNNSYECDIPIGAGICASYQTQTNSPRRARSVASQSIIAYTMSLGAENSVAYSNNSIAIPTNFTISVTTEILPVSMTKTSVDCTMYICGDSTECSNLLLQYGSFCTQLNRALTGIAVEQDKNTQEVFAQVKQIYKTPPIKDFGGFNFSQILPDPSKPSKRSFIEDLLFNKVTLADAGFIKQYGDCLGDIAARDLICAQKFNGLTVLPPLLTDEMIAQYTSALLAGTITSGWTFGAGAALQIPFAMQMAYRFNGIGVTQNVLYENQKLIANQFNSAIGKIQDSLSSTASALGKLQDVVNQNAQALNTLVKQLSSNCGAISSVLNDILSRLDKVEAEVQIDRLITCRLQSLQTYVTQQLIRAAEIRASANLAATKMSECVLGQSKRFDFCGKGYHLMSFPQSAPHGVVFLHVTYVPAQEKNFTTAPAICHDGKAHFPREGVFVSNGTHWFVTQRNFYEPQIITTDNTFVSGNCDVVIGIVNNTVYDPLQPELDSFKEELDKYFKNHTSPDVDLGDISGINASVVNIQKEIDRLNEVAKNLNESLIDLQELGKYEQYIKGGGGSDIDPYKEFGSSYQLLNFLPLDFFPDLNALVDTATALYEEELTGREHCSPHHTAIRQALVCWDELTKLIAWMSSNITSEQVRTIIVNHVNDTWGLKVRQSLWFHLSCLTFGQHTVQEFLVSFGVWIRTPAPYRPPNAPILSTLPEHTVIC

SEQ ID NO: 7413 - protein, 1365 aa, Artificial Sequence
  SARS-CoV-2/China/WF0028/2020__EPI_ISL_413791 spike protein (1-1211)(F970C_G999C) WhcAg construct
MFVFLVLLPLVSSQCVNLTTRTQLPPAYTNSFTRGVYYPDKVFRSSVLHSTQDLFLPFFSNVTWFHAIHVSGTNGTKRFDNPVLPFNDGVYFASTEKSNIIRGWIFGTTLDSKTQSLLIVNNATNVVIKVCEFQFCNDPFLGVYYHKNNKSWMESEFRVYSSANNCTFEYVSQPFLMDLEGKQGNFKNLREFVFKNIDGYFKIYSKHTPINLVRDLPQGFSALEPLVDLPIGINITRFQTLLALHRSYLTPGDSSSGWTAGAAAYYVGYLQPRTFLLKYNENGTITDAVDCALDPLSETKCTLKSFTVEKGIYQTSNFRVQPTESIVRFPNITNLCPFGEVFNATRFASVYAWNRKRISNCVADYSVLYNSASFSTFKCYGVSPTKLNDLCFTNVYADSFVIRGDEVRQIAPGQTGKIADYNYKLPDDFTGCVIAWNSNNLDSKVGGNYNYLYRLFRKSNLKPFERDISTEIYQAGSTPCNGVEGFNCYFPLQSYGFQPTNGVGYQPYRVVVLSFELLHAPATVCGPKKSTNLVKNKCVNFNFNGLTGTGVLTESNKKFLPFQQFGRDIADTTDAVRDPQTLEILDITPCSFGGVSVITPGTNTSNQVAVLYQDVNCTEVPVAIHADQLTPTWRVYSTGSNVFQTRAGCLIGAEHVNNSYECDIPIGAGICASYQTQTNSPRRARSVASQSIIAYTMSLGAENSVAYSNNSIAIPTNFTISVTTEILPVSMTKTSVDCTMYICGDSTECSNLLLQYGSFCTQLNRALTGIAVEQDKNTQEVFAQVKQIYKTPPIKDFGGFNFSQILPDPSKPSKRSFIEDLLFNKVTLADAGFIKQYGDCLGDIAARDLICAQKFNGLTVLPPLLTDEMIAQYTSALLAGTITSGWTFGAGAALQIPFAMQMAYRFNGIGVTQNVLYENQKLIANQFNSAIGKIQDSLSSTASALGKLQDVVNQNAQALNTLVKQLSSNCGAISSVLNDILSRLDKVEAEVQIDRLITCRLQSLQTYVTQQLIRAAEIRASANLAATKMSECVLGQSKRVDFCGKGYHLMSFPQSAPHGVVFLHVTYVPAQEKNFTTAPAICHDGKAHFPREGVFVSNGTHWFVTQRNFYEPQIITTDNTFVSGNCDVVIGIVNNTVYDPLQPELESFKEELDKYFKNHTSPDVDLGDISGINASVVNIQKEIDRLNEVAKNLNESLIDLQELGKYEQYIKGGGGSDIDPYKEFGSSYQLLNFLPLDFFPDLNALVDTATALYEEELTGREHCSPHHTAIRQALVCWDELTKLIAWMSSNITSEQVRTIIVNHVNDTWGLKVRQSLWFHLSCLTFGQHTVQEFLVSFGVWIRTPAPYRPPNAPILSTLPEHTVIC

SEQ ID NO: 7414 - protein, 1365 aa, Artificial Sequence
  SARS-CoV-2/2019-nCoV/USA-CruiseA-18/2020__MT159716.1 spike protein (1-1211)(F970C_G999C) WhcAg construct
MFVFLVLLPLVSSQCVNLTTRTQLPPAYTNSFTRGVYYPDKVFRSSVLHSTQDLFLPFFSNVTWFHAIHVSGTNGTKRFDNPVLPFNDGVYFASTEKSNIIRGWIFGTTLDSKTQSLLIVNNATNVVIKVCEFQFCNDPFLGVYYHKNNKSWMESELRVYSSANNCTFEYVSQPFLMDLEGKQGNFKNLREFVFKNIDGYFKIYSKHTPINLVRDLPQGFSALEPLVDLPIGINITRFQTLLALHRSYLTPGDSSSGWTAGAAAYYVGYLQPRTFLLKYNENGTITDAVDCALDPLSETKCTLKSFTVEKGIYQTSNFRVQPTESIVRFPNITNLCPFGEVFNATRFASVYAWNRKRISNCVADYSVLYNSASFSTFKCYGVSPTKLNDLCFTNVYADSFVIRGDEVRQIAPGQTGKIADYNYKLPDDFTGCVIAWNSNNLDSKVGGNYNYLYRLFRKSNLKPFERDISTEIYQAGSTPCNGVEGFNCYFPLQSYGFQPTNGVGYQPYRVVVLSFELLHAPATVCGPKKSTNLVKNKCVNFNFNGLTGTGVLTESNKKFLPFQQFGRDIADTTDAVRDPQTLEILDITPCSFGGVSVITPGTNTSNQVAVLYQDVNCTEVPVAIHADQLTPTWRVYSTGSNVFQTRAGCLIGAEHVNNSYECDIPIGAGICASYQTQTNSPRRARSVASQSIIAYTMSLGAENSVAYSNNSIAIPTNFTISVTTEILPVSMTKTSVDCTMYICGDSTECSNLLLQYGSFCTQLNRALTGIAVEQDKNTQEVFAQVKQIYKTPPIKDFGGFNFSQILPDPSKPSKRSFIEDLLFNKVTLADAGFIKQYGDCLGDIAARDLICAQKFNGLTVLPPLLTDEMIAQYTSALLAGTITSGWTFGAGAALQIPFAMQMAYRFNGIGVTQNVLYENQKLIANQFNSAIGKIQDSLSSTASALGKLQDVVNQNAQALNTLVKQLSSNCGAISSVLNDILSRLDKVEAEVQIDRLITCRLQSLQTYVTQQLIRAAEIRASANLAATKMSECVLGQSKRVDFCGKGYHLMSFPQSAPHGVVFLHVTYVPAQEKNFTTAPAICHDGKAHFPREGVFVSNGTHWFVTQRNFYEPQIITTDNTFVSGNCDVVIGIVNNTVYDPLQPELDSFKEELDKYFKNHTSPDVDLGDISGINASVVNIQKEIDRLNEVAKNLNESLIDLQELGKYEQYIKGGGGSDIDPYKEFGSSYQLLNFLPLDFFPDLNALVDTATALYEEELTGREHCSPHHTAIRQALVCWDELTKLIAWMSSNITSEQVRTIIVNHVNDTWGLKVRQSLWFHLSCLTFGQHTVQEFLVSFGVWIRTPAPYRPPNAPILSTLPEHTVIC

SEQ ID NO: 7415 - protein, 1365 aa, Artificial Sequence
  SARS-CoV-2/SARS-CoV-2/Yunnan-01/human/2020/CHN__MT049951.1 spike protein (1-1211)(F970C_G999C) WhcAg construct
MFVFLVLLPLVSSQCVNLTTRTQLPPANTNSFTRGVYYPDKVFRSSVLHSTQDLFLPFFSNVTWFHAIHVSGTNGTKRFDNPVLPFNDGVYFASTEKSNIIRGWIFGTTLDSKTQSLLIVNNATNVVIKVCEFQFCNDPFLGVYYHKNNKSWMESEFRVYSSANNCTFEYVSQPFLMDLEGKQGNFKNLREFVFKNIDGYFKIYSKHTPINLVRDLPQGFSALEPLVDLPIGINITRFQTLLALHRSYLTPGDSSSGWTAGAAAYYVGYLQPRTFLLKYNENGTITDAVDCALDPLSETKCTLKSFTVEKGIYQTSNFRVQPTESIVRFPNITNLCPFGEVFNATRFASVYAWNRKRISNCVADYSVLYNSASFSTFKCYGVSPTKLNDLCFTNVYADSFVIRGDEVRQIAPGQTGKIADYNYKLPDDFTGCVIAWNSNNLDSKVGGNYNYLYRLFRKSNLKPFERDISTEIYQAGSTPCNGVEGFNCYFPLQSYGFQPTNGVGYQPYRVVVLSFELLHAPATVCGPKKSTNLVKNKCVNFNFNGLTGTGVLTESNKKFLPFQQFGRDIADTTDAVRDPQTLEILDITPCSFGGVSVITPGTNTSNQVAVLYQDVNCTEVPVAIHADQLTPTWRVYSTGSNVFQTRAGCLIGAEHVNNSYECDIPIGAGICASYQTQTNSPRRARSVASQSIIAYTMSLGAENSVAYSNNSIAIPTNFTISVTTEILPVSMTKTSVDCTMYICGDSTECSNLLLQYGSFCTQLNRALTGIAVEQDKNTQEVFAQVKQIYKTPPIKDFGGFNFSQILPDPSKPSKRSFIEDLLFNKVTLADAGFIKQYGDCLGDIAARDLICAQKFNGLTVLPPLLTDEMIAQYTSALLAGTITSGWTFGAGAALQIPFAMQMAYRFNGIGVTQNVLYENQKLIANQFNSAIGKIQDSLSSTASALGKLQDVVNQNAQALNTLVKQLSSNCGAISSVLNDILSRLDKVEAEVQIDRLITCRLQSLQTYVTQQLIRAAEIRASANLAATKMSECVLGQSKRVDFCGKGYHLMSFPQSAPHGVVFLHVTYVPAQEKNFTTAPAICHDGKAHFPREGVFVSNGTHWFVTQRNFYEPQIITTDNTFVSGNCDVVIGIVNNTVYDPLQPELDSFKEELDKYFKNHTSPDVDLGDISGINASVVNIQKEIDRLNEVAKNLNESLIDLQELGKYEQYIKGGGGSDIDPYKEFGSSYQLLNFLPLDFFPDLNALVDTATALYEEELTGREHCSPHHTAIRQALVCWDELTKLIAWMSSNITSEQVRTIIVNHVNDTWGLKVRQSLWFHLSCLTFGQHTVQEFLVSFGVWIRTPAPYRPPNAPILSTLPEHTVIC

SEQ ID NO: 7416 - protein, 1365 aa, Artificial Sequence
  SARS-CoV-2/USA/WA-UW292/2020__EPI_ISL_418077 spike protein (1-1211)(F970C_G999C) WhcAg construct
MFVFLVLLPLVSSQCVNLTTRTQLPPAYTNSFTRGVYYPDKVFRSSVLHSTQDLFLPFFSNVTWFHAIHVSGTNGTKRFDNPVLPFNDGVYFASTEKSNIIRGWIFGTTLDSKTQSLLIVNNATNVVIKVCEFQFCNDPFLGVYYHKNNKSWMESEFRVYSSANNCTFEYVSQPFLMDLEGKQGNFKNLREFVFKNIDGYFKIYSKHTPINLVRDLPQGFSALEPLVDLPIGINITRFQTLLALHRSYLTPGDSSSGWTAGAAAYYVGYLQPRTFLLKYNENGTITDAVDCALDPLSETKCTLKSFTVEKGIYQTSNFRVQPTESIVRFPNITNLCPFGEVFNATRFASVYAWNRKRISNCVADYSVLYNSASFSTFKCYGVSPTKLNDLCFTNVYADSFVIRGDEVRQIAPGQTGKIADYNYKLPDDFTGCVIAWNSNNLDSKVGGNYNYLYRLFRKSNLKPFERDISTEIYQASSTPCNGVEGFNCYFPLQSYGFQPTNGVGYQPYRVVVLSFELLHAPATVCGPKKSTNLVKNKCVNFNFNGLTGTGVLTESNKKFLPFQQFGRDIADTTDAVRDPQTLEILDITPCSFGGVSVITPGTNTSNQVAVLYQDVNCTEVPVAIHADQLTPTWRVYSTGSNVFQTRAGCLIGAEHVNNSYECDIPIGAGICASYQTQTNSPRRARSVASQSIIAYTMSLGAENSVAYSNNSIAIPTNFTISVTTEILPVSMTKTSVDCTMYICGDSTECSNLLLQYGSFCTQLNRALTGIAVEQDKNTQEVFAQVKQIYKTPPIKDFGGFNFSQILPDPSKPSKRSFIEDLLFNKVTLADAGFIKQYGDCLGDIAARDLICAQKFNGLTVLPPLLTDEMIAQYTSALLAGTITSGWTFGAGAALQIPFAMQMAYRFNGIGVTQNVLYENQKLIANQFNSAIGKIQDSLSSTASALGKLQDVVNQNAQALNTLVKQLSSNCGAISSVLNDILSRLDKVEAEVQIDRLITCRLQSLQTYVTQQLIRAAEIRASANLAATKMSECVLGQSKRVDFCGKGYHLMSFPQSAPHGVVFLHVTYVPAQEKNFTTAPAICHDGKAHFPREGVFVSNGTHWFVTQRNFYEPQIITTDNTFVSGNCDVVIGIVNNTVYDPLQPELDSFKEELDKYFKNHTSPDVDLGDISGINASVVNIQKEIDRLNEVAKNLNESLIDLQELGKYEQYIKGGGGSDIDPYKEFGSSYQLLNFLPLDFFPDLNALVDTATALYEEELTGREHCSPHHTAIRQALVCWDELTKLIAWMSSNITSEQVRTIIVNHVNDTWGLKVRQSLWFHLSCLTFGQHTVQEFLVSFGVWIRTPAPYRPPNAPILSTLPEHTVIC

SEQ ID NO: 7417 - protein, 1365 aa, Artificial Sequence
  SARS-CoV-2/Iceland/192/2020__EPI_ISL_417819 spike protein (1-1211)(F970C_G999C) WhcAg construct
MFVFFVLLPLVSSQCVNLTTRTQLPPAYTNSFTRGVYYPDKVFRSSVLHSTQDLFLPFFSNVTWFHAIHVSGTNGTKRFDNPVLPFNDGVYFASTEKSNIIRGWIFGTTLDSKTQSLLIVNNATNVVIKVCEFQFCNDPFLGVYYHKNNKSWMESEFRVYSSANNCTFEYVSQPFLMDLEGKQGNFKNLREFVFKNIDGYFKIYSKHTPINLVRDLPQGFSALEPLVDLPIGINITRFQTLLALHRSYLTPGDSSSGWTAGAAAYYVGYLQPRTFLLKYNENGTITDAVDCALDPLSETKCTLKSFTVEKGIYQTSNFRVQPTESIVRFPNITNLCPFGEVFNATRFASVYAWNRKRISNCVADYSVLYNSASFSTFKCYGVSPTKLNDLCFTNVYADSFVIRGDEVRQIAPGQTGKIADYNYKLPDDFTGCVIAWNSNNLDSKVGGNYNYLYRLFRKSNLKPFERDISTEIYQAGSTPCNGVEGFNCYFPLQSYGFQPTNGVGYQPYRVVVLSFELLHAPATVCGPKKSTNLVKNKCVNFNFNGLTGTGVLTESNKKFLPFQQFGRDIADTTDAVRDPQTLEILDITPCSFGGVSVITPGTNTSNQVAVLYQGVNCTEVPVAIHADQLTPTWRVYSTGSNVFQTRAGCLIGAEHVNNSYECDIPIGAGICASYQTQTNSPRRARSVASQSIIAYTMSLGAENSVAYSNNSIAIPTNFTISVTTEILPVSMTKTSVDCTMYICGDSTECSNLLLQYGSFCTQLNRALTGIAVEQDKNTQEVFAQVKQIYKTPPIKDFGGFNFSQILPDPSKPSKRSFIEDLLFNKVTLADAGFIKQYGDCLGDIAARDLICAQKFNGLTVLPPLLTDEMIAQYTSALLAGTITSGWTFGAGAALQIPFAMQMAYRFNGIGVTQNVLYENQKLIANQFNSAIGKIQDSLSSTASALGKLQDVVNQNAQALNTLVKQLSSNCGAISSVLNDILSRLDKVEAEVQIDRLITCRLQSLQTYVTQQLIRAAEIRASANLAATKMSECVLGQSKRVDFCGKGYHLMSFPQSAPHGVVFLHVTYVPAQEKNFTTAPAICHDGKAHFPREGVFVSNGTHWFVTQRNFYEPQIITTDNTFVSGNCDVVIGIVNNTVYDPLQPELDSFKEELDKYFKNHTSPDVDLGDISGINASVVNIQKEIDRLNEVAKNLNESLIDLQELGKYEQYIKGGGGSDIDPYKEFGSSYQLLNFLPLDFFPDLNALVDTATALYEEELTGREHCSPHHTAIRQALVCWDELTKLIAWMSSNITSEQVRTIIVNHVNDTWGLKVRQSLWFHLSCLTFGQHTVQEFLVSFGVWIRTPAPYRPPNAPILSTLPEHTVIC

SEQ ID NO: 7418 - protein, 1365 aa, Artificial Sequence
  SARS-CoV-2/Belgium/ULG-6939/2020__EPI_ISL_417020 spike protein (1-1211)(F970C_G999C) WhcAg construct
MFVFLVLLPLVSSQCVNLTTRTQLPPAYTNSFTRGVYYPDKVFRSSVLHSTQDLFLPFFSNVTWFHAIHVSGTNGTKRFDNPVLPFNDGVYFASTEKSNIIRGWIFGTTLDSKTQSLLIVNNATNVVIKVCEFQFCNDPFLGVYYHKNNKSWMESEFRVYSSANNCTFEYVSQPFLMDLEGKQGNFKNLREFVFKNIDGYFKIYSKHTPINLVRDLPQGFSALEPLVDLPIGINITRFQTLLALHRSYLTPGDSSSGWTAGAAAYYVGYLQPRTFLLKYNENGTITDAVDCALDPLSETKCTLKSFTVEKGIYQTSNFRVQPTESIVRFPNITNLCPFGEVFNATRFASVYAWNRKRISNCVADYSVLYNSASFSTFKCYGVSPTKLNDLCFTNVYADSFVIRGDEVRQIAPGQTGKIADYNYKLPDDFTGCVIAWNSNNLDSKVGGNYNYLYRLFRKSNLKPFERDISTEIYQAGSTPCNGVEGFNCYFPLQSYGFQPTNGVGYQPYRVVVLSFELLHAPATVCGPKKSTNLVKNKCVNFNFNGLTGTGVLTESNKKFLPFQQFGRDIADTTDAVRDPQTLEILDITPCSFGGVSVITPGTNTSNQVAVLYQGVNCTEVPVAIHADQLTPTWRVYSTGSNVFQTRAGCLIGAEHVNNSYECDIPIGAGICASYQTQTNSPRRARSVASQSIIAYTMSLGAENSVVYSNNSIAIPTNFTISVTTEILPVSMTKTSVDCTMYICGDSTECSNLLLQYGSFCTQLNRALTGIAVEQDKNTQEVFAQVKQIYKTPPIKDFGGFNFSQILPDPSKPSKRSFIEDLLFNKVTLADAGFIKQYGDCLGDIAARDLICAQKFNGLTVLPPLLTDEMIAQYTSALLAGTITSGWTFGAGAALQIPFAMQMAYRFNGIGVTQNVLYENQKLIANQFNSAIGKIQDSLSSTASALGKLQDVVNQNAQALNTLVKQLSSNCGAISSVLNDILSRLDKVEAEVQIDRLITCRLQSLQTYVTQQLIRAAEIRASANLAATKMSECVLGQSKRVDFCGKGYHLMSFPQSAPHGVVFLHVTYVPAQEKNFTTAPAICHDGKAHFPREGVFVSNGTHWFVTQRNFYEPQIITTDNTFVSGNCDVVIGIVNNTVYDPLQPELDSFKEELDKYFKNHTSPDVDLGDISGINASVVNIQKEIDRLNEVAKNLNESLIDLQELGKYEQYIKGGGGSDIDPYKEFGSSYQLLNFLPLDFFPDLNALVDTATALYEEELTGREHCSPHHTAIRQALVCWDELTKLIAWMSSNITSEQVRTIIVNHVNDTWGLKVRQSLWFHLSCLTFGQHTVQEFLVSFGVWIRTPAPYRPPNAPILSTLPEHTVIC

SEQ ID NO: 7419 - protein, 1365 aa, Artificial Sequence
  SARS-CoV-2/France/HF2496/2020__EPI_ISL_418231 spike protein (1-1211)(F970C_G999C) WhcAg construct
MFVFLVLLPLVSSQCVNLTTRTQLPPAYTNSFTRGVYYPDKVFRSSVLHSTQDLFLPFFSNVTWFHAIHVSGTNGTKRFDNPVLPFNDGVYFASTEKSNIIRGWIFGTTLDSKTQSLLIVNNATNVVIKVCEFQFCNDPFLGVYYHKNNKSWMESEFRVYSSANNCTFEYVSQPFLMDLEGKQGNFKNLREFVFKNIDGYFKIYSKHTPINLVRDLPQGFSALEPLVDLPIGINITRFQTLLALHRSYLTPGDSSSGWTAGAAAYYVGYLQPRTFLLKYNENGTITDAVDCALDPLSETKCTLKSFTVEKGIYQTSNFRVQPTESIVRFPNITNLCPFGEVFNATRFASVYAWNRKRISNCVADYSVLYNSASFSTFKCYGVSPTKLNDLCFTNVYADSFVIRGDEVRQIAPGQTGKIADYNYKLPDDFTGCVIAWNSNNLDSKVGGNYNYLYRLFRKSNLKPFERDISTEIYQAGSTPCNGVEGFNCYFPLQSYGFQPTNGVGYQPYRVVVLSFELLHAPATVCGPKKSTNLVKNKCVNFNFNGLTGTGVLTESNKKFLPFQQFGRDIADTTDAVRDPQTLEILDITPCSFGGVSVITPGTNTSNQVAVLYQGVNCTEVPVAIHADQLTPTWRVYSTGSNVFQTRAGCLIGAEHVNNSYECDIPIGAGICASYQTQTNSPRRARSVASQSIIAYTMSLGAENSVAYSNNSIAIPTNFTISVTTEILPVSMTKTSVDCTMYICGDSTECSNLLLQYGSFCTQLNRALTGIAVEQDKNTQEVFAQVKQIYKTPPIKDFGGFNFSQILPDPSKPSKRSFIEDLLFNKVTLADAGFIKQYGDCLGDIVARDLICAQKFNGLTVLPPLLTDEMIAQYTSALLAGTITSGWTFGAGAALQIPFAMQMAYRFNGIGVTQNVLYENQKLIANQFNSAIGKIQDSLSSTASALGKLQDVVNQNAQALNTLVKQLSSNCGAISSVLNDILSRLDKVEAEVQIDRLITCRLQSLQTYVTQQLIRAAEIRASANLAATKMSECVLGQSKRVDFCGKGYHLMSFPQSAPHGVVFLHVTYVPAQEKNFTTAPAICHDGKAHFPREGVFVSNGTHWFVTQRNFYEPQIITTDNTFVSGNCDVVIGIVNNTVYDPLQPELDSFKEELDKYFKNHTSPDVDLGDISGINASVVNIQKEIDRLNEVAKNLNESLIDLQELGKYEQYIKGGGGSDIDPYKEFGSSYQLLNFLPLDFFPDLNALVDTATALYEEELTGREHCSPHHTAIRQALVCWDELTKLIAWMSSNITSEQVRTIIVNHVNDTWGLKVRQSLWFHLSCLTFGQHTVQEFLVSFGVWIRTPAPYRPPNAPILSTLPEHTVIC

SEQ ID NO: 7420 - protein, 1365 aa, Artificial Sequence
  SARS-CoV-2/USA/WA-UW291/2020__EPI_ISL_418076 spike protein (1-1211)(F970C_G999C) WhcAg construct
MFVFLVLLPLVSSQCVNLTTRTQLPPAYTNSFTRGVYYPDKVFRSSVLHSTQDLFLPFFSNVTWFHAIHVSGTNGTKRFDNPVLPFNDGVYFASTEKSNIIRGWIFGTTLDSKTQSLLIVNNATNVVIKVCEFQFCNDPFLGVYYHKNNKSWMESEFRVYSSANNCTFEYVSQPFLMDLEGKQGNFKNLREFVFKNIDGYFKIYSKHTPINLVRDLPQGFSALEPLVDLPIGINITRFQTLLALHRSYLTPGDSSSGWTAGAAAYYVGYLQPRTFLLKYNENGTITDAVDCALDPLSETKCTLKSFTVEKGIYQTSNFRVQPTESIVRFPNITNLCPFGEVFNATRFASVYAWNRKRISNCVADYSVLYNSASFSTFKCYGVSPTKLNDLCFTNVYADSFVIRGDEVRQIAPGQTGKIADYNYKLPDDFTGCVIAWNSNNLDSKVGGNYNYLYRLFRKSNLKPFERDISTEIYQAGSTPCNGVEGFNCYFPLQSYGFQPTNGVGYQPYRVVVLSFELLHAPATVCGPKKSTNLVKNKCVNFNFNGLTGTGVLTESNKKFLPFQQFGRDIADTTDAVRDPQTLEILDITPCSFGGVSVITPGTNTSNQVAVLYQGVNCTEVPVAIHADQLTPTWRVYSTGSNVFQTRAGCLIGAEHVNNSYECDIPIGAGICASYQTQTNSPRRARSVASQSIIAYTMSLGAENSVAYSNNSIAIPTNFTISVTTEILPVSMTKTSVDCTMYICGDSTECSNLLLQYGSFCTQLNRALTGIAVEQDKNTQEVFAQVKQIYKTPPIKDFGGFNFSQILPDPSKPSKRSFIEDLLFNKVTLADAGFIKQYGDCLGDIAARDLICAQKFNGLTVLPPLLTDEMIAQYTSALLAGTITSGWTFGAGAALQIPFAMQMAYRFNGIGVTQNVLYENQKLIANQFNSAIGKIQYSLSSTASALGKLQDVVNQNAQALNTLVKQLSSNCGAISSVLNDILSRLDKVEAEVQIDRLITCRLQSLQTYVTQQLIRAAEIRASANLAATKMSECVLGQSKRVDFCGKGYHLMSFPQSAPHGVVFLHVTYVPAQEKNFTTAPAICHDGKAHFPREGVFVSNGTHWFVTQRNFYEPQIITTDNTFVSGNCDVVIGIVNNTVYDPLQPELDSFKEELDKYFKNHTSPDVDLGDISGINASVVNIQKEIDRLNEVAKNLNESLIDLQELGKYEQYIKGGGGSDIDPYKEFGSSYQLLNFLPLDFFPDLNALVDTATALYEEELTGREHCSPHHTAIRQALVCWDELTKLIAWMSSNITSEQVRTIIVNHVNDTWGLKVRQSLWFHLSCLTFGQHTVQEFLVSFGVWIRTPAPYRPPNAPILSTLPEHTVIC

SEQ ID NO: 7421 - protein, 1365 aa, Artificial Sequence; identical to SEQ ID NO: 7384
  SARS-CoV-2/Portugal/PT0034/2020__EPI_ISL_418019 spike protein (1-1211)(F970C_G999C) WhcAg construct

SEQ ID NO: 7422 - protein, 1365 aa, Artificial Sequence
  SARS-CoV-2/Iceland/202/2020__EPI_ISL_417750 spike protein (1-1211)(F970C_G999C) WhcAg construct
MFVFLVLLPLVSSQCVNLTTRTQLPPAYTNSFTRGVYYPDKVFRSSVLHSTQDLFLPFFSNVTWFHAIHVSGTNGTKRFDNPVLPFNDGVYFASTEKSNIIRGWIFGTTLDSKTQSLLIVNNATNVVIKVCEFQFCNDPFLGVYYHKNNKSWMESEFRVYSSANNCTFEYVSQPFLMDLEGKQGNFKNLREFVFKNIDGYFKIYSKHTPINLVRDLPQGFSALEPLVDLPIGINITRFQTLLALHRSYLTPGDSSSGWTAGAAAYYVGYLQPRTFLLKYNENGTITDAVDCALDPLSETKCTLKSFTVEKGIYQTSNFRVQPTESIVRFPNITNLCPFGEVFNATRFASVYAWNRKRISNCVADYSVLYNSASFSTFKCYGVSPTKLNDLCFTNVYADSFVIRGDEVRQIAPGQTGKIADYNYKLPDDFTGCVIAWNSNNLDSKVGGNYNYLYRLFRKSNLKPFERDISTEIYQAGSTPCNGVEGFNCYFPLQSYGFQPTNGVGYQPYRVVVLSFELLHAPATVCGPKKSTNLVKNKCVNFNFNGLTGTGVLTESNKKFLPFQQFGRDIADTTDAVRDPQTLEILDITPCSFGGVSVITPGTNTSNQVAVLYQDVNCTEVPVAIHADQLTPTWRVYSTGSNVFQTRAGCLIGAEHVNNSYECDIPIGAGICASYQTQTNSPRRARSVASQSIIAYTMSLGAENSVAYSNNSIAIPTNFTISVTTEILPVSMTKTSVDCTMYICGDSTECSNLLLQYGSFCTQLNRALTGIAVEQDKNTQEVFAQVKQIYKTPPIKDFGGFNFSQILPDPSKPSKRSFIEDLLFNKVTLADAGFIKQYGDCLGDIAARDLICAQKFNGLTVLPPLLTDEMIAQYTSALLAGTITSGWTFGAGAALQIPFAMQMAYRFNGIGVTQNVLYENQKLIANQFNSAIGKIQDSLSSTASALGKLQDVVNQNAQALNTLVKQLSSNCGAISSVLNDILSRLDKVEAEVQIDRLITCRLQSLQTYVTQQLIRAAEIRASANLAATKMSECVLGQSKRVDFCGKGYHLMSFPQSAPHGVVFLHVTYVPAQEKNFTTAPAICHDGKAHFPREGVFVSNGTHWFVTQRNFYEPQIITTDNTFVSGNCDVVIGIVNNTVYDPLQPELDSFKEELDKYFKNHTSPDVDLGDIPGINASVVNIQKEIDRLNEVAKNLNESLIDLQELGKYEQYIKGGGGSDIDPYKEFGSSYQLLNFLPLDFFPDLNALVDTATALYEEELTGREHCSPHHTAIRQALVCWDELTKLIAWMSSNITSEQVRTIIVNHVNDTWGLKVRQSLWFHLSCLTFGQHTVQEFLVSFGVWIRTPAPYRPPNAPILSTLPEHTVIC

SEQ ID NO: 7423 - protein, 1365 aa, Artificial Sequence
  SARS-CoV-2/USA/WA-UW261/2020__EPI_ISL_418046 spike protein (1-1211)(F970C_G999C) WhcAg construct
MFVFLVLLPLVSSQCVNLTTRTQLPPAYTNSFTRGVYYPDKVFRSSVLHSTQDLFLPFFSNVTWFHAIHVSGTNGTKRFDNPVLPFNDGVYFASTEKSNIIRGWIFGTTLDSKTQSLLIVNNATNVVIKVCEFQFCNDPFLGVYYHKNNKSWMESEFRVYSSANNCTFEYVSQPFLMDLEGKQGNFKNLREFVFKNIDGYFKIYSKHTPINLVRDLPQGFSALEPLVDLPIGINITRFQTLLALHRSYLTPGDSSSGWTAGAAAYYVGYLQPRTFLLKYNENGTITDAVDCALDPLSETKCTLKSFTVEKGIYQTSNFRVQPTESIVRFPNITNLCPFGEVFNATRFTSVYAWNRKRISNCVADYSVLYNSASFSTFKCYGVSPTKLNDLCFTNVYADSFVIRGDEVRQIAPGQTGKIADYNYKLPDDFTGCVIAWNSNNLDSKVGGNYNYLYRLFRKSNLKPFERDISTEIYQAGSTPCNGVEGFNCYFPLQSYGFQPTNGVGYQPYRVVVLSFELLHAPATVCGPKKSTNLVKNKCVNFNFNGLTGTGVLTESNKKFLPFQQFGRDIADTTDAVRDPQTLEILDITPCSFGGVSVITPGTNTSNQVAVLYQDVNCTEVPVAIHADQLTPTWRVYSTGSNVFQTRAGCLIGAEHVNNSYECDIPIGAGICASYQTQTNSPRRARSVASQSIIAYTMSLGAENSVAYSNNSIAIPTNFTISVTTEILPVSMTKTSVDCTMYICGDSTECSNLLLQYGSFCTQLNRALTGIAVEQDKNTQEVFAQVKQIYKTPPIKDFGGFNFSQILPDPSKPSKRSFIEDLLFNKVTLADAGFIKQYGDCLGDIAARDLICAQKFNGLTVLPPLLTDEMIAQYTSALLAGTITSGWTFGAGAALQIPFAMQMAYRFNGIGVTQNVLYENQKLIANQFNSAIGKIQDSLSSTASALGKLQDVVNQNAQALNTLVKQLSSNCGAISSVLNDILSRLDKVEAEVQIDRLITCRLQSLQTYVTQQLIRAAEIRASANLAATKMSECVLGQSKRVDFCGKGYHLMSFPQSAPHGVVFLHVTYVPAQEKNFTTAPAICHDGKAHFPREGVFVSNGTHWFVTQRNFYEPQIITTDNTFVSGNCDVVIGIVNNTVYDPLQPELDSFKEELDKYFKNHTSPDVDLGDISGINASVVNIQKEIDRLNEVAKNLNESLIDLQELGKYEQYIKGGGGSDIDPYKEFGSSYQLLNFLPLDFFPDLNALVDTATALYEEELTGREHCSPHHTAIRQALVCWDELTKLIAWMSSNITSEQVRTIIVNHVNDTWGLKVRQSLWFHLSCLTFGQHTVQEFLVSFGVWIRTPAPYRPPNAPILSTLPEHTVIC

SEQ ID NO: 7424 - protein, 1365 aa, Artificial Sequence
  SARS-CoV-2/Portugal/PT0035/2020__EPI_ISL_418020 spike protein (1-1211)(F970C_G999C) WhcAg construct
MFVFLVLLPLVSSQCVNLTTRTQLPPAYTNSFTRGVYYPDKVFRSSVLHSTQDLFLPFFSNVTWFHAIHVSGTNGTKRFDNPVLPFNDGVYFASTEKSNIIRGWIFGTTLDSKTQSLLIVNNATNVVIKVCEFQFCNDPFLGVYYHKNNKSWMESEFRVYSSANNCTFEYVSQPFLMDLEGKQGNFKNLREFVFKNIDGYFKIYSKHTPINLVRDLPQGFSALEPLVDLPIGINITRFQTLLALHRSYLTPGDSSSGWTAGAAAYYVGYLQPRTFLLKYNENGTITDAVDCALDPLSETKCTLKSFTVEKGIYQTSNFRVQPTESIVRFPNITNLCPFGEVFNATRFASVYAWNRKRISNCVADYSVLYNSASFSTFKCYGVSPTKLNDLCFTNVYADSFVIRGDEVRQIAPGQTGKIADYNYKLPDDFTGCVIAWNSNNLDSKVGGNYNYLYRLFRKSNLKPFERDISTEIYQAGSTPCNGVEGFNCYFPLQSYGFQPTNGVGYQPYRVVVLSFELLHAPATVCGPKKSTNLVKNKCVNFNFNGLTGTGVLTESNKKFLPFQQFGRDIADTTDAVRDPQTLEILDITPCSFGGVSVITPGTNTSNQVAVLYQDVNCTEVPVAIHADQLTPTWRVYSTGSNVFQTRAGCLIGAEHVNNSYECDIPIGAGICASYQTQTNSPRRARSVASQSIIAYTMSLGAENSVAYSNNSIAIPTNFTISVTTEILPVSMTKTSVDCTMYICGDSTECSNLLLQYGSFCTQLNRALTGIAVEQDKNTQEVFAQVKQIYKTPPIKDFGGFNFSQILPDPSKPSKRSFIEDLLFNKVTLADAGFIKQYGDCLGDISARDLICAQKFNGLTVLPPLLTDEMIAQYTSALLAGTITSGWTFGAGAALQIPFAMQMAYRFNGIGVTQNVLYENQKLIANQFNSAIGKIQDSLSSTASALGKLQDVVNQNAQALNTLVKQLSSNCGAISSVLNDILSRLDKVEAEVQIDRLITCRLQSLQTYVTQQLIRAAEIRASANLAATKMSECVLGQSKRVDFCGKGYHLMSFPQSAPHGVVFLHVTYVPAQEKNFTTAPAICHDGKAHFPREGVFVSNGTHWFVTQRNFYEPQIITTDNTFVSGNCDVVIGIVNNTVYDPLQPELDSFKEELDKYFKNHTSPDVDLGDISGINASVVNIQKEIDRLNEVAKNLNESLIDLQELGKYEQYIKGGGGSDIDPYKEFGSSYQLLNFLPLDFFPDLNALVDTATALYEEELTGREHCSPHHTAIRQALVCWDELTKLIAWMSSNITSEQVRTIIVNHVNDTWGLKVRQSLWFHLSCLTFGQHTVQEFLVSFGVWIRTPAPYRPPNAPILSTLPEHTVIC

SEQ ID NO: 7425 - protein, 1365 aa, Artificial Sequence
  SARS-CoV-2/USA/NY-NYUMC7/2020__EPI_ISL_418192 spike protein (1-1211)(F970C_G999C) WhcAg construct
MFVFLVLLPLVSSQCVNLTTRTQLPPAYTNSFTRGVYYPDKVFRSSVLHSTQDLFLPFFSNVTWFHAIHVSGTNGTKRFDNPVLPFNDGVYFASTEKSNIIRGWIFGTTLDSKTQSLLIVNNATNVVIKVCEFQFCNDPFLGVYHHKNNKSWMESEFRVYSSANNCTFEYVSQPFLMDLEGKQGNFKNLREFVFKNIDGYFKIYSKHTPINLVRDLPQGFSALEPLVDLPIGINITRFQTLLALHRSYLTPGDSSSGWTAGAAAYYVGYLQPRTFLLKYNENGTITDAVDCALDPLSETKCTLKSFTVEKGIYQTSNFRVQPTESIVRFPNITNLCPFGEVFNATRFASVYAWNRKRISNCVADYSVLYNSASFSTFKCYGVSPTKLNDLCFTNVYADSFVIRGDEVRQIAPGQTGKIADYNYKLPDDFTGCVIAWNSNNLDSKVGGNYNYLYRLFRKSNLKPFERDISTEIYQAGSTPCNGVEGFNCYFPLQSYGFQPTNGVGYQPYRVVVLSFELLHAPATVCGPKKSTNLVKNKCVNFNFNGLTGTGVLTESNKKFLPFQQFGRDIADTTDAVRDPQTLEILDITPCSFGGVSVITPGTNTSNQVAVLYQGVNCTEVPVAIHADQLTPTWRVYSTGSNVFQTRAGCLIGAEHVNNSYECDIPIGAGICASYQTQTNSPRRARSVASQSIIAYTMSLGAENSVAYSNNSIAIPTNFTISVTTEILPVSMTKTSVDCTMYICGDSTECSNLLLQYGSFCTQLNRALTGIAVEQDKNTQEVFAQVKQIYKTPPIKDFGGFNFSQILPDPSKPSKRSFIEDLLFNKVTLADAGFIKQYGDCLGDIAARDLICAQKFNGLTVLPPLLTDEMIAQYTSALLAGTITSGWTFGAGAALQIPFAMQMAYRFNGIGVTQNVLYENQKLIANQFNSAIGKIQDSLSSTASALGKLQDVVNQNAQALNTLVKQLSSNCGAISSVLNDILSRLDKVEAEVQIDRLITCRLQSLQTYVTQQLIRAAEIRASANLAATKMSECVLGQSKRVDFCGKGYHLMSFPQSAPHGVVFLHVTYVPAQEKNFTTAPAICHDGKAHFPREGVFVSNGTHWFVTQRNFYEPQIITTDNTFVSGNCDVVIGIVNNTVYDPLQPELDSFKEELDKYFKNHTSPDVDLGDISGINASVVNIQKEIDRLNEVAKNLNESLIDLQELGKYEQYIKGGGGSDIDPYKEFGSSYQLLNFLPLDFFPDLNALVDTATALYEEELTGREHCSPHHTAIRQALVCWDELTKLIAWMSSNITSEQVRTIIVNHVNDTWGLKVRQSLWFHLSCLTFGQHTVQEFLVSFGVWIRTPAPYRPPNAPILSTLPEHTVIC

SEQ ID NO: 7426 - protein, 1365 aa, Artificial Sequence
  SARS-CoV-2/Iceland/189/2020__EPI_ISL_417709 spike protein (1-1211)(F970C_G999C) WhcAg construct
MFVFLVLLPLVSSQCVNLTTRTQLPPAYTNSFTRGVYYPDKVFRSSVLHSTQDLFLPFFSNVTWFHAIHVSGTNGTKRFDNPVLPFNDGVYFASTEKSNIIRGWIFGTTLDSKTQSLLIVNNATNVVIKVCEFQFCNDPFLGVYYHKNNKSWMESEFRVYSSANNCTFEYVSQPFLMDLEGKQGNFKNLREFVFKNIDGYFKIYSKHTPINLVRDLPQGFSALEPLVDLPIGINITRFQTLLALHRSYLTPGDSSSGWTAGAAAYYVGYLQPRTFLLKYNENGTITDAVDCALDPLSETKCTLKSFTVEKGIYQTSNFRVQPTESIVRFPNITNLCPFGEVFNATRFASVYAWNRKRISNCVADYSVLYNSASFSTFKCYGVSPTKLNDLCFTNVYADSFVIRGDEVRQIAPGQTGKIADYNYKLPDDFTGCVIAWNSNNLDSKVGGNYNYLYRLFRKSNLKPFERDISTEIYQAGSTPCNGVEGFNCYFPLQSYGFQPTNGVGYQPYRVVVLSFELLHAPATVCGPKKSTNLVKNKCVNFNFNGLTGTGVLTESNKKFLPFQQFGRDIADTTDAVRDPQTLEILDITPCSFGGVSVITPGTNTSNQVAVLYQGVNCTEVPVAIHADQLTPTWRVYSTGSNVFQTRAGCLIGAEHVNNSYECDIPIGAGICASYQTQTNSPRRARSVASQSIIAYTMSLGAENSVAYSNNSIAIPTNFTISVTTEILPVSMTKTSVDCTMYICGDSTECSNLLLQYGSFCTQLNRALTGIAVEQDKNTQEVFAQVKQIYKTPPIKDFGGFNFSQILPDPSKPSKRSFIEDLLFNKVTLADAGFTKQYGDCLGDIAARDLICAQKFNGLTVLPPLLTDEMIAQYTSALLAGTITSGWTFGAGAALQIPFAMQMAYRFNGIGVTQNVLYENQKLIANQFNSAIGKIQDSLSSTASALGKLQDVVNQNAQALNTLVKQLSSNCGAISSVLNDILSRLDKVEAEVQIDRLITCRLQSLQTYVTQQLIRAAEIRASANLAATKMSECVLGQSKRVDFCGKGYHLMSFPQSAPHGVVFLHVTYVPAQEKNFTTAPAICHDGKAHFPREGVFVSNGTHWFVTQRNFYEPQIITTDNTFVSGNCDVVIGIVNNTVYDPLQPELDSFKEELDKYFKNHTSPDVDLGDISGINASVVNIQKEIDRLNEVAKNLNESLIDLQELGKYEQYIKGGGGSDIDPYKEFGSSYQLLNFLPLDFFPDLNALVDTATALYEEELTGREHCSPHHTAIRQALVCWDELTKLIAWMSSNITSEQVRTIIVNHVNDTWGLKVRQSLWFHLSCLTFGQHTVQEFLVSFGVWIRTPAPYRPPNAPILSTLPEHTVIC

SEQ ID NO: 7427 - protein, 1365 aa, Artificial Sequence
  SARS-CoV-2/Australia/NSW56/2020__EPI_ISL_417408 spike protein (1-1211)(F970C_G999C) WhcAg construct
MFVFLVLLPLVSSQCVNLTTRTQLPPAYTNSFTRGVYYPDKVFRSSVLHSTQDLFLPFFSNVTWFHAIHVSGTNGTKRFDNPVLPFNDGVYFASTEKSNIIRGWIFGTTLDSKTQSLLIVNNATNVVIKVCEFQFCNDPFLGVYYHKNNKSWMESEFRVYSSANNCTFEYVSQPFLMDLEGKQGNFKNLREFVFKNIDGYFKIYSKHTPINLVRDLPQGFSALEPLVDLPIGINITRFQTLLALHRSYLTPGDSSSGWTAGAAAYYVGYLQPRTFLLKYNENGTITDAVDCALDPLSETKCTLKSFTVEKGIYQTSNFRVQPTESIVRFPNITNLCPFGEVFNATRFASVYAWNRKRISNCVADYSVLYNSASFSTFKCYGVSPTKLNDLCFTNVYADSFVIRGDEVRQIAPGQTGKIADYNYKLPDDFTGCVIAWNSNNLDSKVGGNYNYLYRLFRKSNLKPFERDISTEIYQAGSTPCNGVEGFNCYFPLQSYGFQPTNGVGYQPYRVVVLSFELLHAPATVCGPKKSTNLVKNKCVNFNFNGLTGTGVLTESNKKFLPFQQFGRDIADTTDAVRDPQTLEILDITPCSFGGVSVITPGTNTSNQVAVLYQDVNCTEVPVAIHADQLTPTWRVYSTGSNVFQTRAGCLIGAEHVNNSYECDIPIGAGICASYQTQTNSPRRARSVASQSIIAYTMSLGAENSVAYSNNSIAIPTNFTISVTTEILPVSMTKTSVDCTMYICGDSTECSNLLLQYGSFCTQLNRALTGIAVEQDKNTQEVFAQVKQIYKTPPIKDFGGFNFSQILPDSSKPSKRSFIEDLLFNKVTLADAGFIKQYGDCLGDIAARDLICAQKFNGLTVLPPLLTDEMIAQYTSALLAGTITSGWTFGAGAALQIPFAMQMAYRFNGIGVTQNVLYENQKLIANQFNSAIGKIQDSLSSTASALGKLQDVVNQNAQALNTLVKQLSSNCGAISSVLNDILSRLDKVEAEVQIDRLITCRLQSLQTYVTQQLIRAAEIRASANLAATKMSECVLGQSKRVDFCGKGYHLMSFPQSAPHGVVFLHVTYVPAQEKNFTTAPAICHDGKAHFPREGVFVSNGTHWFVTQRNFYEPQIITTDNTFVSGNCDVVIGIVNNTVYDPLQPELDSFKEELDKYFKNHTSPDVDLGDISGINASVVNIQKEIDRLNEVAKNLNESLIDLQELGKYEQYIKGGGGSDIDPYKEFGSSYQLLNFLPLDFFPDLNALVDTATALYEEELTGREHCSPHHTAIRQALVCWDELTKLIAWMSSNITSEQVRTIIVNHVNDTWGLKVRQSLWFHLSCLTFGQHTVQEFLVSFGVWIRTPAPYRPPNAPILSTLPEHTVIC

SEQ ID NO: 7428 - protein, 1365 aa, Artificial Sequence
  SARS-CoV-2/Iceland/280/2020__EPI_ISL_417608 spike protein (1-1211)(F970C_G999C) WhcAg construct
MFVFLVLLPLVSSQCVNLTTRTQLPPAYTNSFTRGVYYPDKVFRSSVLHSTQDLFLPFFSNVTWFHAIHVSGTNGTKRFDNPVLPFNDGVYFASTEKSNIIRGWIFGTTLDSKTQSLLIVNNATNVVIKVCEFQFCNDPFLGVYYHKNNKSWMESEFRVYSSANNCTFEYVSQPFLMDLEGKQGNFKNLREFVFKNIDGYFKIYSKHTPINLVRDLPQGFSALEPLVDLPIGINITRFQTLLALHRSYLTPGDSSSGWTAGAAAYYVGYLQPRTFLLKYNENGTITDAVDCALDPLSETKCTLKSFTVEKGIYQTSNFRVQPTESIVRFPNITNLCPFGEVFNATRFASVYAWNRKRISNCVADYSVLYNSASFSTFKCYGVSPTKLNDLCFTNVYADSFVIRGDEVRQIAPGQTGKIADYNYKLPDDFTGCVIAWNSNNLDSKVGGNYNYLYRLFRKSNLKPFERDISTEIYQAGSTPCNGVEGFNCYFPLQSYGFQPTNGVGYQPYRVVVLSFELLHAPATVCGPKKSTNLVKNKCVNFNFNGLTGTGVLTESNKKFLPFQQFGRDIADTTDAVRDPQTLEILDITPCSFGGVSVITPGTNTSNQVAVLYQGVNCTEVPVAIHADQLTPTWRVYSTGSNVFQTRAGCLIGAEHVNNSYECDIPIGAGICASYHTQTNSPRRARSVASQSIIAYTMSLGAENSVAYSNNSIAIPTNFTISVTTEILPVSMTKTSVDCTMYICGDSTECSNLLLQYGSFCTQLNRALTGIAVEQDKNTQEVFAQVKQIYKTPPIKDFGGFNFSQILPDPSKPSKRSFIEDLLFNKVTLADAGFIKQYGDCLGDIAARDLICAQKFNGLTVLPPLLTDEMIAQYTSALLAGTITSGWTFGAGAALQIPFAMQMAYRFNGIGVTQNVLYENQKLIANQFNSAIGKIQDSLSSTASALGKLQDVVNQNAQALNTLVKQLSSNCGAISSVLNDILSRLDKVEAEVQIDRLITCRLQSLQTYVTQQLIRAAEIRASANLAATKMSECVLGQSKRVDFCGKGYHLMSFPQSAPHGVVFLHVTYVPAQEKNFTTAPAICHDGKAHFPREGVFVSNGTHWFVTQRNFYEPQIITTDNTFVSGNCDVVIGIVNNTVYDPLQPELDSFKEELDKYFKNHTSPDVDLGDISGINASVVNIQKEIDRLNEVAKNLNESLIDLQELGKYEQYIKGGGGSDIDPYKEFGSSYQLLNFLPLDFFPDLNALVDTATALYEEELTGREHCSPHHTAIRQALVCWDELTKLIAWMSSNITSEQVRTIIVNHVNDTWGLKVRQSLWFHLSCLTFGQHTVQEFLVSFGVWIRTPAPYRPPNAPILSTLPEHTVIC

SEQ ID NO: 7429 - protein, 1365 aa, Artificial Sequence; identical to SEQ ID NO: 7384
  SARS-CoV-2/Iceland/247/2020__EPI_ISL_417575 spike protein (1-1211)(F970C_G999C) WhcAg construct

SEQ ID NO: 7430 - protein, 1365 aa, Artificial Sequence
  SARS-CoV-2/Iceland/238/2020__EPI_ISL_417566 spike protein (1-1211)(F970C_G999C) WhcAg construct
MFVFLVLLPLVSSQCVNLTTRTQLPPAYTNSFTRGVYYPDKVFRSSVLHSTQDLFLPFFSNVTWFHAIHVSGTNGTKRFDNPVLPFNDGVYFASTEKSNIIRGWIFGTTLDSKTQSLLIVNNATNVVIKVCEFQFCNDPFLGVYYHKNNKSWMESEFRVYSSANNCTFEYVSQPFLMDLEGKQGNFKNLREFVFKNIDGYFKIYSKHTPINLVRDLPQGFSALEPLVDLPIGINITRFQTLLALHRSYLTPGDSSSGWTAGAAAYYVGYLQPRTFLLKYNENGTITDAVDCALDPLSETKCTLKSFTVEKGIYQTSNFRVQPTESIVRFPNITNLCPFGEVFNATRFASVYAWNRKRISNCVADYSVLYNSASFSTFKCYGVSPTKLNDLCFTNVYADSFVIRGDEVRQIAPGQTGKIADYNYKLPDDFTGCVIAWNSNNLDSKVGGNYNYLYRLFRKSNLKPFERDISTEIYQAGSTPCNGVEGFNCYFPLQSYGFQPTNGVGYQPYRVVVLSFELLHAPATVCGPKKSTNLVKNKCVNFNFNGLTGTGVLTESNKKFLPFQQFGRDIADTTDAVRDPQTLEILDITPCSFGGVSVITPGTNTSNQVAVLYQGVNCTEVPVAIHADQLTPTWRVYSTGSNVFQTRAGCLIGAEHVNNSYECDIPIGAGICASYQTQTNSPRRARSVASQSIIAYTMSLGAENSVAYSNNSIAIPTNFTISVTTEILPVSMTKTSVDCTMYICGDSTECSNLLLQYGSFCTQLNRALTGIAVEQDKNTQEVFAQVKQIYKTPPIKDFGGFNFSQILPDPSKPSKRSFIEDLLFNKVTLADVGFIKQYGDCLGDIAARDLICAQKFNGLTVLPPLLTDEMIAQYTSALLAGTITSGWTFGAGAALQIPFAMQMAYRFNGIGVTQNVLYENQKLIANQFNSAIGKIQDSLSSTASALGKLQDVVNQNAQALNTLVKQLSSNCGAISSVLNDILSRLDKVEAEVQIDRLITCRLQSLQTYVTQQLIRAAEIRASANLAATKMSECVLGQSKRVDFCGKGYHLMSFPQSAPHGVVFLHVTYVPAQEKNFTTAPAICHDGKAHFPREGVFVSNGTHWFVTQRNFYEPQIITTDNTFVSGNCDVVIGIVNNTVYDPLQPELDSFKEELDKYFKNHTSPDVDLGDISGINASVVNIQKEIDRLNEVAKNLNESLIDLQELGKYEQYIKGGGGSDIDPYKEFGSSYQLLNFLPLDFFPDLNALVDTATALYEEELTGREHCSPHHTAIRQALVCWDELTKLIAWMSSNITSEQVRTIIVNHVNDTWGLKVRQSLWFHLSCLTFGQHTVQEFLVSFGVWIRTPAPYRPPNAPILSTLPEHTVIC

SEQ ID NO: 7431 - protein, 1365 aa, Artificial Sequence
  SARS-CoV-2/Greece/16/2020__EPI_ISL_418265 spike protein (1-1211)(F970C_G999C) WhcAg construct
MFVFLVLLPLVSSQCVNLTTRTQLPPAYTNSFTRGVYYPDKVFRSSVLHSTQDLFLPFFSNVTWFHAIHVSGTNGTKRFDNPVLPFNDGVYFASTEKSNIIRGWIFGTTLDSKTQSLLIVNNATNVVIKVCEFQFCNDPFLGVYYHKNNKSWMESEFRVYSSANNCTFEYVSQPFLMDLEGKQGNFKNLREFVFKNVDGYFKIYSKHTPINLVRDLPQGFSALEPLVDLPIGINITRFQTLLALHRSYLTPGDSSSGWTAGAAAYYVGYLQPRTFLLKYNENGTITDAVDCALDPLSETKCTLKSFTVEKGIYQTSNFRVQPTESIVRFPNITNLCPFGEVFNATRFASVYAWNRKRISNCVADYSVLYNSASFSTFKCYGVSPTKLNDLCFTNVYADSFVIRGDEVRQIAPGQTGKIADYNYKLPDDFTGCVIAWNSNNLDSKVGGNYNYLYRLFRKSNLKPFERDISTEIYQAGSTPCNGVEGFNCYFPLQSYGFQPTNGVGYQPYRVVVLSFELLHAPATVCGPKKSTNLVKNKCVNFNFNGLTGTGVLTESNKKFLPFQQFGRDIADTTDAVRDPQTLEILDITPCSFGGVSVITPGTNTSNQVAVLYQDVNCTEVPVAIHADQLTPTWRVYSTGSNVFQTRAGCLIGAEHVNNSYECDIPIGAGICASYQTQTNSPRRARSVASQSIIAYTMSLGAENSVAYSNNSIAIPTNFTISVTTEILPVSMTKTSVDCTMYICGDSTECSNLLLQYGSFCTQLNRALTGIAVEQDKNTQEVFAQVKQIYKTPPIKDFGGFNFSQILPDPSKPSKRSFIEDLLFNKVTLADAGFIKQYGDCLGDIAARDLICAQKFNGLTVLPPLLTDEMIAQYTSALLAGTITSGWTFGAGAALQIPFAMQMAYRFNGIGVTQNVLYENQKLIANQFNSAIGKIQDSLSSTASALGKLQDVVNQNAQALNTLVKQLSSNCGAISSVLNDILSRLDKVEAEVQIDRLITCRLQSLQTYVTQQLIRAAEIRASANLAATKMSECVLGQSKRVDFCGKGYHLMSFPQSAPHGVVFLHVTYVPAQEKNFTTAPAICHDGKAHFPREGVFVSNGTHWFVTQRNFYEPQIITTDNTFVSGNCDVVIGIVNNTVYDPLQPELDSFKEELDKYFKNHTSPDVDLGDISGINASVVNIQKEIDRLNEVAKNLNESLIDLQELGKYEQYIKGGGGSDIDPYKEFGSSYQLLNFLPLDFFPDLNALVDTATALYEEELTGREHCSPHHTAIRQALVCWDELTKLIAWMSSNITSEQVRTIIVNHVNDTWGLKVRQSLWFHLSCLTFGQHTVQEFLVSFGVWIRTPAPYRPPNAPILSTLPEHTVIC

SEQ ID NO: 7432 - protein, 1365 aa, Artificial Sequence
  SARS-CoV-2/Iceland/319/2020__EPI_ISL_417648 spike protein (1-1211)(F970C_G999C) WhcAg construct
MFVFLVLLPLVSSQCVNLTTRTQLPPAYTNSFTRGVYYPDKVFRSSVLHSTQDLFLPFFSNVTWFHAIHVSGTNGTKRFDNPVLPFNDGVYFASTEKSNIIRGWIFGTTLDSKTQSLLIVNNATNVVIKVCEFQFCNDPFLGVYYHKNNKSWMESEFRVYSSANNCTFEYVSQPFLIDLEGKQGNFKNLREFVFKNIDGYFKIYSKHTPINLVRDLPQGFSALEPLVDLPIGINITRFQTLLALHRSYLTPGDSSSGWTAGAAAYYVGYLQPRTFLLKYNENGTITDAVDCALDPLSETKCTLKSFTVEKGIYQTSNFRVQPTESIVRFPNITNLCPFGEVFNATRFASVYAWNRKRISNCVADYSVLYNSASFSTFKCYGVSPTKLNDLCFTNVYADSFVIRGDEVRQIAPGQTGKIADYNYKLPDDFTGCVIAWNSNNLDSKVGGNYNYLYRLFRKSNLKPFERDISTEIYQAGSTPCNGVEGFNCYFPLQSYGFQPTNGVGYQPYRVVVLSFELLHAPATVCGPKKSTNLVKNKCVNFNFNGLTGTGVLTESNKKFLPFQQFGRDIADTTDAVRDPQTLEILDITPCSFGGVSVITPGTNTSNQVAVLYQGVNCTEVPVAIHADQLTPTWRVYSTGSNVFQTRAGCLIGAEHVNNSYECDIPIGAGICASYQTQTNSPRRARSVASQSIIAYTMSLGAENSVAYSNNSIAIPTNFTISVTTEILPVSMTKTSVDCTMYICGDSTECSNLLLQYGSFCTQLNRALTGIAVEQDKNTQEVFAQVKQIYKTPPIKDFGGFNFSQILPDPSKPSKRSFIEDLLFNKVTLADAGFIKQYGDCLGDIAARDLICAQKFNGLTVLPPLLTDEMIAQYTSALLAGTITSGWTFGAGAALQIPFAMQMAYRFNGIGVTQNVLYENQKLIANQFNSAIGKIQDSLSSTASALGKLQDVVNQNAQALNTLVKQLSSNCGAISSVLNDILSRLDKVEAEVQIDRLITCRLQSLQTYVTQQLIRAAEIRASANLAATKMSECVLGQSKRVDFCGKGYHLMSFPQSAPHGVVFLHVTYVPAQEKNFTTAPAICHDGKAHFPREGVFVSNGTHWFVTQRNFYEPQIITTDNTFVSGNCDVVIGIVNNTVYDPLQPELDSFKEELDKYFKNHTSPDVDLGDISGINASVVNIQKEIDRLNEVAKNLNESLIDLQELGKYEQYIKGGGGSDIDPYKEFGSSYQLLNFLPLDFFPDLNALVDTATALYEEELTGREHCSPHHTAIRQALVCWDELTKLIAWMSSNITSEQVRTIIVNHVNDTWGLKVRQSLWFHLSCLTFGQHTVQEFLVSFGVWIRTPAPYRPPNAPILSTLPEHTVIC

SEQ ID NO: 7433 - protein, 1365 aa, Artificial Sequence
  SARS-CoV-2/Congo/94/2020__EPI_ISL_417947 spike protein (1-1211)(F970C_G999C) WhcAg construct
MFVFLVLLPLVSSQCVNLTTRTQLPPAYTNSFTRGVYYPDKVFRSSVLHSTQDLFLPFFSNVTWFHAIHVSGTNGTKRFDNPVLPFNDGVYFASTEKSNIIRGWIFGTTLDSKTQSLLIVNNATNVVIKVCEFQFCNDPFLGVYYHKNNKSWMESEFRVYSSANNCTFEYVSQPFLMDLEGKQGNFKNLREFVFKNIDGYFKIYSKHTPINLVRDLPQGFSALEPLVDLPIGINITRFQTLLALHRSYLTPGDSSSGWTAGAAAYYVGYLQPRTFLLKYNENGTITDAVDCALDPLSETKCTLKSFTVEKGIYQTSNFRVQPTESIVRFPNITNLCPFGEVFNATRFASVYAWNRKRISNCVADYSVLYNSASFSTFKCYGVSPTKLNDLCFTNVYADSFVIRGDEVRQIAPGQTGKIADYNYKLPDDFTGCVIAWNSNNLDSKVGGNYNYLYRLFRKSNLKPFERDISTEIYQAGSTPCNGVEGFNCYFPLQSYGFQPTNGVGYQPYRVVVLSFELLHAPATVCGPKKSTNLVKNKCVNFNFNGLTGTGVLTESNKKFLPFQQFGRDIADTTDAVRDPQTLEILDITPCSFGGVSVITPGTNTSNQVAVLYQGVNCTEVPVAIHADQLTPTWRVYSTGSNVFQTRAGCLIGAEHVNNSYECDIPIGAGICASYQTQTNSPRRARSVASQSIIAYTMSLGAENSVAYSNNSIAIPTNFTISVTTEILPVSMTKTSVDCTMYICGDSTECSNLLLQYGSFCTQLNRALTGIAVEQDKNTQEVFAQVKQIYKTPPIKDFGGFNFSQILPDPSKPSKRSFIEDILFNKVTLADAGFIKQYGDCLGDIAARDLICAQKFNGLTVLPPLLTDEMIAQYTSALLAGTITSGWTFGAGAALQIPFAMQMAYRFNGIGVTQNVLYENQKLIANQFNSAIGKIQDSLSSTASALGKLQDVVNQNAQALNTLVKQLSSNCGAISSVLNDILSRLDKVEAEVQIDRLITCRLQSLQTYVTQQLIRAAEIRASANLAATKMSECVLGQSKRVDFCGKGYHLMSFPQSAPHGVVFLHVTYVPAQEKNFTTAPAICHDGKAHFPREGVFVSNGTHWFVTQRNFYEPQIITTDNTFVSGNCDVVIGIVNNTVYDPLQPELDSFKEELDKYFKNHTSPDVDLGDISGINASVVNIQKEIDRLNEVAKNLNESLIDLQELGKYEQYIKGGGGSDIDPYKEFGSSYQLLNFLPLDFFPDLNALVDTATALYEEELTGREHCSPHHTAIRQALVCWDELTKLIAWMSSNITSEQVRTIIVNHVNDTWGLKVRQSLWFHLSCLTFGQHTVQEFLVSFGVWIRTPAPYRPPNAPILSTLPEHTVIC

SEQ ID NO: 7434 - protein, 1365 aa, Artificial Sequence
  SARS-CoV-2/Congo/158/2020__EPI_ISL_417950 spike protein (1-1211)(F970C_G999C) WhcAg construct
MFVFLVLLPLVSSQCVNLTTRTQLPPAYTNSFTRGVYYPDKVFRSSVLHSTQDLFLPFFSNVTWFHAIHVSGTNGTKRFDNPVLPFNDGVYFASTEKSNIIRGWIFGTTLDSKTQSLLIVNNATNVVIKVCEFQFCNDPFLGVYYHKNNKSWMESEFRVYSSANNCTFEYVSQPFLMDLEGKQGNFKNLREFVFKNIDGYFKIYSKHTPINLVRDLPQGFSALEPLVDLPIGINITRFQTLLALHRSYLTPGDSSSGWTAGAAAYYVGYLQPRTFLLKYNENGTITDAVDCALDPLSETKCTLKSFTVEKGIYQTSNFRVQPTESIVRFPNITNLCPFGEVFNATRFASVYAWNRKRISNCVADYSVLYNSASFSTFKCYGVSPTKLNDLCFTNVYADSFVIRGDEVRQIAPGQTGKIADYNYKLPDDFTGCVIAWNSNNLDSKVGGNYNYLYRLFRKSNLKPFERDISTEIYQAGSTPCNGVEGFNCYFPLQSYGFQPTNGVGYQPYRVVVLSFELLHAPATVCGPKKSTNLVKNKCVNFNFNGLTGTGVLTESNKKFLPFQQFGRDIADTTDAVRDPQTLEILDITPCSFGGVSVITPGTNTSNQVAVLYQDVNCTEVPVAIHADQLTPTWRVYSTGSNVFQTRAGCLIGAEHVNNSYECDIPIGAGICASYQTQTNSPRRARSVASQSIIAYTMSLGAENSVAYSNNSIAIPTNFTISVTTEILPVSMTKTSVDCTMYICGDSTECSNLLLQYGSFCTQLNRALTGIAVEQDKNTQEVFAQVKQIYKTPPIKDFGGFNFSQILPDPSKPSKRSFIEDLLFNKVTLADAGFIKQYGDCLGDIAARDLICAQKFNGLTVLPPLLTDEMIAQYTSALLAGTITSGWTFGAGAALQIPFAMQMAYRFNGIGVTQNVLYENQKLIANQFNSAIGKIQDSLSSTASALGKLQDVVNQNAQALNTLVKQLSSNCGAISSVLNDILSRLDKVEAEVQIDRLITCRLQSLQTYVTQQLIRAAEIRASANLAATKMSECVLGQSKRVDFCGKGYHLMSFPQSAPHGVVFLHVTYVPAQEKNFTTAPAICHDGKAHFPREGVFVSNGTHWFVTQRNFYEPQIITTDNTFLSGNCDVVIGIVNNTVYDPLQPELDSFKEELDKYFKNHTSPDVDLGDISGINASVVNIQKEIDRLNEVAKNLNESLIDLQELGKYEQYIKGGGGSDIDPYKEFGSSYQLLNFLPLDFFPDLNALVDTATALYEEELTGREHCSPHHTAIRQALVCWDELTKLIAWMSSNITSEQVRTIIVNHVNDTWGLKVRQSLWFHLSCLTFGQHTVQEFLVSFGVWIRTPAPYRPPNAPILSTLPEHTVIC

SEQ ID NO: 7435 - protein, 1365 aa, Artificial Sequence
  SARS-CoV-2/USA/UT-00034/2020__EPI_ISL_417977 spike protein (1-1211)(F970C_G999C) WhcAg construct
MFVFLVLLPLVSSQCVNLTTRTQLPPAYTNSFTRGVYYPDKVFRSSVLHSTQDLFLPFFSNVTWFHAIHVSGTNGTKRFDNPVLPFNDGVYFASTEKSNIIRGWIFGTTLDSKTQSLLIVNNATNVVIKVCEFQFCNDPFLGVYYYKNNKSWMESEFRVYSSANNCTFEYVSQPFLMDLEGKQGNFKNLREFVFKNIDGYFKIYSKHTPINLVRDLPQGFSALEPLVDLPIGINITRFQTLLALHRSYLTPGDSSSGWTAGAAAYYVGYLQPRTFLLKYNENGTITDAVDCALDPLSETKCTLKSFTVEKGIYQTSNFRVQPTESIVRFPNITNLCPFGEVFNATRFASVYAWNRKRISNCVADYSVLYNSASFSTFKCYGVSPTKLNDLCFTNVYADSFVIRGDEVRQIAPGQTGKIADYNYKLPDDFTGCVIAWNSNNLDSKVGGNYNYLYRLFRKSNLKPFERDISTEIYQAGSTPCNGVEGFNCYFPLQSYGFQPTNGVGYQPYRVVVLSFELLHAPATVCGPKKSTNLVKNKCVNFNFNGLTGTGVLTESNKKFLPFQQFGRDIADTTDAVRDPQTLEILDITPCSFGGVSVITPGTNTSNQVAVLYQGVNCTEVPVAIHADQLTPTWRVYSTGSNVFQTRAGCLIGAEHVNNSYECDIPIGAGICASYQTQTNSPRRARSVASQSIIAYTMSLGAENSVAYSNNSIAIPTNFTISVTTEILPVSMTKTSVDCTMYICGDSTECSNLLLQYGSFCTQLNRALTGIAVEQDKNTQEVFAQVKQIYKTPPIKDFGGFNFSQILPDPSKPSKRSFIEDLLFNKVTLADAGFIKQYGDCLGDIAARDLICAQKFNGLTVLPPLLTDEMIAQYTSALLAGTITSGWTFGAGAALQIPFAMQMAYRFNGIGVTQNVLYENQKLIANQFNSAIGKIQDSLSSTASALGKLQDVVNQNAQALNTLVKQLSSNCGAISSVLNDILSRLDKVEAEVQIDRLITCRLQSLQTYVTQQLIRAAEIRASANLAATKMSECVLGQSKRVDFCGKGYHLMSFPQSAPHGVVFLHVTYVPAQEKNFTTAPAICHDGKAHFPREGVFVSNGTHWFVTQRNFYEPQIITTDNTFVSGNCDVVIGIVNNTVYDPLQPELDSFKEELDKYFKNHTSPDVDLGDISGINASVVNIQKEIDRLNEVAKNLNESLIDLQELGKYEQYIKGGGGSDIDPYKEFGSSYQLLNFLPLDFFPDLNALVDTATALYEEELTGREHCSPHHTAIRQALVCWDELTKLIAWMSSNITSEQVRTIIVNHVNDTWGLKVRQSLWFHLSCLTFGQHTVQEFLVSFGVWIRTPAPYRPPNAPILSTLPEHTVIC

SEQ ID NO: 7436 - protein, 1365 aa, Artificial Sequence
  SARS-CoV-2/USA/UT-00033/2020__EPI_ISL_417976 spike protein (1-1211)(F970C_G999C) WhcAg construct
MFVFLVLLPLVSSQCVNLTTRTQLPPAYTNSFTRGVYYPDKVFRSSVLHSTQDLFLPFFSNVTWFHAIHVSGTNGTKRFDNPVLPFNDGVYFASTEKSNIIRGWIFGTTLDSKTQSLLIVNNATNVVIKVCEFQFCNDPFLGVYYHKNNKSWMESEFRVYSSANNCTFEYVSQPFLMDLEGKQGNFKNLREFVFKNIDGYFKIYSKHTPINLVRDLPQGFSALEPLVDLPIGINITRFQTLLALHRSYLTPGDSSSGLTAGAAAYYVGYLQPRTFLLKYNENGTITDAVDCALDPLSETKCTLKSFTVEKGIYQTSNFRVQPTESIVRFPNITNLCPFGEVFNATRFASVYAWNRKRISNCVADYSVLYNSASFSTFKCYGVSPTKLNDLCFTNVYADSFVIRGDEVRQIAPGQTGKIADYNYKLPDDFTGCVIAWNSNNLDSKVGGNYNYLYRLFRKSNLKPFERDISTEIYQAGSTPCNGVEGFNCYFPLQSYGFQPTNGVGYQPYRVVVLSFELLHAPATVCGPKKSTNLVKNKCVNFNFNGLTGTGVLTESNKKFLPFQQFGRDIADTTDAVRDPQTLEILDITPCSFGGVSVITPGTNTSNQVAVLYQGVNCTEVPVAIHADQLTPTWRVYSTGSNVFQTRAGCLIGAEHVNNSYECDIPIGAGICASYQTQTNSPRRARSVASQSIIAYTMSLGAENSVAYSNNSIAIPTNFTISVTTEILPVSMTKTSVDCTMYICGDSTECSNLLLQYGSFCTQLNRALTGIAVEQDKNTQEVFAQVKQIYKTPPIKDFGGFNFSQILPDPSKPSKRSFIEDLLFNKVTLADAGFIKQYGDCLGDIAARDLICAQKFNGLTVLPPLLTDEMIAQYTSALLAGTITSGWTFGAGAALQIPFAMQMAYRFNGIGVTQNVLYENQKLIANQFNSAIGKIQDSLSSTASALGKLQDVVNQNAQALNTLVKQLSSNCGAISSVLNDILSRLDKVEAEVQIDRLITCRLQSLQTYVTQQLIRAAEIRASANLAATKMSECVLGQSKRVDFCGKGYHLMSFPQSAPHGVVFLHVTYVPAQEKNFTTAPAICHDGKAHFPREGVFVSNGTHWFVTQRNFYEPQIITTDNTFVSGNCDVVIGIVNNTVYDPLQPELDSFKEELDKYFKNHTSPDVDLGDISGINASVVNIQKEIDRLNEVAKNLNESLIDLQELGKYEQYIKGGGGSDIDPYKEFGSSYQLLNFLPLDFFPDLNALVDTATALYEEELTGREHCSPHHTAIRQALVCWDELTKLIAWMSSNITSEQVRTIIVNHVNDTWGLKVRQSLWFHLSCLTFGQHTVQEFLVSFGVWIRTPAPYRPPNAPILSTLPEHTVIC

SEQ ID NO: 7437 - protein, 1365 aa, Artificial Sequence
  SARS-CoV-2/USA/WI-13/2020__EPI_ISL_417516 spike protein (1-1211)(F970C_G999C) WhcAg construct
MFVFLVLLPLVSSQCVNLTTRTQLPPAYTNSFTRGVYYPDKVFRSSVLHSTQDLFLPFFSNVTWFHAIHVSGTNGTKRFDNPVLPFNDGVYFASTEKSNIIRGWIFGTTLDSKTQSLLIVNNATNVVIKVCEFQFCNDPFLGVYYHKNNKSWMESEFRVYSSANNCTFEYVSQPFLMDLEGKQGNFKNLREFVFKNIDGYFKIYSKHTPINLVRDLPQGFSALEPLVDLPIGINITRFQTLLALHRSYLTPGDSSSGWTAGAAAYYVGYLQPRTFLLKYNENGTITDAVDCALDPLSETKCTLKSFTVEKGIYQTSNFRVLPTESIVRFPNITNLCPFGEVFNATRFASVYAWNRKRISNCVADYSVLYNSASFSTFKCYGVSPTKLNDLCFTNVYADSFVIRGDEVRQIAPGQTGKIADYNYKLPDDFTGCVIAWNSNNLDSKVGGNYNYLYRLFRKSNLKPFERDISTEIYQAGSTPCNGVEGFNCYFPLQSYGFQPTNGVGYQPYRVVVLSFELLHAPATVCGPKKSTNLVKNKCVNFNFNGLTGTGVLTESNKKFLPFQQFGRDIADTTDAVRDPQTLEILDITPCSFGGVSVITPGTNTSNQVAVLYQGVNCTEVPVAIHADQLTPTWRVYSTGSNVFQTRAGCLIGAEHVNNSYECDIPIGAGICASYQTQTNSPRRARSVASQSIIAYTMSLGAENSVAYSNNSIAIPTNFTISVTTEILPVSMTKTSVDCTMYICGDSTECSNLLLQYGSFCTQLNRALTGIAVEQDKNTQEVFAQVKQIYKTPPIKDFGGFNFSQILPDPSKPSKRSFIEDLLFNKVTLADAGFIKQYGDCLGDIAARDLICAQKFNGLTVLPPLLTDEMIAQYTSALLAGTITSGWTFGAGAALQIPFAMQMAYRFNGIGVTQNVLYENQKLIANQFNSAIGKIQDSLSSTASALGKLQDVVNQNAQALNTLVKQLSSNCGAISSVLNDILSRLDKVEAEVQIDRLITCRLQSLQTYVTQQLIRAAEIRASANLAATKMSECVLGQSKRVDFCGKGYHLMSFPQSAPHGVVFLHVTYVPAQEKNFTTAPAICHDGKAHFPREGVFVSNGTHWFVTQRNFYEPQIITTDNTFVSGNCDVVIGIVNNTVYDPLQPELDSFKEELDKYFKNHTSPDVDLGDISGINASVVNIQKEIDRLNEVAKNLNESLIDLQELGKYEQYIKGGGGSDIDPYKEFGSSYQLLNFLPLDFFPDLNALVDTATALYEEELTGREHCSPHHTAIRQALVCWDELTKLIAWMSSNITSEQVRTIIVNHVNDTWGLKVRQSLWFHLSCLTFGQHTVQEFLVSFGVWIRTPAPYRPPNAPILSTLPEHTVIC

SEQ ID NO: 7438 - protein, 1364 aa, Artificial Sequence
  SARS-CoV-2/India/1-27/2020__EPI_ISL_413522 spike protein (1-1210)(F969C_G998C) WhcAg construct
MFVFLVLLPLVSSQCVNLTTRTQLPPAYTNSFTRGVYYPDKVFRSSVLHSTQDLFLPFFSNVTWFHAIHVSGTNGTKRFDNPVLPFNDGVYFASTEKSNIIRGWIFGTTLDSKTQSLLIVNNATNVVIKVCEFQFCNDPFLGVYHKNNKSWMESEFRVYSSANNCTFEYVSQPFLMDLEGKQGNFKNLREFVFKNIDGYFKIYSKHTPINLVRDLPQGFSALEPLVDLPIGINITRFQTLLALHRSYLTPGDSSSGWTAGAAAYYVGYLQPRTFLLKYNENGTITDAVDCALDPLSETKCTLKSFTVEKGIYQTSNFRVQPTESIVRFPNITNLCPFGEVFNATRFASVYAWNRKRISNCVADYSVLYNSASFSTFKCYGVSPTKLNDLCFTNVYADSFVIRGDEVIQIAPGQTGKIADYNYKLPDDFTGCVIAWNSNNLDSKVGGNYNYLYRLFRKSNLKPFERDISTEIYQAGSTPCNGVEGFNCYFPLQSYGFQPTNGVGYQPYRVVVLSFELLHAPATVCGPKKSTNLVKNKCVNFNFNGLTGTGVLTESNKKFLPFQQFGRDIADTTDAVRDPQTLEILDITPCSFGGVSVITPGTNTSNQVAVLYQDVNCTEVPVAIHADQLTPTWRVYSTGSNVFQTRAGCLIGAEHVNNSYECDIPIGAGICASYQTQTNSPRRARSVASQSIIAYTMSLGAENSVAYSNNSIAIPTNFTISVTTEILPVSMTKTSVDCTMYICGDSTECSNLLLQYGSFCTQLNRALTGIAVEQDKNTQEVFAQVKQIYKTPPIKDFGGFNFSQILPDPSKPSKRSFIEDLLFNKVTLADAGFIKQYGDCLGDIAARDLICAQKFNGLTVLPPLLTDEMIAQYTSALLAGTITSGWTFGAGAALQIPFAMQMAYRFNGIGVTQNVLYENQKLIANQFNSAIGKIQDSLSSTASALGKLQDVVNQNAQALNTLVKQLSSNCGAISSVLNDILSRLDKVEAEVQIDRLITCRLQSLQTYVTQQLIRAAEIRASANLAATKMSECVLGQSKRVDFCGKGYHLMSFPQSAPHGVVFLHVTYVPAQEKNFTTAPAICHDGKAHFPREGVFVSNGTHWFVTQRNFYEPQIITTDNTFVSGNCDVVIGIVNNTVYDPLQPELDSFKEELDKYFKNHTSPDVDLGDISGINASVVNIQKEIDRLNEVAKNLNESLIDLQELGKYEQYIKGGGGSDIDPYKEFGSSYQLLNFLPLDFFPDLNALVDTATALYEEELTGREHCSPHHTAIRQALVCWDELTKLIAWMSSNITSEQVRTIIVNHVNDTWGLKVRQSLWFHLSCLTFGQHTVQEFLVSFGVWIRTPAPYRPPNAPILSTLPEHTVIC

SEQ ID NO: 7439 - protein, 1359 aa, Artificial Sequence
  SARS-CoV-2/pangolin/Guangxi/P4L/2017__EPI_ISL_410538 spike protein (1-1205)(F964C_G993C) WhcAg construct
MFVFLFVLPLVSSQCVNLTTRTGIPPGYTNSSTRGVYYPDKVFRSSILHLTQDLFLPFFSNVTWFNTINYQGGFKKFDNPVLPFNDGVYFASTEKSNIIRGWIFGTTLDARTQSLLIVNNATNVVIKVCEFQFCTDPFLGVYYHNNNKTWVENEFRVYSSANNCTFEYISQPFLMDLEGKQGNFKNLREFVFKNVDGYFKIYSKHTPIDLVRDLPRGFAALEPLVDLPIGINITRFQTLLALHRSYLTPGNLESGWTTGAAAYYVGYLQQRTFLLSYNQNGTITDAVDCSLDPLSETKCTLKSLTVEKGIYQTSNFRVQPTISIVRFPNITNLCPFGEVFNASKFASVYAWNRKRISNCVADYSVLYNSTSFSTFKCYGVSPTKLNDLCFTNVYADSFVVKGDEVRQIAPGQTGVIADYNYKLPDDFTGCVIAWNSVKQDALTGGNYGYLYRLFRKSKLKPFERDISTEIYQAGSTPCNGQVGLNCYYPLERYGFHPTTGVNYQPFRVVVLSFELLNGPATVCGPKLSTTLVKDKCVNFNFNGLTGTGVLTTSKKQFLPFQQFGRDISDTTDAVRDPQTLEILDITPCSFGGVSVITPGTNTSNQVAVLYQDVNCTEVPMAIHAEQLTPAWRVYSAGANVFQTRAGCLVGAEHVNNSYECDIPVGAGICASYHSMSSLRSVNQRSIIAYTMSLGAENSVAYSNNSIAIPTNFTISVTTEILPVSMTKTSVDCTMYICGDSIECSNLLLQYGSFCTQLNRALTGIAVEQDKNTQEVFAQVKQIYKTPPIKDFGGFNFSQILPDPSKPSKRSFIEDLLFNKVTLADAGFIKQYGDCLGDIAARDLICAQKFNGLTVLPPLLTDEMIAQYTSALLAGTITSGWTFGAGAALQIPFAMQMAYRFNGIGVTQNVLYENQKLIANQFNSAIGKIQDSLSSTASALGKLQDVVNQNAQALNTLVKQLSSNCGAISSVLNDILSRLDKVEAEVQIDRLITCRLQSLQTYVTQQLIRAAEIRASANLAATKMSECVLGQSKRVDFCGKGYHLMSFPQSAPHGVVFLHVTYVPAQEKNFTTAPAICHEGKAHFPREGVFVSNGTHWFITQRNFYEPQIITTDNTFVSGSCDVVIGIVNNTVYDPLQPELDSFKEELDKYFKNHTSPDVDLGDISGINASVVNIQKEIDRLNEVAKNLNESPIDLQELGKYEQYIKGGGGSDIDPYKEFGSSYQLLNFLPLDFFPDLNALVDTATALYEEELTGREHCSPHHTAIRQALVCWDELTKLIAWMSSNITSEQVRTIIVNHVNDTWGLKVRQSLWFHLSCLTFGQHTVQEFLVSFGVWIRTPAPYRPPNAPILSTLPEHTVIC

SEQ ID NO: 7440 - protein, 1359 aa, Artificial Sequence
  SARS-CoV-2/pangolin/Guangxi/P5L/2017__EPI_ISL_410540 spike protein (1-1205)(F964C_G993C) WhcAg construct
MFVFLFVLPLVSSQCVNLTTRTGIPPGYTNSSTRGVYYPDKVFRSSILHLTQDLFLPFFSNVTWFNTINYQGGFKKFDNPVLPFNDGVYFASTEKSNIIRGWIFGTTLDARTQSLLIVNNATNVVIKVCEFQFCTDPFLGVYYHNNNKTWVENEFRVYSSANNCTFEYISQPFLMDLEGKQGNFKNLREFVFKNVDGYFKIYSKHTPIDLVRDLPRGFAALEPLVDLPIGINITRFQTLLALHRSYLTPGKLESGWTTGAAAYYVGYLQQRTFLLSYNQNGTITDAVDCSLDPLSETKCTLKSLTVEKGIYQTSNFRVQPTISIVRFPNITNLCPFGEVFNASKFASVYAWNRKRISNCVADYSVLYNSTSFSTFKCYGVSPTKLNDLCFTNVYADSFVVKGDEVRQIAPGQTGVIADYNYKLPDDFTGCVIAWNSVKQDALTGGNYGYLYRLFRKSKLKPFERDISTEIYQAGSTPCNGQVGLNCYYPLERYGFHPTTGVNYQPFRVVVLSFELLNGPATVCGPKLSTTLVKDKCVNFNFNGLTGTGVLTTSKKQFLPFQQFGRDISDTTDAVRDPQTLEILDITPCSFGGVSVITPGTNTSNQVAVLYQDVNCTEVPMAIHAEQLTPAWRVYSAGANVFQTRAGCLVGAEHVNNSYECDIPVGAGICASYHSMSSFRSVNQRSIIAYTMSLGAENSVAYSNNSIAIPTNFTISVTTEILPVSMTKTSVDCTMYICGDSIECSNLLLQYGSFCTQLNRALTGIAVEQDKNTQEVFAQVKQIYKTPPIKDFGGFNFSQILPDPSKPSKRSFIEDLLFNKVTLADAGFIKQYGDCLGDIAARDLICAQKFNGLTVLPPLLTDEMIAQYTSALLAGTITSGWTFGAGAALQIPFAMQMAYRFNGIGVTQNVLYENQKLIANQFNSAIGKIQDSLSSTASALGKLQDVVNQNAQALNTLVKQLSSNCGAISSVLNDILSRLDKVEAEVQIDRLITCRLQSLQTYVTQQLIRAAEIRASANLAATKMSECVLGQSKRVDFCGKGYHLMSFPQSAPHGVVFLHVTYVPAQEKNFTTAPAICHEGKAHFPREGVFVSNGTHWFITQRNFYEPQIITTDNTFVSGSCDVVIGIVNNTVYDPLQPELDSFKEELDKYFKNHTSPDVDLGDISGINASVVNIQKEIDRLNEVAKNLNESLIDLQELGKYEQYIKGGGGSDIDPYKEFGSSYQLLNFLPLDFFPDLNALVDTATALYEEELTGREHCSPHHTAIRQALVCWDELTKLIAWMSSNITSEQVRTIIVNHVNDTWGLKVRQSLWFHLSCLTFGQHTVQEFLVSFGVWIRTPAPYRPPNAPILSTLPEHTVIC

SEQ ID NO: 7441 - protein, 1359 aa, Artificial Sequence
  SARS-CoV-2/pangolin/Guangxi/P5E/2017__EPI_ISL_410541 spike protein (1-1205)(F964C_G993C) WhcAg construct
MFVFLFVLPLVSSQCVNLTTRTGIPPGYTNSSTRGVYYPDKVFRSSILHLTQDLFLPFFSNVTWFNTITYQGGSKKFDNPVLPFNDGVYFASTEKSNIIRGWIFGTTLDARTQSLLIVNNATNVVIKVCEFQFCTDPFLGVYYHNNNKTWVENEFRVYSSANNCTFEYISQPFLMDLEGKQGNFKNLREFVFKNVDGYFKIYSKHTPIDLVRDLPRGFAALEPLVDLPIGINITRFQTLLALHRSYLTPGKLESGWTTGAAAYYVGYLQQRTFLLSYNQNGTITDAVDCSLDPLSETKCTLKSLTVEKGIYQTSNFRVQPTISIVRFPNITNLCPFGEVFNASKFASVYAWNRKRISNCVADYSVLYNSTSFSTFKCYGVSPTKLNDLCFTNVYADSFVVKGDEVRQIAPGQTGVIADYNYKLPDDFTGCVIAWNSVKQDALTGDNYGYLYRLFRKSKLKPFERDISTEIYQAGSTPCNGQVGLNCYYPLERYGFHPTTGVNYQPFRVVVLSFELLNGPATVCGPKLSTTLVKDKCVNFNFNGLTGTGVLTTSKKQFLPFQQFGRDISDTTDAVRDPQTLEILDITPCSFGGVSVITPGTNTSNQVAVLYQDVNCTEVPMAIHAEQLTPAWRVYSAGANVFQTRAGCLVGAEHVNNSYECDIPVGAGICASYHSMSSFRSVNQRSIIAYTMSLGAENSVAYSNNSIAIPTNFTISVTTEILPVSMTKTSVDCTMYICGDSIECSNLLLQYGSFCTQLNRALTGIAVEQDKNTQEVFAQVKQIYKTPPIKDFGGFNFSQILPDPSKPSKRSFIEDLLFNKVTLADAGFIKQYGDCLGDIAARDLICAQKFNGLTVLPPLLTDEMIAQYTSALLAGTITSGWTFGAGAALQIPFAMQMAYRFNGIGVTQNVLYENQKLIANQFNSAIGKIQDSLSSTASALGKLQDVVNQNAQALNTLVKQLSSNCGAISSVLNDILSRLDKVEAEVQIDRLITCRLQSLQTYVTQQLIRAAEIRASANLAATKMSECVLGQSKRVDFCGKGYHLMSFPQSAPHGVVFLHVTYVPAQEKNFTTAPAICHEGKAHFPREGVFVSNGTHWFITQRNFYEPQIITTDNTFVSGSCDVVIGIVNNTVYDPLQPELDSFKEELDKYFKNHTSPDVDLGDISGINASVVNIQKEIDRLNEVAKNLNESLIDLQELGKYEQYIKGGGGSDIDPYKEFGSSYQLLNFLPLDFFPDLNALVDTATALYEEELTGREHCSPHHTAIRQALVCWDELTKLIAWMSSNITSEQVRTIIVNHVNDTWGLKVRQSLWFHLSCLTFGQHTVQEFLVSFGVWIRTPAPYRPPNAPILSTLPEHTVIC

SEQ ID NO: 7442 - protein, 1357 aa, Artificial Sequence
  SARS-CoV-2/pangolin/Guangxi/P1E/2017__EPI_ISL_410539 spike protein (1-1203)(F962C_G991C) WhcAg construct
MFVFLFVLPLVSSQCVNLTTRTGIQPGYTNSSTRGVYYPDKVFRSSILHLTQDLFLPFFSNVTWFNTINYQGGFKKFDNPVLPFNDGVYFASTEKSNIIRGWIFGTTLDARTQSLLIVNNATNVVIKVCEFQFCTDPFLGVYYHNNNKTWVENEFRVYSSANNCTFEYISQPFLMDLEGKQGNFKNLREFVFKNVDGYFKIYSKHTPIDLVRDLPRGFAALEPLVDLPIGINITRFQTLLALHRSYLTPGKLESGWTTGAAAYYVGYLQQRTFLLSYNQNGTITDAVDCSLDPLSETKCTLKSLTVEKGIYQTSNFRVQPTISIVRFPNITNLCPFGEVFNASKFASVYAWNRKRISNCVADYSVLYNSTSFSTFKCYGVSPTKLNDLCFTNVYADSFVVKGDEVRQIAPGQTGVIADYNYKLPDDFTGCVIAWNSVKQDALTGGNYLYRLFRKSKLKPFERDISTEIYQAGSTPCNGQVGLNCYYPLERYGFHPTTGVNYQPFRVVVLSFELLNGPATVCGPKLSTTLVKDKCVNFNFNGLTGTGVLTTSKKQFLPFQQFGRDISDTTDAVRDPQTLEILDITPCSFGGVSVITPGTNTSNQVAVLYQDVNCTEVPMAIHAEQLTPAWRVYSAGANVFQTRAGCLVGAEHVNNSYECDIPVGAGICASYHSMSSLRSVNQRSIIAYTMSLGAENSVAYSNNSIAIPTNFTISVTTEILPVSMTKTSVDCTMYICGDSIECSNLLLQYGSFCTQLNRALTGIAVEQDKNTQEVFAQVKQIYKTPPIKDFGGFNFSQILPDPSKPSKRSFIEDLLFNKVTLADAGFIKQYGDCLGDIAARDLICAQKFNGLTVLPPLLTDEMIAQYTSALLAGTITSGWTFGAGAALQIPFAMQMAYRFNGIGVTQNVLYENQKLIANQFNSAIGKIQDSLSSTASALGKLQDVVNQNAQALNTLVKQLSSNCGAISSVLNDILSRLDKVEAEVQIDRLITCRLQSLQTYVTQQLIRAAEIRASANLAATKMSECVLGQSKRVDFCGKGYHLMSFPQSAPHGVVFLHVTYVPAQEKNFTTAPAICHEGKAHFPREGVFVSNGTHWFITQRNFYEPQIITTDNTFVSGSCDVVIGIVNNTVYDPLQPELDSFKEELDKYFKNHTSPDVDLGDISGINASVVNIQKEIDRLNEVAKNLNESLIDLQELGKYEQYIKGGGGSDIDPYKEFGSSYQLLNFLPLDFFPDLNALVDTATALYEEELTGREHCSPHHTAIRQALVCWDELTKLIAWMSSNITSEQVRTIIVNHVNDTWGLKVRQSLWFHLSCLTFGQHTVQEFLVSFGVWIRTPAPYRPPNAPILSTLPEHTVIC

SEQ ID NO: 7443 - protein, 1365 aa, Artificial Sequence
  SARS-CoV-2/Wuhan/WIV05/2019__EPI_ISL_402128 spike protein (1-1211)(A972C_R995C) WhcAg construct
MFVFLVLLPLVSSQCVNLTTRTQLPPAYTNSFTRGVYYPDKVFRSSVLHSTQDLFLPFFSNVTWFHAIHVSGTNGTKRFDNPVLPFNDGVYFASTEKSNIIRGWIFGTTLDSKTQSLLIVNNATNVVIKVCEFQFCNDPFLGVYYHKNNKSWMESEFRVYSSANNCTFEYVSQPFLMDLEGKQGNFKNLREFVFKNIDGYFKIYSKHTPINLVRDLPQGFSALEPLVDLPIGINITRFQTLLALHRSYLTPGDSSSGWTAGAAAYYVGYLQPRTFLLKYNENGTITDAVDCALDPLSETKCTLKSFTVEKGIYQTSNFRVQPTESIVRFPNITNLCPFGEVFNATRFASVYAWNRKRISNCVADYSVLYNSASFSTFKCYGVSPTKLNDLCFTNVYADSFVIRGDEVRQIAPGQTGKIADYNYKLPDDFTGCVIAWNSNNLDSKVGGNYNYLYRLFRKSNLKPFERDISTEIYQAGSTPCNGVEGFNCYFPLQSYGFQPTNGVGYQPYRVVVLSFELLHAPATVCGPKKSTNLVKNKCVNFNFNGLTGTGVLTESNKKFLPFQQFGRDIADTTDAVRDPQTLEILDITPCSFGGVSVITPGTNTSNQVAVLYQDVNCTEVPVAIHADQLTPTWRVYSTGSNVFQTRAGCLIGAEHVNNSYECDIPIGAGICASYQTQTNSPRRARSVASQSIIAYTMSLGAENSVAYSNNSIAIPTNFTISVTTEILPVSMTKTSVDCTMYICGDSTECSNLLLQYGSFCTQLNRALTGIAVEQDKNTQEVFAQVKQIYKTPPIKDFGGFNFSQILPDPSKPSKRSFIEDLLFNKVTLADAGFIKQYGDCLGDIAARDLICAQKFNGLTVLPPLLTDEMIAQYTSALLAGTITSGWTFGAGAALQIPFAMQMAYRFNGIGVTQNVLYENQKLIANQFNSAIGKIQDSLSSTASALGKLQDVVNQNAQALNTLVKQLSSNFGCISSVLNDILSRLDKVEAEVQIDCLITGRLQSLQTYVTQQLIRAAEIRASANLAATKMSECVLGQSKRVDFCGKGYHLMSFPQSAPHGVVFLHVTYVPAQEKNFTTAPAICHDGKAHFPREGVFVSNGTHWFVTQRNFYEPQIITTDNTFVSGNCDVVIGIVNNTVYDPLQPELDSFKEELDKYFKNHTSPDVDLGDISGINASVVNIQKEIDRLNEVAKNLNESLIDLQELGKYEQYIKGGGGSDIDPYKEFGSSYQLLNFLPLDFFPDLNALVDTATALYEEELTGREHCSPHHTAIRQALVCWDELTKLIAWMSSNITSEQVRTIIVNHVNDTWGLKVRQSLWFHLSCLTFGQHTVQEFLVSFGVWIRTPAPYRPPNAPILSTLPEHTVIC

SEQ ID NO: 7444 - protein, 1361 aa, Artificial Sequence
  SARS-CoV-2/bat/Yunnan/RaTG13/2013__EPI_ISL_402131 spike protein (1-1207)(A968C_R991C) WhcAg construct
MFVFLVLLPLVSSQCVNLTTRTQLPPAYTNSSTRGVYYPDKVFRSSVLHLTQDLFLPFFSNVTWFHAIHVSGTNGIKRFDNPVLPFNDGVYFASTEKSNIIRGWIFGTTLDSKTQSLLIVNNATNVVIKVCEFQFCNDPFLGVYYHKNNKSWMESEFRVYSSANNCTFEYVSQPFLMDLEGKQGNFKNLREFVFKNIDGYFKIYSKHTPINLVRDLPPGFSALEPLVDLPIGINITRFQTLLALHRSYLTPGDSSSGWTAGAAAYYVGYLQPRTFLLKYNENGTITDAVDCALDPLSETKCTLKSFTVEKGIYQTSNFRVQPTDSIVRFPNITNLCPFGEVFNATTFASVYAWNRKRISNCVADYSVLYNSTSFSTFKCYGVSPTKLNDLCFTNVYADSFVITGDEVRQIAPGQTGKIADYNYKLPDDFTGCVIAWNSKHIDAKEGGNFNYLYRLFRKANLKPFERDISTEIYQAGSKPCNGQTGLNCYYPLYRYGFYPTDGVGHQPYRVVVLSFELLNAPATVCGPKKSTNLVKNKCVNFNFNGLTGTGVLTESNKKFLPFQQFGRDIADTTDAVRDPQTLEILDITPCSFGGVSVITPGTNASNQVAVLYQDVNCTEVPVAIHADQLTPTWRVYSTGSNVFQTRAGCLIGAEHVNNSYECDIPIGAGICASYQTQTNSRSVASQSIIAYTMSLGAENSVAYSNNSIAIPTNFTISVTTEILPVSMTKTSVDCTMYICGDSTECSNLLLQYGSFCTQLNRALTGIAVEQDKNTQEVFAQVKQIYKTPPIKDFGGFNFSQILPDPSKPSKRSFIEDLLFNKVTLADAGFIKQYGDCLGDIAARDLICAQKFNGLTVLPPLLTDEMIAQYTSALLAGTITSGWTFGAGAALQIPFAMQMAYRFNGIGVTQNVLYENQKLIANQFNSAIGKIQDSLSSTASALGKLQDVVNQNAQALNTLVKQLSSNFGCISSVLNDILSRLDKVEAEVQIDCLITGRLQSLQTYVTQQLIRAAEIRASANLAATKMSECVLGQSKRVDFCGKGYHLMSFPQSAPHGVVFLHVTYVPAQEKNFTTAPAICHDGKAHFPREGVFVSNGTHWFVTQRNFYEPQIITTDNTFVSGSCDVVIGIVNNTVYDPLQPELDSFKEELDKYFKNHTSPDVDLGDISGINASVVNIQKEIDRLNEVAKNLNESLIDLQELGKYEQYIKGGGGSDIDPYKEFGSSYQLLNFLPLDFFPDLNALVDTATALYEEELTGREHCSPHHTAIRQALVCWDELTKLIAWMSSNITSEQVRTIIVNHVNDTWGLKVRQSLWFHLSCLTFGQHTVQEFLVSFGVWIRTPAPYRPPNAPILSTLPEHTVIC

SEQ ID NO: 7445 - protein, 1365 aa, Artificial Sequence
  SARS-CoV-2/Wuhan/HBCDC-HB-01/2019__EPI_ISL_402132 spike protein (1-1211)(A972C_R995C) WhcAg construct
MFVFLVLLPLVSSQCVNLTTRTQLPPAYTNSITRGVYYPDKVFRSSVLHSTQDLFLPFFSNVTWFHAIHVSGTNGTKRFDNPVLPFNDGVYFASTEKSNIIRGWIFGTTLDSKTQSLLIVNNATNVVIKVCEFQFCNDPFLGVYYHKNNKSWMESEFRVYSSANNCTFEYVSQPFLMDLEGKQGNFKNLREFVFKNIDGYFKIYSKHTPINLVRDLPQGFSALEPLVDLPIGINITRFQTLLALHRSYLTPGDSSSGWTAGAAAYYVGYLQPRTFLLKYNENGTITDAVDCALDPLSETKCTLKSFTVEKGIYQTSNFRVQPTESIVRFPNITNLCPFGEVFNATRFASVYAWNRKRISNCVADYSVLYNSASFSTFKCYGVSPTKLNDLCFTNVYADSFVIRGDEVRQIAPGQTGKIADYNYKLPDDFTGCVIAWNSNNLDSKVGGNYNYLYRLFRKSNLKPFERDISTEIYQAGSTPCNGVEGFNCYFPLQSYGFQPTNGVGYQPYRVVVLSFELLHAPATVCGPKKSTNLVKNKCVNFNFNGLTGTGVLTESNKKFLPFQQFGRDIADTTDAVRDPQTLEILDITPCSFGGVSVITPGTNTSNQVAVLYQDVNCTEVPVAIHADQLTPTWRVYSTGSNVFQTRAGCLIGAEHVNNSYECDIPIGAGICASYQTQTNSPRRARSVASQSIIAYTMSLGAENSVAYSNNSIAIPTNFTISVTTEILPVSMTKTSVDCTMYICGDSTECSNLLLQYGSFCTQLNRALTGIAVEQDKNTQEVFAQVKQIYKTPPIKDFGGFNFSQILPDPSKPSKRSFIEDLLFNKVTLADAGFIKQYGDCLGDIAARDLICAQKFNGLTVLPPLLTDEMIAQYTSALLAGTITSGWTFGAGAALQIPFAMQMAYRFNGIGVTQNVLYENQKLIANQFNSAIGKIQDSLSSTASALGKLQDVVNQNAQALNTLVKQLSSNFGCISSVLNDILSRLDKVEAEVQIDCLITGRLQSLQTYVTQQLIRAAEIRASANLAATKMSECVLGQSKRVDFCGKGYHLMSFPQSAPHGVVFLHVTYVPAQEKNFTTAPAICHDGKAHFPREGVFVSNGTHWFVTQRNFYEPQIITTDNTFVSGNCDVVIGIVNNTVYDPLQPELDSFKEELDKYFKNHTSPDVDLGDISGINASVVNIQKEIDRLNEVAKNLNESLIDLQELGKYEQYIKGGGGSDIDPYKEFGSSYQLLNFLPLDFFPDLNALVDTATALYEEELTGREHCSPHHTAIRQALVCWDELTKLIAWMSSNITSEQVRTIIVNHVNDTWGLKVRQSLWFHLSCLTFGQHTVQEFLVSFGVWIRTPAPYRPPNAPILSTLPEHTVIC

SEQ ID NO: 7446 - protein, 1365 aa, Artificial Sequence
  SARS-CoV-2/Guangdong/20SF028/2020__EPI_ISL_403936 spike protein (1-1211)(A972C_R995C) WhcAg construct
MFVFLVLLPLVSSQCVNLTTRTQLPPAYTNSFTRGVYYPDKVFRSSVLYSTQDLFLPFFSNVTWFHAIHVSGTNGTKRFDNPVLPFNDGVYFASTEKSNIIRGWIFGTTLDSKTQSLLIVNNATNVVIKVCEFQFCNDPFLGVYYHKNNKSWMESEFRVYSSANNCTFEYVSQPFLMDLEGKQGNFKNLREFVFKNIDGYFKIYSKHTPINLVRDLPQGFSALEPLVDLPIGINITRFQTLLALHRSYLTPGDSSSGWTAGAAAYYVGYLQPRTFLLKYNENGTITDAVDCALDPLSETKCTLKSFTVEKGIYQTSNFRVQPTESIVRFPNITNLCPFGEVFNATRFASVYAWNRKRISNCVADYSVLYNSASFSTFKCYGVSPTKLNDLCFTNVYADSFVIRGDEVRQIAPGQTGKIADYNYKLPDDFTGCVIAWNSNNLDSKVGGNYNYLYRLFRKSNLKPFERDISTEIYQAGSTPCNGVEGFNCYFPLQSYGFQPTNGVGYQPYRVVVLSFELLHAPATVCGPKKSTNLVKNKCVNFNFNGLTGTGVLTESNKKFLPFQQFGRDIADTTDAVRDPQTLEILDITPCSFGGVSVITPGTNTSNQVAVLYQDVNCTEVPVAIHADQLTPTWRVYSTGSNVFQTRAGCLIGAEHVNNSYECDIPIGAGICASYQTQTNSPRRARSVASQSIIAYTMSLGAENSVAYSNNSIAIPTNFTISVTTEILPVSMTKTSVDCTMYICGDSTECSNLLLQYGSFCTQLNRALTGIAVEQDKNTQEVFAQVKQIYKTPPIKDFGGFNFSQILPDPSKPSKRSFIEDLLFNKVTLADAGFIKQYGDCLGDIAARDLICAQKFNGLTVLPPLLTDEMIAQYTSALLAGTITSGWTFGAGAALQIPFAMQMAYRFNGIGVTQNVLYENQKLIANQFNSAIGKIQDSLSSTASALGKLQDVVNQNAQALNTLVKQLSSNFGCISSVLNDILSRLDKVEAEVQIDCLITGRLQSLQTYVTQQLIRAAEIRASANLAATKMSECVLGQSKRVDFCGKGYHLMSFPQSAPHGVVFLHVTYVPAQEKNFTTAPAICHDGKAHFPREGVFVSNGTHWFVTQRNFYEPQIITTDNTFVSGNCDVVIGIVNNTVYDPLQPELDSFKEELDKYFKNHTSPDVDLGDISGINASVVNIQKEIDRLNEVAKNLNESLIDLQELGKYEQYIKGGGGSDIDPYKEFGSSYQLLNFLPLDFFPDLNALVDTATALYEEELTGREHCSPHHTAIRQALVCWDELTKLIAWMSSNITSEQVRTIIVNHVNDTWGLKVRQSLWFHLSCLTFGQHTVQEFLVSFGVWIRTPAPYRPPNAPILSTLPEHTVIC

SEQ ID NO: 7447 - protein, 1365 aa, Artificial Sequence
  SARS-CoV-2/Shenzhen/SZTH-001/2020__EPI_ISL_406592 spike protein (1-1211)(A972C_R995C) WhcAg construct
MFVFLVLLPLVSSQCVNLTTRTQLPPAYTNSFTRGVYYPDKVFRSSVLHSTQDLFLPFFSNVTWFHAIHVSGTNGTKRFDNPVLPFNDGVYFASTEKSNIIRGWIFGTTLDSKTQSLLIVNNATNVVIKVCEFQFCNDPFLGVYYHKNNKSWMESEFRVYSSANNCTFEYVSQPFLMDLEGKQGNFKNLREFVFKNIDGYFKIYSKHTPINLVRDLPQGFSALEPLVDLPIGINITRFQTLLALHRSYLTPGDSSSGWTAGAAAYYVGYLQPRTFLLKYNENGTITDAVDCALDPLSETKCTLKSFTVEKGIYQTSNFRVQPTESIVRFPNITNLCPFGEVFNATRFASVYAWNRKRISNCVADYSVLYNSASFSTFKCYGVSPTKLNDLCFTNVYADSFVIRGDEVRQIAPGQTGKIADYNYKLPDDFTGCVIAWNSNNLDSKVGGNYNYLYRLFRKSNLKPFERDISTEIYQAGSTPCNGVEGFNCYFPLQSYGFQPTNGVGYQPYRVVVLSFELLHAPATVCGPKKSTNLVKNKCVNFNFNGLTGTGVLTESNKKFLPFQQFGRDIADTTDAVRDPQTLEILDITPCSFGGVSVITPGTNTSNQVAVLYQDVNCTEVPVAIHADQLTPTWRVYSTGSNVFQTRAGCLIGAEHVNNSYECDIPIGAGICASYQTQTNSPRRARSVASQSIIAYTMSLGAENSVAYSNNSIAIPTNFTISVTTEILPVSMTKTSVDCTMYICGDSTECSNLLLQYGSFCTQLNRALTGIAVEQDKNTQEVFAQVKQIYKTPPIKDFGGFNFSQILPDPSKPSKRSFIEDLLFNKVTLADAGFIKQYGDCLGDIAARDLICAQKFNGLTVLPPLLTDEMIAQYTSALLAGTITSGWTFGAGAALQIPFAMQMAYRFNGIGVTQNVLYENQKLIANQFNSAIGKIQDSLSSTASALGKLQDVVNQNAQALNTLVKQLSSNFGCISSVLNDILSRLDKVEAEVQIDCLITGRLQSLQTYVTQQLIRAAEIRASANLAATKMSECVLGQSKRVDFCGKGYHLMSFPQSAPHGVVFLHVTYVPAQEKNFTTAPAICHDGKAHFPREGVFVSNGTHWFVTQRNFYEPQIITTDNTFVSGNCDVLIGIVNNTVYDPLQPELDSFKEELDKYFKNHTSPDVDLGDISGINASVVNIQKEIDRLNEVAKNLNESLIDLQELGKYEQYIKGGGGSDIDPYKEFGSSYQLLNFLPLDFFPDLNALVDTATALYEEELTGREHCSPHHTAIRQALVCWDELTKLIAWMSSNITSEQVRTIIVNHVNDTWGLKVRQSLWFHLSCLTFGQHTVQEFLVSFGVWIRTPAPYRPPNAPILSTLPEHTVIC

SEQ ID NO: 7448 - protein, 1365 aa, Artificial Sequence
  SARS-CoV-2/Shenzhen/SZTH-004/2020__EPI_ISL_406595 spike protein (1-1211)(A972C_R995C) WhcAg construct
MFVFLVLLPLVSSQCVNLTTRTQLPPAYTNSFTRGVYYPDKVFRSSVLHSTQDLFLPFFSNVTWFHAIHVSGTNGTKRFDNPVLPFNDGVYFASTEKSNIIRGWIFGTTLDSKTQSLLIVNNATNVVIKVCEFQFCNDPFLGVYYHKNNKSWMESEFRVYSSANNCTFEYVSQPFLMDLEGKQGNFKNLREFVFKNIDGYFKIYSKHTPINLVRDLPQGFSALEPLVDLPIGINITRFQTLLALHRSYLTPGDSSSGWTAGAAAYYVGYLQPRTFLLKYNENGTITDAVDCALDPLSETKCTLKSFTVEKGIYQTSNFRVQPTESIVRFPNITNLCPFGEVFNATRFASVYAWDRKRISNCVAYYSVLYNSASFSTFKCYGVSPTKLNDLCFTNVYADSFVIRGDEVRQIAPGQTGKIADYNYKLPDDFTGCVIAWNSNNLDSKVGGNYNYLYRLFRKSNLKPFERDISTEIYQAGSTPCNGVEGFNCYFPLQSYGFQPTNGVGYQPYRVVVLSFELLHAPATVCGPKKSTNLVKNKCVNFNFNGLTGTGVLTESNKKFLPFQQFGRDIADTTDAVRDPQTLEILDITPCSFGGVSVITPGTNTSNQVAVLYQDVNCTEVPVAIHADQLTPTWRVYSTGSNVFQTRAGCLIGAEHVNNSYECDIPIGAGICASYQTQTNSPRRARSVASQSIIAYTMSLGAENSVAYSNNSIAIPTNFTISVTTEILPVSMTKTSVDCTMYICGDSTECSNLLLQYGSFCTQLNRALTGIAVEQDKNTQEVFAQVKQIYKTPPIKDFGGFNFSQILPDPSKPSKRSFIEDLLFNKVTLADAGFIKQYGDCLGDIAARDLICAQKFNGLTVLPPLLTDEMIAQYTSALLAGTITSGWTFGAGAALQIPFAMQMAYRFNGIGVTQNVLYENQKLIANQFNSAIGKIQDSLSSTASALGKLQDVVNQNAQALNTLVKQLSSNFGCISSVLNDILSRLDKVEAEVQIDCLITGRLQSLQTYVTQQLIRAAEIRASANLAATKMSECVLGQSKRVDFCGKGYHLMSFPQSAPHGVVFLHVTYVPAQEKNFTTAPAICHDGKAHFPREGVFVSNGTHWFVTQRNFYEPQIITTDNTFVSGNCDVVIGIVNNTVYDPLQPELDSFKEELDKYFKNHTSPDVDLGDISGINASVVNIQKEIDRLNEVAKNLNESLIDLQELGKYEQYIKGGGGSDIDPYKEFGSSYQLLNFLPLDFFPDLNALVDTATALYEEELTGREHCSPHHTAIRQALVCWDELTKLIAWMSSNITSEQVRTIIVNHVNDTWGLKVRQSLWFHLSCLTFGQHTVQEFLVSFGVWIRTPAPYRPPNAPILSTLPEHTVIC

SEQ ID NO: 7449 - protein, 1365 aa, Artificial Sequence
  SARS-CoV-2/France/IDF0372/2020__EPI_ISL_406596 spike protein (1-1211)(A972C_R995C) WhcAg construct
MFVFLVLLPLVSSQCVNLTTRTQLPPAYTNSFTRGVYYPDKVFRSSVLHSTQDLFLPFFSNVTWFHAIHVSGTNGTKRFDNPVLPFNDGVYFASTEKSNIIRGWIFGTTLDSKTQSLLIVNNATNVVIKVCEFQFCNDPFLGVYYHKNNKSWMESEFRVYSSANNCTFEYVSQPFLMDLEGKQGNFKNLREFVFKNIDGYFKIYSKHTPINLVRDLPQGFSALEPLVDLPIGINITRFQTLLALHRSYLTPGDSSSGWTAGAAAYYVGYLQPRTFLLKYNENGTITDAVDCALDPLSETKCTLKSFTVEKGIYQTSNFRVQPTESIVRFPNITNLCPFGEVFNATRFASVYAWNRKRISNCVADYSFLYNSASFSTFKCYGVSPTKLNDLCFTNVYADSFVIRGDEVRQIAPGQTGKIADYNYKLPDDFTGCVIAWNSNNLDSKVGGNYNYLYRLFRKSNLKPFERDISTEIYQAGSTPCNGVEGFNCYFPLQSYGFQPTNGVGYQPYRVVVLSFELLHAPATVCGPKKSTNLVKNKCVNFNFNGLTGTGVLTESNKKFLPFQQFGRDIADTTDAVRDPQTLEILDITPCSFGGVSVITPGTNTSNQVAVLYQDVNCTEVPVAIHADQLTPTWRVYSTGSNVFQTRAGCLIGAEHVNNSYECDIPIGAGICASYQTQTNSPRRARSVASQSIIAYTMSLGAENSVAYSNNSIAIPTNFTISVTTEILPVSMTKTSVDCTMYICGDSTECSNLLLQYGSFCTQLNRALTGIAVEQDKNTQEVFAQVKQIYKTPPIKDFGGFNFSQILPDPSKPSKRSFIEDLLFNKVTLADAGFIKQYGDCLGDIAARDLICAQKFNGLTVLPPLLTDEMIAQYTSALLAGTITSGWTFGAGAALQIPFAMQMAYRFNGIGVTQNVLYENQKLIANQFNSAIGKIQDSLSSTASALGKLQDVVNQNAQALNTLVKQLSSNFGCISSVLNDILSRLDKVEAEVQIDCLITGRLQSLQTYVTQQLIRAAEIRASANLAATKMSECVLGQSKRVDFCGKGYHLMSFPQSAPHGVVFLHVTYVPAQEKNFTTAPAICHDGKAHFPREGVFVSNGTHWFVTQRNFYEPQIITTDNTFVSGNCDVVIGIVNNTVYDPLQPELDSFKEELDKYFKNHTSPDVDLGDISGINASVVNIQKEIDRLNEVAKNLNESLIDLQELGKYEQYIKGGGGSDIDPYKEFGSSYQLLNFLPLDFFPDLNALVDTATALYEEELTGREHCSPHHTAIRQALVCWDELTKLIAWMSSNITSEQVRTIIVNHVNDTWGLKVRQSLWFHLSCLTFGQHTVQEFLVSFGVWIRTPAPYRPPNAPILSTLPEHTVIC

SEQ ID NO: 7450 - protein, 1365 aa, Artificial Sequence
  SARS-CoV-2/Australia/VIC01/2020__EPI_ISL_406844 spike protein (1-1211)(A972C_R995C) WhcAg construct
MFVFLVLLPLVSSQCVNLTTRTQLPPAYTNSFTRGVYYPDKVFRSSVLHSTQDLFLPFFSNVTWFHAIHVSGTNGTKRFDNPVLPFNDGVYFASTEKSNIIRGWIFGTTLDSKTQSLLIVNNATNVVIKVCEFQFCNDPFLGVYYHKNNKSWMESEFRVYSSANNCTFEYVSQPFLMDLEGKQGNFKNLREFVFKNIDGYFKIYSKHTPINLVRDLPQGFSALEPLVDLPIGINITRFQTLLALHRRYLTPGDSSSGWTAGAAAYYVGYLQPRTFLLKYNENGTITDAVDCALDPLSETKCTLKSFTVEKGIYQTSNFRVQPTESIVRFPNITNLCPFGEVFNATRFASVYAWNRKRISNCVADYSVLYNSASFSTFKCYGVSPTKLNDLCFTNVYADSFVIRGDEVRQIAPGQTGKIADYNYKLPDDFTGCVIAWNSNNLDSKVGGNYNYLYRLFRKSNLKPFERDISTEIYQAGSTPCNGVEGFNCYFPLQSYGFQPTNGVGYQPYRVVVLSFELLHAPATVCGPKKSTNLVKNKCVNFNFNGLTGTGVLTESNKKFLPFQQFGRDIADTTDAVRDPQTLEILDITPCSFGGVSVITPGTNTSNQVAVLYQDVNCTEVPVAIHADQLTPTWRVYSTGSNVFQTRAGCLIGAEHVNNSYECDIPIGAGICASYQTQTNSPRRARSVASQSIIAYTMSLGAENSVAYSNNSIAIPTNFTISVTTEILPVSMTKTSVDCTMYICGDSTECSNLLLQYGSFCTQLNRALTGIAVEQDKNTQEVFAQVKQIYKTPPIKDFGGFNFSQILPDPSKPSKRSFIEDLLFNKVTLADAGFIKQYGDCLGDIAARDLICAQKFNGLTVLPPLLTDEMIAQYTSALLAGTITSGWTFGAGAALQIPFAMQMAYRFNGIGVTQNVLYENQKLIANQFNSAIGKIQDSLSSTASALGKLQDVVNQNAQALNTLVKQLSSNFGCISSVLNDILSRLDKVEAEVQIDCLITGRLQSLQTYVTQQLIRAAEIRASANLAATKMSECVLGQSKRVDFCGKGYHLMSFPQSAPHGVVFLHVTYVPAQEKNFTTAPAICHDGKAHFPREGVFVSNGTHWFVTQRNFYEPQIITTDNTFVSGNCDVVIGIVNNTVYDPLQPELDSFKEELDKYFKNHTSPDVDLGDISGINASVVNIQKEIDRLNEVAKNLNESLIDLQELGKYEQYIKGGGGSDIDPYKEFGSSYQLLNFLPLDFFPDLNALVDTATALYEEELTGREHCSPHHTAIRQALVCWDELTKLIAWMSSNITSEQVRTIIVNHVNDTWGLKVRQSLWFHLSCLTFGQHTVQEFLVSFGVWIRTPAPYRPPNAPILSTLPEHTVIC

SEQ ID NO: 7451 - protein, 1365 aa, Artificial Sequence
  SARS-CoV-2/Germany/BavPat1/2020__EPI_ISL_406862 spike protein (1-1211)(A972C_R995C) WhcAg construct
MFVFLVLLPLVSSQCVNLTTRTQLPPAYTNSFTRGVYYPDKVFRSSVLHSTQDLFLPFFSNVTWFHAIHVSGTNGTKRFDNPVLPFNDGVYFASTEKSNIIRGWIFGTTLDSKTQSLLIVNNATNVVIKVCEFQFCNDPFLGVYYHKNNKSWMESEFRVYSSANNCTFEYVSQPFLMDLEGKQGNFKNLREFVFKNIDGYFKIYSKHTPINLVRDLPQGFSALEPLVDLPIGINITRFQTLLALHRSYLTPGDSSSGWTAGAAAYYVGYLQPRTFLLKYNENGTITDAVDCALDPLSETKCTLKSFTVEKGIYQTSNFRVQPTESIVRFPNITNLCPFGEVFNATRFASVYAWNRKRISNCVADYSVLYNSASFSTFKCYGVSPTKLNDLCFTNVYADSFVIRGDEVRQIAPGQTGKIADYNYKLPDDFTGCVIAWNSNNLDSKVGGNYNYLYRLFRKSNLKPFERDISTEIYQAGSTPCNGVEGFNCYFPLQSYGFQPTNGVGYQPYRVVVLSFELLHAPATVCGPKKSTNLVKNKCVNFNFNGLTGTGVLTESNKKFLPFQQFGRDIADTTDAVRDPQTLEILDITPCSFGGVSVITPGTNTSNQVAVLYQGVNCTEVPVAIHADQLTPTWRVYSTGSNVFQTRAGCLIGAEHVNNSYECDIPIGAGICASYQTQTNSPRRARSVASQSIIAYTMSLGAENSVAYSNNSIAIPTNFTISVTTEILPVSMTKTSVDCTMYICGDSTECSNLLLQYGSFCTQLNRALTGIAVEQDKNTQEVFAQVKQIYKTPPIKDFGGFNFSQILPDPSKPSKRSFIEDLLFNKVTLADAGFIKQYGDCLGDIAARDLICAQKFNGLTVLPPLLTDEMIAQYTSALLAGTITSGWTFGAGAALQIPFAMQMAYRFNGIGVTQNVLYENQKLIANQFNSAIGKIQDSLSSTASALGKLQDVVNQNAQALNTLVKQLSSNFGCISSVLNDILSRLDKVEAEVQIDCLITGRLQSLQTYVTQQLIRAAEIRASANLAATKMSECVLGQSKRVDFCGKGYHLMSFPQSAPHGVVFLHVTYVPAQEKNFTTAPAICHDGKAHFPREGVFVSNGTHWFVTQRNFYEPQIITTDNTFVSGNCDVVIGIVNNTVYDPLQPELDSFKEELDKYFKNHTSPDVDLGDISGINASVVNIQKEIDRLNEVAKNLNESLIDLQELGKYEQYIKGGGGSDIDPYKEFGSSYQLLNFLPLDFFPDLNALVDTATALYEEELTGREHCSPHHTAIRQALVCWDELTKLIAWMSSNITSEQVRTIIVNHVNDTWGLKVRQSLWFHLSCLTFGQHTVQEFLVSFGVWIRTPAPYRPPNAPILSTLPEHTVIC

SEQ ID NO: 7452 - protein, 1365 aa, Artificial Sequence
  SARS-CoV-2/Wuhan/HBCDC-HB-02/2020__EPI_ISL_412978 spike protein (1-1211)(A972C_R995C) WhcAg construct
MFVFLVLLPLVSSQCVNLTTRTQLPPAYTNSFTRGVYYPDKVFRSSVLHSTQDLFLPFFSNVTWFHAIHVSGTNGTKRFDNPVLPFNDGVYFASTEKSNIIRGWIFGTTLDSKTQSLLIVNNATNVVIKVCEFQFCNDPFLGVYYHKNNKSWMESEFRVYSSANNCTFEYVSQPFLMDLEGKQGNFKNLREFVFKNIDGYFKIYSKHTPINLVRDLPQGFSALEPLVDLPIGINITRFQTLLALHRSYLTPGDSSSGWTAGAAAYYVGYLQPRTFLLKYNENGTITDAVDCALDPLSETKCTLKSFTVEKGIYQTSNFRVQPTESIVRFPNITNLCPFGEVFNATRFASVYAWNRKRISNCVADYSVLYNSASFSTFKCYGVSPTKLNDLCFTNVYADSFVIRGDEVRQIAPGQTGKIADYNYKLPDDFTGCVIAWNSNNLDSKVGGNYNYLYRLFRKSNLKPFERDISTEIYQAGSTPCNGVEGFNCYFPLQSYGFQPTNGVGYQPYRVVVLSFELLHAPATVCGPKKSTNLVKNKCVNFNFNGLTGTGVLTESNKKFLPFQQFGRDIADTTDAVRDPQTLEILDITPCSFGGVSVITPGTNTSNQVAVLYQDVNCTEVPVAIHADQLTPTWRVYSTGSNVFQTRAGCLIGAEHVNNSYECDIPIGAGICASYQTQTNSPRRARSVASQSIIAYTMSLGAENSVAYSNNSIAIPTNFTISVTTEILPVSMTKTSVDCTMYICGDSTECSNFLLQYGSFCTQLNRALTGIAVEQDKNTQEVFAQVKQIYKTPPIKDFGGFNFSQILPDPSKPSKRSFIEDLLFNKVTLADAGFIKQYGDCLGDIAARDLICAQKFNGLTVLPPLLTDEMIAQYTSALLAGTITSGWTFGAGAALQIPFAMQMAYRFNGIGVTQNVLYENQKLIANQFNSAIGKIQDSLSSTASALGKLQDVVNQNAQALNTLVKQLSSNFGCISSVLNDILSRLDKVEAEVQIDCLITGRLQSLQTYVTQQLIRAAEIRASANLAATKMSECVLGQSKRVDFCGKGYHLMSFPQSAPHGVVFLHVTYVPAQEKNFTTAPAICHDGKAHFPREGVFVSNGTHWFVTQRNFYEPQIITTDNTFVSGNCDVVIGIVNNTVYDPLQPELDSFKEELDKYFKNHTSPDVDLGDISGINASVVNIQKEIDRLNEVAKNLNESLIDLQELGKYEQYIKGGGGSDIDPYKEFGSSYQLLNFLPLDFFPDLNALVDTATALYEEELTGREHCSPHHTAIRQALVCWDELTKLIAWMSSNITSEQVRTIIVNHVNDTWGLKVRQSLWFHLSCLTFGQHTVQEFLVSFGVWIRTPAPYRPPNAPILSTLPEHTVIC

SEQ ID NO: 7453 - protein, 1365 aa, Artificial Sequence
  SARS-CoV-2/Australia/QLD02/2020__EPI_ISL_407896 spike protein (1-1211)(A972C_R995C) WhcAg construct
MFVFLVLLPLVSSQCVNLTTRTQLPPAYTNSFTRGVYYPDKVFRSSVLHSTQDLFLPFFSNVTWFHAIHVSGTNGTKRFDNPVLPFNDGVYFASTEKSNIIRGWIFGTTLDSKTQSLLIVNNATNVVIKVCEFQFCNDPFLGVYYHKNNKSWMESEFRVYSSANNCTFEYVSQPFLMDLEGKQGNFKNLREFVFKNIDGYFKIYSKHTPINLVRDLPQGFSALEPLVDLPIGINITRFQTLLALHRSYLTPGDSSSGWTAGAAAYYVGYLQPRTFLLKYNENGTITDAVDCALDPLSETKCTLKSFTVEKGIYQTSNFRVQPTESIVRFPNITNLCPFGEVFNATRFASVYAWNRKRISNCVADYSVLYNSASFSTFKCYGVSPTKLNDLCFTNVYADSFVIRGDEVRQIAPGQTGKIADYNYKLPDDFTGCVIAWNSNNLDSKVGGNYNYLYRLFRKSNLKPFERDISTEIYQAGSTPCNGVEGFNCYFPLQSYGFQPTNGVGYQPYRVVVLSFELLHAPATVCGPKKSTNLVKNKCVNFNFNGLTGTGVLTESNKKFLPFQQFGRDIADTTDAVRDPQTLEILDITPCSFGGVSVITPGTNTSNQVAVLYQDVNCTEVPVAIHADQLTPTWRVYSTGSNVFQTRAGCLIGAEHVNNSYECDIPIGAGICASYQTQTNSPRRARSVASQSIIAYTMSLGAENSVAYSNNSIAIPTNFTISVTTEILPVSMTKTSVDCTMYICGDSTECSNLLLQYGSFCTQLNRALTGIAVEQDKNTQEVFAQVKQIYKTPPIKDFGGFNFSQILPDPSKPSKRSFIEDLLFNKVTLADAGFIKQYGDCLGDIAARDLICAQKFNGLTVLPPLLTDEMIAQYTSALLAGTITSGWTFGAGAALQIPFAMQMAYRFNGIGVTQNVLYENQKLIANQFNSAIGKIQDSLSSTASALGKLQDVVNQNAQALNTLVKQLSSNFGCISSVLNDILSRLDKVEAEVQIDCLITGRLQSLQTYVTQQLIRAAEIRASANLAATKMSECVLGQSKRVDFCGKGYHLMSFPQSAPHGVVFLHVTYVPAQEKNFTTAPAICHDGKAHFPREGVFVSNGTHWFVTQRNFYEPQIITTDNTFVSGNCDVVIGIVNNTVYDPLQLELDSFKEELDKYFKNHTSPDVDLGDISGINASVVNIQKEIDRLNEVAKNLNESLIDLQELGKYEQYIKGGGGSDIDPYKEFGSSYQLLNFLPLDFFPDLNALVDTATALYEEELTGREHCSPHHTAIRQALVCWDELTKLIAWMSSNITSEQVRTIIVNHVNDTWGLKVRQSLWFHLSCLTFGQHTVQEFLVSFGVWIRTPAPYRPPNAPILSTLPEHTVIC

SEQ ID NO: 7454 - protein, 1365 aa, Artificial Sequence
  SARS-CoV-2/India/1-31/2020__EPI_ISL_413523 spike protein (1-1211)(A972C_R995C) WhcAg construct
MFVFLVLLPLVSSQCVNLTTRTQLPPAYTNSFTRGVYYPDKVFRSSVLHSTQDLFLPFFSNVTWFHAIHVSGTNGTKRFDNPVLPFNDGVYFASTEKSNIIRGWIFGTTLDSKTQSLLIVNNATNVVIKVCEFQFCNDPFLGVYYHKNNKSWMESEFRVYSSANNCTFEYVSQPFLMDLEGKQGNFKNLREFVFKNIDGYFKIYSKHTPINLVRDLPQGFSALEPLVDLPIGINITRFQTLLALHRSYLTPGDSSSGWTAGAAAYYVGYLQPRTFLLKYNENGTITDAVDCALDPLSETKCTLKSFTVEKGIYQTSNFRVQPTESIVRFPNITNLCPFGEVFNATRFASVYAWNRKRISNCVADYSVLYNSASFSTFKCYGVSPTKLNDLCFTNVYADSFVIRGDEVRQIAPGQTGKIADYNYKLPDDFTGCVIAWNSNNLDSKVGGNYNYLYRLFRKSNLKPFERDISTEIYQAGSTPCNGVEGFNCYFPLQSYGFQPTNGVGYQPYRVVVLSFELLHAPATVCGPKKSTNLVKNKCVNFNFNGLTGTGVLTESNKKFLPFQQFGRDIADTTDAVRDPQTLEILDITPCSFGGVSVITPGTNTSNQVAVLYQDVNCTEVPVAIHADQLTPTWRVYSTGSNVFQTRAGCLIGAEHVNNSYECDIPIGAGICASYQTQTNSPRRARSVASQSIIAYTMSLGAENSVAYSNNSIAIPTNFTISVTTEILPVSMTKTSVDCTMYICGDSTECSNLLLQYGSFCTQLNRALTGIAVEQDKNTQEVFAQVKQIYKTPPIKDFGGFNFSQILPDPSKPSKRSFIEDLLFNKVTLADAGFIKQYGDCLGDIAARDLICAQKFNGLTVLPPLLTDEMIAQYTSALLAGTITSGWTFGAGAALQIPFAMQMAYRFNGIGVTQNVLYENQKLIANQFNSVIGKIQDSLSSTASALGKLQDVVNQNAQALNTLVKQLSSNFGCISSVLNDILSRLDKVEAEVQIDCLITGRLQSLQTYVTQQLIRAAEIRASANLAATKMSECVLGQSKRVDFCGKGYHLMSFPQSAPHGVVFLHVTYVPAQEKNFTTAPAICHDGKAHFPREGVFVSNGTHWFVTQRNFYEPQIITTDNTFVSGNCDVVIGIVNNTVYDPLQPELDSFKEELDKYFKNHTSPDVDLGDISGINASVVNIQKEIDRLNEVAKNLNESLIDLQELGKYEQYIKGGGGSDIDPYKEFGSSYQLLNFLPLDFFPDLNALVDTATALYEEELTGREHCSPHHTAIRQALVCWDELTKLIAWMSSNITSEQVRTIIVNHVNDTWGLKVRQSLWFHLSCLTFGQHTVQEFLVSFGVWIRTPAPYRPPNAPILSTLPEHTVIC

SEQ ID NO: 7455 - protein, 1365 aa, Artificial Sequence
  SARS-CoV-2/Guangdong/GD2020087-P0008/2020__EPI_ISL_413863 spike protein (1-1211)(A972C_R995C) WhcAg construct
MFVFLVLLPLVSSQCVNLTTRTQLPPAYTNSFTRGVYYPDKVFRSSVLHSTQDLFLPFFSNVTWFHAIHVSGTNGTKRFDNPVLPFNDGVYFASTEKSNIIRGWIFGTTLDSKTQSLLIVNNATNVVIKVCEFQFCNDPFLGVYYHKNNKSWMESEFRVYSSANNCTFEYVSQPFLMDLEGKQGNFKNLREFVFKNIDGYFKIYSKHTPINLVRDLPQGFSALEPLVDLPIGINITRFQTLLALHRSYLTPGDSSSGWTAGAAAYYVGYLQPRTFLLKYNENGTITDAVDCALDPLSETKCTLKSFTVEKGIYQTSNFRVQPTESIVRFPNITNLCPFGEVFNATRFASVYAWNRKRISNCVADYSVLYNSASFSTFKCYGVSPTKLNDLCFTNVYADSFVIRGDEVREIAPGQTGKIADYNYKLPDDFTGCVIAWNSNNLDSKVGGNYNYLYRLFRKSNLKPFERDISTEIYQAGSTPCNGVEGFNCYFPLQSYGFQPTNGVGYQPYRVVVLSFELLHAPATVCGPKKSTNLVKNKCVNFNFNGLTGTGVLTESNKKFLPFQQFGRDIADTTDAVRDPQTLEILDITPCSFGGVSVITPGTNTSNQVAVLYQDVNCTEVPVAIHADQLTPTWRVYSTGSNVFQTRAGCLIGAEHVNNSYECDIPIGAGICASYQTQTNSPRRARSVASQSIIAYTMSLGAENSVAYSNNSIAIPTNFTISVTTEILPVSMTKTSVDCTMYICGDSTECSNLLLQYGSFCTQLNRALTGIAVEQDKNTQEVFAQVKQIYKTPPIKDFGGFNFSQILPDPSKPSKRSFIEDLLFNKVTLADAGFIKQYGDCLGDIAARDLICAQKFNGLTVLPPLLTDEMIAQYTSALLAGTITSGWTFGAGAALQIPFAMQMAYRFNGIGVTQNVLYENQKLIANQFNSAIGKIQDSLSSTASALGKLQDVVNQNAQALNTLVKQLSSNFGCISSVLNDILSRLDKVEAEVQIDCLITGRLQSLQTYVTQQLIRAAEIRASANLAATKMSECVLGQSKRVDFCGKGYHLMSFPQSAPHGVVFLHVTYVPAQEKNFTTAPAICHDGKAHFPREGVFVSNGTHWFVTQRNFYEPQIITTDNTFVSGNCDVVIGIVNNTVYDPLQPELDSFKEELDKYFKNHTSPDVDLGDISGINASVVNIQKEIDRLNEVAKNLNESLIDLQELGKYEQYIKGGGGSDIDPYKEFGSSYQLLNFLPLDFFPDLNALVDTATALYEEELTGREHCSPHHTAIRQALVCWDELTKLIAWMSSNITSEQVRTIIVNHVNDTWGLKVRQSLWFHLSCLTFGQHTVQEFLVSFGVWIRTPAPYRPPNAPILSTLPEHTVIC

SEQ ID NO: 7456 - protein, 1365 aa, Artificial Sequence
  SARS-CoV-2/Sweden/01/2020__EPI_ISL_411951 spike protein (1-1211)(A972C_R995C) WhcAg construct
MFVFLVLLPLVSSQCVNLTTRTQLPPAYTNSFTRGVYYPDKVFRSSVLHSTQDLFLPFFSNVTWFHAIHVSGTNGTKRFDNPVLPFNDGVYFASTEKSNIIRGWIFGTTLDSKTQSLLIVNNATNVVIKVCEFQFCNDPFLGVYYHKNNKSWMESEFRVYSSANNCTFEYVSQPFLMDLEGKQGNFKNLREFVFKNIDGYFKIYSKHTPINLVRDLPQGFSALEPLVDLPIGINITRFQTLLALHRSYLTPGDSSSGWTAGAAAYYVGYLQPRTFLLKYNENGTITDAVDCALDPLSETKCTLKSFTVEKGIYQTSNFRVQPTESIVRFPNITNLCPFGEVFNATRFASVYAWNRKRISNCVADYSVLYNSASFSTFKCYGVSPTKLNDLCFTNVYADSFVIRGDEVRQIAPGQTGKIADYNYKLPDDFTGCVIAWNSNNLDSKVGGNYNYLYRLFRKSNLKPFERDISTEIYQAGSTPCNGVEGFNCYFPLQSYGFQPTNGVGYQPYRVVVLSFELLHAPATVCGPKKSTNLVKNKCVNFNFNGLTGTGVLTESNKKFLPFQQFGRDIADTTDAVRDPQTLEILDITPCSFGGVSVITPGTNTSNQVAVLYQDVNCTEVPVAIHADQLTPTWRVYSTGSNVFQTRAGCLIGAEHVNNSYECDIPIGAGICASYQTQTNSPRRARSVASQSIIAYTMSLGAENSVAYSNNSIAIPTNFTISVTTEILPVSMTKTSVDCTMYICGDSTECSNLLLQYGSFCTQLNRALTGIAVEQDKNTQEVFAQVKQIYKTPPIKDCGGFNFSQILPDPSKPSKRSFIEDLLFNKVTLADAGFIKQYGDCLGDIAARDLICAQKFNGLTVLPPLLTDEMIAQYTSALLAGTITSGWTFGAGAALQIPFAMQMAYRFNGIGVTQNVLYENQKLIANQFNSAIGKIQDSLSSTASALGKLQDVVNQNAQALNTLVKQLSSNFGCISSVLNDILSRLDKVEAEVQIDCLITGRLQSLQTYVTQQLIRAAEIRASANLAATKMSECVLGQSKRVDFCGKGYHLMSFPQSAPHGVVFLHVTYVPAQEKNFTTAPAICHDGKAHFPREGVFVSNGTHWFVTQRNFYEPQIITTDNTFVSGNCDVVIGIVNNTVYDPLQPELDSFKEELDKYFKNHTSPDVDLGDISGINASVVNIQKEIDRLNEVAKNLNESLIDLQELGKYEQYIKGGGGSDIDPYKEFGSSYQLLNFLPLDFFPDLNALVDTATALYEEELTGREHCSPHHTAIRQALVCWDELTKLIAWMSSNITSEQVRTIIVNHVNDTWGLKVRQSLWFHLSCLTFGQHTVQEFLVSFGVWIRTPAPYRPPNAPILSTLPEHTVIC

SEQ ID NO: 7457 - protein, 1365 aa, Artificial Sequence
  SARS-CoV-2/Tianmen/HBCDC-HB-07/2020__EPI_ISL_412983 spike protein (1-1211)(A972C_R995C) WhcAg construct
MFVFLVLLPLVSSQCVNLTTRTQLPPAYTNSFTRGVYYPDKVFRSSVLHSTQDLFLPFFSNVTWFHAIHVSGTNGTKRFDNPVLPFNDGVYFASTEKSNIIRGWIFGTTLDSKTQSLLIVNNATNVVIKVCEFQFCNDPFLGVYYHKNNKSWMESEFRVYSSANNCTFEYVSQPFLMDLEGKQGNFKNLREFVFKNIDGYFKIYSKHTPINLVRDLPQGFSALEPLVDLPIGINITRFQTLLALHRSYLTPGDSSSGWTAGAAAYYVGYLQPRTFLLKYNENGTITDAVDCALDPLSETKCTLKSFTVEKGIYQTSNFRVQPTESIVRFPNITNLCPFGEVFNATRFASVYAWNRKRISNCVADYSVLYNSASFSTFKCYGVSPTKLNDLCFTNVYADSFVIRGDEVRQIAPGQTGKIADYNYKLPDDFTGCVIAWNSNNLDSKVGGNYNYLYRLFRKSNLKPFERDISTEIYQAGSTPCNGVEGFNCYFPLQSYGFQPTNGVGYQPYRVVVLSFELLHAPATVCGPKKSTNLVKNKCVNFNFNGLTGTGVLTESNKKFLPFQQFGRDIADTTDAVRDPQTLEILDITPCSFGGVSVITPGTNTSNQVAVLYQDLNCTEVPVAIHADQLTPTWRVYSTGSNVFQTRAGCLIGAEHVNNSYECDIPIGAGICASYQTQTNSPRRARSVASQSIIAYTMSLGAENSVAYSNNSIAIPTNFTISVTTEILPVSMTKTSVDCTMYICGDSTECSNLLLQYGSFCTQLNRALTGIAVEQDKNTQEVFAQVKQIYKTPPIKDFGGFNFSQILPDPSKPSKRSFIEDLLFNKVTLADAGFIKQYGDCLGDIAARDLICAQKFNGLTVLPPLLTDEMIAQYTSALLAGTITSGWTFGAGAALQIPFAMQMAYRFNGIGVTQNVLYENQKLIANQFNSAIGKIQDSLSSTASALGKLQDVVNQNAQALNTLVKQLSSNFGCISSVLNDILSRLDKVEAEVQIDCLITGRLQSLQTYVTQQLIRAAEIRASANLAATKMSECVLGQSKRVDFCGKGYHLMSFPQSAPHGVVFLHVTYVPAQEKNFTTAPAICHDGKAHFPREGVFVSNGTHWFVTQRNFYEPQIITTDNTFVSGNCDVVIGIVNNTVYDPLQPELDSFKEELDKYFKNHTSPDVDLGDISGINASVVNIQKEIDRLNEVAKNLNESLIDLQELGKYEQYIKGGGGSDIDPYKEFGSSYQLLNFLPLDFFPDLNALVDTATALYEEELTGREHCSPHHTAIRQALVCWDELTKLIAWMSSNITSEQVRTIIVNHVNDTWGLKVRQSLWFHLSCLTFGQHTVQEFLVSFGVWIRTPAPYRPPNAPILSTLPEHTVIC

SEQ ID NO: 7458 - protein, 1365 aa, Artificial Sequence
  SARS-CoV-2/Hong Kong/case42_VM20002493/2020__EPI_ISL_414527 spike protein (1-1211)(A972C_R995C) WhcAg construct
MFVFLVLLPLVSSQCVNLTTRTQLPPAYTNSFTRGVYYPDKVFRSSVLHSTQDLFLPFFSNVTWFHAIHVSGTNGTKRFDNPVLPFNDGVYFASTEKSNIIRGWIFGTTLDSKTQSLLIVNNATNVVIKVCEFQFCNDPFLGVYYHKNNKSWMESEFRVYSSANNCTFEYVSQPFLMDLEGKQGNFKNLREFVFKNIDGYFKIYSKHTPINLVRDLPQGFSALEPLVDLPIGINITRFQTLLALHRSYLTPGDSSSGWTAGAAAYYVGYLQPRTFLLKYNENGTITDAVDCALDPLSETKCTLKSFTVEKGIYQTSNFRVQPTESIVRFPNITNLCPFGEVFNATRFASVYAWNRKRISNCVADYSVLYNSASFSTFKCYGVSPTKLNDLCFTNVYADSFVIRGDEVRQIAPGQTGKIADYNYKLPDDFTGCVIAWNSNNLDSKVGGNYNYLYRLFRKSNLKPFERDISTEIYQAGSTPCNGVEGFNCYFPLQSYGFQPTNGVGYQPYRVVVLSFELLHAPATVCGPKKSTNLVKNKCVNFNFNGLTGTGVLTESNKKFLPFQQFGRDIADTTDAVRDPQTLEILDITPCSFGGVSVITPGTNTSNQVAVLYQDVNCTEVPVAIHADQLTPTWRVYSTGSNVFQTRAGCLIGAEHVNNSYECDIPIGAGICASYQTQTNSPRRARSVASQSIIAYTMSLGAENSVAYSNNSIAIPTNFAISVTTEILPVSMTKTSVDCTMYICGDSTECSNLLLQYGSFCTQLNRALTGIAVEQDKNTQEVFAQVKQIYKTPPIKDFGGFNFSQILPDPSKPSKRSFIEDLLFNKVTLADAGFIKQYGDCLGDIAARDLICAQKFNGLTVLPPLLTDEMIAQYTSALLAGTITSGWTFGAGAALQIPFAMQMAYRFNGIGVTQNVLYENQKLIANQFNSAIGKIQDSLSSTASALGKLQDVVNQNAQALNTLVKQLSSNFGCISSVLNDILSRLDKVEAEVQIDCLITGRLQSLQTYVTQQLIRAAEIRASANLAATKMSECVLGQSKRVDFCGKGYHLMSFPQSAPHGVVFLHVTYVPAQEKNFTTAPAICHDGKAHFPREGVFVSNGTHWFVTQRNFYEPQIITTDNTFVSGNCDVVIGIVNNTVYDPLQPELDSFKEELDKYFKNHTSPDVDLGDISGINASVVNIQKEIDRLNEVAKNLNESLIDLQELGKYEQYIKGGGGSDIDPYKEFGSSYQLLNFLPLDFFPDLNALVDTATALYEEELTGREHCSPHHTAIRQALVCWDELTKLIAWMSSNITSEQVRTIIVNHVNDTWGLKVRQSLWFHLSCLTFGQHTVQEFLVSFGVWIRTPAPYRPPNAPILSTLPEHTVIC

SEQ ID NO: 7459 - protein, 1365 aa, Artificial Sequence
  SARS-CoV-2/USA/CruiseA-23/2020__EPI_ISL_414482 spike protein (1-1211)(A972C_R995C) WhcAg construct
MFVFLVLLPLVSSQCVNLTTRTQLPPAYTNSFTRGVYYPDKVFRSSVLHSTQDLFLPFFSNVTWFHAIHVSGTNGTKRFDNPVLPFNDGVYFASTEKSNIIRGWIFGTTLDSKTQSLLIVNNATNVVIKVCEFQFCNDPFLGVYYHKNNKSWMESEFRVYSSANNCTFEYVSQPFLMDLEVKQGNFKNLREFVFKNIDGYFKIYSKHTPINLVRDLPQGFSALEPLVDLPIGINITRFQTLLALHRSYLTPGDSSSGWTAGAAAYYVGYLQPRTFLLKYNENGTITDAVDCALDPLSETKCTLKSFTVEKGIYQTSNFRVQPTESIVRFPNITNLCPFGEVFNATRFASVYAWNRKRISNCVADYSVLYNSASFSTFKCYGVSPTKLNDLCFTNVYADSFVIRGDEVRQIAPGQTGKIADYNYKLPDDFTGCVIAWNSNNLDSKVGGNYNYLYRLFRKSNLKPFERDISTEIYQAGSTPCNGVEGFNCYFPLQSYGFQPTNGVGYQPYRVVVLSFELLHAPATVCGPKKSTNLVKNKCVNFNFNGLTGTGVLTESNKKFLPFQQFGRDIADTTDAVRDPQTLEILDITPCSFGGVSVITPGTNTSNQVAVLYQDVNCTEVPVAIHADQLTPTWRVYSTGSNVFQTRAGCLIGAEHVNNSYECDIPIGAGICASYQTQTNSPRRARSVASQSIIAYTMSLGAENSVAYSNNSIAIPTNFTISVTTEILPVSMTKTSVDCTMYICGDSTECSNLLLQYGSFCTQLNRALTGIAVEQDKNTQEVFAQVKQIYKTPPIKDFGGFNFSQILPDPSKPSKRSFIEDLLFNKVTLADAGFIKQYGDCLGDIAARDLICAQKFNGLTVLPPLLTDEMIAQYTSALLAGTITSGWTFGAGAALQIPFAMQMAYRFNGIGVTQNVLYENQKLIANQFNSAIGKIQDSLSSTASALGKLQDVVNQNAQALNTLVKQLSSNFGCISSVLNDILSRLDKVEAEVQIDCLITGRLQSLQTYVTQQLIRAAEIRASANLAATKMSECVLGQSKRVDFCGKGYHLMSFPQSAPHGVVFLHVTYVPAQEKNFTTAPAICHDGKAHFPREGVFVSNGTHWFVTQRNFYEPQIITTDNTFVSGNCDVVIGIVNNTVYDPLQPELDSFKEELDKYFKNHTSPDVDLGDISGINASVVNIQKEIDRLNEVAKNLNESLIDLQELGKYEQYIKGGGGSDIDPYKEFGSSYQLLNFLPLDFFPDLNALVDTATALYEEELTGREHCSPHHTAIRQALVCWDELTKLIAWMSSNITSEQVRTIIVNHVNDTWGLKVRQSLWFHLSCLTFGQHTVQEFLVSFGVWIRTPAPYRPPNAPILSTLPEHTVIC

SEQ ID NO: 7460 - protein, 1365 aa, Artificial Sequence
  SARS-CoV-2/Hong Kong/case85_VM20002868/2020__EPI_ISL_414519 spike protein (1-1211)(A972C_R995C) WhcAg construct
MFVFLVLVPLVSSQCVNLTTRTQLPPAYTNSFTRGVYYPDKVFRSSVLHSTQDLFLPFFSNVTWFHAIHVSGTNGTKRFDNPVLPFNDGVYFASTEKSNIIRGWIFGTTLDSKTQSLLIVNNATNVVIKVCEFQFCNDPFLGVYYHKNNKSWMESEFRVYSSANNCTFEYVSQPFLMDLEGKQGNFKNLREFVFKNIDGYFKIYSKHTPINLVRDLPQGFSALEPLVDLPIGINITRFQTLLALHRSYLTPGDSSSGWTAGAAAYYVGYLQPRTFLLKYNENGTITDAVDCALDPLSETKCTLKSFTVEKGIYQTSNFRVQPTESIVRFPNITNLCPFGEVFNATRFASVYAWNRKRISNCVADYSVLYNSASFSTFKCYGVSPTKLNDLCFTNVYADSFVIRGDEVRQIAPGQTGKIADYNYKLPDDFTGCVIAWNSNNLDSKVGGNYNYLYRLFRKSNLKPFERDISTEIYQAGSTPCNGVEGFNCYFPLQSYGFQPTNGVGYQPYRVVVLSFELLHAPATVCGPKKSTNLVKNKCVNFNFNGLTGTGVLTESNKKFLPFQQFGRDIADTTDAVRDPQTLEILDITPCSFGGVSVITPGTNTSNQVAVLYQDVNCTEVPVAIHADQLTPTWRVYSTGSNVFQTRAGCLIGAEHVNNSYECDIPIGAGICASYQTQTNSPRRARSVASQSIIAYTMSLGAENSVAYSNNSIAIPTNFTISVTTEILPVSMTKTSVDCTMYICGDSTECSNLLLQYGSFCTQLNRALTGIAVEQDKNTQEVFAQVKQIYKTPPIKDFGGFNFSQILPDPSKPSKRSFIEDLLFNKVTLADAGFIKQYGDCLGDIAARDLICAQKFNGLTVLPPLLTDEMIAQYTSALLAGTITSGWTFGAGAALQIPFAMQMAYRFNGIGVTQNVLYENQKLIANQFNSAIGKIQDSLSSTASALGKLQDVVNQNAQALNTLVKQLSSNFGCISSVLNDILSRLDKVEAEVQIDCLITGRLQSLQTYVTQQLIRAAEIRASANLAATKMSECVLGQSKRVDFCGKGYHLMSFPQSAPHGVVFLHVTYVPAQEKNFTTAPAICHDGKAHFPREGVFVSNGTHWFVTQRNFYEPQIITTDNTFVSGNCDVVIGIVNNTVYDPLQPELDSFKEELDKYFKNHTSPDVDLGDISGINASVVNIQKEIDRLNEVAKNLNESLIDLQELGKYEQYIKGGGGSDIDPYKEFGSSYQLLNFLPLDFFPDLNALVDTATALYEEELTGREHCSPHHTAIRQALVCWDELTKLIAWMSSNITSEQVRTIIVNHVNDTWGLKVRQSLWFHLSCLTFGQHTVQEFLVSFGVWIRTPAPYRPPNAPILSTLPEHTVIC

SEQ ID NO: 7461 - protein, 1365 aa, Artificial Sequence; identical to SEQ ID NO: 7451
  SARS-CoV-2/England/200990660/2020__EPI_ISL_414523 spike protein (1-1211)(A972C_R995C) WhcAg construct

SEQ ID NO: 7462 - protein, 1365 aa, Artificial Sequence
  SARS-CoV-2/Australia/NSW09/2020__EPI_ISL_413595 spike protein (1-1211)(A972C_R995C) WhcAg construct
MFVFLVLLPLVSSQCVNLTTRTQLPPAYTNSFTRGVYYPDKVFRSSVLHSTQDLFLPFFSNVTWFHAIHVSGTNGTKRFDNPVLPFNDGVYFASTEKSNIIRGWIFGTTLDSKTQSLLIVNNATNVVIKVCEFQFCNDPFLGVYYHKNNKSWMESEFRVYSSANNCTFEYVSQPFLMDLEGKQGNFKNLREFVFKNIDGYFKIYSKHTPINLVRDLPQGFSALEPLVDLPIGINITRFQTLLALHRSYLTPGDSSSGWTAGAAAYYVGYLQPRTFLLKYNENGTITDAVDCALDPLSETKCTLKSFTVEKGIYQTSNFRVQPTESIVRFPNITNLCPFGEVFNATRFASVYAWNRKRISNCVADYSVLYNSASFSTFKCYGVSPTKLNDLCFTNVYADSFVIRGDEVRQIAPGQTGKIADYNYKLPDDFTGCVIAWNSNNLDSKVGGNYNYLYRLFRKSNLKPFERDISTEIYQAGSTPCNGVEGFNCYFPLQSYGFQPTNGVGYQPYRVVVLSFELLHAPATVCGPKKSTNLVKNKCVNFNFNGLTGTGVLTESNKKFLPFQQFGRDIADTTDAVRDPQTLEILDITPCSFGGVSVITPGTNTSNQVAVLYQDVNCTEVPVAIHADQLTPTWRVYSTGSNVFQTRAGCLIGAEHVNNSYECDIPIGAGICASYQTQTNSPRRARSVASQSIIAYTMSLGAENSVAYSNNSIAIPTNFTISVTTEILPVSMTKTSVDCTMYICGDSTECSNLLLQYGSFCTQLNRALTGIAVEQDKNTQEVFAQVKQIYKTPPIKDFGGFNFSQILPDPSKPSKRSFIEDLLFNKVTLADAGFIKQYGDCLGDIAARDLICAQKFNGLTVLPPLLTDEMIAQYTSALLAGTITSGWTFGAGAALQIPFAMQMAYRFNGIGVTQNVLYENQKLIANQFNSAIGKIQDSLSFTASALGKLQDVVNQNAQALNTLVKQLSSNFGCISSVLNDILSRLDKVEAEVQIDCLITGRLQSLQTYVTQQLIRAAEIRASANLAATKMSECVLGQSKRVDFCGKGYHLMSFPQSAPHGVVFLHVTYVPAQEKNFTTAPAICHDGKAHFPREGVFVSNGTHWFVTQRNFYEPQIITTDNTFVSGNCDVVIGIVNNTVYDPLQPELDSFKEELDKYFKNHTSPDVDLGDISGINASVVNIQKEIDRLNEVAKNLNESLIDLQELGKYEQYIKGGGGSDIDPYKEFGSSYQLLNFLPLDFFPDLNALVDTATALYEEELTGREHCSPHHTAIRQALVCWDELTKLIAWMSSNITSEQVRTIIVNHVNDTWGLKVRQSLWFHLSCLTFGQHTVQEFLVSFGVWIRTPAPYRPPNAPILSTLPEHTVIC

SEQ ID NO: 7463 - protein, 1365 aa, Artificial Sequence; identical to SEQ ID NO: 7443
  SARS-CoV-2/Australia/NSW10/2020__EPI_ISL_413596 spike protein (1-1211)(A972C_R995C) WhcAg construct

SEQ ID NO: 7464 - protein, 1365 aa, Artificial Sequence
  SARS-CoV-2/Switzerland/1000477797/2020__EPI_ISL_413023 spike protein (1-1211)(A972C_R995C) WhcAg construct
MFVFLVLLPLVSSQCVNLTTRTQLPPAYTNSFTRGVYYPDKVFRSSVLHSTQDLFLPFFSNVTWFHAIHVSGTNGTKRFDNPVLPFNDGVYFASTEKSNIIRGWIFGTTLDSKTQSLLIVNNATNVVIKVCEFQFCNDPFLGVYYHKNNKSWMESEFRVYSSANNCTFEYVSQPFLMDLEGKQGNFKNLREFVFKNIDGYFNIYSKHTPINLVRDLPQGFSALEPLVDLPIGINITRFQTLLALHRSYLTPGDSSSGWTAGAAAYYVGYLQPRTFLLKYNENGTITDAVDCALDPLSETKCTLKSFTVEKGIYQTSNFRVQPTESIVRFPNITNLCPFGEVFNATRFASVYAWNRKRISNCVADYSVLYNSASFSTFKCYGVSPTKLNDLCFTNVYADSFVIRGDEVRQIAPGQTGKIADYNYKLPDDFTGCVIAWNSNNLDSKVGGNYNYLYRLFRKSNLKPFERDISTEIYQAGSTPCNGVEGFNCYFPLQSYGFQPTNGVGYQPYRVVVLSFELLHAPATVCGPKKSTNLVKNKCVNFNFNGLTGTGVLTESNKKFLPFQQFGRDIADTTDAVRDPQTLEILDITPCSFGGVSVITPGTNTSNQVAVLYQGVNCTEVPVAIHADQLTPTWRVYSTGSNVFQTRAGCLIGAEHVNNSYECDIPIGAGICASYQTQTNSPRRARSVASQSIIAYTMSLGAENSVAYSNNSIAIPTNFTISVTTEILPVSMTKTSVDCTMYICGDSTECSNLLLQYGSFCTQLNRALTGIAVEQDKNTQEVFAQVKQIYKTPPIKDFGGFNFSQILPDPSKPSKRSFIEDLLFNKVTLADAGFIKQYGDCLGDIAARDLICAQKFNGLTVLPPLLTDEMIAQYTSALLAGTITSGWTFGAGAALQIPFAMQMAYRFNGIGVTQNVLYENQKLIANQFNSAIGKIQDSLSSTASALGKLQDVVNQNAQALNTLVKQLSSNFGCISSVLNDILSRLDKVEAEVQIDCLITGRLQSLQTYVTQQLIRAAEIRASANLAATKMSECVLGQSKRVDFCGKGYHLMSFPQSAPHGVVFLHVTYVPAQEKNFTTAPAICHDGKAHFPREGVFVSNGTHWFVTQRNFYEPQIITTDNTFVSGNCDVVIGIVNNTVYDPLQPELDSFKEELDKYFKNHTSPDVDLGDISGINASVVNIQKEIDRLNEVAKNLNESLIDLQELGKYEQYIKGGGGSDIDPYKEFGSSYQLLNFLPLDFFPDLNALVDTATALYEEELTGREHCSPHHTAIRQALVCWDELTKLIAWMSSNITSEQVRTIIVNHVNDTWGLKVRQSLWFHLSCLTFGQHTVQEFLVSFGVWIRTPAPYRPPNAPILSTLPEHTVIC

SEQ ID NO: 7465 - protein, 1365 aa, Artificial Sequence
  SARS-CoV-2/Belgium/BA-02291/2020__EPI_ISL_415159 spike protein (1-1211)(A972C_R995C) WhcAg construct
MFVFLVLLPLVSSQCVNLTTRTQLPPAYTNSFTRGVYYPDKVFRSSVLHSTQDLFLPFFSNVTWFHAIHVSGTNGTKRFDNPVLPFNDGVYFASTEKSNIIRGWIFGTTLDSKTQSLLIVNNATNVVIKVCEFQFCNDPFLGVYYHKNNKSWMESEFRVYSSANNCTFEYVSQPFLMDLEGKQGNFKNLREFVFKNIDGYFKIYSKHTPINLVRDLPQGFSALEPLVDLPIGINITRFQTLLALHRSYLTPGDSSSGWTAGAAAYYVGYLQPRTFLLKYNENGTITDAVDCALDPLSETKCTLKSFTVEKGIYQTSNFRVQPTESIVRFPNITNLCPFGEVFNATRFASVYAWNRKRISNCVADYSVLYNSASFSTFKCYGVSPTKLNDLCFTNVYADSFVIRGDEVRQIAPGQTGKIADYNYKLPDDFTGCVIAWNSNNLDSKVGGNYNYLYRLFRRSNLKPFERDISTEIYQAGSTPCNGVEGFNCYFPLQSYGFQPTNGVGYQPYRVVVLSFELLPAPATVCGPKKSTNLVKNKCVNFNFNGLTGTGVLTESNKKFLPFQQFGRDIADTTDAVRDPQTLEILDITPCSFGGVSVITPGTNTSNQVAVLYQGVNCTEVPVAIHADQLTPTWRVYSTGSNVFQTRAGCLIGAEHVNNSYECDIPIGAGICASYQTQTNSPRRARSVASQSIIAYTMSLGAENSVAYSNNSIAIPTNFTISVTTEILPVSMTKTSVDCTMYICGDSTECSNLLLQYGSFCTQLNRALTGIAVEQDKNTQEVFAQVKQIYKTPPIKDFGGFNFSQILPDPSKPSKRSFIEDLLFNKVTLADAGFIKQYGDCLGDIAARDLICAQKFNGLTVLPPLLTDEMIAQYTSALLAGTITSGWTFGAGAALQIPFAMQMAYRFNGIGVTQNVLYENQKLIANQFNSAIGKIQDSLSSAAPALGKLQDVVNQNAQALNTLVKQLSSNFGCISSVLNDILSRLDKVEAEVQIDCLITGRLQSLQTYVTQQLIRAAEIRASANLAATKMSECVLGQSKRVDFCGKGYHLMSFPQSAPHGVVFLHVTYVPAQEKNFTTAPAICHDGKAHFPREGVFVSNGTHWFVTQRNFYEPQIITTDNTFVSGNCDVVIGIVNNTVYDPLQPELDSFKEELDKYFKNHTSPDVDLGDISGINASVVNIQKEIDRLNEVAKNLNESLIDLQELGKYEQYIKGGGGSDIDPYKEFGSSYQLLNFLPLDFFPDLNALVDTATALYEEELTGREHCSPHHTAIRQALVCWDELTKLIAWMSSNITSEQVRTIIVNHVNDTWGLKVRQSLWFHLSCLTFGQHTVQEFLVSFGVWIRTPAPYRPPNAPILSTLPEHTVIC

SEQ ID NO: 7466 - protein, 1365 aa, Artificial Sequence
  SARS-CoV-2/USA/WA8-UW5/2020__EPI_ISL_413486 spike protein (1-1211)(A972C_R995C) WhcAg construct
MFVFLVLLPLVSSQCVNLTTRTQLPPAYTNSFTRGVYYPDKVFRSSVLHSTQDLFLPFFSNVTWFHAIHVSGTNGTKRFDNPVLPFNDGVYFASTEKSNIIRGWIFGTTLDSKTQSLLIVNNATNVVIKVCEFQFCNDPFLGVYYHKNNKSWMESEFRVYSSANNCTFEYVSQPFLMDLEGKQGNFKNLREFVFKNIDGYFKIYSKHTPINLVRDLPQGFSALEPLVDLPIGINITRFQTLLALHRSYLTPGDSSSGWTAGAAAYYVGYLQPRTFLLKYNENGTITDAVDCALDPLSETKCTLKSFTVEKGIYQTSNFRVQPTESIVRFPNITNLCPFGEVFNATRFASVYAWNRKRISNCVADYSVLYNSASFSTFKCYGVSPTKLNDLCFTNVYADSFVIRGDEVRQIAPGQTGKIADYNYKLPDDFTGCVIAWNSNNLDSKVGGNYNYLYRLFRKSNLKPFERDISTEIYQAGSTPCNGVEGFNCYFPLQSYGFQPTNGVGYQPYRVVVLSFELLHAPATVCGPKKSTNLVKNKCVNFNFNGLTGTGVLTESNKKFLPFQQFGRDIADTTDAVRDPQTLEILDITPCSFGGVSVITPGTNTSNQVAVLYQDVNCTEVPVAIHADQLTPTWRVYSTGSNVFQTRAGCLIGAEYVNNSYECDIPIGAGICASYQTQTNSPRRARSVASQSIIAYTMSLGAENSVAYSNNSIAIPTNFTISVTTEILPVSMTKTSVDCTMYICGDSTECSNLLLQYGSFCTQLNRALTGIAVEQDKNTQEVFAQVKQIYKTPPIKDFGGFNFSQILPDPSKPSKRSFIEDLLFNKVTLADAGFIKQYGDCLGDIAARDLICAQKFNGLTVLPPLLTDEMIAQYTSALLAGTITSGWTFGAGAALQIPFAMQMAYRFNGIGVTQNVLYENQKLIANQFNSAIGKIQDSLSSTASALGKLQDVVNQNAQALNTLVKQLSSNFGCISSVLNDILSRLDKVEAEVQIDCLITGRLQSLQTYVTQQLIRAAEIRASANLAATKMSECVLGQSKRVDFCGKGYHLMSFPQSAPHGVVFLHVTYVPAQEKNFTTAPAICHDGKAHFPREGVFVSNGTHWFVTQRNFYEPQIITTDNTFVSGNCDVVIGIVNNTVYDPLQPELDSFKEELDKYFKNHTSPDVDLGDISGINASVVNIQKEIDRLNEVAKNLNESLIDLQELGKYEQYIKGGGGSDIDPYKEFGSSYQLLNFLPLDFFPDLNALVDTATALYEEELTGREHCSPHHTAIRQALVCWDELTKLIAWMSSNITSEQVRTIIVNHVNDTWGLKVRQSLWFHLSCLTFGQHTVQEFLVSFGVWIRTPAPYRPPNAPILSTLPEHTVIC

SEQ ID NO: 7467 - protein, 1365 aa, Artificial Sequence
  SARS-CoV-2/England/20102000506/2020__EPI_ISL_415147 spike protein (1-1211)(A972C_R995C) WhcAg construct
MFVFLVLLPLVSSQCVNLTTRTQLPPAYTNSFTRGVYYPDKVFRSSVLHSTQDLFLPFFSNVTWFHAIHVSGTNGTKRFDNPVLPFNDGVYFASTEKSNIIRGWIFGTTLDSKTQSLLIVNNATNVVIKVCEFQFCNDPFLGVYYHKNNKSWMESEFRVYSSANNCTFEYVSQPFLMDLEGKQGNFKNLREFVFKNIDGYFKIYSKHTPINLVRDLPQGFSALEPLVDLPIGINITRFQTLLALHRSYLTPGDSSSGWTAGAAAYYVGYLQPRTFLLKYNENGTITDAVDCALDPLSETKCTLKSFTVEKGIYQTSNFRVQPTESIVRFPNITNLCPFGEVFNATRFASVYAWNRKRISNCVADYSVLYNSASFSTFKCYGVSPTKLNDLCFTNVYADSFVIRGDEVRQIAPGQTGKIADYNYKLPDDFTGCVIAWNSNNLDSKVGGNYNYLYRLFRKSNLKPFERDISTEIYQAGSTPCNGVEGFNCYFPLQSYGFQPTNGVGYQPYRVVVLSFELLHAPATVCGPKKSTNLVKNKCVNFNFNGLTGTGVLTESNKKFLPFQQFGRDIADTTDAVRDPQTLEILDITPCSFGGVSVITPGTNTSNQVAVLYQGVNCTEVPVAIHADQLTPTWRVYSTGSNVFQTRAGCLIGAEHVNNSYECDIPIGAGICASYQTQTNSPRRARSVASQSIIAYTMSLGAENSVAYSNNSIAIPTNFTISVTTEILPVSMTKTSVDCTMYICGDSTECSNLLLQYGSFCTQLNRALTGIAVEQDKNTQEVFAQVKQIYKTPPIKDFGGFNFSQILPDPSKPSKRSFIEDLLFNKVTLADAGFIKQYGYCLGDIAARDLICAQKFNGLTVLPPLLTDEMIAQYTSALLAGTITSGWTFGAGAALQIPFAMQMAYRFNGIGVTQNVLYENQKLIANQFNSAIGKIQDSLSSTASALGKLQDVVNQNAQALNTLVKQLSSNFGCISSVLNDILSRLDKVEAEVQIDCLITGRLQSLQTYVTQQLIRAAEIRASANLAATKMSECVLGQSKRVDFCGKGYHLMSFPQSAPHGVVFLHVTYVPAQEKNFTTAPAICHDGKAHFPREGVFVSNGTHWFVTQRNFYEPQIITTDNTFVSGNCDVVIGIVNNTVYDPLQPELDSFKEELDKYFKNHTSPDVDLGDISGINASVVNIQKEIDRLNEVAKNLNESLIDLQELGKYEQYIKGGGGSDIDPYKEFGSSYQLLNFLPLDFFPDLNALVDTATALYEEELTGREHCSPHHTAIRQALVCWDELTKLIAWMSSNITSEQVRTIIVNHVNDTWGLKVRQSLWFHLSCLTFGQHTVQEFLVSFGVWIRTPAPYRPPNAPILSTLPEHTVIC

SEQ ID NO: 7468 - protein, 1365 aa, Artificial Sequence
  SARS-CoV-2/Belgium/VAG-03013/2020__EPI_ISL_415155 spike protein (1-1211)(A972C_R995C) WhcAg construct
MFVFLVLLPLVSSQCVNLTTRTQLPPAYTNSFTRGVYYPDKVFRSSVLHSTQDLFLPFFSNVTWFHAIHVSGTNGTKRFDNPVLPFNDGVYFASTEKSNIIRGWIFGTTLDSKTQSLLIVNNATNVVIKVCEFQFCNDPFLGVYYHKNNKSWMESEFRVYSSANNCTFEYVSQPFLMDLEGKQGNFKNLREFVFKNIDGYFKIYSKHTPINLVRDLPQGFSALEPLVDLPIGINITRFQTLLALHRSYLTPGDSSSGWTAGAAAYYVGYLQPRTFLLKYNENGTITDAVDCALDPLSETKCTLKSFTVEKGIYQTSNFRVQPTESIVRFPNITNLCPFGEVFNATRFASVYAWNRKRISNCVADYSVLYNSASFSTFKCYGVSPTKLNDLCFTNVYADSFVIRGDEVRQIAPGQTGKIADYNYKLPDDFTGCVIAWNSNNLDSKVGGNYNYLYRLFRKSNLKPFERDISTEIYQAGSTPCNGVEGFNCYFPLQSYGFQPTNGVGYQPYRVVVLSFELLHAPATVCGPKKSTNLVKNKCVNFNFNGLTGTGVLTESNKKFLPFQQFGRDIADTTDAVRDPQTLEILDITPCSFGGVSVITPGTNTSNQVAVLYQGVNCTEVPVAIHADQLTPTWRVYSTGSNVFQTRAGCLIGAEHVNNSYECDIPIGAGICASYQTQTNSPRRARSVASQSIIAYTMSLGAENSVAYSNNSIAIPTNFTISVTTEILPVSMTKTSVDCTMYICGDSTECSNLLLQYGSFCTQLNRALTGIAVEQDKNTQEVFAQVKQIYKTPPIKDFGGFNFSQILPDPSKPSKRSFIEDLLFNKVTLADAGFIKQYGDCLGDIAARDLICAQKFNGLTVLPPLLTDEMIAQYTSALLAGTITSGWTFGAGAALQIPFAMQMAYRFNGIGVTQNVLYENQKLIANQFNSAIGKIQDSLSSTATALGKLQDVVNQNAQALNTLVKQLSSNFGCISSVLNDILSRLDKVEAEVQIDCLITGRLQSLQTYVTQQLIRAAEIRASANLAATKMSECVLGQSKRVDFCGKGYHLMSFPQSAPHGVVFLHVTYVPAQEKNFTTAPAICHDGKAHFPREGVFVSNGTHWFVTQRNFYEPQIITTDNTFVSGNCDVVIGIVNNTVYDPLQPELDSFKEELDKYFKNHTSPDVDLGDISGINASVVNIQKEIDRLNEVAKNLNESLIDLQELGKYEQYIKGGGGSDIDPYKEFGSSYQLLNFLPLDFFPDLNALVDTATALYEEELTGREHCSPHHTAIRQALVCWDELTKLIAWMSSNITSEQVRTIIVNHVNDTWGLKVRQSLWFHLSCLTFGQHTVQEFLVSFGVWIRTPAPYRPPNAPILSTLPEHTVIC

SEQ ID NO: 7469 - protein, 1365 aa, Artificial Sequence
  SARS-CoV-2/Belgium/BC-03016/2020__EPI_ISL_415157 spike protein (1-1211)(A972C_R995C) WhcAg construct
MFVFLVLLPLVSSQCVNLTTRTQLPPAYTNSFTRGVYYPDKVFRSSVLHSTQDLFLPFFSNVTWFHAIHVSGTNGTKRFDNPVLPFNDGVYFASTEKSNIIRGWIFGTTLDSKTQSLLIVNNATNVVIKVCEFQFCNDPFLGVYYHKNNKSWMESEFRVYSSANNCTFEYVSQPFLMDLEGKQGNFKNLREFVFKNIDGYFKIYSKHTPINLVRDLPQGFSALEPLVDLPIGINITRFQTLLALHRSYLTPGDSSSGWTAGAAAYYVGYLQPRTFLLKYNENGTITDAVDCALDPLSETKCTLKSFTVEKGIYQTSNFRVQPTESIVRFPNITNLCPFGEVFNATRFASVYAWNRKRISNCVADYSVLYNSASFSTFKCYGVSPTKLNDLCFTNVYADSFVIRGDEVRQIAPGQTGKIADYNYKLPDDFTGCVIAWNSNNLDSKVGGNYNYLYRLFRKSNLKPFERDISTEIYQAGSTPCNGVEGFNCYFPLQSYGFQPTNGVGYQPYRVVVLSFELLHAPATVCGPKKSTNLVKNKCVNFNFNGLTGTGVLTESNKKFLPFQQFGRDIADTTDAVRDPQTLEILDITPCSFGGVSVITPGTNTSNQVAVLYQGVNCTEVPVAIHADQLTPTWRVYSTGSNVFQTRAGCLIGAEHVNNSYECDIPIGAGICASYQTQTNSPRRARSVASQSIIAYTMSLGAENSVAYSNNSIAIPTNFTISVTTEILPVSMTKTSVDCTMYICGDSTECSNLLLQYGSFCTQLNRALTGIAVEQDKNTQEVFAQVKQIYKTPPIKDFGGFNFSQILPDPSKPSKRSFIEDLLFNKVTLADAGFIKQYGDCLGDIAARDLICAQKFNGLTVLPPLLTDEMIAQYTSALLAGTITSGWTFGAGAALQIPFAMQMAYRFNGIGVTQNVLYENQKLIANQFNSAIGKIQDSLSSTAPALGKLQDVVNQNAQALNTLVKQLSSNFGCISSVLNDILSRLDKVEAEVQIDCLITGRLQSLQTYVTQQLIRAAEIRASANLAATKMSECVLGQSKRVDFCGKGYHLMSFPQSAPHGVVFLHVTYVPAQEKNFTTAPAICHDGKAHFPREGVFVSNGTHWFVTQRNFYEPQIITTDNTFVSGNCDVVIGIVNNTVYDPLQPELDSFKEELDKYFKNHTSPDVDLGDISGINASVVNIQKEIDRLNEVAKNLNESLIDLQELGKYEQYIKGGGGSDIDPYKEFGSSYQLLNFLPLDFFPDLNALVDTATALYEEELTGREHCSPHHTAIRQALVCWDELTKLIAWMSSNITSEQVRTIIVNHVNDTWGLKVRQSLWFHLSCLTFGQHTVQEFLVSFGVWIRTPAPYRPPNAPILSTLPEHTVIC

SEQ ID NO: 7470 - protein, 1365 aa, Artificial Sequence
  SARS-CoV-2/Germany/BavPat3/2020__EPI_ISL_414521 spike protein (1-1211)(A972C_R995C) WhcAg construct
MFVFLVLLPLVSSQCVNLTTRTQLPPAYTNSFTRGVYYPDKVFRSSVLHSTQDLFLPFFSNVTWFHAIHVSGTNGTKRFDNPVLPFNDGVYFASTEKSNIIRGWIFGTTLDSKTQSLLIVNNATNVVIKVCEFQFCNDPFLGVYYHKNNKSWMESEFRVYSSANNCTFEYVSQPFLMDLEGKQGNFKNLREFVFKNIDGYFKIYSKHTPINLVRDLPQGFSALEPLVDLPIGINITRFQTLLALHRSYLTPGDSSSGWTAGAAAYYVGYLQPRTFLLKYNENGTITDAVDCALDPLSETKCTLKSFTVEKGIYQTSNFRVQPTESIVRFPNITNLCPFGEVFNATRFASVYAWNRKRISNCVADYSVLYNSASFSTFKCYGVSPTKLNDLCFTNVYADSFVIRGDEVRQIAPGQTGKIADYNYKLPDDFTGCVIAWNSNNLDSKVGGNYNYLYRLFRKSNLKPFERDISTEIYQAGSTPCNGVEGFNCYFPLQSYGFQPTNGVGYQPYRVVVLSFELLHAPATVCGPKKSTNLVKNKCVNFNFNGLTGTGVLTESNKKFLPFQQFGRDIADTTDAVRDPQTLEILDITPCSFGGVSVITPGTNTSNQVAVLYQDVNCTEVPVAIHADQLTPTWRVYSTGSNVFQTRAGCLIGAEHVNNSYECDIPIGAGICASYQTQTNSPRRARSVASQSIIAYTMSLGAENSVAYSNNSIAIPTNFTISVTTEILPVSMTKTSVDCTMYICGDSTECSNLLLQYGSFCTQLNRALTGIAVEQDKNTQQVFAQVKQIYKTPPIKDFGGFNFSQILPDPSKPSKRSFIEDLLFNKVTLADAGFIKQYGDCLGDIAARDLICAQKFNGLTVLPPLLTDEMIAQYTSALLAGTITSGWTFGAGAALQIPFAMQMAYRFNGIGVTQNVLYENQKLIANQFNSAIGKIQDSLSSTASALGKLQDVVNQNAQALNTLVKQLSSNFGCISSVLNDILSRLDKVEAEVQIDCLITGRLQSLQTYVTQQLIRAAEIRASANLAATKMSECVLGQSKRVDFCGKGYHLMSFPQSAPHGVVFLHVTYVPAQEKNFTTAPAICHDGKAHFPREGVFVSNGTHWFVTQRNFYEPQIITTDNTFVSGNCDVVIGIVNNTVYDPLQPELDSFKEELDKYFKNHTSPDVDLGDISGINASVVNIQKEIDRLNEVAKNLNESLIDLQELGKYEQYIKGGGGSDIDPYKEFGSSYQLLNFLPLDFFPDLNALVDTATALYEEELTGREHCSPHHTAIRQALVCWDELTKLIAWMSSNITSEQVRTIIVNHVNDTWGLKVRQSLWFHLSCLTFGQHTVQEFLVSFGVWIRTPAPYRPPNAPILSTLPEHTVIC

SEQ ID NO: 7471 - protein, 1365 aa, Artificial Sequence
  SARS-CoV-2/France/HF1805/2020__EPI_ISL_414628 spike protein (1-1211)(A972C_R995C) WhcAg construct
MFVFLVLLPLVSSQCVNLTTRTQLPPAYTNSFTRGVYYPDKVFRSSVLHSTQDLFLPFFSNVTWFHAIHVSGTNGTKRFDNPVLPFNDGVYFASTEKSNIIRGWIFGTTLDSKTQSLLIVNNATNVVIKVCEFQFCNDPFLGVYYHKNNKSWMESEFRVYSSANNCTFEYVSQPFLMDLEGKQGNFKNLREFVFKNIDGYFKIYSKHTPINLVRDLPQGFSALEPLVDLPIGINITRFQTLLALHRSYLTPGDSSSGWTAGAAAYYVGYLQPRTFLLKYNENGTITDAVDCALDPLSETKCTLKSFTVEKGIYQTSNFRVQPTESIVRFPNITNLCPFGEVFNATRFASVYAWNRKRISNCVADYSVLYNSASFSTFKCYGVSPTKLNDLCFTNVYADSFVIRGDEVRQIAPGQTGKIADYNYKLPDDFTGCVIAWNSNNLDSKVGGNYNYLYRLFRKSNLKPFERDISTEIYQAGSTPCNGVEGFNCYFPLQSYGFQPTNGVGYQPYRVVVLSFELLHAPATVCGPKKSTNLVKNKCVNFNFNGLTGTGVLTESNKKFLPFQQFGRDIADTTDAVRDPQTLEILDITPCSFGGVSVITPGTNTSNQVAVLYQGVNCTEVPVAIHADQLTPTWRVYSTGSNVFQTRAGCLIGAEHVNNSYECDIPIGAGICASYQTQTNSPRRARSVASQSIIAYTMSLGAENSVAYSNNSIAIPTNFTISVTTEILPVSMTKTSVDCTMYICGDSTECSNLLLQYGSFCTQLNRALTGIAVEQDKNTQEVFAQVKQIYKTPPIKDFGGFNFSQILPDPSKPSKRSFIEDLLFNKVTLADAGFIKQYGDCLGDIAARDLICAQKFNGLTVLPPLLTDEMIAQYTSALLAGTITSGWTFGAGAALQIPFAMQMAYRFNGIGVTQNVLYENQKLIANQFNSAIGKIQDSLSSTASALGKLQDVVNQNAQALNTLVKQLSSNFGCISSVLNDILSRLDKVEAEVQIDCLITGRLQSLQTYVTQQLIRAAEIRASANLAATKMSECVLGQSKRVDFCGKGYHLMSFPQSAPHGVVFLHVTYVPAQEKNFTTAPAICHDGKAHFPREGVFVSNGTHWFVTQRNFYEPQIITTDNTFVSGNCDVVIGVVNNTVYDPLQPELDSFKEELDKYFKNHTSPDVDLGDISGINASVVNIQKEIDRLNEVAKNLNESLIDLQELGKYEQYIKGGGGSDIDPYKEFGSSYQLLNFLPLDFFPDLNALVDTATALYEEELTGREHCSPHHTAIRQALVCWDELTKLIAWMSSNITSEQVRTIIVNHVNDTWGLKVRQSLWFHLSCLTFGQHTVQEFLVSFGVWIRTPAPYRPPNAPILSTLPEHTVIC

SEQ ID NO: 7472 - protein, 1365 aa, Artificial Sequence
  SARS-CoV-2/Netherlands/ZuidHolland_9/2020__EPI_ISL_414445 spike protein (1-1211)(A972C_R995C) WhcAg construct
MFVFLVLLPLVSSQCVNLTTRTQLPPAYTNSFTRGVYYPDKVFRSSVLHSTQDLFLPFFSNVTWFHAIHVSGTNGTKRFDNPVLPFNDGVYFASTEKSNIIRGWIFGTTLDSKTQSLLIVNNATNVVIKVCEFQFCNDPFLGVYYHKNNKSWMESEFRVYSSANNCTFEYVSQPFLMDLEGKQGNFKNLREFVFKNIDGYFKIYSKHTPINLVRDLPQGFSALEPLVDLPIGINITRFQTLLALHRSYLTPGDSSSGWTAGAAAYYVGYLQPRTFLLKYNENGTITDAVDCALDPLSETKCTLKSFTVEKGIYQTSNFRVQPTESIVRFPNITNLCPFGEVFNATRFASVYAWNRKRISNCVADYSVLYNSASFSTFKCYGVSPTKLNDLCFTNVYADSFVIRGDEVRQIAPGQTGKIADYNYKLPDDFTGCVIAWNSNNLDSKVGGNYNYLYRLFRKSNLKPFERDISTEIYQAGSTPCNGVEGFNCYFPLQSYGFQPTNGVGYQPYRVVVLSFELLHAPATVCGPKKSTNLVKNKCVNFNFNGLTGTGVLTESNKKFLPFQQFGRDIADTTDAVRDPQTLEILDITPCSFGGVSVITPGTNTSNQVAVLYQGVNCTEVPVAIHADQLTPTWRVYSTGSNVFQTRAGCLIGAEHVNNSYECDIPIGAGICASYQTQTNSPRRARSVASQSIIAYTMSLGAENSVAYSNNSIAIPTNFTISVTTEILPVSMTKTSVDCTMYICGDSTECSNLLLQYGSFCTQLNRALTGIAVEQDKNTQEVFAQVKQIYKTPPIKDFGGFNFSQILPDPSKPSKRSFIEDLLFNKVTLADAGFIKQYGDCLGDIAARDLICVQKFNGLTVLPPLLTDEMIAQYTSALLAGTITSGWTFGAGAALQIPFAMQMAYRFNGIGVTQNVLYENQKLIANQFNSAIGKIQDSLSSTASALGKLQDVVNQNAQALNTLVKQLSSNFGCISSVLNDILSRLDKVEAEVQIDCLITGRLQSLQTYVTQQLIRAAEIRASANLAATKMSECVLGQSKRVDFCGKGYHLMSFPQSAPHGVVFLHVTYVPAQEKNFTTAPAICHDGKAHFPREGVFVSNGTHWFVTQRNFYEPQIITTDNTFVSGNCDVVIGIVNNTVYDPLQPELDSFKEELDKYFKNHTSPDVDLGDISGINASVVNIQKEIDRLNEVAKNLNESLIDLQELGKYEQYIKGGGGSDIDPYKEFGSSYQLLNFLPLDFFPDLNALVDTATALYEEELTGREHCSPHHTAIRQALVCWDELTKLIAWMSSNITSEQVRTIIVNHVNDTWGLKVRQSLWFHLSCLTFGQHTVQEFLVSFGVWIRTPAPYRPPNAPILSTLPEHTVIC

SEQ ID NO: 7473 - protein, 1365 aa, Artificial Sequence
  SARS-CoV-2/Finland/FIN03032020A/2020__EPI_ISL_413602 spike protein (1-1211)(A972C_R995C) WhcAg construct
MFVFLVLLPLVSSQCVNLTTRTQLPPAYTNSFTRGVYYPDKVFRSSVLHSTQDLFLPFFSNVTWFHAIHVSGTNGTKRFDNPVLPFNDGVYFASTEKSNIIRGWIFGTTLDSKTQSLLIVNNATNVVIKVCEFQFCNDPFLGVYYHKNNKSWMESEFRVYSSANNCTFEYVSQPFLMDLEGKQGNFKNLREFVFKNIDGYFKIYSKHTPINLVRDLPQGFSALEPLVDLPIGINITRFQTLLALHRSYLTPGDSSSGWTAGAAAYYVGYLQPRTFLLKYNENGTITDAVDCALDPLSETKCTLKSFTVEKGIYQTSNFRVQPTESIVRFPNITNLCPFGEVFNATRFASVYAWNRKRISNCVADYSVLYNSASFSTFKCYGVSPTKLNDLCFTNVYADSFVIRGDEVRQIAPGQTGKIADYNYKLPDDFTGCVISWNSNNLDSKVGGNYNYLYRLFRKSNLKPFERDISTEIYQAGSTPCNGVEGFNCYFPLQSYGFQPTNGVGYQPYRVVVLSFELLHAPATVCGPKKSTNLVKNKCVNFNFNGLTGTGVLTESNKKFLPFQQFGRDIADTTDAVRDPQTLEILDITPCSFGGVSVITPGTNTSNQVAVLYQGVNCTEVPVAIHADQLTPTWRVYSTGSNVFQTRAGCLIGAEHVNNSYECDIPIGAGICASYQTQTNSPRRARSVASQSIIAYTMSLGAENSVAYSNNSIAIPTNFTISVTTEILPVSMTKTSVDCTMYICGDSTECSNLLLQYGSFCTQLNRALTGIAVEQDKNTQEVFAQVKQIYKTPPIKDFGGFNFSQILPDPSKPSKRSFIEDLLFNKVTLADAGFIKQYGDCLGDIAARDLICAQKFNGLTVLPPLLTDEMIAQYTSALLAGTITSGWTFGAGAALQIPFAMQMAYRFNGIGVTQNVLYENQKLIANQFNSAIGKIQDSLSSTASALGKLQDVVNQNAQALNTLVKQLSSNFGCISSVLNDILSRLDKVEAEVQIDCLITGRLQSLQTYVTQQLIRAAEIRASANLAATKMSECVLGQSKRVDFCGKGYHLMSFPQSAPHGVVFLHVTYVPAQEKNFTTAPAICHDGKAHFPREGVFVSNGTHWFVTQRNFYEPQIITTDNTFVSGNCDVVIGIVNNTVYDPLQPELDSFKEELDKYFKNHTSPDVDLGDISGINASVVNIQKEIDRLNEVAKNLNESLIDLQELGKYEQYIKGGGGSDIDPYKEFGSSYQLLNFLPLDFFPDLNALVDTATALYEEELTGREHCSPHHTAIRQALVCWDELTKLIAWMSSNITSEQVRTIIVNHVNDTWGLKVRQSLWFHLSCLTFGQHTVQEFLVSFGVWIRTPAPYRPPNAPILSTLPEHTVIC

SEQ ID NO: 7474 - protein, 1365 aa, Artificial Sequence
  SARS-CoV-2/France/GE1977/2020__EPI_ISL_414632 spike protein (1-1211)(A972C_R995C) WhcAg construct
MFVFLVLLPLVSSQCVNLTTRTQLPPAYTNSFTRGVYYPDKVFRSSVLHSTQDLFLPFFSNVTWFHAIHVSGTNGTKRFDNPVLPFNDGVYFASTEKSNIIRGWIFGTTLDSKTQSLLIVNNATNVVIKVCEFQFCNDPFLGVYYHKNNKSWMESEFRVYSSANNCTFEYVSQPFLMDLEGKQGNFKNLREFVFKNIDGYFKIYSKHTPINLVRDLPQGFSALEPLVDLPIGINITRFQTLLALHRSYLTPGDSSSGWTAGAAAYYVGYLQPRTFLLKYNENGTITDAVDCALDPLSETKCTLKSFTVEKGIYQTSNFRVQPTESIVRFPNITNLCPFGEVFNATRFASVYAWNRKRISNCVADYSVLYNSASFSTFKCYGVSPTKLNDLCFTNVYADSFVIRGDEVRQIAPGQTGKIADYNYKLPDDFTGCVIAWNSNNLDSKVGGNYNYLYRLFRKSNLKPFERDISTEIYQAGSTPCNGVEGFNCYFPLQSYGFQPTNGVGYQPYRVVVLSFELLHAPATVCGPKKSTNLVKNKCVNFNFNGLTGTGVLTESNKKFLPFQQFGRDIADTTDAVRDPQTLEILDITPCSFGGVSVITPGTNTSNQVAVLYQGVNCTEVPVAIHADQLTPTWRVYSTGSNVFQTRAGCLIGAEHVNNSYECDIPIGAGICASYQTQTNSPRRARSVASQSIIAYTMSLGAENSVAYSNNSIAIPTNFTISVTTEILPVSMTKTSVDCTMYICGDSTECSNLLLQYGSFCTQLNRALTGIAVEQDKNTQEVFAQVKQIYKTPPIKDFGGFNFSQILPDPSKPSKRSFIEDLLFNKVTLADAGFIKQYGDCLGDIAARDLICAQKFNGLTVLPPLLTDEMIAQYTSALLAGTITSGWTFGAGAALQIPFAMQMAYRFNGIGVTQNVLYENQKLIANQFNSAIGKIQDSLFSTASALGKLQDVVNQNAQALNTLVKQLSSNFGCISSVLNDILSRLDKVEAEVQIDCLITGRLQSLQTYVTQQLIRAAEIRASANLAATKMSECVLGQSKRVDFCGKGYHLMSFPQSAPHGVVFLHVTYVPAQEKNFTTAPAICHDGKAHFPREGVFVSNGTHWFVTQRNFYEPQIITTDNTFVSGNCDVVIGIVNNTVYDPLQPELDSFKEELDKYFKNHTSPDVDLGDISGINASVVNIQKEIDRLNEVAKNLNESLIDLQELGKYEQYIKGGGGSDIDPYKEFGSSYQLLNFLPLDFFPDLNALVDTATALYEEELTGREHCSPHHTAIRQALVCWDELTKLIAWMSSNITSEQVRTIIVNHVNDTWGLKVRQSLWFHLSCLTFGQHTVQEFLVSFGVWIRTPAPYRPPNAPILSTLPEHTVIC

SEQ ID NO: 7475 - protein, 1365 aa, Artificial Sequence
  SARS-CoV-2/Finland/FIN-313/2020__EPI_ISL_414641 spike protein (1-1211)(A972C_R995C) WhcAg construct
MFVFLVLLPLVSSQCVNLTTRTQLPPAYTNSFTRGVYYPDKVFRSSVLHSTQDLFLPFFSNVTWFHAIHVSGTNGTKRFDNPVLPFNDGVYFASTEKSNIIRGWIFGTTLDSKTQSLLIVNNATNVVIKVCEFQFCNDPFLGVYYHKNNKSWMESEFRVYSSANNCTFEYVSQPFLMDLEGKQGNFKNLREFVFKNIDGYFKIYSKHTPINLVRDLPQGFSALEPLVDLPIGINITRFKTLLALHRSYLTPGDSSSGWTAGAAAYYVGYLQPRTFLLKYNENGTITDAVDCALDPLSETKCTLKSFTVEKGIYQTSNFRVQPTESIVRFPNITNLCPFGEVFNATRFASVYAWNRKRISNCVADYSVLYNSASFSTFKCYGVSPTKLNDLCFTNVYADSFVIRGDEVRQIAPGQTGKIADYNYKLPDDFTGCVIAWNSNNLDSKVGGNYNYLYRLFRKSNLKPFERDISTEIYQAGSTPCNGVEGFNCYFPLQSYGFQPTNGVGYQPYRVVVLSFELLHAPATVCGPKKSTNLVKNKCVNFNFNGLTGTGVLTESNKKFLPFQQFGRDIADTTDAVRDPQTLEILDITPCSFGGVSVITPGTNTSNQVAVLYQGVNCTEVPVAIHADQLTPTWRVYSTGSNVFQTRAGCLIGAEHVNNSYECDIPIGAGICASYQTQTNSPRRARSVASQSIIAYTMSLGAENSVAYSNNSIAIPTNFTISVTTEILPVSMTKTSVDCTMYICGDSTECSNLLLQYGSFCTQLNRALTGIAVEQDKNTQEVFAQVKQIYKTPPIKDFGGFNFSQILPDPSKPSKRSFIEDLLFNKVTLADAGFIKQYGDCLGDIAARDLICAQKFNGLTVLPPLLTDEMIAQYTSALLAGTITSGWTFGAGAALQIPFAMQMAYRFNGIGVTQNVLYENQKLIANQFNSAIGKIQDSLSSTASALGKLQDVVNQNAQALNTLVKQLSSNFGCISSVLNDILSRLDKVEAEVQIDCLITGRLQSLQTYVTQQLIRAAEIRASANLAATKMSECVLGQSKRVDFCGKGYHLMSFPQSAPHGVVFLHVTYVPAQEKNFTTAPAICHDGKAHFPREGVFVSNGTHWFVTQRNFYEPQIITTDNTFVSGNCDVVIGIVNNTVYDPLQPELDSFKEELDKYFKNHTSPDVDLGDISGINASVVNIQKEIDRLNEVAKNLNESLIDLQELGKYEQYIKGGGGSDIDPYKEFGSSYQLLNFLPLDFFPDLNALVDTATALYEEELTGREHCSPHHTAIRQALVCWDELTKLIAWMSSNITSEQVRTIIVNHVNDTWGLKVRQSLWFHLSCLTFGQHTVQEFLVSFGVWIRTPAPYRPPNAPILSTLPEHTVIC

SEQ ID NO: 7476 - protein, 1365 aa, Artificial Sequence
  SARS-CoV-2/Netherlands/ZuidHolland_2/2020__EPI_ISL_414556 spike protein (1-1211)(A972C_R995C) WhcAg construct
MFVFLVLLPLVSSQCVNLTTRTQLPPAYTNSFTRGVYYPDKVFRSSVLHSTQDLFLPFFSNVTWFHAIHVSGTNGTKRFDNPVLPFNDGVYFASTEKSNIIRGWIFGTTLDSKTQSLLIVNNATNVVIKVCEFQFCNDPFLGVYYHKNNKSWMESEFRVYSSANNCTFEYVSQPFLMDLEGKQGNFKNLREFVFKNIDGYFKIYSKHTPINLVRDLPQGFSALEPLVDLPIGINITRFQTLLALHRSYLTPGDSSSGWTAGAAAYYVGYLQPRTFLLKYNENGTITDAVDCALDPLSETKCTLKSFTVEKGIYQTSNFRVQPTESIVRFPNITNLCPFGEVFNATRFASVYAWNRKRISNCVADYSVLYNSASFSTFKCYGVSPTKLNDLCFTNVYADSFVIRGDEVRQIAPGQTGKIADYNYKLPDDFTGCVIAWNSNNLDSKVGGNYNYLYRLFRKSNLKPFERDISTEIYQAGSTPCNGVEGFNCYFPLQSYGFQPTNGVGYQPYRVVVLSFELLHAPATVCGPKKSTNLVKNKCVNFNFNGLTGTGVLTESNKKFLPFQQFGRDIADTTDAVRDPQTLEILDITPCSFGGVSVITPGTNTSNQVAVLYQGVNCTEVPVAIHADQLTPTWRVYSTGSNVFQTRAGCLIGAEHVNNSYECDIPIGAGICASYQTQTNSPRRARSVASQSIIAYTMSLGAENSVAYSNNSIAIPTNFTISVTTEILPVSMTKTSVDCTMYICGDSTECSNLLLQYGSFCTQLNRALTGIALEQDKNTQEVFAQVKQIYKTPPIKDFGGFNFSQILPDPSKPSKRSFIEDLLFNKVTLADAGFIKQYGDCLGDIAARDLICAQKFNGLTVLPPLLTDEMIAQYTSALLAGTITSGWTFGAGAALQIPFAMQMAYRFNGIGVTQNVLYENQKLIANQFNSAIGKIQDSLSSTASALGKLQDVVNQNAQALNTLVKQLSSNFGCISSVLNDILSRLDKVEAEVQIDCLITGRLQSLQTYVTQQLIRAAEIRASANLAATKMSECVLGQSKRVDFCGKGYHLMSFPQSAPHGVVFLHVTYVPAQEKNFTTAPAICHDGKAHFPREGVFVSNGTHWFVTQRNFYEPQIITTDNTFVSGNCDVVIGIVNNTVYDPLQPELDSFKEELDKYFKNHTSPDVDLGDISGINASVVNIQKEIDRLNEVAKNLNESLIDLQELGKYEQYIKGGGGSDIDPYKEFGSSYQLLNFLPLDFFPDLNALVDTATALYEEELTGREHCSPHHTAIRQALVCWDELTKLIAWMSSNITSEQVRTIIVNHVNDTWGLKVRQSLWFHLSCLTFGQHTVQEFLVSFGVWIRTPAPYRPPNAPILSTLPEHTVIC

SEQ ID NO: 7477 - protein, 1365 aa, Artificial Sequence
  SARS-CoV-2/USA/WA-UW31/2020__EPI_ISL_414618 spike protein (1-1211)(A972C_R995C) WhcAg construct
MFVFLVLLPLVSSQCVNLTTRTQLPPAYTNSFTRGVYYPDKVFRSSVLHSTQDLFLPFFSNVTWFHAIHVSGTNGTKRFDNPVLPFNDGVYFASTEKSNIIRGWIFGTTLDSKTQSLLIVNNATNVVIKVCEFQFCNDPFLGVYYHKNNKSWMESEFRVYSSANNCTFEYVSQPFLMDLEGKQGNFKNLREFVFKNIDGYFKIYSKHTPINLVRDLPQGFSALEPLVDLPIGINITRFQTLLALHRSYLTPGDSSSGWTAGAAAYYVGYLQPRTFLLKYNENGTITDAVDCALDPLSETKCTLKSFTVEKGIYQTSNFRVQPTESIVRFPNITNLCPFGEVFNATRFASVYAWNRKRISNCVADYSVLYNSASFSTFKCYGVSPTKLNDLCFTNVYADSFVIRGDEVRQIAPGQTGKIADYNYKLPDDFTGCVIAWNSNNLDSKVGGNYNYLYRLFRKSNLKPFERDISTEIYQAGSTPCNGAEGFNCYFPLQSYGFQPTNGVGYQPYRVVVLSFELLHAPATVCGPKKSTNLVKNKCVNFNFNGLTGTGVLTESNKKFLPFQQFGRDIADTTDAVRDPQTLEILDITPCSFGGVSVITPGTNTSNQVAVLYQDVNCTEVPVAIHADQLTPTWRVYSTGSNVFQTRAGCLIGAEHVNNSYECDIPIGAGICASYQTQTNSPRRARSVASQSIIAYTMSLGAENSVAYSNNSIAIPTNFTISVTTEILPVSMTKTSVDCTMYICGDSTECSNLLLQYGSFCTQLNRALTGIAVEQDKNTQEVFAQVKQIYKTPPIKDFGGFNFSQILPDPSKPSKRSFIEDLLFNKVTLADAGFIKQYGDCLGDIAARDLICAQKFNGLTVLPPLLTDEMIAQYTSALLAGTITSGWTFGAGAALQIPFAMQMAYRFNGIGVTQNVLYENQKLIANQFNSAIGKIQDSLSSTASALGKLQDVVNQNAQALNTLVKQLSSNFGCISSVLNDILSRLDKVEAEVQIDCLITGRLQSLQTYVTQQLIRAAEIRASANLAATKMSECVLGQSKRVDFCGKGYHLMSFPQSAPHGVVFLHVTYVPAQEKNFTTAPAICHDGKAHFPREGVFVSNGTHWFVTQRNFYEPQIITTDNTFVSGNCDVVIGIVNNTVYDPLQPELDSFKEELDKYFKNHTSPDVDLGDISGINASVVNIQKEIDRLNEVAKNLNESLIDLQELGKYEQYIKGGGGSDIDPYKEFGSSYQLLNFLPLDFFPDLNALVDTATALYEEELTGREHCSPHHTAIRQALVCWDELTKLIAWMSSNITSEQVRTIIVNHVNDTWGLKVRQSLWFHLSCLTFGQHTVQEFLVSFGVWIRTPAPYRPPNAPILSTLPEHTVIC

SEQ ID NO: 7478 - protein, 1365 aa, Artificial Sequence
  SARS-CoV-2/South Korea/SNU01/2020__EPI_ISL_411929 spike protein (1-1211)(A972C_R995C) WhcAg construct
MFVFLVLLPLVSSQCVNLTTRTQLPPAYTNSFTRGVYYPDKVFRSSVLHSTQDLFLPFFSNVTWFHAIHVSGTNGTKRFDNPVLPFNDGVYFASTEKSNIIRGWIFGTTLDSKTQSLLIVNNATNVVIKVCEFQFCNDPFLGVYYHKNNKSWMESEFRVYSSANNCTFEYVSQPFLMDLEGKQGNFKNLREFVFKNIDGYFKIYSKHTPINLVRDLPQGFWALEPLVDLPIGINITRFQTLLALHRSYLTPGDSSSGWTAGAAAYYVGYLQPRTFLLKYNENGTITDAVDCALDPLSETKCTLKSFTVEKGIYQTSNFRVQPTESIVRFPNITNLCPFGEVFNATRFASVYAWNRKRISNCVADYSVLYNSASFSTFKCYGVSPTKLNDLCFTNVYADSFVIRGDEVRQIAPGQTGKIADYNYKLPDDFTGCVIAWNSNNLDSKVGGNYNYLYRLFRKSNLKPFERDISTEIYQAGSTPCNGVEGFNCYFPLQSYGFQPTNGVGYQPYRVVVLSFELLHAPATVCGPKKSTNLVKNKCVNFNFNGLTGTGVLTESNKKFLPFQQFGRDIADTTDAVRDPQTLEILDITPCSFGGVSVITPGTNTSNQVAVLYQDVNCTEVPVAIHADQLTPTWRVYSTGSNVFQTRAGCLIGAEHVNNSYECDIPIGAGICASYQTQTNSPRRARSVASQSIIAYTMSLGAENSVAYSNNSIAIPTNFTISVTTEILPVSMTKTSVDCTMYICGDSTECSNLLLQYGSFCTQLNRALTGIAVEQDKNTQEVFAQVKQIYKTPPIKDFGGFNFSQILPDPSKPSKRSFIEDLLFNKVTLADAGFIKQYGDCLGDIAARDLICAQKFNGLTVLPPLLTDEMIAQYTSALLAGTITSGWTFGAGAALQIPFAMQMAYRFNGIGVTQNVLYENQKLIANQFNSAIGKIQDSLSSTASALGKLQDVVNQNAQALNTLVKQLSSNFGCISSVLNDILSRLDKVEAEVQIDCLITGRLQSLQTYVTQQLIRAAEIRASANLAATKMSECVLGQSKRVDFCGKGYHLMSFPQSAPHGVVFLHVTYVPAQEKNFTTAPAICHDGKAHFPREGVFVSNGTHWFVTQRNFYEPQIITTDNTFVSGNCDVVIGIVNNTVYDPLQPELDSFKEELDKYFKNHTSPDVDLGDISGINASVVNIQKEIDRLNEVAKNLNESLIDLQELGKYEQYIKGGGGSDIDPYKEFGSSYQLLNFLPLDFFPDLNALVDTATALYEEELTGREHCSPHHTAIRQALVCWDELTKLIAWMSSNITSEQVRTIIVNHVNDTWGLKVRQSLWFHLSCLTFGQHTVQEFLVSFGVWIRTPAPYRPPNAPILSTLPEHTVIC

SEQ ID NO: 7479 - protein, 1365 aa, Artificial Sequence
  SARS-CoV-2/China/WF0004/2020__EPI_ISL_413694 spike protein (1-1211)(A972C_R995C) WhcAg construct
MFVFLVLLPLVSSQCVNLTTRTQLPPAYTNSFTRGVYYPDKVFRSSVLHSTQDLFLPFFSNVTWFHAIHVSGTNGTKRFDNPVLPFNDGVYFASTEKSNIIRGWIFGTTLDSKTQSLLIVNNATNVVIKVCEFQFCNDPFLGVYYHKNNKSWTESEFRVYSSANNCTFEYVSQPFLMDLEGKQGNFKNLREFVFKNIDGYFKIYSKHTPINLVRDLPQGFSALEPLVDLPIGINITRFQTLLALHRSYLTPGDSSSGWTAGAAAYYVGYLQPRTFLLKYNENGTITDAVDCALDPLSETKCTLKSFTVEKGIYQTSNFRVQPTESIVRFPNITNLCPFGEVFNATRFASVYAWNRKRISNCVADYSVLYNSASFSTFKCYGVSPTKLNDLCFTNVYADSFVIRGDEVRQIAPGQTGKIADYNYKLPDDFTGCVIAWNSNNLDSKVGGNYNYLYRLFRKSNLKPFERDISTEIYQAGSTPCNGVEGFNCYFPLQSYGFQPTNGVGYQPYRVVVLSFELLHAPATVCGPKKSTNLVKNKCVNFNFNGLTGTGVLTESNKKFLPFQQFGRDIADTTDAVRDPQTLEILDITPCSFGGVSVITPGTNTSNQVAVLYQDVNCTEVPVAIHADQLTPTWRVYSTGSNVFQTRAGCLIGAEHVNNSYECDIPIGAGICASYQTQTNSPRRARSVASQSIIAYTMSLGAENSVAYSNNSIAIPTNFTISVTTEILPVSMTKTSVDCTMYICGDSTECSNLLLQYGSFCTQLNRALTGIAVEQDKNTQEVFAQVKQIYKTPPIKDFGGFNFSQILPDPSKPSKRSFIEDLLFNKVTLADAGFIKQYGDCLGDIAARDLICAQKFNGLTVLPPLLTDEMIAQYTSALLAGTITSGWTFGAGAALQIPFAMQMAYRFNGIGVTQNVLYENQKLIANQFNSAIGKIQDSLSSTASALGKLQDVVNQNAQALNTLVKQLSSNFGCISSVLNDILSRLDKVEAEVQIDCLITGRLQSLQTYVTQQLIRAAEIRASANLAATKMSECVLGQSKRFDFCGKGYHLMSFPQSAPHGVVFLHVTYVPAQEKNFTTAPAICHDGKAHFPREGVFVSNGTHWFVTQRNFYEPQIITTDNTFVSGNCDVVIGIVNNTVYDPLQPELDSFKEELDKYFKNHTSPDVDLGDISGINASVVNIQKEIDRLNEVAKNLNESLIDLQELGKYEQYIKGGGGSDIDPYKEFGSSYQLLNFLPLDFFPDLNALVDTATALYEEELTGREHCSPHHTAIRQALVCWDELTKLIAWMSSNITSEQVRTIIVNHVNDTWGLKVRQSLWFHLSCLTFGQHTVQEFLVSFGVWIRTPAPYRPPNAPILSTLPEHTVIC

SEQ ID NO: 7480 - protein, 1365 aa, Artificial Sequence
  SARS-CoV-2/China/WF0028/2020__EPI_ISL_413791 spike protein (1-1211)(A972C_R995C) WhcAg construct
MFVFLVLLPLVSSQCVNLTTRTQLPPAYTNSFTRGVYYPDKVFRSSVLHSTQDLFLPFFSNVTWFHAIHVSGTNGTKRFDNPVLPFNDGVYFASTEKSNIIRGWIFGTTLDSKTQSLLIVNNATNVVIKVCEFQFCNDPFLGVYYHKNNKSWMESEFRVYSSANNCTFEYVSQPFLMDLEGKQGNFKNLREFVFKNIDGYFKIYSKHTPINLVRDLPQGFSALEPLVDLPIGINITRFQTLLALHRSYLTPGDSSSGWTAGAAAYYVGYLQPRTFLLKYNENGTITDAVDCALDPLSETKCTLKSFTVEKGIYQTSNFRVQPTESIVRFPNITNLCPFGEVFNATRFASVYAWNRKRISNCVADYSVLYNSASFSTFKCYGVSPTKLNDLCFTNVYADSFVIRGDEVRQIAPGQTGKIADYNYKLPDDFTGCVIAWNSNNLDSKVGGNYNYLYRLFRKSNLKPFERDISTEIYQAGSTPCNGVEGFNCYFPLQSYGFQPTNGVGYQPYRVVVLSFELLHAPATVCGPKKSTNLVKNKCVNFNFNGLTGTGVLTESNKKFLPFQQFGRDIADTTDAVRDPQTLEILDITPCSFGGVSVITPGTNTSNQVAVLYQDVNCTEVPVAIHADQLTPTWRVYSTGSNVFQTRAGCLIGAEHVNNSYECDIPIGAGICASYQTQTNSPRRARSVASQSIIAYTMSLGAENSVAYSNNSIAIPTNFTISVTTEILPVSMTKTSVDCTMYICGDSTECSNLLLQYGSFCTQLNRALTGIAVEQDKNTQEVFAQVKQIYKTPPIKDFGGFNFSQILPDPSKPSKRSFIEDLLFNKVTLADAGFIKQYGDCLGDIAARDLICAQKFNGLTVLPPLLTDEMIAQYTSALLAGTITSGWTFGAGAALQIPFAMQMAYRFNGIGVTQNVLYENQKLIANQFNSAIGKIQDSLSSTASALGKLQDVVNQNAQALNTLVKQLSSNFGCISSVLNDILSRLDKVEAEVQIDCLITGRLQSLQTYVTQQLIRAAEIRASANLAATKMSECVLGQSKRVDFCGKGYHLMSFPQSAPHGVVFLHVTYVPAQEKNFTTAPAICHDGKAHFPREGVFVSNGTHWFVTQRNFYEPQIITTDNTFVSGNCDVVIGIVNNTVYDPLQPELESFKEELDKYFKNHTSPDVDLGDISGINASVVNIQKEIDRLNEVAKNLNESLIDLQELGKYEQYIKGGGGSDIDPYKEFGSSYQLLNFLPLDFFPDLNALVDTATALYEEELTGREHCSPHHTAIRQALVCWDELTKLIAWMSSNITSEQVRTIIVNHVNDTWGLKVRQSLWFHLSCLTFGQHTVQEFLVSFGVWIRTPAPYRPPNAPILSTLPEHTVIC

SEQ ID NO: 7481 - protein, 1365 aa, Artificial Sequence
  SARS-CoV-2/2019-nCoV/USA-CruiseA-18/2020__MT159716.1 spike protein (1-1211)(A972C_R995C) WhcAg construct
MFVFLVLLPLVSSQCVNLTTRTQLPPAYTNSFTRGVYYPDKVFRSSVLHSTQDLFLPFFSNVTWFHAIHVSGTNGTKRFDNPVLPFNDGVYFASTEKSNIIRGWIFGTTLDSKTQSLLIVNNATNVVIKVCEFQFCNDPFLGVYYHKNNKSWMESELRVYSSANNCTFEYVSQPFLMDLEGKQGNFKNLREFVFKNIDGYFKIYSKHTPINLVRDLPQGFSALEPLVDLPIGINITRFQTLLALHRSYLTPGDSSSGWTAGAAAYYVGYLQPRTFLLKYNENGTITDAVDCALDPLSETKCTLKSFTVEKGIYQTSNFRVQPTESIVRFPNITNLCPFGEVFNATRFASVYAWNRKRISNCVADYSVLYNSASFSTFKCYGVSPTKLNDLCFTNVYADSFVIRGDEVRQIAPGQTGKIADYNYKLPDDFTGCVIAWNSNNLDSKVGGNYNYLYRLFRKSNLKPFERDISTEIYQAGSTPCNGVEGFNCYFPLQSYGFQPTNGVGYQPYRVVVLSFELLHAPATVCGPKKSTNLVKNKCVNFNFNGLTGTGVLTESNKKFLPFQQFGRDIADTTDAVRDPQTLEILDITPCSFGGVSVITPGTNTSNQVAVLYQDVNCTEVPVAIHADQLTPTWRVYSTGSNVFQTRAGCLIGAEHVNNSYECDIPIGAGICASYQTQTNSPRRARSVASQSIIAYTMSLGAENSVAYSNNSIAIPTNFTISVTTEILPVSMTKTSVDCTMYICGDSTECSNLLLQYGSFCTQLNRALTGIAVEQDKNTQEVFAQVKQIYKTPPIKDFGGFNFSQILPDPSKPSKRSFIEDLLFNKVTLADAGFIKQYGDCLGDIAARDLICAQKFNGLTVLPPLLTDEMIAQYTSALLAGTITSGWTFGAGAALQIPFAMQMAYRFNGIGVTQNVLYENQKLIANQFNSAIGKIQDSLSSTASALGKLQDVVNQNAQALNTLVKQLSSNFGCISSVLNDILSRLDKVEAEVQIDCLITGRLQSLQTYVTQQLIRAAEIRASANLAATKMSECVLGQSKRVDFCGKGYHLMSFPQSAPHGVVFLHVTYVPAQEKNFTTAPAICHDGKAHFPREGVFVSNGTHWFVTQRNFYEPQIITTDNTFVSGNCDVVIGIVNNTVYDPLQPELDSFKEELDKYFKNHTSPDVDLGDISGINASVVNIQKEIDRLNEVAKNLNESLIDLQELGKYEQYIKGGGGSDIDPYKEFGSSYQLLNFLPLDFFPDLNALVDTATALYEEELTGREHCSPHHTAIRQALVCWDELTKLIAWMSSNITSEQVRTIIVNHVNDTWGLKVRQSLWFHLSCLTFGQHTVQEFLVSFGVWIRTPAPYRPPNAPILSTLPEHTVIC

SEQ ID NO: 7482 - protein, 1365 aa, Artificial Sequence
  SARS-CoV-2/SARS-CoV-2/Yunnan-01/human/2020/CHN__MT049951.1 spike protein (1-1211)(A972C_R995C) WhcAg construct
MFVFLVLLPLVSSQCVNLTTRTQLPPANTNSFTRGVYYPDKVFRSSVLHSTQDLFLPFFSNVTWFHAIHVSGTNGTKRFDNPVLPFNDGVYFASTEKSNIIRGWIFGTTLDSKTQSLLIVNNATNVVIKVCEFQFCNDPFLGVYYHKNNKSWMESEFRVYSSANNCTFEYVSQPFLMDLEGKQGNFKNLREFVFKNIDGYFKIYSKHTPINLVRDLPQGFSALEPLVDLPIGINITRFQTLLALHRSYLTPGDSSSGWTAGAAAYYVGYLQPRTFLLKYNENGTITDAVDCALDPLSETKCTLKSFTVEKGIYQTSNFRVQPTESIVRFPNITNLCPFGEVFNATRFASVYAWNRKRISNCVADYSVLYNSASFSTFKCYGVSPTKLNDLCFTNVYADSFVIRGDEVRQIAPGQTGKIADYNYKLPDDFTGCVIAWNSNNLDSKVGGNYNYLYRLFRKSNLKPFERDISTEIYQAGSTPCNGVEGFNCYFPLQSYGFQPTNGVGYQPYRVVVLSFELLHAPATVCGPKKSTNLVKNKCVNFNFNGLTGTGVLTESNKKFLPFQQFGRDIADTTDAVRDPQTLEILDITPCSFGGVSVITPGTNTSNQVAVLYQDVNCTEVPVAIHADQLTPTWRVYSTGSNVFQTRAGCLIGAEHVNNSYECDIPIGAGICASYQTQTNSPRRARSVASQSIIAYTMSLGAENSVAYSNNSIAIPTNFTISVTTEILPVSMTKTSVDCTMYICGDSTECSNLLLQYGSFCTQLNRALTGIAVEQDKNTQEVFAQVKQIYKTPPIKDFGGFNFSQILPDPSKPSKRSFIEDLLFNKVTLADAGFIKQYGDCLGDIAARDLICAQKFNGLTVLPPLLTDEMIAQYTSALLAGTITSGWTFGAGAALQIPFAMQMAYRFNGIGVTQNVLYENQKLIANQFNSAIGKIQDSLSSTASALGKLQDVVNQNAQALNTLVKQLSSNFGCISSVLNDILSRLDKVEAEVQIDCLITGRLQSLQTYVTQQLIRAAEIRASANLAATKMSECVLGQSKRVDFCGKGYHLMSFPQSAPHGVVFLHVTYVPAQEKNFTTAPAICHDGKAHFPREGVFVSNGTHWFVTQRNFYEPQIITTDNTFVSGNCDVVIGIVNNTVYDPLQPELDSFKEELDKYFKNHTSPDVDLGDISGINASVVNIQKEIDRLNEVAKNLNESLIDLQELGKYEQYIKGGGGSDIDPYKEFGSSYQLLNFLPLDFFPDLNALVDTATALYEEELTGREHCSPHHTAIRQALVCWDELTKLIAWMSSNITSEQVRTIIVNHVNDTWGLKVRQSLWFHLSCLTFGQHTVQEFLVSFGVWIRTPAPYRPPNAPILSTLPEHTVIC

SEQ ID NO: 7483 - protein, 1365 aa, Artificial Sequence
  SARS-CoV-2/USA/WA-UW292/2020__EPI_ISL_418077 spike protein (1-1211)(A972C_R995C) WhcAg construct
MFVFLVLLPLVSSQCVNLTTRTQLPPAYTNSFTRGVYYPDKVFRSSVLHSTQDLFLPFFSNVTWFHAIHVSGTNGTKRFDNPVLPFNDGVYFASTEKSNIIRGWIFGTTLDSKTQSLLIVNNATNVVIKVCEFQFCNDPFLGVYYHKNNKSWMESEFRVYSSANNCTFEYVSQPFLMDLEGKQGNFKNLREFVFKNIDGYFKIYSKHTPINLVRDLPQGFSALEPLVDLPIGINITRFQTLLALHRSYLTPGDSSSGWTAGAAAYYVGYLQPRTFLLKYNENGTITDAVDCALDPLSETKCTLKSFTVEKGIYQTSNFRVQPTESIVRFPNITNLCPFGEVFNATRFASVYAWNRKRISNCVADYSVLYNSASFSTFKCYGVSPTKLNDLCFTNVYADSFVIRGDEVRQIAPGQTGKIADYNYKLPDDFTGCVIAWNSNNLDSKVGGNYNYLYRLFRKSNLKPFERDISTEIYQASSTPCNGVEGFNCYFPLQSYGFQPTNGVGYQPYRVVVLSFELLHAPATVCGPKKSTNLVKNKCVNFNFNGLTGTGVLTESNKKFLPFQQFGRDIADTTDAVRDPQTLEILDITPCSFGGVSVITPGTNTSNQVAVLYQDVNCTEVPVAIHADQLTPTWRVYSTGSNVFQTRAGCLIGAEHVNNSYECDIPIGAGICASYQTQTNSPRRARSVASQSIIAYTMSLGAENSVAYSNNSIAIPTNFTISVTTEILPVSMTKTSVDCTMYICGDSTECSNLLLQYGSFCTQLNRALTGIAVEQDKNTQEVFAQVKQIYKTPPIKDFGGFNFSQILPDPSKPSKRSFIEDLLFNKVTLADAGFIKQYGDCLGDIAARDLICAQKFNGLTVLPPLLTDEMIAQYTSALLAGTITSGWTFGAGAALQIPFAMQMAYRFNGIGVTQNVLYENQKLIANQFNSAIGKIQDSLSSTASALGKLQDVVNQNAQALNTLVKQLSSNFGCISSVLNDILSRLDKVEAEVQIDCLITGRLQSLQTYVTQQLIRAAEIRASANLAATKMSECVLGQSKRVDFCGKGYHLMSFPQSAPHGVVFLHVTYVPAQEKNFTTAPAICHDGKAHFPREGVFVSNGTHWFVTQRNFYEPQIITTDNTFVSGNCDVVIGIVNNTVYDPLQPELDSFKEELDKYFKNHTSPDVDLGDISGINASVVNIQKEIDRLNEVAKNLNESLIDLQELGKYEQYIKGGGGSDIDPYKEFGSSYQLLNFLPLDFFPDLNALVDTATALYEEELTGREHCSPHHTAIRQALVCWDELTKLIAWMSSNITSEQVRTIIVNHVNDTWGLKVRQSLWFHLSCLTFGQHTVQEFLVSFGVWIRTPAPYRPPNAPILSTLPEHTVIC

SEQ ID NO: 7484 - protein, 1365 aa, Artificial Sequence
  SARS-CoV-2/Iceland/192/2020__EPI_ISL_417819 spike protein (1-1211)(A972C_R995C) WhcAg construct
MFVFFVLLPLVSSQCVNLTTRTQLPPAYTNSFTRGVYYPDKVFRSSVLHSTQDLFLPFFSNVTWFHAIHVSGTNGTKRFDNPVLPFNDGVYFASTEKSNIIRGWIFGTTLDSKTQSLLIVNNATNVVIKVCEFQFCNDPFLGVYYHKNNKSWMESEFRVYSSANNCTFEYVSQPFLMDLEGKQGNFKNLREFVFKNIDGYFKIYSKHTPINLVRDLPQGFSALEPLVDLPIGINITRFQTLLALHRSYLTPGDSSSGWTAGAAAYYVGYLQPRTFLLKYNENGTITDAVDCALDPLSETKCTLKSFTVEKGIYQTSNFRVQPTESIVRFPNITNLCPFGEVFNATRFASVYAWNRKRISNCVADYSVLYNSASFSTFKCYGVSPTKLNDLCFTNVYADSFVIRGDEVRQIAPGQTGKIADYNYKLPDDFTGCVIAWNSNNLDSKVGGNYNYLYRLFRKSNLKPFERDISTEIYQAGSTPCNGVEGFNCYFPLQSYGFQPTNGVGYQPYRVVVLSFELLHAPATVCGPKKSTNLVKNKCVNFNFNGLTGTGVLTESNKKFLPFQQFGRDIADTTDAVRDPQTLEILDITPCSFGGVSVITPGTNTSNQVAVLYQGVNCTEVPVAIHADQLTPTWRVYSTGSNVFQTRAGCLIGAEHVNNSYECDIPIGAGICASYQTQTNSPRRARSVASQSIIAYTMSLGAENSVAYSNNSIAIPTNFTISVTTEILPVSMTKTSVDCTMYICGDSTECSNLLLQYGSFCTQLNRALTGIAVEQDKNTQEVFAQVKQIYKTPPIKDFGGFNFSQILPDPSKPSKRSFIEDLLFNKVTLADAGFIKQYGDCLGDIAARDLICAQKFNGLTVLPPLLTDEMIAQYTSALLAGTITSGWTFGAGAALQIPFAMQMAYRFNGIGVTQNVLYENQKLIANQFNSAIGKIQDSLSSTASALGKLQDVVNQNAQALNTLVKQLSSNFGCISSVLNDILSRLDKVEAEVQIDCLITGRLQSLQTYVTQQLIRAAEIRASANLAATKMSECVLGQSKRVDFCGKGYHLMSFPQSAPHGVVFLHVTYVPAQEKNFTTAPAICHDGKAHFPREGVFVSNGTHWFVTQRNFYEPQIITTDNTFVSGNCDVVIGIVNNTVYDPLQPELDSFKEELDKYFKNHTSPDVDLGDISGINASVVNIQKEIDRLNEVAKNLNESLIDLQELGKYEQYIKGGGGSDIDPYKEFGSSYQLLNFLPLDFFPDLNALVDTATALYEEELTGREHCSPHHTAIRQALVCWDELTKLIAWMSSNITSEQVRTIIVNHVNDTWGLKVRQSLWFHLSCLTFGQHTVQEFLVSFGVWIRTPAPYRPPNAPILSTLPEHTVIC

SEQ ID NO: 7485 - protein, 1365 aa, Artificial Sequence
  SARS-CoV-2/Belgium/ULG-6939/2020__EPI_ISL_417020 spike protein (1-1211)(A972C_R995C) WhcAg construct
MFVFLVLLPLVSSQCVNLTTRTQLPPAYTNSFTRGVYYPDKVFRSSVLHSTQDLFLPFFSNVTWFHAIHVSGTNGTKRFDNPVLPFNDGVYFASTEKSNIIRGWIFGTTLDSKTQSLLIVNNATNVVIKVCEFQFCNDPFLGVYYHKNNKSWMESEFRVYSSANNCTFEYVSQPFLMDLEGKQGNFKNLREFVFKNIDGYFKIYSKHTPINLVRDLPQGFSALEPLVDLPIGINITRFQTLLALHRSYLTPGDSSSGWTAGAAAYYVGYLQPRTFLLKYNENGTITDAVDCALDPLSETKCTLKSFTVEKGIYQTSNFRVQPTESIVRFPNITNLCPFGEVFNATRFASVYAWNRKRISNCVADYSVLYNSASFSTFKCYGVSPTKLNDLCFTNVYADSFVIRGDEVRQIAPGQTGKIADYNYKLPDDFTGCVIAWNSNNLDSKVGGNYNYLYRLFRKSNLKPFERDISTEIYQAGSTPCNGVEGFNCYFPLQSYGFQPTNGVGYQPYRVVVLSFELLHAPATVCGPKKSTNLVKNKCVNFNFNGLTGTGVLTESNKKFLPFQQFGRDIADTTDAVRDPQTLEILDITPCSFGGVSVITPGTNTSNQVAVLYQGVNCTEVPVAIHADQLTPTWRVYSTGSNVFQTRAGCLIGAEHVNNSYECDIPIGAGICASYQTQTNSPRRARSVASQSIIAYTMSLGAENSVVYSNNSIAIPTNFTISVTTEILPVSMTKTSVDCTMYICGDSTECSNLLLQYGSFCTQLNRALTGIAVEQDKNTQEVFAQVKQIYKTPPIKDFGGFNFSQILPDPSKPSKRSFIEDLLFNKVTLADAGFIKQYGDCLGDIAARDLICAQKFNGLTVLPPLLTDEMIAQYTSALLAGTITSGWTFGAGAALQIPFAMQMAYRFNGIGVTQNVLYENQKLIANQFNSAIGKIQDSLSSTASALGKLQDVVNQNAQALNTLVKQLSSNFGCISSVLNDILSRLDKVEAEVQIDCLITGRLQSLQTYVTQQLIRAAEIRASANLAATKMSECVLGQSKRVDFCGKGYHLMSFPQSAPHGVVFLHVTYVPAQEKNFTTAPAICHDGKAHFPREGVFVSNGTHWFVTQRNFYEPQIITTDNTFVSGNCDVVIGIVNNTVYDPLQPELDSFKEELDKYFKNHTSPDVDLGDISGINASVVNIQKEIDRLNEVAKNLNESLIDLQELGKYEQYIKGGGGSDIDPYKEFGSSYQLLNFLPLDFFPDLNALVDTATALYEEELTGREHCSPHHTAIRQALVCWDELTKLIAWMSSNITSEQVRTIIVNHVNDTWGLKVRQSLWFHLSCLTFGQHTVQEFLVSFGVWIRTPAPYRPPNAPILSTLPEHTVIC

SEQ ID NO: 7486 - protein, 1365 aa, Artificial Sequence
  SARS-CoV-2/France/HF2496/2020__EPI_ISL_418231 spike protein (1-1211)(A972C_R995C) WhcAg construct
MFVFLVLLPLVSSQCVNLTTRTQLPPAYTNSFTRGVYYPDKVFRSSVLHSTQDLFLPFFSNVTWFHAIHVSGTNGTKRFDNPVLPFNDGVYFASTEKSNIIRGWIFGTTLDSKTQSLLIVNNATNVVIKVCEFQFCNDPFLGVYYHKNNKSWMESEFRVYSSANNCTFEYVSQPFLMDLEGKQGNFKNLREFVFKNIDGYFKIYSKHTPINLVRDLPQGFSALEPLVDLPIGINITRFQTLLALHRSYLTPGDSSSGWTAGAAAYYVGYLQPRTFLLKYNENGTITDAVDCALDPLSETKCTLKSFTVEKGIYQTSNFRVQPTESIVRFPNITNLCPFGEVFNATRFASVYAWNRKRISNCVADYSVLYNSASFSTFKCYGVSPTKLNDLCFTNVYADSFVIRGDEVRQIAPGQTGKIADYNYKLPDDFTGCVIAWNSNNLDSKVGGNYNYLYRLFRKSNLKPFERDISTEIYQAGSTPCNGVEGFNCYFPLQSYGFQPTNGVGYQPYRVVVLSFELLHAPATVCGPKKSTNLVKNKCVNFNFNGLTGTGVLTESNKKFLPFQQFGRDIADTTDAVRDPQTLEILDITPCSFGGVSVITPGTNTSNQVAVLYQGVNCTEVPVAIHADQLTPTWRVYSTGSNVFQTRAGCLIGAEHVNNSYECDIPIGAGICASYQTQTNSPRRARSVASQSIIAYTMSLGAENSVAYSNNSIAIPTNFTISVTTEILPVSMTKTSVDCTMYICGDSTECSNLLLQYGSFCTQLNRALTGIAVEQDKNTQEVFAQVKQIYKTPPIKDFGGFNFSQILPDPSKPSKRSFIEDLLFNKVTLADAGFIKQYGDCLGDIVARDLICAQKFNGLTVLPPLLTDEMIAQYTSALLAGTITSGWTFGAGAALQIPFAMQMAYRFNGIGVTQNVLYENQKLIANQFNSAIGKIQDSLSSTASALGKLQDVVNQNAQALNTLVKQLSSNFGCISSVLNDILSRLDKVEAEVQIDCLITGRLQSLQTYVTQQLIRAAEIRASANLAATKMSECVLGQSKRVDFCGKGYHLMSFPQSAPHGVVFLHVTYVPAQEKNFTTAPAICHDGKAHFPREGVFVSNGTHWFVTQRNFYEPQIITTDNTFVSGNCDVVIGIVNNTVYDPLQPELDSFKEELDKYFKNHTSPDVDLGDISGINASVVNIQKEIDRLNEVAKNLNESLIDLQELGKYEQYIKGGGGSDIDPYKEFGSSYQLLNFLPLDFFPDLNALVDTATALYEEELTGREHCSPHHTAIRQALVCWDELTKLIAWMSSNITSEQVRTIIVNHVNDTWGLKVRQSLWFHLSCLTFGQHTVQEFLVSFGVWIRTPAPYRPPNAPILSTLPEHTVIC

SEQ ID NO: 7487 - protein, 1365 aa, Artificial Sequence
  SARS-CoV-2/USA/WA-UW291/2020__EPI_ISL_418076 spike protein (1-1211)(A972C_R995C) WhcAg construct
MFVFLVLLPLVSSQCVNLTTRTQLPPAYTNSFTRGVYYPDKVFRSSVLHSTQDLFLPFFSNVTWFHAIHVSGTNGTKRFDNPVLPFNDGVYFASTEKSNIIRGWIFGTTLDSKTQSLLIVNNATNVVIKVCEFQFCNDPFLGVYYHKNNKSWMESEFRVYSSANNCTFEYVSQPFLMDLEGKQGNFKNLREFVFKNIDGYFKIYSKHTPINLVRDLPQGFSALEPLVDLPIGINITRFQTLLALHRSYLTPGDSSSGWTAGAAAYYVGYLQPRTFLLKYNENGTITDAVDCALDPLSETKCTLKSFTVEKGIYQTSNFRVQPTESIVRFPNITNLCPFGEVFNATRFASVYAWNRKRISNCVADYSVLYNSASFSTFKCYGVSPTKLNDLCFTNVYADSFVIRGDEVRQIAPGQTGKIADYNYKLPDDFTGCVIAWNSNNLDSKVGGNYNYLYRLFRKSNLKPFERDISTEIYQAGSTPCNGVEGFNCYFPLQSYGFQPTNGVGYQPYRVVVLSFELLHAPATVCGPKKSTNLVKNKCVNFNFNGLTGTGVLTESNKKFLPFQQFGRDIADTTDAVRDPQTLEILDITPCSFGGVSVITPGTNTSNQVAVLYQGVNCTEVPVAIHADQLTPTWRVYSTGSNVFQTRAGCLIGAEHVNNSYECDIPIGAGICASYQTQTNSPRRARSVASQSIIAYTMSLGAENSVAYSNNSIAIPTNFTISVTTEILPVSMTKTSVDCTMYICGDSTECSNLLLQYGSFCTQLNRALTGIAVEQDKNTQEVFAQVKQIYKTPPIKDFGGFNFSQILPDPSKPSKRSFIEDLLFNKVTLADAGFIKQYGDCLGDIAARDLICAQKFNGLTVLPPLLTDEMIAQYTSALLAGTITSGWTFGAGAALQIPFAMQMAYRFNGIGVTQNVLYENQKLIANQFNSAIGKIQYSLSSTASALGKLQDVVNQNAQALNTLVKQLSSNFGCISSVLNDILSRLDKVEAEVQIDCLITGRLQSLQTYVTQQLIRAAEIRASANLAATKMSECVLGQSKRVDFCGKGYHLMSFPQSAPHGVVFLHVTYVPAQEKNFTTAPAICHDGKAHFPREGVFVSNGTHWFVTQRNFYEPQIITTDNTFVSGNCDVVIGIVNNTVYDPLQPELDSFKEELDKYFKNHTSPDVDLGDISGINASVVNIQKEIDRLNEVAKNLNESLIDLQELGKYEQYIKGGGGSDIDPYKEFGSSYQLLNFLPLDFFPDLNALVDTATALYEEELTGREHCSPHHTAIRQALVCWDELTKLIAWMSSNITSEQVRTIIVNHVNDTWGLKVRQSLWFHLSCLTFGQHTVQEFLVSFGVWIRTPAPYRPPNAPILSTLPEHTVIC

SEQ ID NO: 7488 - protein, 1365 aa, Artificial Sequence; identical to SEQ ID NO: 7451
  SARS-CoV-2/Portugal/PT0034/2020__EPI_ISL_418019 spike protein (1-1211)(A972C_R995C) WhcAg construct

SEQ ID NO: 7489 - protein, 1365 aa, Artificial Sequence
  SARS-CoV-2/Iceland/202/2020__EPI_ISL_417750 spike protein (1-1211)(A972C_R995C) WhcAg construct
MFVFLVLLPLVSSQCVNLTTRTQLPPAYTNSFTRGVYYPDKVFRSSVLHSTQDLFLPFFSNVTWFHAIHVSGTNGTKRFDNPVLPFNDGVYFASTEKSNIIRGWIFGTTLDSKTQSLLIVNNATNVVIKVCEFQFCNDPFLGVYYHKNNKSWMESEFRVYSSANNCTFEYVSQPFLMDLEGKQGNFKNLREFVFKNIDGYFKIYSKHTPINLVRDLPQGFSALEPLVDLPIGINITRFQTLLALHRSYLTPGDSSSGWTAGAAAYYVGYLQPRTFLLKYNENGTITDAVDCALDPLSETKCTLKSFTVEKGIYQTSNFRVQPTESIVRFPNITNLCPFGEVFNATRFASVYAWNRKRISNCVADYSVLYNSASFSTFKCYGVSPTKLNDLCFTNVYADSFVIRGDEVRQIAPGQTGKIADYNYKLPDDFTGCVIAWNSNNLDSKVGGNYNYLYRLFRKSNLKPFERDISTEIYQAGSTPCNGVEGFNCYFPLQSYGFQPTNGVGYQPYRVVVLSFELLHAPATVCGPKKSTNLVKNKCVNFNFNGLTGTGVLTESNKKFLPFQQFGRDIADTTDAVRDPQTLEILDITPCSFGGVSVITPGTNTSNQVAVLYQDVNCTEVPVAIHADQLTPTWRVYSTGSNVFQTRAGCLIGAEHVNNSYECDIPIGAGICASYQTQTNSPRRARSVASQSIIAYTMSLGAENSVAYSNNSIAIPTNFTISVTTEILPVSMTKTSVDCTMYICGDSTECSNLLLQYGSFCTQLNRALTGIAVEQDKNTQEVFAQVKQIYKTPPIKDFGGFNFSQILPDPSKPSKRSFIEDLLFNKVTLADAGFIKQYGDCLGDIAARDLICAQKFNGLTVLPPLLTDEMIAQYTSALLAGTITSGWTFGAGAALQIPFAMQMAYRFNGIGVTQNVLYENQKLIANQFNSAIGKIQDSLSSTASALGKLQDVVNQNAQALNTLVKQLSSNFGCISSVLNDILSRLDKVEAEVQIDCLITGRLQSLQTYVTQQLIRAAEIRASANLAATKMSECVLGQSKRVDFCGKGYHLMSFPQSAPHGVVFLHVTYVPAQEKNFTTAPAICHDGKAHFPREGVFVSNGTHWFVTQRNFYEPQIITTDNTFVSGNCDVVIGIVNNTVYDPLQPELDSFKEELDKYFKNHTSPDVDLGDIPGINASVVNIQKEIDRLNEVAKNLNESLIDLQELGKYEQYIKGGGGSDIDPYKEFGSSYQLLNFLPLDFFPDLNALVDTATALYEEELTGREHCSPHHTAIRQALVCWDELTKLIAWMSSNITSEQVRTIIVNHVNDTWGLKVRQSLWFHLSCLTFGQHTVQEFLVSFGVWIRTPAPYRPPNAPILSTLPEHTVIC

SEQ ID NO: 7490 - protein, 1365 aa, Artificial Sequence
  SARS-CoV-2/USA/WA-UW261/2020__EPI_ISL_418046 spike protein (1-1211)(A972C_R995C) WhcAg construct
MFVFLVLLPLVSSQCVNLTTRTQLPPAYTNSFTRGVYYPDKVFRSSVLHSTQDLFLPFFSNVTWFHAIHVSGTNGTKRFDNPVLPFNDGVYFASTEKSNIIRGWIFGTTLDSKTQSLLIVNNATNVVIKVCEFQFCNDPFLGVYYHKNNKSWMESEFRVYSSANNCTFEYVSQPFLMDLEGKQGNFKNLREFVFKNIDGYFKIYSKHTPINLVRDLPQGFSALEPLVDLPIGINITRFQTLLALHRSYLTPGDSSSGWTAGAAAYYVGYLQPRTFLLKYNENGTITDAVDCALDPLSETKCTLKSFTVEKGIYQTSNFRVQPTESIVRFPNITNLCPFGEVFNATRFTSVYAWNRKRISNCVADYSVLYNSASFSTFKCYGVSPTKLNDLCFTNVYADSFVIRGDEVRQIAPGQTGKIADYNYKLPDDFTGCVIAWNSNNLDSKVGGNYNYLYRLFRKSNLKPFERDISTEIYQAGSTPCNGVEGFNCYFPLQSYGFQPTNGVGYQPYRVVVLSFELLHAPATVCGPKKSTNLVKNKCVNFNFNGLTGTGVLTESNKKFLPFQQFGRDIADTTDAVRDPQTLEILDITPCSFGGVSVITPGTNTSNQVAVLYQDVNCTEVPVAIHADQLTPTWRVYSTGSNVFQTRAGCLIGAEHVNNSYECDIPIGAGICASYQTQTNSPRRARSVASQSIIAYTMSLGAENSVAYSNNSIAIPTNFTISVTTEILPVSMTKTSVDCTMYICGDSTECSNLLLQYGSFCTQLNRALTGIAVEQDKNTQEVFAQVKQIYKTPPIKDFGGFNFSQILPDPSKPSKRSFIEDLLFNKVTLADAGFIKQYGDCLGDIAARDLICAQKFNGLTVLPPLLTDEMIAQYTSALLAGTITSGWTFGAGAALQIPFAMQMAYRFNGIGVTQNVLYENQKLIANQFNSAIGKIQDSLSSTASALGKLQDVVNQNAQALNTLVKQLSSNFGCISSVLNDILSRLDKVEAEVQIDCLITGRLQSLQTYVTQQLIRAAEIRASANLAATKMSECVLGQSKRVDFCGKGYHLMSFPQSAPHGVVFLHVTYVPAQEKNFTTAPAICHDGKAHFPREGVFVSNGTHWFVTQRNFYEPQIITTDNTFVSGNCDVVIGIVNNTVYDPLQPELDSFKEELDKYFKNHTSPDVDLGDISGINASVVNIQKEIDRLNEVAKNLNESLIDLQELGKYEQYIKGGGGSDIDPYKEFGSSYQLLNFLPLDFFPDLNALVDTATALYEEELTGREHCSPHHTAIRQALVCWDELTKLIAWMSSNITSEQVRTIIVNHVNDTWGLKVRQSLWFHLSCLTFGQHTVQEFLVSFGVWIRTPAPYRPPNAPILSTLPEHTVIC

SEQ ID NO: 7491 - protein, 1365 aa, Artificial Sequence
  SARS-CoV-2/Portugal/PT0035/2020__EPI_ISL_418020 spike protein (1-1211)(A972C_R995C) WhcAg construct
MFVFLVLLPLVSSQCVNLTTRTQLPPAYTNSFTRGVYYPDKVFRSSVLHSTQDLFLPFFSNVTWFHAIHVSGTNGTKRFDNPVLPFNDGVYFASTEKSNIIRGWIFGTTLDSKTQSLLIVNNATNVVIKVCEFQFCNDPFLGVYYHKNNKSWMESEFRVYSSANNCTFEYVSQPFLMDLEGKQGNFKNLREFVFKNIDGYFKIYSKHTPINLVRDLPQGFSALEPLVDLPIGINITRFQTLLALHRSYLTPGDSSSGWTAGAAAYYVGYLQPRTFLLKYNENGTITDAVDCALDPLSETKCTLKSFTVEKGIYQTSNFRVQPTESIVRFPNITNLCPFGEVFNATRFASVYAWNRKRISNCVADYSVLYNSASFSTFKCYGVSPTKLNDLCFTNVYADSFVIRGDEVRQIAPGQTGKIADYNYKLPDDFTGCVIAWNSNNLDSKVGGNYNYLYRLFRKSNLKPFERDISTEIYQAGSTPCNGVEGFNCYFPLQSYGFQPTNGVGYQPYRVVVLSFELLHAPATVCGPKKSTNLVKNKCVNFNFNGLTGTGVLTESNKKFLPFQQFGRDIADTTDAVRDPQTLEILDITPCSFGGVSVITPGTNTSNQVAVLYQDVNCTEVPVAIHADQLTPTWRVYSTGSNVFQTRAGCLIGAEHVNNSYECDIPIGAGICASYQTQTNSPRRARSVASQSIIAYTMSLGAENSVAYSNNSIAIPTNFTISVTTEILPVSMTKTSVDCTMYICGDSTECSNLLLQYGSFCTQLNRALTGIAVEQDKNTQEVFAQVKQIYKTPPIKDFGGFNFSQILPDPSKPSKRSFIEDLLFNKVTLADAGFIKQYGDCLGDISARDLICAQKFNGLTVLPPLLTDEMIAQYTSALLAGTITSGWTFGAGAALQIPFAMQMAYRFNGIGVTQNVLYENQKLIANQFNSAIGKIQDSLSSTASALGKLQDVVNQNAQALNTLVKQLSSNFGCISSVLNDILSRLDKVEAEVQIDCLITGRLQSLQTYVTQQLIRAAEIRASANLAATKMSECVLGQSKRVDFCGKGYHLMSFPQSAPHGVVFLHVTYVPAQEKNFTTAPAICHDGKAHFPREGVFVSNGTHWFVTQRNFYEPQIITTDNTFVSGNCDVVIGIVNNTVYDPLQPELDSFKEELDKYFKNHTSPDVDLGDISGINASVVNIQKEIDRLNEVAKNLNESLIDLQELGKYEQYIKGGGGSDIDPYKEFGSSYQLLNFLPLDFFPDLNALVDTATALYEEELTGREHCSPHHTAIRQALVCWDELTKLIAWMSSNITSEQVRTIIVNHVNDTWGLKVRQSLWFHLSCLTFGQHTVQEFLVSFGVWIRTPAPYRPPNAPILSTLPEHTVIC

SEQ ID NO: 7492 - protein, 1365 aa, Artificial Sequence
  SARS-CoV-2/USA/NY-NYUMC7/2020__EPI_ISL_418192 spike protein (1-1211)(A972C_R995C) WhcAg construct
MFVFLVLLPLVSSQCVNLTTRTQLPPAYTNSFTRGVYYPDKVFRSSVLHSTQDLFLPFFSNVTWFHAIHVSGTNGTKRFDNPVLPFNDGVYFASTEKSNIIRGWIFGTTLDSKTQSLLIVNNATNVVIKVCEFQFCNDPFLGVYHHKNNKSWMESEFRVYSSANNCTFEYVSQPFLMDLEGKQGNFKNLREFVFKNIDGYFKIYSKHTPINLVRDLPQGFSALEPLVDLPIGINITRFQTLLALHRSYLTPGDSSSGWTAGAAAYYVGYLQPRTFLLKYNENGTITDAVDCALDPLSETKCTLKSFTVEKGIYQTSNFRVQPTESIVRFPNITNLCPFGEVFNATRFASVYAWNRKRISNCVADYSVLYNSASFSTFKCYGVSPTKLNDLCFTNVYADSFVIRGDEVRQIAPGQTGKIADYNYKLPDDFTGCVIAWNSNNLDSKVGGNYNYLYRLFRKSNLKPFERDISTEIYQAGSTPCNGVEGFNCYFPLQSYGFQPTNGVGYQPYRVVVLSFELLHAPATVCGPKKSTNLVKNKCVNFNFNGLTGTGVLTESNKKFLPFQQFGRDIADTTDAVRDPQTLEILDITPCSFGGVSVITPGTNTSNQVAVLYQGVNCTEVPVAIHADQLTPTWRVYSTGSNVFQTRAGCLIGAEHVNNSYECDIPIGAGICASYQTQTNSPRRARSVASQSIIAYTMSLGAENSVAYSNNSIAIPTNFTISVTTEILPVSMTKTSVDCTMYICGDSTECSNLLLQYGSFCTQLNRALTGIAVEQDKNTQEVFAQVKQIYKTPPIKDFGGFNFSQILPDPSKPSKRSFIEDLLFNKVTLADAGFIKQYGDCLGDIAARDLICAQKFNGLTVLPPLLTDEMIAQYTSALLAGTITSGWTFGAGAALQIPFAMQMAYRFNGIGVTQNVLYENQKLIANQFNSAIGKIQDSLSSTASALGKLQDVVNQNAQALNTLVKQLSSNFGCISSVLNDILSRLDKVEAEVQIDCLITGRLQSLQTYVTQQLIRAAEIRASANLAATKMSECVLGQSKRVDFCGKGYHLMSFPQSAPHGVVFLHVTYVPAQEKNFTTAPAICHDGKAHFPREGVFVSNGTHWFVTQRNFYEPQIITTDNTFVSGNCDVVIGIVNNTVYDPLQPELDSFKEELDKYFKNHTSPDVDLGDISGINASVVNIQKEIDRLNEVAKNLNESLIDLQELGKYEQYIKGGGGSDIDPYKEFGSSYQLLNFLPLDFFPDLNALVDTATALYEEELTGREHCSPHHTAIRQALVCWDELTKLIAWMSSNITSEQVRTIIVNHVNDTWGLKVRQSLWFHLSCLTFGQHTVQEFLVSFGVWIRTPAPYRPPNAPILSTLPEHTVIC

SEQ ID NO: 7493 - protein, 1365 aa, Artificial Sequence
  SARS-CoV-2/Iceland/189/2020__EPI_ISL_417709 spike protein (1-1211)(A972C_R995C) WhcAg construct
MFVFLVLLPLVSSQCVNLTTRTQLPPAYTNSFTRGVYYPDKVFRSSVLHSTQDLFLPFFSNVTWFHAIHVSGTNGTKRFDNPVLPFNDGVYFASTEKSNIIRGWIFGTTLDSKTQSLLIVNNATNVVIKVCEFQFCNDPFLGVYYHKNNKSWMESEFRVYSSANNCTFEYVSQPFLMDLEGKQGNFKNLREFVFKNIDGYFKIYSKHTPINLVRDLPQGFSALEPLVDLPIGINITRFQTLLALHRSYLTPGDSSSGWTAGAAAYYVGYLQPRTFLLKYNENGTITDAVDCALDPLSETKCTLKSFTVEKGIYQTSNFRVQPTESIVRFPNITNLCPFGEVFNATRFASVYAWNRKRISNCVADYSVLYNSASFSTFKCYGVSPTKLNDLCFTNVYADSFVIRGDEVRQIAPGQTGKIADYNYKLPDDFTGCVIAWNSNNLDSKVGGNYNYLYRLFRKSNLKPFERDISTEIYQAGSTPCNGVEGFNCYFPLQSYGFQPTNGVGYQPYRVVVLSFELLHAPATVCGPKKSTNLVKNKCVNFNFNGLTGTGVLTESNKKFLPFQQFGRDIADTTDAVRDPQTLEILDITPCSFGGVSVITPGTNTSNQVAVLYQGVNCTEVPVAIHADQLTPTWRVYSTGSNVFQTRAGCLIGAEHVNNSYECDIPIGAGICASYQTQTNSPRRARSVASQSIIAYTMSLGAENSVAYSNNSIAIPTNFTISVTTEILPVSMTKTSVDCTMYICGDSTECSNLLLQYGSFCTQLNRALTGIAVEQDKNTQEVFAQVKQIYKTPPIKDFGGFNFSQILPDPSKPSKRSFIEDLLFNKVTLADAGFTKQYGDCLGDIAARDLICAQKFNGLTVLPPLLTDEMIAQYTSALLAGTITSGWTFGAGAALQIPFAMQMAYRFNGIGVTQNVLYENQKLIANQFNSAIGKIQDSLSSTASALGKLQDVVNQNAQALNTLVKQLSSNFGCISSVLNDILSRLDKVEAEVQIDCLITGRLQSLQTYVTQQLIRAAEIRASANLAATKMSECVLGQSKRVDFCGKGYHLMSFPQSAPHGVVFLHVTYVPAQEKNFTTAPAICHDGKAHFPREGVFVSNGTHWFVTQRNFYEPQIITTDNTFVSGNCDVVIGIVNNTVYDPLQPELDSFKEELDKYFKNHTSPDVDLGDISGINASVVNIQKEIDRLNEVAKNLNESLIDLQELGKYEQYIKGGGGSDIDPYKEFGSSYQLLNFLPLDFFPDLNALVDTATALYEEELTGREHCSPHHTAIRQALVCWDELTKLIAWMSSNITSEQVRTIIVNHVNDTWGLKVRQSLWFHLSCLTFGQHTVQEFLVSFGVWIRTPAPYRPPNAPILSTLPEHTVIC

SEQ ID NO: 7494 - protein, 1365 aa, Artificial Sequence
  SARS-CoV-2/Australia/NSW56/2020__EPI_ISL_417408 spike protein (1-1211)(A972C_R995C) WhcAg construct
MFVFLVLLPLVSSQCVNLTTRTQLPPAYTNSFTRGVYYPDKVFRSSVLHSTQDLFLPFFSNVTWFHAIHVSGTNGTKRFDNPVLPFNDGVYFASTEKSNIIRGWIFGTTLDSKTQSLLIVNNATNVVIKVCEFQFCNDPFLGVYYHKNNKSWMESEFRVYSSANNCTFEYVSQPFLMDLEGKQGNFKNLREFVFKNIDGYFKIYSKHTPINLVRDLPQGFSALEPLVDLPIGINITRFQTLLALHRSYLTPGDSSSGWTAGAAAYYVGYLQPRTFLLKYNENGTITDAVDCALDPLSETKCTLKSFTVEKGIYQTSNFRVQPTESIVRFPNITNLCPFGEVFNATRFASVYAWNRKRISNCVADYSVLYNSASFSTFKCYGVSPTKLNDLCFTNVYADSFVIRGDEVRQIAPGQTGKIADYNYKLPDDFTGCVIAWNSNNLDSKVGGNYNYLYRLFRKSNLKPFERDISTEIYQAGSTPCNGVEGFNCYFPLQSYGFQPTNGVGYQPYRVVVLSFELLHAPATVCGPKKSTNLVKNKCVNFNFNGLTGTGVLTESNKKFLPFQQFGRDIADTTDAVRDPQTLEILDITPCSFGGVSVITPGTNTSNQVAVLYQDVNCTEVPVAIHADQLTPTWRVYSTGSNVFQTRAGCLIGAEHVNNSYECDIPIGAGICASYQTQTNSPRRARSVASQSIIAYTMSLGAENSVAYSNNSIAIPTNFTISVTTEILPVSMTKTSVDCTMYICGDSTECSNLLLQYGSFCTQLNRALTGIAVEQDKNTQEVFAQVKQIYKTPPIKDFGGFNFSQILPDSSKPSKRSFIEDLLFNKVTLADAGFIKQYGDCLGDIAARDLICAQKFNGLTVLPPLLTDEMIAQYTSALLAGTITSGWTFGAGAALQIPFAMQMAYRFNGIGVTQNVLYENQKLIANQFNSAIGKIQDSLSSTASALGKLQDVVNQNAQALNTLVKQLSSNFGCISSVLNDILSRLDKVEAEVQIDCLITGRLQSLQTYVTQQLIRAAEIRASANLAATKMSECVLGQSKRVDFCGKGYHLMSFPQSAPHGVVFLHVTYVPAQEKNFTTAPAICHDGKAHFPREGVFVSNGTHWFVTQRNFYEPQIITTDNTFVSGNCDVVIGIVNNTVYDPLQPELDSFKEELDKYFKNHTSPDVDLGDISGINASVVNIQKEIDRLNEVAKNLNESLIDLQELGKYEQYIKGGGGSDIDPYKEFGSSYQLLNFLPLDFFPDLNALVDTATALYEEELTGREHCSPHHTAIRQALVCWDELTKLIAWMSSNITSEQVRTIIVNHVNDTWGLKVRQSLWFHLSCLTFGQHTVQEFLVSFGVWIRTPAPYRPPNAPILSTLPEHTVIC

SEQ ID NO: 7495 - protein, 1365 aa, Artificial Sequence
  SARS-CoV-2/Iceland/280/2020__EPI_ISL_417608 spike protein (1-1211)(A972C_R995C) WhcAg construct
MFVFLVLLPLVSSQCVNLTTRTQLPPAYTNSFTRGVYYPDKVFRSSVLHSTQDLFLPFFSNVTWFHAIHVSGTNGTKRFDNPVLPFNDGVYFASTEKSNIIRGWIFGTTLDSKTQSLLIVNNATNVVIKVCEFQFCNDPFLGVYYHKNNKSWMESEFRVYSSANNCTFEYVSQPFLMDLEGKQGNFKNLREFVFKNIDGYFKIYSKHTPINLVRDLPQGFSALEPLVDLPIGINITRFQTLLALHRSYLTPGDSSSGWTAGAAAYYVGYLQPRTFLLKYNENGTITDAVDCALDPLSETKCTLKSFTVEKGIYQTSNFRVQPTESIVRFPNITNLCPFGEVFNATRFASVYAWNRKRISNCVADYSVLYNSASFSTFKCYGVSPTKLNDLCFTNVYADSFVIRGDEVRQIAPGQTGKIADYNYKLPDDFTGCVIAWNSNNLDSKVGGNYNYLYRLFRKSNLKPFERDISTEIYQAGSTPCNGVEGFNCYFPLQSYGFQPTNGVGYQPYRVVVLSFELLHAPATVCGPKKSTNLVKNKCVNFNFNGLTGTGVLTESNKKFLPFQQFGRDIADTTDAVRDPQTLEILDITPCSFGGVSVITPGTNTSNQVAVLYQGVNCTEVPVAIHADQLTPTWRVYSTGSNVFQTRAGCLIGAEHVNNSYECDIPIGAGICASYHTQTNSPRRARSVASQSIIAYTMSLGAENSVAYSNNSIAIPTNFTISVTTEILPVSMTKTSVDCTMYICGDSTECSNLLLQYGSFCTQLNRALTGIAVEQDKNTQEVFAQVKQIYKTPPIKDFGGFNFSQILPDPSKPSKRSFIEDLLFNKVTLADAGFIKQYGDCLGDIAARDLICAQKFNGLTVLPPLLTDEMIAQYTSALLAGTITSGWTFGAGAALQIPFAMQMAYRFNGIGVTQNVLYENQKLIANQFNSAIGKIQDSLSSTASALGKLQDVVNQNAQALNTLVKQLSSNFGCISSVLNDILSRLDKVEAEVQIDCLITGRLQSLQTYVTQQLIRAAEIRASANLAATKMSECVLGQSKRVDFCGKGYHLMSFPQSAPHGVVFLHVTYVPAQEKNFTTAPAICHDGKAHFPREGVFVSNGTHWFVTQRNFYEPQIITTDNTFVSGNCDVVIGIVNNTVYDPLQPELDSFKEELDKYFKNHTSPDVDLGDISGINASVVNIQKEIDRLNEVAKNLNESLIDLQELGKYEQYIKGGGGSDIDPYKEFGSSYQLLNFLPLDFFPDLNALVDTATALYEEELTGREHCSPHHTAIRQALVCWDELTKLIAWMSSNITSEQVRTIIVNHVNDTWGLKVRQSLWFHLSCLTFGQHTVQEFLVSFGVWIRTPAPYRPPNAPILSTLPEHTVIC

SEQ ID NO: 7496 - protein, 1365 aa, Artificial Sequence; identical to SEQ ID NO: 7451
  SARS-CoV-2/Iceland/247/2020__EPI_ISL_417575 spike protein (1-1211)(A972C_R995C) WhcAg construct

SEQ ID NO: 7497 - protein, 1365 aa, Artificial Sequence
  SARS-CoV-2/Iceland/238/2020__EPI_ISL_417566 spike protein (1-1211)(A972C_R995C) WhcAg construct
MFVFLVLLPLVSSQCVNLTTRTQLPPAYTNSFTRGVYYPDKVFRSSVLHSTQDLFLPFFSNVTWFHAIHVSGTNGTKRFDNPVLPFNDGVYFASTEKSNIIRGWIFGTTLDSKTQSLLIVNNATNVVIKVCEFQFCNDPFLGVYYHKNNKSWMESEFRVYSSANNCTFEYVSQPFLMDLEGKQGNFKNLREFVFKNIDGYFKIYSKHTPINLVRDLPQGFSALEPLVDLPIGINITRFQTLLALHRSYLTPGDSSSGWTAGAAAYYVGYLQPRTFLLKYNENGTITDAVDCALDPLSETKCTLKSFTVEKGIYQTSNFRVQPTESIVRFPNITNLCPFGEVFNATRFASVYAWNRKRISNCVADYSVLYNSASFSTFKCYGVSPTKLNDLCFTNVYADSFVIRGDEVRQIAPGQTGKIADYNYKLPDDFTGCVIAWNSNNLDSKVGGNYNYLYRLFRKSNLKPFERDISTEIYQAGSTPCNGVEGFNCYFPLQSYGFQPTNGVGYQPYRVVVLSFELLHAPATVCGPKKSTNLVKNKCVNFNFNGLTGTGVLTESNKKFLPFQQFGRDIADTTDAVRDPQTLEILDITPCSFGGVSVITPGTNTSNQVAVLYQGVNCTEVPVAIHADQLTPTWRVYSTGSNVFQTRAGCLIGAEHVNNSYECDIPIGAGICASYQTQTNSPRRARSVASQSIIAYTMSLGAENSVAYSNNSIAIPTNFTISVTTEILPVSMTKTSVDCTMYICGDSTECSNLLLQYGSFCTQLNRALTGIAVEQDKNTQEVFAQVKQIYKTPPIKDFGGFNFSQILPDPSKPSKRSFIEDLLFNKVTLADVGFIKQYGDCLGDIAARDLICAQKFNGLTVLPPLLTDEMIAQYTSALLAGTITSGWTFGAGAALQIPFAMQMAYRFNGIGVTQNVLYENQKLIANQFNSAIGKIQDSLSSTASALGKLQDVVNQNAQALNTLVKQLSSNFGCISSVLNDILSRLDKVEAEVQIDCLITGRLQSLQTYVTQQLIRAAEIRASANLAATKMSECVLGQSKRVDFCGKGYHLMSFPQSAPHGVVFLHVTYVPAQEKNFTTAPAICHDGKAHFPREGVFVSNGTHWFVTQRNFYEPQIITTDNTFVSGNCDVVIGIVNNTVYDPLQPELDSFKEELDKYFKNHTSPDVDLGDISGINASVVNIQKEIDRLNEVAKNLNESLIDLQELGKYEQYIKGGGGSDIDPYKEFGSSYQLLNFLPLDFFPDLNALVDTATALYEEELTGREHCSPHHTAIRQALVCWDELTKLIAWMSSNITSEQVRTIIVNHVNDTWGLKVRQSLWFHLSCLTFGQHTVQEFLVSFGVWIRTPAPYRPPNAPILSTLPEHTVIC

SEQ ID NO: 7498 - protein, 1365 aa, Artificial Sequence
  SARS-CoV-2/Greece/16/2020__EPI_ISL_418265 spike protein (1-1211)(A972C_R995C) WhcAg construct
MFVFLVLLPLVSSQCVNLTTRTQLPPAYTNSFTRGVYYPDKVFRSSVLHSTQDLFLPFFSNVTWFHAIHVSGTNGTKRFDNPVLPFNDGVYFASTEKSNIIRGWIFGTTLDSKTQSLLIVNNATNVVIKVCEFQFCNDPFLGVYYHKNNKSWMESEFRVYSSANNCTFEYVSQPFLMDLEGKQGNFKNLREFVFKNVDGYFKIYSKHTPINLVRDLPQGFSALEPLVDLPIGINITRFQTLLALHRSYLTPGDSSSGWTAGAAAYYVGYLQPRTFLLKYNENGTITDAVDCALDPLSETKCTLKSFTVEKGIYQTSNFRVQPTESIVRFPNITNLCPFGEVFNATRFASVYAWNRKRISNCVADYSVLYNSASFSTFKCYGVSPTKLNDLCFTNVYADSFVIRGDEVRQIAPGQTGKIADYNYKLPDDFTGCVIAWNSNNLDSKVGGNYNYLYRLFRKSNLKPFERDISTEIYQAGSTPCNGVEGFNCYFPLQSYGFQPTNGVGYQPYRVVVLSFELLHAPATVCGPKKSTNLVKNKCVNFNFNGLTGTGVLTESNKKFLPFQQFGRDIADTTDAVRDPQTLEILDITPCSFGGVSVITPGTNTSNQVAVLYQDVNCTEVPVAIHADQLTPTWRVYSTGSNVFQTRAGCLIGAEHVNNSYECDIPIGAGICASYQTQTNSPRRARSVASQSIIAYTMSLGAENSVAYSNNSIAIPTNFTISVTTEILPVSMTKTSVDCTMYICGDSTECSNLLLQYGSFCTQLNRALTGIAVEQDKNTQEVFAQVKQIYKTPPIKDFGGFNFSQILPDPSKPSKRSFIEDLLFNKVTLADAGFIKQYGDCLGDIAARDLICAQKFNGLTVLPPLLTDEMIAQYTSALLAGTITSGWTFGAGAALQIPFAMQMAYRFNGIGVTQNVLYENQKLIANQFNSAIGKIQDSLSSTASALGKLQDVVNQNAQALNTLVKQLSSNFGCISSVLNDILSRLDKVEAEVQIDCLITGRLQSLQTYVTQQLIRAAEIRASANLAATKMSECVLGQSKRVDFCGKGYHLMSFPQSAPHGVVFLHVTYVPAQEKNFTTAPAICHDGKAHFPREGVFVSNGTHWFVTQRNFYEPQIITTDNTFVSGNCDVVIGIVNNTVYDPLQPELDSFKEELDKYFKNHTSPDVDLGDISGINASVVNIQKEIDRLNEVAKNLNESLIDLQELGKYEQYIKGGGGSDIDPYKEFGSSYQLLNFLPLDFFPDLNALVDTATALYEEELTGREHCSPHHTAIRQALVCWDELTKLIAWMSSNITSEQVRTIIVNHVNDTWGLKVRQSLWFHLSCLTFGQHTVQEFLVSFGVWIRTPAPYRPPNAPILSTLPEHTVIC

SEQ ID NO: 7499 - protein, 1365 aa, Artificial Sequence
  SARS-CoV-2/Iceland/319/2020__EPI_ISL_417648 spike protein (1-1211)(A972C_R995C) WhcAg construct
MFVFLVLLPLVSSQCVNLTTRTQLPPAYTNSFTRGVYYPDKVFRSSVLHSTQDLFLPFFSNVTWFHAIHVSGTNGTKRFDNPVLPFNDGVYFASTEKSNIIRGWIFGTTLDSKTQSLLIVNNATNVVIKVCEFQFCNDPFLGVYYHKNNKSWMESEFRVYSSANNCTFEYVSQPFLIDLEGKQGNFKNLREFVFKNIDGYFKIYSKHTPINLVRDLPQGFSALEPLVDLPIGINITRFQTLLALHRSYLTPGDSSSGWTAGAAAYYVGYLQPRTFLLKYNENGTITDAVDCALDPLSETKCTLKSFTVEKGIYQTSNFRVQPTESIVRFPNITNLCPFGEVFNATRFASVYAWNRKRISNCVADYSVLYNSASFSTFKCYGVSPTKLNDLCFTNVYADSFVIRGDEVRQIAPGQTGKIADYNYKLPDDFTGCVIAWNSNNLDSKVGGNYNYLYRLFRKSNLKPFERDISTEIYQAGSTPCNGVEGFNCYFPLQSYGFQPTNGVGYQPYRVVVLSFELLHAPATVCGPKKSTNLVKNKCVNFNFNGLTGTGVLTESNKKFLPFQQFGRDIADTTDAVRDPQTLEILDITPCSFGGVSVITPGTNTSNQVAVLYQGVNCTEVPVAIHADQLTPTWRVYSTGSNVFQTRAGCLIGAEHVNNSYECDIPIGAGICASYQTQTNSPRRARSVASQSIIAYTMSLGAENSVAYSNNSIAIPTNFTISVTTEILPVSMTKTSVDCTMYICGDSTECSNLLLQYGSFCTQLNRALTGIAVEQDKNTQEVFAQVKQIYKTPPIKDFGGFNFSQILPDPSKPSKRSFIEDLLFNKVTLADAGFIKQYGDCLGDIAARDLICAQKFNGLTVLPPLLTDEMIAQYTSALLAGTITSGWTFGAGAALQIPFAMQMAYRFNGIGVTQNVLYENQKLIANQFNSAIGKIQDSLSSTASALGKLQDVVNQNAQALNTLVKQLSSNFGCISSVLNDILSRLDKVEAEVQIDCLITGRLQSLQTYVTQQLIRAAEIRASANLAATKMSECVLGQSKRVDFCGKGYHLMSFPQSAPHGVVFLHVTYVPAQEKNFTTAPAICHDGKAHFPREGVFVSNGTHWFVTQRNFYEPQIITTDNTFVSGNCDVVIGIVNNTVYDPLQPELDSFKEELDKYFKNHTSPDVDLGDISGINASVVNIQKEIDRLNEVAKNLNESLIDLQELGKYEQYIKGGGGSDIDPYKEFGSSYQLLNFLPLDFFPDLNALVDTATALYEEELTGREHCSPHHTAIRQALVCWDELTKLIAWMSSNITSEQVRTIIVNHVNDTWGLKVRQSLWFHLSCLTFGQHTVQEFLVSFGVWIRTPAPYRPPNAPILSTLPEHTVIC

SEQ ID NO: 7500 - protein, 1365 aa, Artificial Sequence
  SARS-CoV-2/Congo/94/2020__EPI_ISL_417947 spike protein (1-1211)(A972C_R995C) WhcAg construct
MFVFLVLLPLVSSQCVNLTTRTQLPPAYTNSFTRGVYYPDKVFRSSVLHSTQDLFLPFFSNVTWFHAIHVSGTNGTKRFDNPVLPFNDGVYFASTEKSNIIRGWIFGTTLDSKTQSLLIVNNATNVVIKVCEFQFCNDPFLGVYYHKNNKSWMESEFRVYSSANNCTFEYVSQPFLMDLEGKQGNFKNLREFVFKNIDGYFKIYSKHTPINLVRDLPQGFSALEPLVDLPIGINITRFQTLLALHRSYLTPGDSSSGWTAGAAAYYVGYLQPRTFLLKYNENGTITDAVDCALDPLSETKCTLKSFTVEKGIYQTSNFRVQPTESIVRFPNITNLCPFGEVFNATRFASVYAWNRKRISNCVADYSVLYNSASFSTFKCYGVSPTKLNDLCFTNVYADSFVIRGDEVRQIAPGQTGKIADYNYKLPDDFTGCVIAWNSNNLDSKVGGNYNYLYRLFRKSNLKPFERDISTEIYQAGSTPCNGVEGFNCYFPLQSYGFQPTNGVGYQPYRVVVLSFELLHAPATVCGPKKSTNLVKNKCVNFNFNGLTGTGVLTESNKKFLPFQQFGRDIADTTDAVRDPQTLEILDITPCSFGGVSVITPGTNTSNQVAVLYQGVNCTEVPVAIHADQLTPTWRVYSTGSNVFQTRAGCLIGAEHVNNSYECDIPIGAGICASYQTQTNSPRRARSVASQSIIAYTMSLGAENSVAYSNNSIAIPTNFTISVTTEILPVSMTKTSVDCTMYICGDSTECSNLLLQYGSFCTQLNRALTGIAVEQDKNTQEVFAQVKQIYKTPPIKDFGGFNFSQILPDPSKPSKRSFIEDILFNKVTLADAGFIKQYGDCLGDIAARDLICAQKFNGLTVLPPLLTDEMIAQYTSALLAGTITSGWTFGAGAALQIPFAMQMAYRFNGIGVTQNVLYENQKLIANQFNSAIGKIQDSLSSTASALGKLQDVVNQNAQALNTLVKQLSSNFGCISSVLNDILSRLDKVEAEVQIDCLITGRLQSLQTYVTQQLIRAAEIRASANLAATKMSECVLGQSKRVDFCGKGYHLMSFPQSAPHGVVFLHVTYVPAQEKNFTTAPAICHDGKAHFPREGVFVSNGTHWFVTQRNFYEPQIITTDNTFVSGNCDVVIGIVNNTVYDPLQPELDSFKEELDKYFKNHTSPDVDLGDISGINASVVNIQKEIDRLNEVAKNLNESLIDLQELGKYEQYIKGGGGSDIDPYKEFGSSYQLLNFLPLDFFPDLNALVDTATALYEEELTGREHCSPHHTAIRQALVCWDELTKLIAWMSSNITSEQVRTIIVNHVNDTWGLKVRQSLWFHLSCLTFGQHTVQEFLVSFGVWIRTPAPYRPPNAPILSTLPEHTVIC

SEQ ID NO: 7501 - protein, 1365 aa, Artificial Sequence
  SARS-CoV-2/Congo/158/2020__EPI_ISL_417950 spike protein (1-1211)(A972C_R995C) WhcAg construct
MFVFLVLLPLVSSQCVNLTTRTQLPPAYTNSFTRGVYYPDKVFRSSVLHSTQDLFLPFFSNVTWFHAIHVSGTNGTKRFDNPVLPFNDGVYFASTEKSNIIRGWIFGTTLDSKTQSLLIVNNATNVVIKVCEFQFCNDPFLGVYYHKNNKSWMESEFRVYSSANNCTFEYVSQPFLMDLEGKQGNFKNLREFVFKNIDGYFKIYSKHTPINLVRDLPQGFSALEPLVDLPIGINITRFQTLLALHRSYLTPGDSSSGWTAGAAAYYVGYLQPRTFLLKYNENGTITDAVDCALDPLSETKCTLKSFTVEKGIYQTSNFRVQPTESIVRFPNITNLCPFGEVFNATRFASVYAWNRKRISNCVADYSVLYNSASFSTFKCYGVSPTKLNDLCFTNVYADSFVIRGDEVRQIAPGQTGKIADYNYKLPDDFTGCVIAWNSNNLDSKVGGNYNYLYRLFRKSNLKPFERDISTEIYQAGSTPCNGVEGFNCYFPLQSYGFQPTNGVGYQPYRVVVLSFELLHAPATVCGPKKSTNLVKNKCVNFNFNGLTGTGVLTESNKKFLPFQQFGRDIADTTDAVRDPQTLEILDITPCSFGGVSVITPGTNTSNQVAVLYQDVNCTEVPVAIHADQLTPTWRVYSTGSNVFQTRAGCLIGAEHVNNSYECDIPIGAGICASYQTQTNSPRRARSVASQSIIAYTMSLGAENSVAYSNNSIAIPTNFTISVTTEILPVSMTKTSVDCTMYICGDSTECSNLLLQYGSFCTQLNRALTGIAVEQDKNTQEVFAQVKQIYKTPPIKDFGGFNFSQILPDPSKPSKRSFIEDLLFNKVTLADAGFIKQYGDCLGDIAARDLICAQKFNGLTVLPPLLTDEMIAQYTSALLAGTITSGWTFGAGAALQIPFAMQMAYRFNGIGVTQNVLYENQKLIANQFNSAIGKIQDSLSSTASALGKLQDVVNQNAQALNTLVKQLSSNFGCISSVLNDILSRLDKVEAEVQIDCLITGRLQSLQTYVTQQLIRAAEIRASANLAATKMSECVLGQSKRVDFCGKGYHLMSFPQSAPHGVVFLHVTYVPAQEKNFTTAPAICHDGKAHFPREGVFVSNGTHWFVTQRNFYEPQIITTDNTFLSGNCDVVIGIVNNTVYDPLQPELDSFKEELDKYFKNHTSPDVDLGDISGINASVVNIQKEIDRLNEVAKNLNESLIDLQELGKYEQYIKGGGGSDIDPYKEFGSSYQLLNFLPLDFFPDLNALVDTATALYEEELTGREHCSPHHTAIRQALVCWDELTKLIAWMSSNITSEQVRTIIVNHVNDTWGLKVRQSLWFHLSCLTFGQHTVQEFLVSFGVWIRTPAPYRPPNAPILSTLPEHTVIC

SEQ ID NO: 7502 - protein, 1365 aa, Artificial Sequence
  SARS-CoV-2/USA/UT-00034/2020__EPI_ISL_417977 spike protein (1-1211)(A972C_R995C) WhcAg construct
MFVFLVLLPLVSSQCVNLTTRTQLPPAYTNSFTRGVYYPDKVFRSSVLHSTQDLFLPFFSNVTWFHAIHVSGTNGTKRFDNPVLPFNDGVYFASTEKSNIIRGWIFGTTLDSKTQSLLIVNNATNVVIKVCEFQFCNDPFLGVYYYKNNKSWMESEFRVYSSANNCTFEYVSQPFLMDLEGKQGNFKNLREFVFKNIDGYFKIYSKHTPINLVRDLPQGFSALEPLVDLPIGINITRFQTLLALHRSYLTPGDSSSGWTAGAAAYYVGYLQPRTFLLKYNENGTITDAVDCALDPLSETKCTLKSFTVEKGIYQTSNFRVQPTESIVRFPNITNLCPFGEVFNATRFASVYAWNRKRISNCVADYSVLYNSASFSTFKCYGVSPTKLNDLCFTNVYADSFVIRGDEVRQIAPGQTGKIADYNYKLPDDFTGCVIAWNSNNLDSKVGGNYNYLYRLFRKSNLKPFERDISTEIYQAGSTPCNGVEGFNCYFPLQSYGFQPTNGVGYQPYRVVVLSFELLHAPATVCGPKKSTNLVKNKCVNFNFNGLTGTGVLTESNKKFLPFQQFGRDIADTTDAVRDPQTLEILDITPCSFGGVSVITPGTNTSNQVAVLYQGVNCTEVPVAIHADQLTPTWRVYSTGSNVFQTRAGCLIGAEHVNNSYECDIPIGAGICASYQTQTNSPRRARSVASQSIIAYTMSLGAENSVAYSNNSIAIPTNFTISVTTEILPVSMTKTSVDCTMYICGDSTECSNLLLQYGSFCTQLNRALTGIAVEQDKNTQEVFAQVKQIYKTPPIKDFGGFNFSQILPDPSKPSKRSFIEDLLFNKVTLADAGFIKQYGDCLGDIAARDLICAQKFNGLTVLPPLLTDEMIAQYTSALLAGTITSGWTFGAGAALQIPFAMQMAYRFNGIGVTQNVLYENQKLIANQFNSAIGKIQDSLSSTASALGKLQDVVNQNAQALNTLVKQLSSNFGCISSVLNDILSRLDKVEAEVQIDCLITGRLQSLQTYVTQQLIRAAEIRASANLAATKMSECVLGQSKRVDFCGKGYHLMSFPQSAPHGVVFLHVTYVPAQEKNFTTAPAICHDGKAHFPREGVFVSNGTHWFVTQRNFYEPQIITTDNTFVSGNCDVVIGIVNNTVYDPLQPELDSFKEELDKYFKNHTSPDVDLGDISGINASVVNIQKEIDRLNEVAKNLNESLIDLQELGKYEQYIKGGGGSDIDPYKEFGSSYQLLNFLPLDFFPDLNALVDTATALYEEELTGREHCSPHHTAIRQALVCWDELTKLIAWMSSNITSEQVRTIIVNHVNDTWGLKVRQSLWFHLSCLTFGQHTVQEFLVSFGVWIRTPAPYRPPNAPILSTLPEHTVIC

SEQ ID NO: 7503 - protein, 1365 aa, Artificial Sequence
  SARS-CoV-2/USA/UT-00033/2020__EPI_ISL_417976 spike protein (1-1211)(A972C_R995C) WhcAg construct
MFVFLVLLPLVSSQCVNLTTRTQLPPAYTNSFTRGVYYPDKVFRSSVLHSTQDLFLPFFSNVTWFHAIHVSGTNGTKRFDNPVLPFNDGVYFASTEKSNIIRGWIFGTTLDSKTQSLLIVNNATNVVIKVCEFQFCNDPFLGVYYHKNNKSWMESEFRVYSSANNCTFEYVSQPFLMDLEGKQGNFKNLREFVFKNIDGYFKIYSKHTPINLVRDLPQGFSALEPLVDLPIGINITRFQTLLALHRSYLTPGDSSSGLTAGAAAYYVGYLQPRTFLLKYNENGTITDAVDCALDPLSETKCTLKSFTVEKGIYQTSNFRVQPTESIVRFPNITNLCPFGEVFNATRFASVYAWNRKRISNCVADYSVLYNSASFSTFKCYGVSPTKLNDLCFTNVYADSFVIRGDEVRQIAPGQTGKIADYNYKLPDDFTGCVIAWNSNNLDSKVGGNYNYLYRLFRKSNLKPFERDISTEIYQAGSTPCNGVEGFNCYFPLQSYGFQPTNGVGYQPYRVVVLSFELLHAPATVCGPKKSTNLVKNKCVNFNFNGLTGTGVLTESNKKFLPFQQFGRDIADTTDAVRDPQTLEILDITPCSFGGVSVITPGTNTSNQVAVLYQGVNCTEVPVAIHADQLTPTWRVYSTGSNVFQTRAGCLIGAEHVNNSYECDIPIGAGICASYQTQTNSPRRARSVASQSIIAYTMSLGAENSVAYSNNSIAIPTNFTISVTTEILPVSMTKTSVDCTMYICGDSTECSNLLLQYGSFCTQLNRALTGIAVEQDKNTQEVFAQVKQIYKTPPIKDFGGFNFSQILPDPSKPSKRSFIEDLLFNKVTLADAGFIKQYGDCLGDIAARDLICAQKFNGLTVLPPLLTDEMIAQYTSALLAGTITSGWTFGAGAALQIPFAMQMAYRFNGIGVTQNVLYENQKLIANQFNSAIGKIQDSLSSTASALGKLQDVVNQNAQALNTLVKQLSSNFGCISSVLNDILSRLDKVEAEVQIDCLITGRLQSLQTYVTQQLIRAAEIRASANLAATKMSECVLGQSKRVDFCGKGYHLMSFPQSAPHGVVFLHVTYVPAQEKNFTTAPAICHDGKAHFPREGVFVSNGTHWFVTQRNFYEPQIITTDNTFVSGNCDVVIGIVNNTVYDPLQPELDSFKEELDKYFKNHTSPDVDLGDISGINASVVNIQKEIDRLNEVAKNLNESLIDLQELGKYEQYIKGGGGSDIDPYKEFGSSYQLLNFLPLDFFPDLNALVDTATALYEEELTGREHCSPHHTAIRQALVCWDELTKLIAWMSSNITSEQVRTIIVNHVNDTWGLKVRQSLWFHLSCLTFGQHTVQEFLVSFGVWIRTPAPYRPPNAPILSTLPEHTVIC

SEQ ID NO: 7504 - protein, 1365 aa, Artificial Sequence
  SARS-CoV-2/USA/WI-13/2020__EPI_ISL_417516 spike protein (1-1211)(A972C_R995C) WhcAg construct
MFVFLVLLPLVSSQCVNLTTRTQLPPAYTNSFTRGVYYPDKVFRSSVLHSTQDLFLPFFSNVTWFHAIHVSGTNGTKRFDNPVLPFNDGVYFASTEKSNIIRGWIFGTTLDSKTQSLLIVNNATNVVIKVCEFQFCNDPFLGVYYHKNNKSWMESEFRVYSSANNCTFEYVSQPFLMDLEGKQGNFKNLREFVFKNIDGYFKIYSKHTPINLVRDLPQGFSALEPLVDLPIGINITRFQTLLALHRSYLTPGDSSSGWTAGAAAYYVGYLQPRTFLLKYNENGTITDAVDCALDPLSETKCTLKSFTVEKGIYQTSNFRVLPTESIVRFPNITNLCPFGEVFNATRFASVYAWNRKRISNCVADYSVLYNSASFSTFKCYGVSPTKLNDLCFTNVYADSFVIRGDEVRQIAPGQTGKIADYNYKLPDDFTGCVIAWNSNNLDSKVGGNYNYLYRLFRKSNLKPFERDISTEIYQAGSTPCNGVEGFNCYFPLQSYGFQPTNGVGYQPYRVVVLSFELLHAPATVCGPKKSTNLVKNKCVNFNFNGLTGTGVLTESNKKFLPFQQFGRDIADTTDAVRDPQTLEILDITPCSFGGVSVITPGTNTSNQVAVLYQGVNCTEVPVAIHADQLTPTWRVYSTGSNVFQTRAGCLIGAEHVNNSYECDIPIGAGICASYQTQTNSPRRARSVASQSIIAYTMSLGAENSVAYSNNSIAIPTNFTISVTTEILPVSMTKTSVDCTMYICGDSTECSNLLLQYGSFCTQLNRALTGIAVEQDKNTQEVFAQVKQIYKTPPIKDFGGFNFSQILPDPSKPSKRSFIEDLLFNKVTLADAGFIKQYGDCLGDIAARDLICAQKFNGLTVLPPLLTDEMIAQYTSALLAGTITSGWTFGAGAALQIPFAMQMAYRFNGIGVTQNVLYENQKLIANQFNSAIGKIQDSLSSTASALGKLQDVVNQNAQALNTLVKQLSSNFGCISSVLNDILSRLDKVEAEVQIDCLITGRLQSLQTYVTQQLIRAAEIRASANLAATKMSECVLGQSKRVDFCGKGYHLMSFPQSAPHGVVFLHVTYVPAQEKNFTTAPAICHDGKAHFPREGVFVSNGTHWFVTQRNFYEPQIITTDNTFVSGNCDVVIGIVNNTVYDPLQPELDSFKEELDKYFKNHTSPDVDLGDISGINASVVNIQKEIDRLNEVAKNLNESLIDLQELGKYEQYIKGGGGSDIDPYKEFGSSYQLLNFLPLDFFPDLNALVDTATALYEEELTGREHCSPHHTAIRQALVCWDELTKLIAWMSSNITSEQVRTIIVNHVNDTWGLKVRQSLWFHLSCLTFGQHTVQEFLVSFGVWIRTPAPYRPPNAPILSTLPEHTVIC

SEQ ID NO: 7505 - protein, 1364 aa, Artificial Sequence
  SARS-CoV-2/India/1-27/2020__EPI_ISL_413522 spike protein (1-1210)(A971C_R994C) WhcAg construct
MFVFLVLLPLVSSQCVNLTTRTQLPPAYTNSFTRGVYYPDKVFRSSVLHSTQDLFLPFFSNVTWFHAIHVSGTNGTKRFDNPVLPFNDGVYFASTEKSNIIRGWIFGTTLDSKTQSLLIVNNATNVVIKVCEFQFCNDPFLGVYHKNNKSWMESEFRVYSSANNCTFEYVSQPFLMDLEGKQGNFKNLREFVFKNIDGYFKIYSKHTPINLVRDLPQGFSALEPLVDLPIGINITRFQTLLALHRSYLTPGDSSSGWTAGAAAYYVGYLQPRTFLLKYNENGTITDAVDCALDPLSETKCTLKSFTVEKGIYQTSNFRVQPTESIVRFPNITNLCPFGEVFNATRFASVYAWNRKRISNCVADYSVLYNSASFSTFKCYGVSPTKLNDLCFTNVYADSFVIRGDEVIQIAPGQTGKIADYNYKLPDDFTGCVIAWNSNNLDSKVGGNYNYLYRLFRKSNLKPFERDISTEIYQAGSTPCNGVEGFNCYFPLQSYGFQPTNGVGYQPYRVVVLSFELLHAPATVCGPKKSTNLVKNKCVNFNFNGLTGTGVLTESNKKFLPFQQFGRDIADTTDAVRDPQTLEILDITPCSFGGVSVITPGTNTSNQVAVLYQDVNCTEVPVAIHADQLTPTWRVYSTGSNVFQTRAGCLIGAEHVNNSYECDIPIGAGICASYQTQTNSPRRARSVASQSIIAYTMSLGAENSVAYSNNSIAIPTNFTISVTTEILPVSMTKTSVDCTMYICGDSTECSNLLLQYGSFCTQLNRALTGIAVEQDKNTQEVFAQVKQIYKTPPIKDFGGFNFSQILPDPSKPSKRSFIEDLLFNKVTLADAGFIKQYGDCLGDIAARDLICAQKFNGLTVLPPLLTDEMIAQYTSALLAGTITSGWTFGAGAALQIPFAMQMAYRFNGIGVTQNVLYENQKLIANQFNSAIGKIQDSLSSTASALGKLQDVVNQNAQALNTLVKQLSSNFGCISSVLNDILSRLDKVEAEVQIDCLITGRLQSLQTYVTQQLIRAAEIRASANLAATKMSECVLGQSKRVDFCGKGYHLMSFPQSAPHGVVFLHVTYVPAQEKNFTTAPAICHDGKAHFPREGVFVSNGTHWFVTQRNFYEPQIITTDNTFVSGNCDVVIGIVNNTVYDPLQPELDSFKEELDKYFKNHTSPDVDLGDISGINASVVNIQKEIDRLNEVAKNLNESLIDLQELGKYEQYIKGGGGSDIDPYKEFGSSYQLLNFLPLDFFPDLNALVDTATALYEEELTGREHCSPHHTAIRQALVCWDELTKLIAWMSSNITSEQVRTIIVNHVNDTWGLKVRQSLWFHLSCLTFGQHTVQEFLVSFGVWIRTPAPYRPPNAPILSTLPEHTVIC

SEQ ID NO: 7506 - protein, 1359 aa, Artificial Sequence
  SARS-CoV-2/pangolin/Guangxi/P4L/2017__EPI_ISL_410538 spike protein (1-1205)(A966C_R989C) WhcAg construct
MFVFLFVLPLVSSQCVNLTTRTGIPPGYTNSSTRGVYYPDKVFRSSILHLTQDLFLPFFSNVTWFNTINYQGGFKKFDNPVLPFNDGVYFASTEKSNIIRGWIFGTTLDARTQSLLIVNNATNVVIKVCEFQFCTDPFLGVYYHNNNKTWVENEFRVYSSANNCTFEYISQPFLMDLEGKQGNFKNLREFVFKNVDGYFKIYSKHTPIDLVRDLPRGFAALEPLVDLPIGINITRFQTLLALHRSYLTPGNLESGWTTGAAAYYVGYLQQRTFLLSYNQNGTITDAVDCSLDPLSETKCTLKSLTVEKGIYQTSNFRVQPTISIVRFPNITNLCPFGEVFNASKFASVYAWNRKRISNCVADYSVLYNSTSFSTFKCYGVSPTKLNDLCFTNVYADSFVVKGDEVRQIAPGQTGVIADYNYKLPDDFTGCVIAWNSVKQDALTGGNYGYLYRLFRKSKLKPFERDISTEIYQAGSTPCNGQVGLNCYYPLERYGFHPTTGVNYQPFRVVVLSFELLNGPATVCGPKLSTTLVKDKCVNFNFNGLTGTGVLTTSKKQFLPFQQFGRDISDTTDAVRDPQTLEILDITPCSFGGVSVITPGTNTSNQVAVLYQDVNCTEVPMAIHAEQLTPAWRVYSAGANVFQTRAGCLVGAEHVNNSYECDIPVGAGICASYHSMSSLRSVNQRSIIAYTMSLGAENSVAYSNNSIAIPTNFTISVTTEILPVSMTKTSVDCTMYICGDSIECSNLLLQYGSFCTQLNRALTGIAVEQDKNTQEVFAQVKQIYKTPPIKDFGGFNFSQILPDPSKPSKRSFIEDLLFNKVTLADAGFIKQYGDCLGDIAARDLICAQKFNGLTVLPPLLTDEMIAQYTSALLAGTITSGWTFGAGAALQIPFAMQMAYRFNGIGVTQNVLYENQKLIANQFNSAIGKIQDSLSSTASALGKLQDVVNQNAQALNTLVKQLSSNFGCISSVLNDILSRLDKVEAEVQIDCLITGRLQSLQTYVTQQLIRAAEIRASANLAATKMSECVLGQSKRVDFCGKGYHLMSFPQSAPHGVVFLHVTYVPAQEKNFTTAPAICHEGKAHFPREGVFVSNGTHWFITQRNFYEPQIITTDNTFVSGSCDVVIGIVNNTVYDPLQPELDSFKEELDKYFKNHTSPDVDLGDISGINASVVNIQKEIDRLNEVAKNLNESPIDLQELGKYEQYIKGGGGSDIDPYKEFGSSYQLLNFLPLDFFPDLNALVDTATALYEEELTGREHCSPHHTAIRQALVCWDELTKLIAWMSSNITSEQVRTIIVNHVNDTWGLKVRQSLWFHLSCLTFGQHTVQEFLVSFGVWIRTPAPYRPPNAPILSTLPEHTVIC

SEQ ID NO: 7507 - protein, 1359 aa, Artificial Sequence
  SARS-CoV-2/pangolin/Guangxi/P5L/2017__EPI_ISL_410540 spike protein (1-1205)(A966C_R989C) WhcAg construct
MFVFLFVLPLVSSQCVNLTTRTGIPPGYTNSSTRGVYYPDKVFRSSILHLTQDLFLPFFSNVTWFNTINYQGGFKKFDNPVLPFNDGVYFASTEKSNIIRGWIFGTTLDARTQSLLIVNNATNVVIKVCEFQFCTDPFLGVYYHNNNKTWVENEFRVYSSANNCTFEYISQPFLMDLEGKQGNFKNLREFVFKNVDGYFKIYSKHTPIDLVRDLPRGFAALEPLVDLPIGINITRFQTLLALHRSYLTPGKLESGWTTGAAAYYVGYLQQRTFLLSYNQNGTITDAVDCSLDPLSETKCTLKSLTVEKGIYQTSNFRVQPTISIVRFPNITNLCPFGEVFNASKFASVYAWNRKRISNCVADYSVLYNSTSFSTFKCYGVSPTKLNDLCFTNVYADSFVVKGDEVRQIAPGQTGVIADYNYKLPDDFTGCVIAWNSVKQDALTGGNYGYLYRLFRKSKLKPFERDISTEIYQAGSTPCNGQVGLNCYYPLERYGFHPTTGVNYQPFRVVVLSFELLNGPATVCGPKLSTTLVKDKCVNFNFNGLTGTGVLTTSKKQFLPFQQFGRDISDTTDAVRDPQTLEILDITPCSFGGVSVITPGTNTSNQVAVLYQDVNCTEVPMAIHAEQLTPAWRVYSAGANVFQTRAGCLVGAEHVNNSYECDIPVGAGICASYHSMSSFRSVNQRSIIAYTMSLGAENSVAYSNNSIAIPTNFTISVTTEILPVSMTKTSVDCTMYICGDSIECSNLLLQYGSFCTQLNRALTGIAVEQDKNTQEVFAQVKQIYKTPPIKDFGGFNFSQILPDPSKPSKRSFIEDLLFNKVTLADAGFIKQYGDCLGDIAARDLICAQKFNGLTVLPPLLTDEMIAQYTSALLAGTITSGWTFGAGAALQIPFAMQMAYRFNGIGVTQNVLYENQKLIANQFNSAIGKIQDSLSSTASALGKLQDVVNQNAQALNTLVKQLSSNFGCISSVLNDILSRLDKVEAEVQIDCLITGRLQSLQTYVTQQLIRAAEIRASANLAATKMSECVLGQSKRVDFCGKGYHLMSFPQSAPHGVVFLHVTYVPAQEKNFTTAPAICHEGKAHFPREGVFVSNGTHWFITQRNFYEPQIITTDNTFVSGSCDVVIGIVNNTVYDPLQPELDSFKEELDKYFKNHTSPDVDLGDISGINASVVNIQKEIDRLNEVAKNLNESLIDLQELGKYEQYIKGGGGSDIDPYKEFGSSYQLLNFLPLDFFPDLNALVDTATALYEEELTGREHCSPHHTAIRQALVCWDELTKLIAWMSSNITSEQVRTIIVNHVNDTWGLKVRQSLWFHLSCLTFGQHTVQEFLVSFGVWIRTPAPYRPPNAPILSTLPEHTVIC

SEQ ID NO: 7508 - protein, 1359 aa, Artificial Sequence
  SARS-CoV-2/pangolin/Guangxi/P5E/2017__EPI_ISL_410541 spike protein (1-1205)(A966C_R989C) WhcAg construct
MFVFLFVLPLVSSQCVNLTTRTGIPPGYTNSSTRGVYYPDKVFRSSILHLTQDLFLPFFSNVTWFNTITYQGGSKKFDNPVLPFNDGVYFASTEKSNIIRGWIFGTTLDARTQSLLIVNNATNVVIKVCEFQFCTDPFLGVYYHNNNKTWVENEFRVYSSANNCTFEYISQPFLMDLEGKQGNFKNLREFVFKNVDGYFKIYSKHTPIDLVRDLPRGFAALEPLVDLPIGINITRFQTLLALHRSYLTPGKLESGWTTGAAAYYVGYLQQRTFLLSYNQNGTITDAVDCSLDPLSETKCTLKSLTVEKGIYQTSNFRVQPTISIVRFPNITNLCPFGEVFNASKFASVYAWNRKRISNCVADYSVLYNSTSFSTFKCYGVSPTKLNDLCFTNVYADSFVVKGDEVRQIAPGQTGVIADYNYKLPDDFTGCVIAWNSVKQDALTGDNYGYLYRLFRKSKLKPFERDISTEIYQAGSTPCNGQVGLNCYYPLERYGFHPTTGVNYQPFRVVVLSFELLNGPATVCGPKLSTTLVKDKCVNFNFNGLTGTGVLTTSKKQFLPFQQFGRDISDTTDAVRDPQTLEILDITPCSFGGVSVITPGTNTSNQVAVLYQDVNCTEVPMAIHAEQLTPAWRVYSAGANVFQTRAGCLVGAEHVNNSYECDIPVGAGICASYHSMSSFRSVNQRSIIAYTMSLGAENSVAYSNNSIAIPTNFTISVTTEILPVSMTKTSVDCTMYICGDSIECSNLLLQYGSFCTQLNRALTGIAVEQDKNTQEVFAQVKQIYKTPPIKDFGGFNFSQILPDPSKPSKRSFIEDLLFNKVTLADAGFIKQYGDCLGDIAARDLICAQKFNGLTVLPPLLTDEMIAQYTSALLAGTITSGWTFGAGAALQIPFAMQMAYRFNGIGVTQNVLYENQKLIANQFNSAIGKIQDSLSSTASALGKLQDVVNQNAQALNTLVKQLSSNFGCISSVLNDILSRLDKVEAEVQIDCLITGRLQSLQTYVTQQLIRAAEIRASANLAATKMSECVLGQSKRVDFCGKGYHLMSFPQSAPHGVVFLHVTYVPAQEKNFTTAPAICHEGKAHFPREGVFVSNGTHWFITQRNFYEPQIITTDNTFVSGSCDVVIGIVNNTVYDPLQPELDSFKEELDKYFKNHTSPDVDLGDISGINASVVNIQKEIDRLNEVAKNLNESLIDLQELGKYEQYIKGGGGSDIDPYKEFGSSYQLLNFLPLDFFPDLNALVDTATALYEEELTGREHCSPHHTAIRQALVCWDELTKLIAWMSSNITSEQVRTIIVNHVNDTWGLKVRQSLWFHLSCLTFGQHTVQEFLVSFGVWIRTPAPYRPPNAPILSTLPEHTVIC

SEQ ID NO: 7509 - protein, 1357 aa, Artificial Sequence
  SARS-CoV-2/pangolin/Guangxi/P1E/2017__EPI_ISL_410539 spike protein (1-1203)(A964C_R987C) WhcAg construct
MFVFLFVLPLVSSQCVNLTTRTGIQPGYTNSSTRGVYYPDKVFRSSILHLTQDLFLPFFSNVTWFNTINYQGGFKKFDNPVLPFNDGVYFASTEKSNIIRGWIFGTTLDARTQSLLIVNNATNVVIKVCEFQFCTDPFLGVYYHNNNKTWVENEFRVYSSANNCTFEYISQPFLMDLEGKQGNFKNLREFVFKNVDGYFKIYSKHTPIDLVRDLPRGFAALEPLVDLPIGINITRFQTLLALHRSYLTPGKLESGWTTGAAAYYVGYLQQRTFLLSYNQNGTITDAVDCSLDPLSETKCTLKSLTVEKGIYQTSNFRVQPTISIVRFPNITNLCPFGEVFNASKFASVYAWNRKRISNCVADYSVLYNSTSFSTFKCYGVSPTKLNDLCFTNVYADSFVVKGDEVRQIAPGQTGVIADYNYKLPDDFTGCVIAWNSVKQDALTGGNYLYRLFRKSKLKPFERDISTEIYQAGSTPCNGQVGLNCYYPLERYGFHPTTGVNYQPFRVVVLSFELLNGPATVCGPKLSTTLVKDKCVNFNFNGLTGTGVLTTSKKQFLPFQQFGRDISDTTDAVRDPQTLEILDITPCSFGGVSVITPGTNTSNQVAVLYQDVNCTEVPMAIHAEQLTPAWRVYSAGANVFQTRAGCLVGAEHVNNSYECDIPVGAGICASYHSMSSLRSVNQRSIIAYTMSLGAENSVAYSNNSIAIPTNFTISVTTEILPVSMTKTSVDCTMYICGDSIECSNLLLQYGSFCTQLNRALTGIAVEQDKNTQEVFAQVKQIYKTPPIKDFGGFNFSQILPDPSKPSKRSFIEDLLFNKVTLADAGFIKQYGDCLGDIAARDLICAQKFNGLTVLPPLLTDEMIAQYTSALLAGTITSGWTFGAGAALQIPFAMQMAYRFNGIGVTQNVLYENQKLIANQFNSAIGKIQDSLSSTASALGKLQDVVNQNAQALNTLVKQLSSNFGCISSVLNDILSRLDKVEAEVQIDCLITGRLQSLQTYVTQQLIRAAEIRASANLAATKMSECVLGQSKRVDFCGKGYHLMSFPQSAPHGVVFLHVTYVPAQEKNFTTAPAICHEGKAHFPREGVFVSNGTHWFITQRNFYEPQIITTDNTFVSGSCDVVIGIVNNTVYDPLQPELDSFKEELDKYFKNHTSPDVDLGDISGINASVVNIQKEIDRLNEVAKNLNESLIDLQELGKYEQYIKGGGGSDIDPYKEFGSSYQLLNFLPLDFFPDLNALVDTATALYEEELTGREHCSPHHTAIRQALVCWDELTKLIAWMSSNITSEQVRTIIVNHVNDTWGLKVRQSLWFHLSCLTFGQHTVQEFLVSFGVWIRTPAPYRPPNAPILSTLPEHTVIC

SEQ ID NO: 7510 - protein, 1365 aa, Artificial Sequence
  SARS-CoV-2/Wuhan/WIV05/2019__EPI_ISL_402128 spike protein (1-1211)(A890C_V1040C) WhcAg construct
MFVFLVLLPLVSSQCVNLTTRTQLPPAYTNSFTRGVYYPDKVFRSSVLHSTQDLFLPFFSNVTWFHAIHVSGTNGTKRFDNPVLPFNDGVYFASTEKSNIIRGWIFGTTLDSKTQSLLIVNNATNVVIKVCEFQFCNDPFLGVYYHKNNKSWMESEFRVYSSANNCTFEYVSQPFLMDLEGKQGNFKNLREFVFKNIDGYFKIYSKHTPINLVRDLPQGFSALEPLVDLPIGINITRFQTLLALHRSYLTPGDSSSGWTAGAAAYYVGYLQPRTFLLKYNENGTITDAVDCALDPLSETKCTLKSFTVEKGIYQTSNFRVQPTESIVRFPNITNLCPFGEVFNATRFASVYAWNRKRISNCVADYSVLYNSASFSTFKCYGVSPTKLNDLCFTNVYADSFVIRGDEVRQIAPGQTGKIADYNYKLPDDFTGCVIAWNSNNLDSKVGGNYNYLYRLFRKSNLKPFERDISTEIYQAGSTPCNGVEGFNCYFPLQSYGFQPTNGVGYQPYRVVVLSFELLHAPATVCGPKKSTNLVKNKCVNFNFNGLTGTGVLTESNKKFLPFQQFGRDIADTTDAVRDPQTLEILDITPCSFGGVSVITPGTNTSNQVAVLYQDVNCTEVPVAIHADQLTPTWRVYSTGSNVFQTRAGCLIGAEHVNNSYECDIPIGAGICASYQTQTNSPRRARSVASQSIIAYTMSLGAENSVAYSNNSIAIPTNFTISVTTEILPVSMTKTSVDCTMYICGDSTECSNLLLQYGSFCTQLNRALTGIAVEQDKNTQEVFAQVKQIYKTPPIKDFGGFNFSQILPDPSKPSKRSFIEDLLFNKVTLADAGFIKQYGDCLGDIAARDLICAQKFNGLTVLPPLLTDEMIAQYTSALLAGTITSGWTFGCGAALQIPFAMQMAYRFNGIGVTQNVLYENQKLIANQFNSAIGKIQDSLSSTASALGKLQDVVNQNAQALNTLVKQLSSNFGAISSVLNDILSRLDKVEAEVQIDRLITGRLQSLQTYVTQQLIRAAEIRASANLAATKMSECVLGQSKRCDFCGKGYHLMSFPQSAPHGVVFLHVTYVPAQEKNFTTAPAICHDGKAHFPREGVFVSNGTHWFVTQRNFYEPQIITTDNTFVSGNCDVVIGIVNNTVYDPLQPELDSFKEELDKYFKNHTSPDVDLGDISGINASVVNIQKEIDRLNEVAKNLNESLIDLQELGKYEQYIKGGGGSDIDPYKEFGSSYQLLNFLPLDFFPDLNALVDTATALYEEELTGREHCSPHHTAIRQALVCWDELTKLIAWMSSNITSEQVRTIIVNHVNDTWGLKVRQSLWFHLSCLTFGQHTVQEFLVSFGVWIRTPAPYRPPNAPILSTLPEHTVIC

SEQ ID NO: 7511 - protein, 1361 aa, Artificial Sequence; identical to SEQ ID NO: 7243
  SARS-CoV-2/bat/Yunnan/RaTG13/2013__EPI_ISL_402131 spike protein (1-1207)(A886C_V1036C) WhcAg construct

SEQ ID NO: 7512 - protein, 1365 aa, Artificial Sequence; identical to SEQ ID NO: 7244
  SARS-CoV-2/Wuhan/HBCDC-HB-01/2019__EPI_ISL_402132 spike protein (1-1211)(A890C_V1040C) WhcAg construct

SEQ ID NO: 7513 - protein, 1365 aa, Artificial Sequence; identical to SEQ ID NO: 7245
  SARS-CoV-2/Guangdong/20SF028/2020__EPI_ISL_403936 spike protein (1-1211)(A890C_V1040C) WhcAg construct

SEQ ID NO: 7514 - protein, 1365 aa, Artificial Sequence; identical to SEQ ID NO: 7246
  SARS-CoV-2/Shenzhen/SZTH-001/2020__EPI_ISL_406592 spike protein (1-1211)(A890C_V1040C) WhcAg construct

SEQ ID NO: 7515 - protein, 1365 aa, Artificial Sequence; identical to SEQ ID NO: 7247
  SARS-CoV-2/Shenzhen/SZTH-004/2020__EPI_ISL_406595 spike protein (1-1211)(A890C_V1040C) WhcAg construct

SEQ ID NO: 7516 - protein, 1365 aa, Artificial Sequence; identical to SEQ ID NO: 7248
  SARS-CoV-2/France/IDF0372/2020__EPI_ISL_406596 spike protein (1-1211)(A890C_V1040C) WhcAg construct

SEQ ID NO: 7517 - protein, 1365 aa, Artificial Sequence; identical to SEQ ID NO: 7249
  SARS-CoV-2/Australia/VIC01/2020__EPI_ISL_406844 spike protein (1-1211)(A890C_V1040C) WhcAg construct

SEQ ID NO: 7518 - protein, 1365 aa, Artificial Sequence; identical to SEQ ID NO: 7250
  SARS-CoV-2/Germany/BavPat1/2020__EPI_ISL_406862 spike protein (1-1211)(A890C_V1040C) WhcAg construct

SEQ ID NO: 7519 - protein, 1365 aa, Artificial Sequence; identical to SEQ ID NO: 7251
  SARS-CoV-2/Wuhan/HBCDC-HB-02/2020__EPI_ISL_412978 spike protein (1-1211)(A890C_V1040C) WhcAg construct

SEQ ID NO: 7520 - protein, 1365 aa, Artificial Sequence; identical to SEQ ID NO: 7252
  SARS-CoV-2/Australia/QLD02/2020__EPI_ISL_407896 spike protein (1-1211)(A890C_V1040C) WhcAg construct

SEQ ID NO: 7521 - protein, 1365 aa, Artificial Sequence; identical to SEQ ID NO: 7253
  SARS-CoV-2/India/1-31/2020__EPI_ISL_413523 spike protein (1-1211)(A890C_V1040C) WhcAg construct

SEQ ID NO: 7522 - protein, 1365 aa, Artificial Sequence; identical to SEQ ID NO: 7254
  SARS-CoV-2/Guangdong/GD2020087-P0008/2020__EPI_ISL_413863 spike protein (1-1211)(A890C_V1040C) WhcAg construct

SEQ ID NO: 7523 - protein, 1365 aa, Artificial Sequence; identical to SEQ ID NO: 7255
  SARS-CoV-2/Sweden/01/2020__EPI_ISL_411951 spike protein (1-1211)(A890C_V1040C) WhcAg construct

SEQ ID NO: 7524 - protein, 1365 aa, Artificial Sequence; identical to SEQ ID NO: 7256
  SARS-CoV-2/Tianmen/HBCDC-HB-07/2020__EPI_ISL_412983 spike protein (1-1211)(A890C_V1040C) WhcAg construct

SEQ ID NO: 7525 - protein, 1365 aa, Artificial Sequence; identical to SEQ ID NO: 7257
  SARS-CoV-2/Hong Kong/case42_VM20002493/2020__EPI_ISL_414527 spike protein (1-1211)(A890C_V1040C) WhcAg construct

SEQ ID NO: 7526 - protein, 1365 aa, Artificial Sequence; identical to SEQ ID NO: 7258
  SARS-CoV-2/USA/CruiseA-23/2020__EPI_ISL_414482 spike protein (1-1211)(A890C_V1040C) WhcAg construct

SEQ ID NO: 7527 - protein, 1365 aa, Artificial Sequence; identical to SEQ ID NO: 7259
  SARS-CoV-2/Hong Kong/case85_VM20002868/2020__EPI_ISL_414519 spike protein (1-1211)(A890C_V1040C) WhcAg construct

SEQ ID NO: 7528 - protein, 1365 aa, Artificial Sequence; identical to SEQ ID NO: 7250
  SARS-CoV-2/England/200990660/2020__EPI_ISL_414523 spike protein (1-1211)(A890C_V1040C) WhcAg construct

SEQ ID NO: 7529 - protein, 1365 aa, Artificial Sequence; identical to SEQ ID NO: 7261
  SARS-CoV-2/Australia/NSW09/2020__EPI_ISL_413595 spike protein (1-1211)(A890C_V1040C) WhcAg construct

SEQ ID NO: 7530 - protein, 1365 aa, Artificial Sequence; identical to SEQ ID NO: 7242
  SARS-CoV-2/Australia/NSW10/2020__EPI_ISL_413596 spike protein (1-1211)(A890C_V1040C) WhcAg construct

SEQ ID NO: 7531 - protein, 1365 aa, Artificial Sequence; identical to SEQ ID NO: 7263
  SARS-CoV-2/Switzerland/1000477797/2020__EPI_ISL_413023 spike protein (1-1211)(A890C_V1040C) WhcAg construct

SEQ ID NO: 7532 - protein, 1365 aa, Artificial Sequence; identical to SEQ ID NO: 7264
  SARS-CoV-2/Belgium/BA-02291/2020__EPI_ISL_415159 spike protein (1-1211)(A890C_V1040C) WhcAg construct

SEQ ID NO: 7533 - protein, 1365 aa, Artificial Sequence; identical to SEQ ID NO: 7265
  SARS-CoV-2/USA/WA8-UW5/2020__EPI_ISL_413486 spike protein (1-1211)(A890C_V1040C) WhcAg construct

SEQ ID NO: 7534 - protein, 1365 aa, Artificial Sequence; identical to SEQ ID NO: 7266
  SARS-CoV-2/England/20102000506/2020__EPI_ISL_415147 spike protein (1-1211)(A890C_V1040C) WhcAg construct

SEQ ID NO: 7535 - protein, 1365 aa, Artificial Sequence; identical to SEQ ID NO: 7267
  SARS-CoV-2/Belgium/VAG-03013/2020__EPI_ISL_415155 spike protein (1-1211)(A890C_V1040C) WhcAg construct

SEQ ID NO: 7536 - protein, 1365 aa, Artificial Sequence; identical to SEQ ID NO: 7268
  SARS-CoV-2/Belgium/BC-03016/2020__EPI_ISL_415157 spike protein (1-1211)(A890C_V1040C) WhcAg construct

SEQ ID NO: 7537 - protein, 1365 aa, Artificial Sequence; identical to SEQ ID NO: 7269
  SARS-CoV-2/Germany/BavPat3/2020__EPI_ISL_414521 spike protein (1-1211)(A890C_V1040C) WhcAg construct

SEQ ID NO: 7538 - protein, 1365 aa, Artificial Sequence; identical to SEQ ID NO: 7270
  SARS-CoV-2/France/HF1805/2020__EPI_ISL_414628 spike protein (1-1211)(A890C_V1040C) WhcAg construct

SEQ ID NO: 7539 - protein, 1365 aa, Artificial Sequence; identical to SEQ ID NO: 7271
  SARS-CoV-2/Netherlands/ZuidHolland_9/2020__EPI_ISL_414445 spike protein (1-1211)(A890C_V1040C) WhcAg construct

SEQ ID NO: 7540 - protein, 1365 aa, Artificial Sequence; identical to SEQ ID NO: 7272
  SARS-CoV-2/Finland/FIN03032020A/2020__EPI_ISL_413602 spike protein (1-1211)(A890C_V1040C) WhcAg construct

SEQ ID NO: 7541 - protein, 1365 aa, Artificial Sequence; identical to SEQ ID NO: 7273
  SARS-CoV-2/France/GE1977/2020__EPI_ISL_414632 spike protein (1-1211)(A890C_V1040C) WhcAg construct

SEQ ID NO: 7542 - protein, 1365 aa, Artificial Sequence; identical to SEQ ID NO: 7274
  SARS-CoV-2/Finland/FIN-313/2020__EPI_ISL_414641 spike protein (1-1211)(A890C_V1040C) WhcAg construct

SEQ ID NO: 7543 - protein, 1365 aa, Artificial Sequence; identical to SEQ ID NO: 7275
  SARS-CoV-2/Netherlands/ZuidHolland_2/2020__EPI_ISL_414556 spike protein (1-1211)(A890C_V1040C) WhcAg construct

SEQ ID NO: 7544 - protein, 1365 aa, Artificial Sequence; identical to SEQ ID NO: 7276
  SARS-CoV-2/USA/WA-UW31/2020__EPI_ISL_414618 spike protein (1-1211)(A890C_V1040C) WhcAg construct

SEQ ID NO: 7545 - protein, 1365 aa, Artificial Sequence; identical to SEQ ID NO: 7277
  SARS-CoV-2/South Korea/SNU01/2020__EPI_ISL_411929 spike protein (1-1211)(A890C_V1040C) WhcAg construct

SEQ ID NO: 7546 - protein, 1365 aa, Artificial Sequence; identical to SEQ ID NO: 7278
  SARS-CoV-2/China/WF0004/2020__EPI_ISL_413694 spike protein (1-1211)(A890C_V1040C) WhcAg construct

SEQ ID NO: 7547 - protein, 1365 aa, Artificial Sequence; identical to SEQ ID NO: 7279
  SARS-CoV-2/China/WF0028/2020__EPI_ISL_413791 spike protein (1-1211)(A890C_V1040C) WhcAg construct

SEQ ID NO: 7548 - protein, 1365 aa, Artificial Sequence; identical to SEQ ID NO: 7280
  SARS-CoV-2/2019-nCoV/USA-CruiseA-18/2020__MT159716.1 spike protein (1-1211)(A890C_V1040C) WhcAg construct

SEQ ID NO: 7549 - protein, 1365 aa, Artificial Sequence; identical to SEQ ID NO: 7281
  SARS-CoV-2/SARS-CoV-2/Yunnan-01/human/2020/CHN__MT049951.1 spike protein (1-1211)(A890C_V1040C) WhcAg construct

SEQ ID NO: 7550 - protein, 1365 aa, Artificial Sequence; identical to SEQ ID NO: 7282
  SARS-CoV-2/USA/WA-UW292/2020__EPI_ISL_418077 spike protein (1-1211)(A890C_V1040C) WhcAg construct

SEQ ID NO: 7551 - protein, 1365 aa, Artificial Sequence; identical to SEQ ID NO: 7283
  SARS-CoV-2/Iceland/192/2020__EPI_ISL_417819 spike protein (1-1211)(A890C_V1040C) WhcAg construct

SEQ ID NO: 7552 - protein, 1365 aa, Artificial Sequence; identical to SEQ ID NO: 7284
  SARS-CoV-2/Belgium/ULG-6939/2020__EPI_ISL_417020 spike protein (1-1211)(A890C_V1040C) WhcAg construct

SEQ ID NO: 7553 - protein, 1365 aa, Artificial Sequence; identical to SEQ ID NO: 7285
  SARS-CoV-2/France/HF2496/2020__EPI_ISL_418231 spike protein (1-1211)(A890C_V1040C) WhcAg construct

SEQ ID NO: 7554 - protein, 1365 aa, Artificial Sequence; identical to SEQ ID NO: 7286
  SARS-CoV-2/USA/WA-UW291/2020__EPI_ISL_418076 spike protein (1-1211)(A890C_V1040C) WhcAg construct

SEQ ID NO: 7555 - protein, 1365 aa, Artificial Sequence; identical to SEQ ID NO: 7250
  SARS-CoV-2/Portugal/PT0034/2020__EPI_ISL_418019 spike protein (1-1211)(A890C_V1040C) WhcAg construct

SEQ ID NO: 7556 - protein, 1365 aa, Artificial Sequence; identical to SEQ ID NO: 7288
  SARS-CoV-2/Iceland/202/2020__EPI_ISL_417750 spike protein (1-1211)(A890C_V1040C) WhcAg construct

SEQ ID NO: 7557 - protein, 1365 aa, Artificial Sequence; identical to SEQ ID NO: 7289
  SARS-CoV-2/USA/WA-UW261/2020__EPI_ISL_418046 spike protein (1-1211)(A890C_V1040C) WhcAg construct

SEQ ID NO: 7558 - protein, 1365 aa, Artificial Sequence; identical to SEQ ID NO: 7290
  SARS-CoV-2/Portugal/PT0035/2020__EPI_ISL_418020 spike protein (1-1211)(A890C_V1040C) WhcAg construct

SEQ ID NO: 7559 - protein, 1365 aa, Artificial Sequence; identical to SEQ ID NO: 7291
  SARS-CoV-2/USA/NY-NYUMC7/2020__EPI_ISL_418192 spike protein (1-1211)(A890C_V1040C) WhcAg construct

SEQ ID NO: 7560 - protein, 1365 aa, Artificial Sequence; identical to SEQ ID NO: 7292
  SARS-CoV-2/Iceland/189/2020__EPI_ISL_417709 spike protein (1-1211)(A890C_V1040C) WhcAg construct

SEQ ID NO: 7561 - protein, 1365 aa, Artificial Sequence; identical to SEQ ID NO: 7293
  SARS-CoV-2/Australia/NSW56/2020__EPI_ISL_417408 spike protein (1-1211)(A890C_V1040C) WhcAg construct

SEQ ID NO: 7562 - protein, 1365 aa, Artificial Sequence; identical to SEQ ID NO: 7294
  SARS-CoV-2/Iceland/280/2020__EPI_ISL_417608 spike protein (1-1211)(A890C_V1040C) WhcAg construct

SEQ ID NO: 7563 - protein, 1365 aa, Artificial Sequence; identical to SEQ ID NO: 7250
  SARS-CoV-2/Iceland/247/2020__EPI_ISL_417575 spike protein (1-1211)(A890C_V1040C) WhcAg construct

SEQ ID NO: 7564 - protein, 1365 aa, Artificial Sequence; identical to SEQ ID NO: 7296
  SARS-CoV-2/Iceland/238/2020__EPI_ISL_417566 spike protein (1-1211)(A890C_V1040C) WhcAg construct

SEQ ID NO: 7565 - protein, 1365 aa, Artificial Sequence; identical to SEQ ID NO: 7297
  SARS-CoV-2/Greece/16/2020__EPI_ISL_418265 spike protein (1-1211)(A890C_V1040C) WhcAg construct

SEQ ID NO: 7566 - protein, 1365 aa, Artificial Sequence; identical to SEQ ID NO: 7298
  SARS-CoV-2/Iceland/319/2020__EPI_ISL_417648 spike protein (1-1211)(A890C_V1040C) WhcAg construct

SEQ ID NO: 7567 - protein, 1365 aa, Artificial Sequence; identical to SEQ ID NO: 7299
  SARS-CoV-2/Congo/94/2020__EPI_ISL_417947 spike protein (1-1211)(A890C_V1040C) WhcAg construct

SEQ ID NO: 7568 - protein, 1365 aa, Artificial Sequence; identical to SEQ ID NO: 7300
  SARS-CoV-2/Congo/158/2020__EPI_ISL_417950 spike protein (1-1211)(A890C_V1040C) WhcAg construct

SEQ ID NO: 7569 - protein, 1365 aa, Artificial Sequence; identical to SEQ ID NO: 7301
  SARS-CoV-2/USA/UT-00034/2020__EPI_ISL_417977 spike protein (1-1211)(A890C_V1040C) WhcAg construct

SEQ ID NO: 7570 - protein, 1365 aa, Artificial Sequence; identical to SEQ ID NO: 7302
  SARS-CoV-2/USA/UT-00033/2020__EPI_ISL_417976 spike protein (1-1211)(A890C_V1040C) WhcAg construct

SEQ ID NO: 7571 - protein, 1365 aa, Artificial Sequence; identical to SEQ ID NO: 7303
  SARS-CoV-2/USA/WI-13/2020__EPI_ISL_417516 spike protein (1-1211)(A890C_V1040C) WhcAg construct

SEQ ID NO: 7572 - protein, 1364 aa, Artificial Sequence; identical to SEQ ID NO: 7304
  SARS-CoV-2/India/1-27/2020__EPI_ISL_413522 spike protein (1-1210)(A889C_V1039C) WhcAg construct

SEQ ID NO: 7573 - protein, 1359 aa, Artificial Sequence; identical to SEQ ID NO: 7305
  SARS-CoV-2/pangolin/Guangxi/P4L/2017__EPI_ISL_410538 spike protein (1-1205)(A884C_V1034C) WhcAg construct

SEQ ID NO: 7574 - protein, 1359 aa, Artificial Sequence; identical to SEQ ID NO: 7306
  SARS-CoV-2/pangolin/Guangxi/P5L/2017__EPI_ISL_410540 spike protein (1-1205)(A884C_V1034C) WhcAg construct

SEQ ID NO: 7575 - protein, 1359 aa, Artificial Sequence; identical to SEQ ID NO: 7307
  SARS-CoV-2/pangolin/Guangxi/P5E/2017__EPI_ISL_410541 spike protein (1-1205)(A884C_V1034C) WhcAg construct

SEQ ID NO: 7576 - protein, 1357 aa, Artificial Sequence; identical to SEQ ID NO: 7308
  SARS-CoV-2/pangolin/Guangxi/P1E/2017__EPI_ISL_410539 spike protein (1-1203)(A882C_V1032C) WhcAg construct

SEQ ID NO: 7577 - protein, 1365 aa, Artificial Sequence
  SARS-CoV-2/Wuhan/WIV05/2019__EPI_ISL_402128 spike protein (1-1211)(T874C_S1055C) WhcAg construct
MFVFLVLLPLVSSQCVNLTTRTQLPPAYTNSFTRGVYYPDKVFRSSVLHSTQDLFLPFFSNVTWFHAIHVSGTNGTKRFDNPVLPFNDGVYFASTEKSNIIRGWIFGTTLDSKTQSLLIVNNATNVVIKVCEFQFCNDPFLGVYYHKNNKSWMESEFRVYSSANNCTFEYVSQPFLMDLEGKQGNFKNLREFVFKNIDGYFKIYSKHTPINLVRDLPQGFSALEPLVDLPIGINITRFQTLLALHRSYLTPGDSSSGWTAGAAAYYVGYLQPRTFLLKYNENGTITDAVDCALDPLSETKCTLKSFTVEKGIYQTSNFRVQPTESIVRFPNITNLCPFGEVFNATRFASVYAWNRKRISNCVADYSVLYNSASFSTFKCYGVSPTKLNDLCFTNVYADSFVIRGDEVRQIAPGQTGKIADYNYKLPDDFTGCVIAWNSNNLDSKVGGNYNYLYRLFRKSNLKPFERDISTEIYQAGSTPCNGVEGFNCYFPLQSYGFQPTNGVGYQPYRVVVLSFELLHAPATVCGPKKSTNLVKNKCVNFNFNGLTGTGVLTESNKKFLPFQQFGRDIADTTDAVRDPQTLEILDITPCSFGGVSVITPGTNTSNQVAVLYQDVNCTEVPVAIHADQLTPTWRVYSTGSNVFQTRAGCLIGAEHVNNSYECDIPIGAGICASYQTQTNSPRRARSVASQSIIAYTMSLGAENSVAYSNNSIAIPTNFTISVTTEILPVSMTKTSVDCTMYICGDSTECSNLLLQYGSFCTQLNRALTGIAVEQDKNTQEVFAQVKQIYKTPPIKDFGGFNFSQILPDPSKPSKRSFIEDLLFNKVTLADAGFIKQYGDCLGDIAARDLICAQKFNGLTVLPPLLTDEMIAQYCSALLAGTITSGWTFGAGAALQIPFAMQMAYRFNGIGVTQNVLYENQKLIANQFNSAIGKIQDSLSSTASALGKLQDVVNQNAQALNTLVKQLSSNFGAISSVLNDILSRLDKVEAEVQIDRLITGRLQSLQTYVTQQLIRAAEIRASANLAATKMSECVLGQSKRVDFCGKGYHLMSFPQCAPHGVVFLHVTYVPAQEKNFTTAPAICHDGKAHFPREGVFVSNGTHWFVTQRNFYEPQIITTDNTFVSGNCDVVIGIVNNTVYDPLQPELDSFKEELDKYFKNHTSPDVDLGDISGINASVVNIQKEIDRLNEVAKNLNESLIDLQELGKYEQYIKGGGGSDIDPYKEFGSSYQLLNFLPLDFFPDLNALVDTATALYEEELTGREHCSPHHTAIRQALVCWDELTKLIAWMSSNITSEQVRTIIVNHVNDTWGLKVRQSLWFHLSCLTFGQHTVQEFLVSFGVWIRTPAPYRPPNAPILSTLPEHTVIC

SEQ ID NO: 7578 - protein, 1361 aa, Artificial Sequence
  SARS-CoV-2/bat/Yunnan/RaTG13/2013__EPI_ISL_402131 spike protein (1-1207)(T870C_S1051C) WhcAg construct
MFVFLVLLPLVSSQCVNLTTRTQLPPAYTNSSTRGVYYPDKVFRSSVLHLTQDLFLPFFSNVTWFHAIHVSGTNGIKRFDNPVLPFNDGVYFASTEKSNIIRGWIFGTTLDSKTQSLLIVNNATNVVIKVCEFQFCNDPFLGVYYHKNNKSWMESEFRVYSSANNCTFEYVSQPFLMDLEGKQGNFKNLREFVFKNIDGYFKIYSKHTPINLVRDLPPGFSALEPLVDLPIGINITRFQTLLALHRSYLTPGDSSSGWTAGAAAYYVGYLQPRTFLLKYNENGTITDAVDCALDPLSETKCTLKSFTVEKGIYQTSNFRVQPTDSIVRFPNITNLCPFGEVFNATTFASVYAWNRKRISNCVADYSVLYNSTSFSTFKCYGVSPTKLNDLCFTNVYADSFVITGDEVRQIAPGQTGKIADYNYKLPDDFTGCVIAWNSKHIDAKEGGNFNYLYRLFRKANLKPFERDISTEIYQAGSKPCNGQTGLNCYYPLYRYGFYPTDGVGHQPYRVVVLSFELLNAPATVCGPKKSTNLVKNKCVNFNFNGLTGTGVLTESNKKFLPFQQFGRDIADTTDAVRDPQTLEILDITPCSFGGVSVITPGTNASNQVAVLYQDVNCTEVPVAIHADQLTPTWRVYSTGSNVFQTRAGCLIGAEHVNNSYECDIPIGAGICASYQTQTNSRSVASQSIIAYTMSLGAENSVAYSNNSIAIPTNFTISVTTEILPVSMTKTSVDCTMYICGDSTECSNLLLQYGSFCTQLNRALTGIAVEQDKNTQEVFAQVKQIYKTPPIKDFGGFNFSQILPDPSKPSKRSFIEDLLFNKVTLADAGFIKQYGDCLGDIAARDLICAQKFNGLTVLPPLLTDEMIAQYCSALLAGTITSGWTFGAGAALQIPFAMQMAYRFNGIGVTQNVLYENQKLIANQFNSAIGKIQDSLSSTASALGKLQDVVNQNAQALNTLVKQLSSNFGAISSVLNDILSRLDKVEAEVQIDRLITGRLQSLQTYVTQQLIRAAEIRASANLAATKMSECVLGQSKRVDFCGKGYHLMSFPQCAPHGVVFLHVTYVPAQEKNFTTAPAICHDGKAHFPREGVFVSNGTHWFVTQRNFYEPQIITTDNTFVSGSCDVVIGIVNNTVYDPLQPELDSFKEELDKYFKNHTSPDVDLGDISGINASVVNIQKEIDRLNEVAKNLNESLIDLQELGKYEQYIKGGGGSDIDPYKEFGSSYQLLNFLPLDFFPDLNALVDTATALYEEELTGREHCSPHHTAIRQALVCWDELTKLIAWMSSNITSEQVRTIIVNHVNDTWGLKVRQSLWFHLSCLTFGQHTVQEFLVSFGVWIRTPAPYRPPNAPILSTLPEHTVIC

SEQ ID NO: 7579 - protein, 1365 aa, Artificial Sequence
  SARS-CoV-2/Wuhan/HBCDC-HB-01/2019__EPI_ISL_402132 spike protein (1-1211)(T874C_S1055C) WhcAg construct
MFVFLVLLPLVSSQCVNLTTRTQLPPAYTNSITRGVYYPDKVFRSSVLHSTQDLFLPFFSNVTWFHAIHVSGTNGTKRFDNPVLPFNDGVYFASTEKSNIIRGWIFGTTLDSKTQSLLIVNNATNVVIKVCEFQFCNDPFLGVYYHKNNKSWMESEFRVYSSANNCTFEYVSQPFLMDLEGKQGNFKNLREFVFKNIDGYFKIYSKHTPINLVRDLPQGFSALEPLVDLPIGINITRFQTLLALHRSYLTPGDSSSGWTAGAAAYYVGYLQPRTFLLKYNENGTITDAVDCALDPLSETKCTLKSFTVEKGIYQTSNFRVQPTESIVRFPNITNLCPFGEVFNATRFASVYAWNRKRISNCVADYSVLYNSASFSTFKCYGVSPTKLNDLCFTNVYADSFVIRGDEVRQIAPGQTGKIADYNYKLPDDFTGCVIAWNSNNLDSKVGGNYNYLYRLFRKSNLKPFERDISTEIYQAGSTPCNGVEGFNCYFPLQSYGFQPTNGVGYQPYRVVVLSFELLHAPATVCGPKKSTNLVKNKCVNFNFNGLTGTGVLTESNKKFLPFQQFGRDIADTTDAVRDPQTLEILDITPCSFGGVSVITPGTNTSNQVAVLYQDVNCTEVPVAIHADQLTPTWRVYSTGSNVFQTRAGCLIGAEHVNNSYECDIPIGAGICASYQTQTNSPRRARSVASQSIIAYTMSLGAENSVAYSNNSIAIPTNFTISVTTEILPVSMTKTSVDCTMYICGDSTECSNLLLQYGSFCTQLNRALTGIAVEQDKNTQEVFAQVKQIYKTPPIKDFGGFNFSQILPDPSKPSKRSFIEDLLFNKVTLADAGFIKQYGDCLGDIAARDLICAQKFNGLTVLPPLLTDEMIAQYCSALLAGTITSGWTFGAGAALQIPFAMQMAYRFNGIGVTQNVLYENQKLIANQFNSAIGKIQDSLSSTASALGKLQDVVNQNAQALNTLVKQLSSNFGAISSVLNDILSRLDKVEAEVQIDRLITGRLQSLQTYVTQQLIRAAEIRASANLAATKMSECVLGQSKRVDFCGKGYHLMSFPQCAPHGVVFLHVTYVPAQEKNFTTAPAICHDGKAHFPREGVFVSNGTHWFVTQRNFYEPQIITTDNTFVSGNCDVVIGIVNNTVYDPLQPELDSFKEELDKYFKNHTSPDVDLGDISGINASVVNIQKEIDRLNEVAKNLNESLIDLQELGKYEQYIKGGGGSDIDPYKEFGSSYQLLNFLPLDFFPDLNALVDTATALYEEELTGREHCSPHHTAIRQALVCWDELTKLIAWMSSNITSEQVRTIIVNHVNDTWGLKVRQSLWFHLSCLTFGQHTVQEFLVSFGVWIRTPAPYRPPNAPILSTLPEHTVIC

SEQ ID NO: 7580 - protein, 1365 aa, Artificial Sequence
  SARS-CoV-2/Guangdong/20SF028/2020__EPI_ISL_403936 spike protein (1-1211)(T874C_S1055C) WhcAg construct
MFVFLVLLPLVSSQCVNLTTRTQLPPAYTNSFTRGVYYPDKVFRSSVLYSTQDLFLPFFSNVTWFHAIHVSGTNGTKRFDNPVLPFNDGVYFASTEKSNIIRGWIFGTTLDSKTQSLLIVNNATNVVIKVCEFQFCNDPFLGVYYHKNNKSWMESEFRVYSSANNCTFEYVSQPFLMDLEGKQGNFKNLREFVFKNIDGYFKIYSKHTPINLVRDLPQGFSALEPLVDLPIGINITRFQTLLALHRSYLTPGDSSSGWTAGAAAYYVGYLQPRTFLLKYNENGTITDAVDCALDPLSETKCTLKSFTVEKGIYQTSNFRVQPTESIVRFPNITNLCPFGEVFNATRFASVYAWNRKRISNCVADYSVLYNSASFSTFKCYGVSPTKLNDLCFTNVYADSFVIRGDEVRQIAPGQTGKIADYNYKLPDDFTGCVIAWNSNNLDSKVGGNYNYLYRLFRKSNLKPFERDISTEIYQAGSTPCNGVEGFNCYFPLQSYGFQPTNGVGYQPYRVVVLSFELLHAPATVCGPKKSTNLVKNKCVNFNFNGLTGTGVLTESNKKFLPFQQFGRDIADTTDAVRDPQTLEILDITPCSFGGVSVITPGTNTSNQVAVLYQDVNCTEVPVAIHADQLTPTWRVYSTGSNVFQTRAGCLIGAEHVNNSYECDIPIGAGICASYQTQTNSPRRARSVASQSIIAYTMSLGAENSVAYSNNSIAIPTNFTISVTTEILPVSMTKTSVDCTMYICGDSTECSNLLLQYGSFCTQLNRALTGIAVEQDKNTQEVFAQVKQIYKTPPIKDFGGFNFSQILPDPSKPSKRSFIEDLLFNKVTLADAGFIKQYGDCLGDIAARDLICAQKFNGLTVLPPLLTDEMIAQYCSALLAGTITSGWTFGAGAALQIPFAMQMAYRFNGIGVTQNVLYENQKLIANQFNSAIGKIQDSLSSTASALGKLQDVVNQNAQALNTLVKQLSSNFGAISSVLNDILSRLDKVEAEVQIDRLITGRLQSLQTYVTQQLIRAAEIRASANLAATKMSECVLGQSKRVDFCGKGYHLMSFPQCAPHGVVFLHVTYVPAQEKNFTTAPAICHDGKAHFPREGVFVSNGTHWFVTQRNFYEPQIITTDNTFVSGNCDVVIGIVNNTVYDPLQPELDSFKEELDKYFKNHTSPDVDLGDISGINASVVNIQKEIDRLNEVAKNLNESLIDLQELGKYEQYIKGGGGSDIDPYKEFGSSYQLLNFLPLDFFPDLNALVDTATALYEEELTGREHCSPHHTAIRQALVCWDELTKLIAWMSSNITSEQVRTIIVNHVNDTWGLKVRQSLWFHLSCLTFGQHTVQEFLVSFGVWIRTPAPYRPPNAPILSTLPEHTVIC

SEQ ID NO: 7581 - protein, 1365 aa, Artificial Sequence
  SARS-CoV-2/Shenzhen/SZTH-001/2020__EPI_ISL_406592 spike protein (1-1211)(T874C_S1055C) WhcAg construct
MFVFLVLLPLVSSQCVNLTTRTQLPPAYTNSFTRGVYYPDKVFRSSVLHSTQDLFLPFFSNVTWFHAIHVSGTNGTKRFDNPVLPFNDGVYFASTEKSNIIRGWIFGTTLDSKTQSLLIVNNATNVVIKVCEFQFCNDPFLGVYYHKNNKSWMESEFRVYSSANNCTFEYVSQPFLMDLEGKQGNFKNLREFVFKNIDGYFKIYSKHTPINLVRDLPQGFSALEPLVDLPIGINITRFQTLLALHRSYLTPGDSSSGWTAGAAAYYVGYLQPRTFLLKYNENGTITDAVDCALDPLSETKCTLKSFTVEKGIYQTSNFRVQPTESIVRFPNITNLCPFGEVFNATRFASVYAWNRKRISNCVADYSVLYNSASFSTFKCYGVSPTKLNDLCFTNVYADSFVIRGDEVRQIAPGQTGKIADYNYKLPDDFTGCVIAWNSNNLDSKVGGNYNYLYRLFRKSNLKPFERDISTEIYQAGSTPCNGVEGFNCYFPLQSYGFQPTNGVGYQPYRVVVLSFELLHAPATVCGPKKSTNLVKNKCVNFNFNGLTGTGVLTESNKKFLPFQQFGRDIADTTDAVRDPQTLEILDITPCSFGGVSVITPGTNTSNQVAVLYQDVNCTEVPVAIHADQLTPTWRVYSTGSNVFQTRAGCLIGAEHVNNSYECDIPIGAGICASYQTQTNSPRRARSVASQSIIAYTMSLGAENSVAYSNNSIAIPTNFTISVTTEILPVSMTKTSVDCTMYICGDSTECSNLLLQYGSFCTQLNRALTGIAVEQDKNTQEVFAQVKQIYKTPPIKDFGGFNFSQILPDPSKPSKRSFIEDLLFNKVTLADAGFIKQYGDCLGDIAARDLICAQKFNGLTVLPPLLTDEMIAQYCSALLAGTITSGWTFGAGAALQIPFAMQMAYRFNGIGVTQNVLYENQKLIANQFNSAIGKIQDSLSSTASALGKLQDVVNQNAQALNTLVKQLSSNFGAISSVLNDILSRLDKVEAEVQIDRLITGRLQSLQTYVTQQLIRAAEIRASANLAATKMSECVLGQSKRVDFCGKGYHLMSFPQCAPHGVVFLHVTYVPAQEKNFTTAPAICHDGKAHFPREGVFVSNGTHWFVTQRNFYEPQIITTDNTFVSGNCDVLIGIVNNTVYDPLQPELDSFKEELDKYFKNHTSPDVDLGDISGINASVVNIQKEIDRLNEVAKNLNESLIDLQELGKYEQYIKGGGGSDIDPYKEFGSSYQLLNFLPLDFFPDLNALVDTATALYEEELTGREHCSPHHTAIRQALVCWDELTKLIAWMSSNITSEQVRTIIVNHVNDTWGLKVRQSLWFHLSCLTFGQHTVQEFLVSFGVWIRTPAPYRPPNAPILSTLPEHTVIC

SEQ ID NO: 7582 - protein, 1365 aa, Artificial Sequence
  SARS-CoV-2/Shenzhen/SZTH-004/2020__EPI_ISL_406595 spike protein (1-1211)(T874C_S1055C) WhcAg construct
MFVFLVLLPLVSSQCVNLTTRTQLPPAYTNSFTRGVYYPDKVFRSSVLHSTQDLFLPFFSNVTWFHAIHVSGTNGTKRFDNPVLPFNDGVYFASTEKSNIIRGWIFGTTLDSKTQSLLIVNNATNVVIKVCEFQFCNDPFLGVYYHKNNKSWMESEFRVYSSANNCTFEYVSQPFLMDLEGKQGNFKNLREFVFKNIDGYFKIYSKHTPINLVRDLPQGFSALEPLVDLPIGINITRFQTLLALHRSYLTPGDSSSGWTAGAAAYYVGYLQPRTFLLKYNENGTITDAVDCALDPLSETKCTLKSFTVEKGIYQTSNFRVQPTESIVRFPNITNLCPFGEVFNATRFASVYAWDRKRISNCVAYYSVLYNSASFSTFKCYGVSPTKLNDLCFTNVYADSFVIRGDEVRQIAPGQTGKIADYNYKLPDDFTGCVIAWNSNNLDSKVGGNYNYLYRLFRKSNLKPFERDISTEIYQAGSTPCNGVEGFNCYFPLQSYGFQPTNGVGYQPYRVVVLSFELLHAPATVCGPKKSTNLVKNKCVNFNFNGLTGTGVLTESNKKFLPFQQFGRDIADTTDAVRDPQTLEILDITPCSFGGVSVITPGTNTSNQVAVLYQDVNCTEVPVAIHADQLTPTWRVYSTGSNVFQTRAGCLIGAEHVNNSYECDIPIGAGICASYQTQTNSPRRARSVASQSIIAYTMSLGAENSVAYSNNSIAIPTNFTISVTTEILPVSMTKTSVDCTMYICGDSTECSNLLLQYGSFCTQLNRALTGIAVEQDKNTQEVFAQVKQIYKTPPIKDFGGFNFSQILPDPSKPSKRSFIEDLLFNKVTLADAGFIKQYGDCLGDIAARDLICAQKFNGLTVLPPLLTDEMIAQYCSALLAGTITSGWTFGAGAALQIPFAMQMAYRFNGIGVTQNVLYENQKLIANQFNSAIGKIQDSLSSTASALGKLQDVVNQNAQALNTLVKQLSSNFGAISSVLNDILSRLDKVEAEVQIDRLITGRLQSLQTYVTQQLIRAAEIRASANLAATKMSECVLGQSKRVDFCGKGYHLMSFPQCAPHGVVFLHVTYVPAQEKNFTTAPAICHDGKAHFPREGVFVSNGTHWFVTQRNFYEPQIITTDNTFVSGNCDVVIGIVNNTVYDPLQPELDSFKEELDKYFKNHTSPDVDLGDISGINASVVNIQKEIDRLNEVAKNLNESLIDLQELGKYEQYIKGGGGSDIDPYKEFGSSYQLLNFLPLDFFPDLNALVDTATALYEEELTGREHCSPHHTAIRQALVCWDELTKLIAWMSSNITSEQVRTIIVNHVNDTWGLKVRQSLWFHLSCLTFGQHTVQEFLVSFGVWIRTPAPYRPPNAPILSTLPEHTVIC

SEQ ID NO: 7583 - protein, 1365 aa, Artificial Sequence
  SARS-CoV-2/France/IDF0372/2020__EPI_ISL_406596 spike protein (1-1211)(T874C_S1055C) WhcAg construct
MFVFLVLLPLVSSQCVNLTTRTQLPPAYTNSFTRGVYYPDKVFRSSVLHSTQDLFLPFFSNVTWFHAIHVSGTNGTKRFDNPVLPFNDGVYFASTEKSNIIRGWIFGTTLDSKTQSLLIVNNATNVVIKVCEFQFCNDPFLGVYYHKNNKSWMESEFRVYSSANNCTFEYVSQPFLMDLEGKQGNFKNLREFVFKNIDGYFKIYSKHTPINLVRDLPQGFSALEPLVDLPIGINITRFQTLLALHRSYLTPGDSSSGWTAGAAAYYVGYLQPRTFLLKYNENGTITDAVDCALDPLSETKCTLKSFTVEKGIYQTSNFRVQPTESIVRFPNITNLCPFGEVFNATRFASVYAWNRKRISNCVADYSFLYNSASFSTFKCYGVSPTKLNDLCFTNVYADSFVIRGDEVRQIAPGQTGKIADYNYKLPDDFTGCVIAWNSNNLDSKVGGNYNYLYRLFRKSNLKPFERDISTEIYQAGSTPCNGVEGFNCYFPLQSYGFQPTNGVGYQPYRVVVLSFELLHAPATVCGPKKSTNLVKNKCVNFNFNGLTGTGVLTESNKKFLPFQQFGRDIADTTDAVRDPQTLEILDITPCSFGGVSVITPGTNTSNQVAVLYQDVNCTEVPVAIHADQLTPTWRVYSTGSNVFQTRAGCLIGAEHVNNSYECDIPIGAGICASYQTQTNSPRRARSVASQSIIAYTMSLGAENSVAYSNNSIAIPTNFTISVTTEILPVSMTKTSVDCTMYICGDSTECSNLLLQYGSFCTQLNRALTGIAVEQDKNTQEVFAQVKQIYKTPPIKDFGGFNFSQILPDPSKPSKRSFIEDLLFNKVTLADAGFIKQYGDCLGDIAARDLICAQKFNGLTVLPPLLTDEMIAQYCSALLAGTITSGWTFGAGAALQIPFAMQMAYRFNGIGVTQNVLYENQKLIANQFNSAIGKIQDSLSSTASALGKLQDVVNQNAQALNTLVKQLSSNFGAISSVLNDILSRLDKVEAEVQIDRLITGRLQSLQTYVTQQLIRAAEIRASANLAATKMSECVLGQSKRVDFCGKGYHLMSFPQCAPHGVVFLHVTYVPAQEKNFTTAPAICHDGKAHFPREGVFVSNGTHWFVTQRNFYEPQIITTDNTFVSGNCDVVIGIVNNTVYDPLQPELDSFKEELDKYFKNHTSPDVDLGDISGINASVVNIQKEIDRLNEVAKNLNESLIDLQELGKYEQYIKGGGGSDIDPYKEFGSSYQLLNFLPLDFFPDLNALVDTATALYEEELTGREHCSPHHTAIRQALVCWDELTKLIAWMSSNITSEQVRTIIVNHVNDTWGLKVRQSLWFHLSCLTFGQHTVQEFLVSFGVWIRTPAPYRPPNAPILSTLPEHTVIC

SEQ ID NO: 7584 - protein, 1365 aa, Artificial Sequence
  SARS-CoV-2/Australia/VIC01/2020__EPI_ISL_406844 spike protein (1-1211)(T874C_S1055C) WhcAg construct
MFVFLVLLPLVSSQCVNLTTRTQLPPAYTNSFTRGVYYPDKVFRSSVLHSTQDLFLPFFSNVTWFHAIHVSGTNGTKRFDNPVLPFNDGVYFASTEKSNIIRGWIFGTTLDSKTQSLLIVNNATNVVIKVCEFQFCNDPFLGVYYHKNNKSWMESEFRVYSSANNCTFEYVSQPFLMDLEGKQGNFKNLREFVFKNIDGYFKIYSKHTPINLVRDLPQGFSALEPLVDLPIGINITRFQTLLALHRRYLTPGDSSSGWTAGAAAYYVGYLQPRTFLLKYNENGTITDAVDCALDPLSETKCTLKSFTVEKGIYQTSNFRVQPTESIVRFPNITNLCPFGEVFNATRFASVYAWNRKRISNCVADYSVLYNSASFSTFKCYGVSPTKLNDLCFTNVYADSFVIRGDEVRQIAPGQTGKIADYNYKLPDDFTGCVIAWNSNNLDSKVGGNYNYLYRLFRKSNLKPFERDISTEIYQAGSTPCNGVEGFNCYFPLQSYGFQPTNGVGYQPYRVVVLSFELLHAPATVCGPKKSTNLVKNKCVNFNFNGLTGTGVLTESNKKFLPFQQFGRDIADTTDAVRDPQTLEILDITPCSFGGVSVITPGTNTSNQVAVLYQDVNCTEVPVAIHADQLTPTWRVYSTGSNVFQTRAGCLIGAEHVNNSYECDIPIGAGICASYQTQTNSPRRARSVASQSIIAYTMSLGAENSVAYSNNSIAIPTNFTISVTTEILPVSMTKTSVDCTMYICGDSTECSNLLLQYGSFCTQLNRALTGIAVEQDKNTQEVFAQVKQIYKTPPIKDFGGFNFSQILPDPSKPSKRSFIEDLLFNKVTLADAGFIKQYGDCLGDIAARDLICAQKFNGLTVLPPLLTDEMIAQYCSALLAGTITSGWTFGAGAALQIPFAMQMAYRFNGIGVTQNVLYENQKLIANQFNSAIGKIQDSLSSTASALGKLQDVVNQNAQALNTLVKQLSSNFGAISSVLNDILSRLDKVEAEVQIDRLITGRLQSLQTYVTQQLIRAAEIRASANLAATKMSECVLGQSKRVDFCGKGYHLMSFPQCAPHGVVFLHVTYVPAQEKNFTTAPAICHDGKAHFPREGVFVSNGTHWFVTQRNFYEPQIITTDNTFVSGNCDVVIGIVNNTVYDPLQPELDSFKEELDKYFKNHTSPDVDLGDISGINASVVNIQKEIDRLNEVAKNLNESLIDLQELGKYEQYIKGGGGSDIDPYKEFGSSYQLLNFLPLDFFPDLNALVDTATALYEEELTGREHCSPHHTAIRQALVCWDELTKLIAWMSSNITSEQVRTIIVNHVNDTWGLKVRQSLWFHLSCLTFGQHTVQEFLVSFGVWIRTPAPYRPPNAPILSTLPEHTVIC

SEQ ID NO: 7585 - protein, 1365 aa, Artificial Sequence
  SARS-CoV-2/Germany/BavPat1/2020__EPI_ISL_406862 spike protein (1-1211)(T874C_S1055C) WhcAg construct
MFVFLVLLPLVSSQCVNLTTRTQLPPAYTNSFTRGVYYPDKVFRSSVLHSTQDLFLPFFSNVTWFHAIHVSGTNGTKRFDNPVLPFNDGVYFASTEKSNIIRGWIFGTTLDSKTQSLLIVNNATNVVIKVCEFQFCNDPFLGVYYHKNNKSWMESEFRVYSSANNCTFEYVSQPFLMDLEGKQGNFKNLREFVFKNIDGYFKIYSKHTPINLVRDLPQGFSALEPLVDLPIGINITRFQTLLALHRSYLTPGDSSSGWTAGAAAYYVGYLQPRTFLLKYNENGTITDAVDCALDPLSETKCTLKSFTVEKGIYQTSNFRVQPTESIVRFPNITNLCPFGEVFNATRFASVYAWNRKRISNCVADYSVLYNSASFSTFKCYGVSPTKLNDLCFTNVYADSFVIRGDEVRQIAPGQTGKIADYNYKLPDDFTGCVIAWNSNNLDSKVGGNYNYLYRLFRKSNLKPFERDISTEIYQAGSTPCNGVEGFNCYFPLQSYGFQPTNGVGYQPYRVVVLSFELLHAPATVCGPKKSTNLVKNKCVNFNFNGLTGTGVLTESNKKFLPFQQFGRDIADTTDAVRDPQTLEILDITPCSFGGVSVITPGTNTSNQVAVLYQGVNCTEVPVAIHADQLTPTWRVYSTGSNVFQTRAGCLIGAEHVNNSYECDIPIGAGICASYQTQTNSPRRARSVASQSIIAYTMSLGAENSVAYSNNSIAIPTNFTISVTTEILPVSMTKTSVDCTMYICGDSTECSNLLLQYGSFCTQLNRALTGIAVEQDKNTQEVFAQVKQIYKTPPIKDFGGFNFSQILPDPSKPSKRSFIEDLLFNKVTLADAGFIKQYGDCLGDIAARDLICAQKFNGLTVLPPLLTDEMIAQYCSALLAGTITSGWTFGAGAALQIPFAMQMAYRFNGIGVTQNVLYENQKLIANQFNSAIGKIQDSLSSTASALGKLQDVVNQNAQALNTLVKQLSSNFGAISSVLNDILSRLDKVEAEVQIDRLITGRLQSLQTYVTQQLIRAAEIRASANLAATKMSECVLGQSKRVDFCGKGYHLMSFPQCAPHGVVFLHVTYVPAQEKNFTTAPAICHDGKAHFPREGVFVSNGTHWFVTQRNFYEPQIITTDNTFVSGNCDVVIGIVNNTVYDPLQPELDSFKEELDKYFKNHTSPDVDLGDISGINASVVNIQKEIDRLNEVAKNLNESLIDLQELGKYEQYIKGGGGSDIDPYKEFGSSYQLLNFLPLDFFPDLNALVDTATALYEEELTGREHCSPHHTAIRQALVCWDELTKLIAWMSSNITSEQVRTIIVNHVNDTWGLKVRQSLWFHLSCLTFGQHTVQEFLVSFGVWIRTPAPYRPPNAPILSTLPEHTVIC

SEQ ID NO: 7586 - protein, 1365 aa, Artificial Sequence
  SARS-CoV-2/Wuhan/HBCDC-HB-02/2020__EPI_ISL_412978 spike protein (1-1211)(T874C_S1055C) WhcAg construct
MFVFLVLLPLVSSQCVNLTTRTQLPPAYTNSFTRGVYYPDKVFRSSVLHSTQDLFLPFFSNVTWFHAIHVSGTNGTKRFDNPVLPFNDGVYFASTEKSNIIRGWIFGTTLDSKTQSLLIVNNATNVVIKVCEFQFCNDPFLGVYYHKNNKSWMESEFRVYSSANNCTFEYVSQPFLMDLEGKQGNFKNLREFVFKNIDGYFKIYSKHTPINLVRDLPQGFSALEPLVDLPIGINITRFQTLLALHRSYLTPGDSSSGWTAGAAAYYVGYLQPRTFLLKYNENGTITDAVDCALDPLSETKCTLKSFTVEKGIYQTSNFRVQPTESIVRFPNITNLCPFGEVFNATRFASVYAWNRKRISNCVADYSVLYNSASFSTFKCYGVSPTKLNDLCFTNVYADSFVIRGDEVRQIAPGQTGKIADYNYKLPDDFTGCVIAWNSNNLDSKVGGNYNYLYRLFRKSNLKPFERDISTEIYQAGSTPCNGVEGFNCYFPLQSYGFQPTNGVGYQPYRVVVLSFELLHAPATVCGPKKSTNLVKNKCVNFNFNGLTGTGVLTESNKKFLPFQQFGRDIADTTDAVRDPQTLEILDITPCSFGGVSVITPGTNTSNQVAVLYQDVNCTEVPVAIHADQLTPTWRVYSTGSNVFQTRAGCLIGAEHVNNSYECDIPIGAGICASYQTQTNSPRRARSVASQSIIAYTMSLGAENSVAYSNNSIAIPTNFTISVTTEILPVSMTKTSVDCTMYICGDSTECSNFLLQYGSFCTQLNRALTGIAVEQDKNTQEVFAQVKQIYKTPPIKDFGGFNFSQILPDPSKPSKRSFIEDLLFNKVTLADAGFIKQYGDCLGDIAARDLICAQKFNGLTVLPPLLTDEMIAQYCSALLAGTITSGWTFGAGAALQIPFAMQMAYRFNGIGVTQNVLYENQKLIANQFNSAIGKIQDSLSSTASALGKLQDVVNQNAQALNTLVKQLSSNFGAISSVLNDILSRLDKVEAEVQIDRLITGRLQSLQTYVTQQLIRAAEIRASANLAATKMSECVLGQSKRVDFCGKGYHLMSFPQCAPHGVVFLHVTYVPAQEKNFTTAPAICHDGKAHFPREGVFVSNGTHWFVTQRNFYEPQIITTDNTFVSGNCDVVIGIVNNTVYDPLQPELDSFKEELDKYFKNHTSPDVDLGDISGINASVVNIQKEIDRLNEVAKNLNESLIDLQELGKYEQYIKGGGGSDIDPYKEFGSSYQLLNFLPLDFFPDLNALVDTATALYEEELTGREHCSPHHTAIRQALVCWDELTKLIAWMSSNITSEQVRTIIVNHVNDTWGLKVRQSLWFHLSCLTFGQHTVQEFLVSFGVWIRTPAPYRPPNAPILSTLPEHTVIC

SEQ ID NO: 7587 - protein, 1365 aa, Artificial Sequence
  SARS-CoV-2/Australia/QLD02/2020__EPI_ISL_407896 spike protein (1-1211)(T874C_S1055C) WhcAg construct
MFVFLVLLPLVSSQCVNLTTRTQLPPAYTNSFTRGVYYPDKVFRSSVLHSTQDLFLPFFSNVTWFHAIHVSGTNGTKRFDNPVLPFNDGVYFASTEKSNIIRGWIFGTTLDSKTQSLLIVNNATNVVIKVCEFQFCNDPFLGVYYHKNNKSWMESEFRVYSSANNCTFEYVSQPFLMDLEGKQGNFKNLREFVFKNIDGYFKIYSKHTPINLVRDLPQGFSALEPLVDLPIGINITRFQTLLALHRSYLTPGDSSSGWTAGAAAYYVGYLQPRTFLLKYNENGTITDAVDCALDPLSETKCTLKSFTVEKGIYQTSNFRVQPTESIVRFPNITNLCPFGEVFNATRFASVYAWNRKRISNCVADYSVLYNSASFSTFKCYGVSPTKLNDLCFTNVYADSFVIRGDEVRQIAPGQTGKIADYNYKLPDDFTGCVIAWNSNNLDSKVGGNYNYLYRLFRKSNLKPFERDISTEIYQAGSTPCNGVEGFNCYFPLQSYGFQPTNGVGYQPYRVVVLSFELLHAPATVCGPKKSTNLVKNKCVNFNFNGLTGTGVLTESNKKFLPFQQFGRDIADTTDAVRDPQTLEILDITPCSFGGVSVITPGTNTSNQVAVLYQDVNCTEVPVAIHADQLTPTWRVYSTGSNVFQTRAGCLIGAEHVNNSYECDIPIGAGICASYQTQTNSPRRARSVASQSIIAYTMSLGAENSVAYSNNSIAIPTNFTISVTTEILPVSMTKTSVDCTMYICGDSTECSNLLLQYGSFCTQLNRALTGIAVEQDKNTQEVFAQVKQIYKTPPIKDFGGFNFSQILPDPSKPSKRSFIEDLLFNKVTLADAGFIKQYGDCLGDIAARDLICAQKFNGLTVLPPLLTDEMIAQYCSALLAGTITSGWTFGAGAALQIPFAMQMAYRFNGIGVTQNVLYENQKLIANQFNSAIGKIQDSLSSTASALGKLQDVVNQNAQALNTLVKQLSSNFGAISSVLNDILSRLDKVEAEVQIDRLITGRLQSLQTYVTQQLIRAAEIRASANLAATKMSECVLGQSKRVDFCGKGYHLMSFPQCAPHGVVFLHVTYVPAQEKNFTTAPAICHDGKAHFPREGVFVSNGTHWFVTQRNFYEPQIITTDNTFVSGNCDVVIGIVNNTVYDPLQLELDSFKEELDKYFKNHTSPDVDLGDISGINASVVNIQKEIDRLNEVAKNLNESLIDLQELGKYEQYIKGGGGSDIDPYKEFGSSYQLLNFLPLDFFPDLNALVDTATALYEEELTGREHCSPHHTAIRQALVCWDELTKLIAWMSSNITSEQVRTIIVNHVNDTWGLKVRQSLWFHLSCLTFGQHTVQEFLVSFGVWIRTPAPYRPPNAPILSTLPEHTVIC

SEQ ID NO: 7588 - protein, 1365 aa, Artificial Sequence
  SARS-CoV-2/India/1-31/2020__EPI_ISL_413523 spike protein (1-1211)(T874C_S1055C) WhcAg construct
MFVFLVLLPLVSSQCVNLTTRTQLPPAYTNSFTRGVYYPDKVFRSSVLHSTQDLFLPFFSNVTWFHAIHVSGTNGTKRFDNPVLPFNDGVYFASTEKSNIIRGWIFGTTLDSKTQSLLIVNNATNVVIKVCEFQFCNDPFLGVYYHKNNKSWMESEFRVYSSANNCTFEYVSQPFLMDLEGKQGNFKNLREFVFKNIDGYFKIYSKHTPINLVRDLPQGFSALEPLVDLPIGINITRFQTLLALHRSYLTPGDSSSGWTAGAAAYYVGYLQPRTFLLKYNENGTITDAVDCALDPLSETKCTLKSFTVEKGIYQTSNFRVQPTESIVRFPNITNLCPFGEVFNATRFASVYAWNRKRISNCVADYSVLYNSASFSTFKCYGVSPTKLNDLCFTNVYADSFVIRGDEVRQIAPGQTGKIADYNYKLPDDFTGCVIAWNSNNLDSKVGGNYNYLYRLFRKSNLKPFERDISTEIYQAGSTPCNGVEGFNCYFPLQSYGFQPTNGVGYQPYRVVVLSFELLHAPATVCGPKKSTNLVKNKCVNFNFNGLTGTGVLTESNKKFLPFQQFGRDIADTTDAVRDPQTLEILDITPCSFGGVSVITPGTNTSNQVAVLYQDVNCTEVPVAIHADQLTPTWRVYSTGSNVFQTRAGCLIGAEHVNNSYECDIPIGAGICASYQTQTNSPRRARSVASQSIIAYTMSLGAENSVAYSNNSIAIPTNFTISVTTEILPVSMTKTSVDCTMYICGDSTECSNLLLQYGSFCTQLNRALTGIAVEQDKNTQEVFAQVKQIYKTPPIKDFGGFNFSQILPDPSKPSKRSFIEDLLFNKVTLADAGFIKQYGDCLGDIAARDLICAQKFNGLTVLPPLLTDEMIAQYCSALLAGTITSGWTFGAGAALQIPFAMQMAYRFNGIGVTQNVLYENQKLIANQFNSVIGKIQDSLSSTASALGKLQDVVNQNAQALNTLVKQLSSNFGAISSVLNDILSRLDKVEAEVQIDRLITGRLQSLQTYVTQQLIRAAEIRASANLAATKMSECVLGQSKRVDFCGKGYHLMSFPQCAPHGVVFLHVTYVPAQEKNFTTAPAICHDGKAHFPREGVFVSNGTHWFVTQRNFYEPQIITTDNTFVSGNCDVVIGIVNNTVYDPLQPELDSFKEELDKYFKNHTSPDVDLGDISGINASVVNIQKEIDRLNEVAKNLNESLIDLQELGKYEQYIKGGGGSDIDPYKEFGSSYQLLNFLPLDFFPDLNALVDTATALYEEELTGREHCSPHHTAIRQALVCWDELTKLIAWMSSNITSEQVRTIIVNHVNDTWGLKVRQSLWFHLSCLTFGQHTVQEFLVSFGVWIRTPAPYRPPNAPILSTLPEHTVIC

SEQ ID NO: 7589 - protein, 1365 aa, Artificial Sequence
  SARS-CoV-2/Guangdong/GD2020087-P0008/2020__EPI_ISL_413863 spike protein (1-1211)(T874C_S1055C) WhcAg construct
MFVFLVLLPLVSSQCVNLTTRTQLPPAYTNSFTRGVYYPDKVFRSSVLHSTQDLFLPFFSNVTWFHAIHVSGTNGTKRFDNPVLPFNDGVYFASTEKSNIIRGWIFGTTLDSKTQSLLIVNNATNVVIKVCEFQFCNDPFLGVYYHKNNKSWMESEFRVYSSANNCTFEYVSQPFLMDLEGKQGNFKNLREFVFKNIDGYFKIYSKHTPINLVRDLPQGFSALEPLVDLPIGINITRFQTLLALHRSYLTPGDSSSGWTAGAAAYYVGYLQPRTFLLKYNENGTITDAVDCALDPLSETKCTLKSFTVEKGIYQTSNFRVQPTESIVRFPNITNLCPFGEVFNATRFASVYAWNRKRISNCVADYSVLYNSASFSTFKCYGVSPTKLNDLCFTNVYADSFVIRGDEVREIAPGQTGKIADYNYKLPDDFTGCVIAWNSNNLDSKVGGNYNYLYRLFRKSNLKPFERDISTEIYQAGSTPCNGVEGFNCYFPLQSYGFQPTNGVGYQPYRVVVLSFELLHAPATVCGPKKSTNLVKNKCVNFNFNGLTGTGVLTESNKKFLPFQQFGRDIADTTDAVRDPQTLEILDITPCSFGGVSVITPGTNTSNQVAVLYQDVNCTEVPVAIHADQLTPTWRVYSTGSNVFQTRAGCLIGAEHVNNSYECDIPIGAGICASYQTQTNSPRRARSVASQSIIAYTMSLGAENSVAYSNNSIAIPTNFTISVTTEILPVSMTKTSVDCTMYICGDSTECSNLLLQYGSFCTQLNRALTGIAVEQDKNTQEVFAQVKQIYKTPPIKDFGGFNFSQILPDPSKPSKRSFIEDLLFNKVTLADAGFIKQYGDCLGDIAARDLICAQKFNGLTVLPPLLTDEMIAQYCSALLAGTITSGWTFGAGAALQIPFAMQMAYRFNGIGVTQNVLYENQKLIANQFNSAIGKIQDSLSSTASALGKLQDVVNQNAQALNTLVKQLSSNFGAISSVLNDILSRLDKVEAEVQIDRLITGRLQSLQTYVTQQLIRAAEIRASANLAATKMSECVLGQSKRVDFCGKGYHLMSFPQCAPHGVVFLHVTYVPAQEKNFTTAPAICHDGKAHFPREGVFVSNGTHWFVTQRNFYEPQIITTDNTFVSGNCDVVIGIVNNTVYDPLQPELDSFKEELDKYFKNHTSPDVDLGDISGINASVVNIQKEIDRLNEVAKNLNESLIDLQELGKYEQYIKGGGGSDIDPYKEFGSSYQLLNFLPLDFFPDLNALVDTATALYEEELTGREHCSPHHTAIRQALVCWDELTKLIAWMSSNITSEQVRTIIVNHVNDTWGLKVRQSLWFHLSCLTFGQHTVQEFLVSFGVWIRTPAPYRPPNAPILSTLPEHTVIC

SEQ ID NO: 7590 - protein, 1365 aa, Artificial Sequence
  SARS-CoV-2/Sweden/01/2020__EPI_ISL_411951 spike protein (1-1211)(T874C_S1055C) WhcAg construct
MFVFLVLLPLVSSQCVNLTTRTQLPPAYTNSFTRGVYYPDKVFRSSVLHSTQDLFLPFFSNVTWFHAIHVSGTNGTKRFDNPVLPFNDGVYFASTEKSNIIRGWIFGTTLDSKTQSLLIVNNATNVVIKVCEFQFCNDPFLGVYYHKNNKSWMESEFRVYSSANNCTFEYVSQPFLMDLEGKQGNFKNLREFVFKNIDGYFKIYSKHTPINLVRDLPQGFSALEPLVDLPIGINITRFQTLLALHRSYLTPGDSSSGWTAGAAAYYVGYLQPRTFLLKYNENGTITDAVDCALDPLSETKCTLKSFTVEKGIYQTSNFRVQPTESIVRFPNITNLCPFGEVFNATRFASVYAWNRKRISNCVADYSVLYNSASFSTFKCYGVSPTKLNDLCFTNVYADSFVIRGDEVRQIAPGQTGKIADYNYKLPDDFTGCVIAWNSNNLDSKVGGNYNYLYRLFRKSNLKPFERDISTEIYQAGSTPCNGVEGFNCYFPLQSYGFQPTNGVGYQPYRVVVLSFELLHAPATVCGPKKSTNLVKNKCVNFNFNGLTGTGVLTESNKKFLPFQQFGRDIADTTDAVRDPQTLEILDITPCSFGGVSVITPGTNTSNQVAVLYQDVNCTEVPVAIHADQLTPTWRVYSTGSNVFQTRAGCLIGAEHVNNSYECDIPIGAGICASYQTQTNSPRRARSVASQSIIAYTMSLGAENSVAYSNNSIAIPTNFTISVTTEILPVSMTKTSVDCTMYICGDSTECSNLLLQYGSFCTQLNRALTGIAVEQDKNTQEVFAQVKQIYKTPPIKDCGGFNFSQILPDPSKPSKRSFIEDLLFNKVTLADAGFIKQYGDCLGDIAARDLICAQKFNGLTVLPPLLTDEMIAQYCSALLAGTITSGWTFGAGAALQIPFAMQMAYRFNGIGVTQNVLYENQKLIANQFNSAIGKIQDSLSSTASALGKLQDVVNQNAQALNTLVKQLSSNFGAISSVLNDILSRLDKVEAEVQIDRLITGRLQSLQTYVTQQLIRAAEIRASANLAATKMSECVLGQSKRVDFCGKGYHLMSFPQCAPHGVVFLHVTYVPAQEKNFTTAPAICHDGKAHFPREGVFVSNGTHWFVTQRNFYEPQIITTDNTFVSGNCDVVIGIVNNTVYDPLQPELDSFKEELDKYFKNHTSPDVDLGDISGINASVVNIQKEIDRLNEVAKNLNESLIDLQELGKYEQYIKGGGGSDIDPYKEFGSSYQLLNFLPLDFFPDLNALVDTATALYEEELTGREHCSPHHTAIRQALVCWDELTKLIAWMSSNITSEQVRTIIVNHVNDTWGLKVRQSLWFHLSCLTFGQHTVQEFLVSFGVWIRTPAPYRPPNAPILSTLPEHTVIC

SEQ ID NO: 7591 - protein, 1365 aa, Artificial Sequence
  SARS-CoV-2/Tianmen/HBCDC-HB-07/2020__EPI_ISL_412983 spike protein (1-1211)(T874C_S1055C) WhcAg construct
MFVFLVLLPLVSSQCVNLTTRTQLPPAYTNSFTRGVYYPDKVFRSSVLHSTQDLFLPFFSNVTWFHAIHVSGTNGTKRFDNPVLPFNDGVYFASTEKSNIIRGWIFGTTLDSKTQSLLIVNNATNVVIKVCEFQFCNDPFLGVYYHKNNKSWMESEFRVYSSANNCTFEYVSQPFLMDLEGKQGNFKNLREFVFKNIDGYFKIYSKHTPINLVRDLPQGFSALEPLVDLPIGINITRFQTLLALHRSYLTPGDSSSGWTAGAAAYYVGYLQPRTFLLKYNENGTITDAVDCALDPLSETKCTLKSFTVEKGIYQTSNFRVQPTESIVRFPNITNLCPFGEVFNATRFASVYAWNRKRISNCVADYSVLYNSASFSTFKCYGVSPTKLNDLCFTNVYADSFVIRGDEVRQIAPGQTGKIADYNYKLPDDFTGCVIAWNSNNLDSKVGGNYNYLYRLFRKSNLKPFERDISTEIYQAGSTPCNGVEGFNCYFPLQSYGFQPTNGVGYQPYRVVVLSFELLHAPATVCGPKKSTNLVKNKCVNFNFNGLTGTGVLTESNKKFLPFQQFGRDIADTTDAVRDPQTLEILDITPCSFGGVSVITPGTNTSNQVAVLYQDLNCTEVPVAIHADQLTPTWRVYSTGSNVFQTRAGCLIGAEHVNNSYECDIPIGAGICASYQTQTNSPRRARSVASQSIIAYTMSLGAENSVAYSNNSIAIPTNFTISVTTEILPVSMTKTSVDCTMYICGDSTECSNLLLQYGSFCTQLNRALTGIAVEQDKNTQEVFAQVKQIYKTPPIKDFGGFNFSQILPDPSKPSKRSFIEDLLFNKVTLADAGFIKQYGDCLGDIAARDLICAQKFNGLTVLPPLLTDEMIAQYCSALLAGTITSGWTFGAGAALQIPFAMQMAYRFNGIGVTQNVLYENQKLIANQFNSAIGKIQDSLSSTASALGKLQDVVNQNAQALNTLVKQLSSNFGAISSVLNDILSRLDKVEAEVQIDRLITGRLQSLQTYVTQQLIRAAEIRASANLAATKMSECVLGQSKRVDFCGKGYHLMSFPQCAPHGVVFLHVTYVPAQEKNFTTAPAICHDGKAHFPREGVFVSNGTHWFVTQRNFYEPQIITTDNTFVSGNCDVVIGIVNNTVYDPLQPELDSFKEELDKYFKNHTSPDVDLGDISGINASVVNIQKEIDRLNEVAKNLNESLIDLQELGKYEQYIKGGGGSDIDPYKEFGSSYQLLNFLPLDFFPDLNALVDTATALYEEELTGREHCSPHHTAIRQALVCWDELTKLIAWMSSNITSEQVRTIIVNHVNDTWGLKVRQSLWFHLSCLTFGQHTVQEFLVSFGVWIRTPAPYRPPNAPILSTLPEHTVIC

SEQ ID NO: 7592 - protein, 1365 aa, Artificial Sequence
  SARS-CoV-2/Hong Kong/case42_VM20002493/2020__EPI_ISL_414527 spike protein (1-1211)(T874C_S1055C) WhcAg construct
MFVFLVLLPLVSSQCVNLTTRTQLPPAYTNSFTRGVYYPDKVFRSSVLHSTQDLFLPFFSNVTWFHAIHVSGTNGTKRFDNPVLPFNDGVYFASTEKSNIIRGWIFGTTLDSKTQSLLIVNNATNVVIKVCEFQFCNDPFLGVYYHKNNKSWMESEFRVYSSANNCTFEYVSQPFLMDLEGKQGNFKNLREFVFKNIDGYFKIYSKHTPINLVRDLPQGFSALEPLVDLPIGINITRFQTLLALHRSYLTPGDSSSGWTAGAAAYYVGYLQPRTFLLKYNENGTITDAVDCALDPLSETKCTLKSFTVEKGIYQTSNFRVQPTESIVRFPNITNLCPFGEVFNATRFASVYAWNRKRISNCVADYSVLYNSASFSTFKCYGVSPTKLNDLCFTNVYADSFVIRGDEVRQIAPGQTGKIADYNYKLPDDFTGCVIAWNSNNLDSKVGGNYNYLYRLFRKSNLKPFERDISTEIYQAGSTPCNGVEGFNCYFPLQSYGFQPTNGVGYQPYRVVVLSFELLHAPATVCGPKKSTNLVKNKCVNFNFNGLTGTGVLTESNKKFLPFQQFGRDIADTTDAVRDPQTLEILDITPCSFGGVSVITPGTNTSNQVAVLYQDVNCTEVPVAIHADQLTPTWRVYSTGSNVFQTRAGCLIGAEHVNNSYECDIPIGAGICASYQTQTNSPRRARSVASQSIIAYTMSLGAENSVAYSNNSIAIPTNFAISVTTEILPVSMTKTSVDCTMYICGDSTECSNLLLQYGSFCTQLNRALTGIAVEQDKNTQEVFAQVKQIYKTPPIKDFGGFNFSQILPDPSKPSKRSFIEDLLFNKVTLADAGFIKQYGDCLGDIAARDLICAQKFNGLTVLPPLLTDEMIAQYCSALLAGTITSGWTFGAGAALQIPFAMQMAYRFNGIGVTQNVLYENQKLIANQFNSAIGKIQDSLSSTASALGKLQDVVNQNAQALNTLVKQLSSNFGAISSVLNDILSRLDKVEAEVQIDRLITGRLQSLQTYVTQQLIRAAEIRASANLAATKMSECVLGQSKRVDFCGKGYHLMSFPQCAPHGVVFLHVTYVPAQEKNFTTAPAICHDGKAHFPREGVFVSNGTHWFVTQRNFYEPQIITTDNTFVSGNCDVVIGIVNNTVYDPLQPELDSFKEELDKYFKNHTSPDVDLGDISGINASVVNIQKEIDRLNEVAKNLNESLIDLQELGKYEQYIKGGGGSDIDPYKEFGSSYQLLNFLPLDFFPDLNALVDTATALYEEELTGREHCSPHHTAIRQALVCWDELTKLIAWMSSNITSEQVRTIIVNHVNDTWGLKVRQSLWFHLSCLTFGQHTVQEFLVSFGVWIRTPAPYRPPNAPILSTLPEHTVIC

SEQ ID NO: 7593 - protein, 1365 aa, Artificial Sequence
  SARS-CoV-2/USA/CruiseA-23/2020__EPI_ISL_414482 spike protein (1-1211)(T874C_S1055C) WhcAg construct
MFVFLVLLPLVSSQCVNLTTRTQLPPAYTNSFTRGVYYPDKVFRSSVLHSTQDLFLPFFSNVTWFHAIHVSGTNGTKRFDNPVLPFNDGVYFASTEKSNIIRGWIFGTTLDSKTQSLLIVNNATNVVIKVCEFQFCNDPFLGVYYHKNNKSWMESEFRVYSSANNCTFEYVSQPFLMDLEVKQGNFKNLREFVFKNIDGYFKIYSKHTPINLVRDLPQGFSALEPLVDLPIGINITRFQTLLALHRSYLTPGDSSSGWTAGAAAYYVGYLQPRTFLLKYNENGTITDAVDCALDPLSETKCTLKSFTVEKGIYQTSNFRVQPTESIVRFPNITNLCPFGEVFNATRFASVYAWNRKRISNCVADYSVLYNSASFSTFKCYGVSPTKLNDLCFTNVYADSFVIRGDEVRQIAPGQTGKIADYNYKLPDDFTGCVIAWNSNNLDSKVGGNYNYLYRLFRKSNLKPFERDISTEIYQAGSTPCNGVEGFNCYFPLQSYGFQPTNGVGYQPYRVVVLSFELLHAPATVCGPKKSTNLVKNKCVNFNFNGLTGTGVLTESNKKFLPFQQFGRDIADTTDAVRDPQTLEILDITPCSFGGVSVITPGTNTSNQVAVLYQDVNCTEVPVAIHADQLTPTWRVYSTGSNVFQTRAGCLIGAEHVNNSYECDIPIGAGICASYQTQTNSPRRARSVASQSIIAYTMSLGAENSVAYSNNSIAIPTNFTISVTTEILPVSMTKTSVDCTMYICGDSTECSNLLLQYGSFCTQLNRALTGIAVEQDKNTQEVFAQVKQIYKTPPIKDFGGFNFSQILPDPSKPSKRSFIEDLLFNKVTLADAGFIKQYGDCLGDIAARDLICAQKFNGLTVLPPLLTDEMIAQYCSALLAGTITSGWTFGAGAALQIPFAMQMAYRFNGIGVTQNVLYENQKLIANQFNSAIGKIQDSLSSTASALGKLQDVVNQNAQALNTLVKQLSSNFGAISSVLNDILSRLDKVEAEVQIDRLITGRLQSLQTYVTQQLIRAAEIRASANLAATKMSECVLGQSKRVDFCGKGYHLMSFPQCAPHGVVFLHVTYVPAQEKNFTTAPAICHDGKAHFPREGVFVSNGTHWFVTQRNFYEPQIITTDNTFVSGNCDVVIGIVNNTVYDPLQPELDSFKEELDKYFKNHTSPDVDLGDISGINASVVNIQKEIDRLNEVAKNLNESLIDLQELGKYEQYIKGGGGSDIDPYKEFGSSYQLLNFLPLDFFPDLNALVDTATALYEEELTGREHCSPHHTAIRQALVCWDELTKLIAWMSSNITSEQVRTIIVNHVNDTWGLKVRQSLWFHLSCLTFGQHTVQEFLVSFGVWIRTPAPYRPPNAPILSTLPEHTVIC

SEQ ID NO: 7594 - protein, 1365 aa, Artificial Sequence
  SARS-CoV-2/Hong Kong/case85_VM20002868/2020__EPI_ISL_414519 spike protein (1-1211)(T874C_S1055C) WhcAg construct
MFVFLVLVPLVSSQCVNLTTRTQLPPAYTNSFTRGVYYPDKVFRSSVLHSTQDLFLPFFSNVTWFHAIHVSGTNGTKRFDNPVLPFNDGVYFASTEKSNIIRGWIFGTTLDSKTQSLLIVNNATNVVIKVCEFQFCNDPFLGVYYHKNNKSWMESEFRVYSSANNCTFEYVSQPFLMDLEGKQGNFKNLREFVFKNIDGYFKIYSKHTPINLVRDLPQGFSALEPLVDLPIGINITRFQTLLALHRSYLTPGDSSSGWTAGAAAYYVGYLQPRTFLLKYNENGTITDAVDCALDPLSETKCTLKSFTVEKGIYQTSNFRVQPTESIVRFPNITNLCPFGEVFNATRFASVYAWNRKRISNCVADYSVLYNSASFSTFKCYGVSPTKLNDLCFTNVYADSFVIRGDEVRQIAPGQTGKIADYNYKLPDDFTGCVIAWNSNNLDSKVGGNYNYLYRLFRKSNLKPFERDISTEIYQAGSTPCNGVEGFNCYFPLQSYGFQPTNGVGYQPYRVVVLSFELLHAPATVCGPKKSTNLVKNKCVNFNFNGLTGTGVLTESNKKFLPFQQFGRDIADTTDAVRDPQTLEILDITPCSFGGVSVITPGTNTSNQVAVLYQDVNCTEVPVAIHADQLTPTWRVYSTGSNVFQTRAGCLIGAEHVNNSYECDIPIGAGICASYQTQTNSPRRARSVASQSIIAYTMSLGAENSVAYSNNSIAIPTNFTISVTTEILPVSMTKTSVDCTMYICGDSTECSNLLLQYGSFCTQLNRALTGIAVEQDKNTQEVFAQVKQIYKTPPIKDFGGFNFSQILPDPSKPSKRSFIEDLLFNKVTLADAGFIKQYGDCLGDIAARDLICAQKFNGLTVLPPLLTDEMIAQYCSALLAGTITSGWTFGAGAALQIPFAMQMAYRFNGIGVTQNVLYENQKLIANQFNSAIGKIQDSLSSTASALGKLQDVVNQNAQALNTLVKQLSSNFGAISSVLNDILSRLDKVEAEVQIDRLITGRLQSLQTYVTQQLIRAAEIRASANLAATKMSECVLGQSKRVDFCGKGYHLMSFPQCAPHGVVFLHVTYVPAQEKNFTTAPAICHDGKAHFPREGVFVSNGTHWFVTQRNFYEPQIITTDNTFVSGNCDVVIGIVNNTVYDPLQPELDSFKEELDKYFKNHTSPDVDLGDISGINASVVNIQKEIDRLNEVAKNLNESLIDLQELGKYEQYIKGGGGSDIDPYKEFGSSYQLLNFLPLDFFPDLNALVDTATALYEEELTGREHCSPHHTAIRQALVCWDELTKLIAWMSSNITSEQVRTIIVNHVNDTWGLKVRQSLWFHLSCLTFGQHTVQEFLVSFGVWIRTPAPYRPPNAPILSTLPEHTVIC

SEQ ID NO: 7595 - protein, 1365 aa, Artificial Sequence; identical to SEQ ID NO: 7585
  SARS-CoV-2/England/200990660/2020__EPI_ISL_414523 spike protein (1-1211)(T874C_S1055C) WhcAg construct

SEQ ID NO: 7596 - protein, 1365 aa, Artificial Sequence
  SARS-CoV-2/Australia/NSW09/2020__EPI_ISL_413595 spike protein (1-1211)(T874C_S1055C) WhcAg construct
MFVFLVLLPLVSSQCVNLTTRTQLPPAYTNSFTRGVYYPDKVFRSSVLHSTQDLFLPFFSNVTWFHAIHVSGTNGTKRFDNPVLPFNDGVYFASTEKSNIIRGWIFGTTLDSKTQSLLIVNNATNVVIKVCEFQFCNDPFLGVYYHKNNKSWMESEFRVYSSANNCTFEYVSQPFLMDLEGKQGNFKNLREFVFKNIDGYFKIYSKHTPINLVRDLPQGFSALEPLVDLPIGINITRFQTLLALHRSYLTPGDSSSGWTAGAAAYYVGYLQPRTFLLKYNENGTITDAVDCALDPLSETKCTLKSFTVEKGIYQTSNFRVQPTESIVRFPNITNLCPFGEVFNATRFASVYAWNRKRISNCVADYSVLYNSASFSTFKCYGVSPTKLNDLCFTNVYADSFVIRGDEVRQIAPGQTGKIADYNYKLPDDFTGCVIAWNSNNLDSKVGGNYNYLYRLFRKSNLKPFERDISTEIYQAGSTPCNGVEGFNCYFPLQSYGFQPTNGVGYQPYRVVVLSFELLHAPATVCGPKKSTNLVKNKCVNFNFNGLTGTGVLTESNKKFLPFQQFGRDIADTTDAVRDPQTLEILDITPCSFGGVSVITPGTNTSNQVAVLYQDVNCTEVPVAIHADQLTPTWRVYSTGSNVFQTRAGCLIGAEHVNNSYECDIPIGAGICASYQTQTNSPRRARSVASQSIIAYTMSLGAENSVAYSNNSIAIPTNFTISVTTEILPVSMTKTSVDCTMYICGDSTECSNLLLQYGSFCTQLNRALTGIAVEQDKNTQEVFAQVKQIYKTPPIKDFGGFNFSQILPDPSKPSKRSFIEDLLFNKVTLADAGFIKQYGDCLGDIAARDLICAQKFNGLTVLPPLLTDEMIAQYCSALLAGTITSGWTFGAGAALQIPFAMQMAYRFNGIGVTQNVLYENQKLIANQFNSAIGKIQDSLSFTASALGKLQDVVNQNAQALNTLVKQLSSNFGAISSVLNDILSRLDKVEAEVQIDRLITGRLQSLQTYVTQQLIRAAEIRASANLAATKMSECVLGQSKRVDFCGKGYHLMSFPQCAPHGVVFLHVTYVPAQEKNFTTAPAICHDGKAHFPREGVFVSNGTHWFVTQRNFYEPQIITTDNTFVSGNCDVVIGIVNNTVYDPLQPELDSFKEELDKYFKNHTSPDVDLGDISGINASVVNIQKEIDRLNEVAKNLNESLIDLQELGKYEQYIKGGGGSDIDPYKEFGSSYQLLNFLPLDFFPDLNALVDTATALYEEELTGREHCSPHHTAIRQALVCWDELTKLIAWMSSNITSEQVRTIIVNHVNDTWGLKVRQSLWFHLSCLTFGQHTVQEFLVSFGVWIRTPAPYRPPNAPILSTLPEHTVIC

SEQ ID NO: 7597 - protein, 1365 aa, Artificial Sequence; identical to SEQ ID NO: 7577
  SARS-CoV-2/Australia/NSW10/2020__EPI_ISL_413596 spike protein (1-1211)(T874C_S1055C) WhcAg construct

SEQ ID NO: 7598 - protein, 1365 aa, Artificial Sequence
  SARS-CoV-2/Switzerland/1000477797/2020__EPI_ISL_413023 spike protein (1-1211)(T874C_S1055C) WhcAg construct
MFVFLVLLPLVSSQCVNLTTRTQLPPAYTNSFTRGVYYPDKVFRSSVLHSTQDLFLPFFSNVTWFHAIHVSGTNGTKRFDNPVLPFNDGVYFASTEKSNIIRGWIFGTTLDSKTQSLLIVNNATNVVIKVCEFQFCNDPFLGVYYHKNNKSWMESEFRVYSSANNCTFEYVSQPFLMDLEGKQGNFKNLREFVFKNIDGYFNIYSKHTPINLVRDLPQGFSALEPLVDLPIGINITRFQTLLALHRSYLTPGDSSSGWTAGAAAYYVGYLQPRTFLLKYNENGTITDAVDCALDPLSETKCTLKSFTVEKGIYQTSNFRVQPTESIVRFPNITNLCPFGEVFNATRFASVYAWNRKRISNCVADYSVLYNSASFSTFKCYGVSPTKLNDLCFTNVYADSFVIRGDEVRQIAPGQTGKIADYNYKLPDDFTGCVIAWNSNNLDSKVGGNYNYLYRLFRKSNLKPFERDISTEIYQAGSTPCNGVEGFNCYFPLQSYGFQPTNGVGYQPYRVVVLSFELLHAPATVCGPKKSTNLVKNKCVNFNFNGLTGTGVLTESNKKFLPFQQFGRDIADTTDAVRDPQTLEILDITPCSFGGVSVITPGTNTSNQVAVLYQGVNCTEVPVAIHADQLTPTWRVYSTGSNVFQTRAGCLIGAEHVNNSYECDIPIGAGICASYQTQTNSPRRARSVASQSIIAYTMSLGAENSVAYSNNSIAIPTNFTISVTTEILPVSMTKTSVDCTMYICGDSTECSNLLLQYGSFCTQLNRALTGIAVEQDKNTQEVFAQVKQIYKTPPIKDFGGFNFSQILPDPSKPSKRSFIEDLLFNKVTLADAGFIKQYGDCLGDIAARDLICAQKFNGLTVLPPLLTDEMIAQYCSALLAGTITSGWTFGAGAALQIPFAMQMAYRFNGIGVTQNVLYENQKLIANQFNSAIGKIQDSLSSTASALGKLQDVVNQNAQALNTLVKQLSSNFGAISSVLNDILSRLDKVEAEVQIDRLITGRLQSLQTYVTQQLIRAAEIRASANLAATKMSECVLGQSKRVDFCGKGYHLMSFPQCAPHGVVFLHVTYVPAQEKNFTTAPAICHDGKAHFPREGVFVSNGTHWFVTQRNFYEPQIITTDNTFVSGNCDVVIGIVNNTVYDPLQPELDSFKEELDKYFKNHTSPDVDLGDISGINASVVNIQKEIDRLNEVAKNLNESLIDLQELGKYEQYIKGGGGSDIDPYKEFGSSYQLLNFLPLDFFPDLNALVDTATALYEEELTGREHCSPHHTAIRQALVCWDELTKLIAWMSSNITSEQVRTIIVNHVNDTWGLKVRQSLWFHLSCLTFGQHTVQEFLVSFGVWIRTPAPYRPPNAPILSTLPEHTVIC

SEQ ID NO: 7599 - protein, 1365 aa, Artificial Sequence
  SARS-CoV-2/Belgium/BA-02291/2020__EPI_ISL_415159 spike protein (1-1211)(T874C_S1055C) WhcAg construct
MFVFLVLLPLVSSQCVNLTTRTQLPPAYTNSFTRGVYYPDKVFRSSVLHSTQDLFLPFFSNVTWFHAIHVSGTNGTKRFDNPVLPFNDGVYFASTEKSNIIRGWIFGTTLDSKTQSLLIVNNATNVVIKVCEFQFCNDPFLGVYYHKNNKSWMESEFRVYSSANNCTFEYVSQPFLMDLEGKQGNFKNLREFVFKNIDGYFKIYSKHTPINLVRDLPQGFSALEPLVDLPIGINITRFQTLLALHRSYLTPGDSSSGWTAGAAAYYVGYLQPRTFLLKYNENGTITDAVDCALDPLSETKCTLKSFTVEKGIYQTSNFRVQPTESIVRFPNITNLCPFGEVFNATRFASVYAWNRKRISNCVADYSVLYNSASFSTFKCYGVSPTKLNDLCFTNVYADSFVIRGDEVRQIAPGQTGKIADYNYKLPDDFTGCVIAWNSNNLDSKVGGNYNYLYRLFRRSNLKPFERDISTEIYQAGSTPCNGVEGFNCYFPLQSYGFQPTNGVGYQPYRVVVLSFELLPAPATVCGPKKSTNLVKNKCVNFNFNGLTGTGVLTESNKKFLPFQQFGRDIADTTDAVRDPQTLEILDITPCSFGGVSVITPGTNTSNQVAVLYQGVNCTEVPVAIHADQLTPTWRVYSTGSNVFQTRAGCLIGAEHVNNSYECDIPIGAGICASYQTQTNSPRRARSVASQSIIAYTMSLGAENSVAYSNNSIAIPTNFTISVTTEILPVSMTKTSVDCTMYICGDSTECSNLLLQYGSFCTQLNRALTGIAVEQDKNTQEVFAQVKQIYKTPPIKDFGGFNFSQILPDPSKPSKRSFIEDLLFNKVTLADAGFIKQYGDCLGDIAARDLICAQKFNGLTVLPPLLTDEMIAQYCSALLAGTITSGWTFGAGAALQIPFAMQMAYRFNGIGVTQNVLYENQKLIANQFNSAIGKIQDSLSSAAPALGKLQDVVNQNAQALNTLVKQLSSNFGAISSVLNDILSRLDKVEAEVQIDRLITGRLQSLQTYVTQQLIRAAEIRASANLAATKMSECVLGQSKRVDFCGKGYHLMSFPQCAPHGVVFLHVTYVPAQEKNFTTAPAICHDGKAHFPREGVFVSNGTHWFVTQRNFYEPQIITTDNTFVSGNCDVVIGIVNNTVYDPLQPELDSFKEELDKYFKNHTSPDVDLGDISGINASVVNIQKEIDRLNEVAKNLNESLIDLQELGKYEQYIKGGGGSDIDPYKEFGSSYQLLNFLPLDFFPDLNALVDTATALYEEELTGREHCSPHHTAIRQALVCWDELTKLIAWMSSNITSEQVRTIIVNHVNDTWGLKVRQSLWFHLSCLTFGQHTVQEFLVSFGVWIRTPAPYRPPNAPILSTLPEHTVIC

SEQ ID NO: 7600 - protein, 1365 aa, Artificial Sequence
  SARS-CoV-2/USA/WA8-UW5/2020__EPI_ISL_413486 spike protein (1-1211)(T874C_S1055C) WhcAg construct
MFVFLVLLPLVSSQCVNLTTRTQLPPAYTNSFTRGVYYPDKVFRSSVLHSTQDLFLPFFSNVTWFHAIHVSGTNGTKRFDNPVLPFNDGVYFASTEKSNIIRGWIFGTTLDSKTQSLLIVNNATNVVIKVCEFQFCNDPFLGVYYHKNNKSWMESEFRVYSSANNCTFEYVSQPFLMDLEGKQGNFKNLREFVFKNIDGYFKIYSKHTPINLVRDLPQGFSALEPLVDLPIGINITRFQTLLALHRSYLTPGDSSSGWTAGAAAYYVGYLQPRTFLLKYNENGTITDAVDCALDPLSETKCTLKSFTVEKGIYQTSNFRVQPTESIVRFPNITNLCPFGEVFNATRFASVYAWNRKRISNCVADYSVLYNSASFSTFKCYGVSPTKLNDLCFTNVYADSFVIRGDEVRQIAPGQTGKIADYNYKLPDDFTGCVIAWNSNNLDSKVGGNYNYLYRLFRKSNLKPFERDISTEIYQAGSTPCNGVEGFNCYFPLQSYGFQPTNGVGYQPYRVVVLSFELLHAPATVCGPKKSTNLVKNKCVNFNFNGLTGTGVLTESNKKFLPFQQFGRDIADTTDAVRDPQTLEILDITPCSFGGVSVITPGTNTSNQVAVLYQDVNCTEVPVAIHADQLTPTWRVYSTGSNVFQTRAGCLIGAEYVNNSYECDIPIGAGICASYQTQTNSPRRARSVASQSIIAYTMSLGAENSVAYSNNSIAIPTNFTISVTTEILPVSMTKTSVDCTMYICGDSTECSNLLLQYGSFCTQLNRALTGIAVEQDKNTQEVFAQVKQIYKTPPIKDFGGFNFSQILPDPSKPSKRSFIEDLLFNKVTLADAGFIKQYGDCLGDIAARDLICAQKFNGLTVLPPLLTDEMIAQYCSALLAGTITSGWTFGAGAALQIPFAMQMAYRFNGIGVTQNVLYENQKLIANQFNSAIGKIQDSLSSTASALGKLQDVVNQNAQALNTLVKQLSSNFGAISSVLNDILSRLDKVEAEVQIDRLITGRLQSLQTYVTQQLIRAAEIRASANLAATKMSECVLGQSKRVDFCGKGYHLMSFPQCAPHGVVFLHVTYVPAQEKNFTTAPAICHDGKAHFPREGVFVSNGTHWFVTQRNFYEPQIITTDNTFVSGNCDVVIGIVNNTVYDPLQPELDSFKEELDKYFKNHTSPDVDLGDISGINASVVNIQKEIDRLNEVAKNLNESLIDLQELGKYEQYIKGGGGSDIDPYKEFGSSYQLLNFLPLDFFPDLNALVDTATALYEEELTGREHCSPHHTAIRQALVCWDELTKLIAWMSSNITSEQVRTIIVNHVNDTWGLKVRQSLWFHLSCLTFGQHTVQEFLVSFGVWIRTPAPYRPPNAPILSTLPEHTVIC

SEQ ID NO: 7601 - protein, 1365 aa, Artificial Sequence
  SARS-CoV-2/England/20102000506/2020__EPI_ISL_415147 spike protein (1-1211)(T874C_S1055C) WhcAg construct
MFVFLVLLPLVSSQCVNLTTRTQLPPAYTNSFTRGVYYPDKVFRSSVLHSTQDLFLPFFSNVTWFHAIHVSGTNGTKRFDNPVLPFNDGVYFASTEKSNIIRGWIFGTTLDSKTQSLLIVNNATNVVIKVCEFQFCNDPFLGVYYHKNNKSWMESEFRVYSSANNCTFEYVSQPFLMDLEGKQGNFKNLREFVFKNIDGYFKIYSKHTPINLVRDLPQGFSALEPLVDLPIGINITRFQTLLALHRSYLTPGDSSSGWTAGAAAYYVGYLQPRTFLLKYNENGTITDAVDCALDPLSETKCTLKSFTVEKGIYQTSNFRVQPTESIVRFPNITNLCPFGEVFNATRFASVYAWNRKRISNCVADYSVLYNSASFSTFKCYGVSPTKLNDLCFTNVYADSFVIRGDEVRQIAPGQTGKIADYNYKLPDDFTGCVIAWNSNNLDSKVGGNYNYLYRLFRKSNLKPFERDISTEIYQAGSTPCNGVEGFNCYFPLQSYGFQPTNGVGYQPYRVVVLSFELLHAPATVCGPKKSTNLVKNKCVNFNFNGLTGTGVLTESNKKFLPFQQFGRDIADTTDAVRDPQTLEILDITPCSFGGVSVITPGTNTSNQVAVLYQGVNCTEVPVAIHADQLTPTWRVYSTGSNVFQTRAGCLIGAEHVNNSYECDIPIGAGICASYQTQTNSPRRARSVASQSIIAYTMSLGAENSVAYSNNSIAIPTNFTISVTTEILPVSMTKTSVDCTMYICGDSTECSNLLLQYGSFCTQLNRALTGIAVEQDKNTQEVFAQVKQIYKTPPIKDFGGFNFSQILPDPSKPSKRSFIEDLLFNKVTLADAGFIKQYGYCLGDIAARDLICAQKFNGLTVLPPLLTDEMIAQYCSALLAGTITSGWTFGAGAALQIPFAMQMAYRFNGIGVTQNVLYENQKLIANQFNSAIGKIQDSLSSTASALGKLQDVVNQNAQALNTLVKQLSSNFGAISSVLNDILSRLDKVEAEVQIDRLITGRLQSLQTYVTQQLIRAAEIRASANLAATKMSECVLGQSKRVDFCGKGYHLMSFPQCAPHGVVFLHVTYVPAQEKNFTTAPAICHDGKAHFPREGVFVSNGTHWFVTQRNFYEPQIITTDNTFVSGNCDVVIGIVNNTVYDPLQPELDSFKEELDKYFKNHTSPDVDLGDISGINASVVNIQKEIDRLNEVAKNLNESLIDLQELGKYEQYIKGGGGSDIDPYKEFGSSYQLLNFLPLDFFPDLNALVDTATALYEEELTGREHCSPHHTAIRQALVCWDELTKLIAWMSSNITSEQVRTIIVNHVNDTWGLKVRQSLWFHLSCLTFGQHTVQEFLVSFGVWIRTPAPYRPPNAPILSTLPEHTVIC

SEQ ID NO: 7602 - protein, 1365 aa, Artificial Sequence
  SARS-CoV-2/Belgium/VAG-03013/2020__EPI_ISL_415155 spike protein (1-1211)(T874C_S1055C) WhcAg construct
MFVFLVLLPLVSSQCVNLTTRTQLPPAYTNSFTRGVYYPDKVFRSSVLHSTQDLFLPFFSNVTWFHAIHVSGTNGTKRFDNPVLPFNDGVYFASTEKSNIIRGWIFGTTLDSKTQSLLIVNNATNVVIKVCEFQFCNDPFLGVYYHKNNKSWMESEFRVYSSANNCTFEYVSQPFLMDLEGKQGNFKNLREFVFKNIDGYFKIYSKHTPINLVRDLPQGFSALEPLVDLPIGINITRFQTLLALHRSYLTPGDSSSGWTAGAAAYYVGYLQPRTFLLKYNENGTITDAVDCALDPLSETKCTLKSFTVEKGIYQTSNFRVQPTESIVRFPNITNLCPFGEVFNATRFASVYAWNRKRISNCVADYSVLYNSASFSTFKCYGVSPTKLNDLCFTNVYADSFVIRGDEVRQIAPGQTGKIADYNYKLPDDFTGCVIAWNSNNLDSKVGGNYNYLYRLFRKSNLKPFERDISTEIYQAGSTPCNGVEGFNCYFPLQSYGFQPTNGVGYQPYRVVVLSFELLHAPATVCGPKKSTNLVKNKCVNFNFNGLTGTGVLTESNKKFLPFQQFGRDIADTTDAVRDPQTLEILDITPCSFGGVSVITPGTNTSNQVAVLYQGVNCTEVPVAIHADQLTPTWRVYSTGSNVFQTRAGCLIGAEHVNNSYECDIPIGAGICASYQTQTNSPRRARSVASQSIIAYTMSLGAENSVAYSNNSIAIPTNFTISVTTEILPVSMTKTSVDCTMYICGDSTECSNLLLQYGSFCTQLNRALTGIAVEQDKNTQEVFAQVKQIYKTPPIKDFGGFNFSQILPDPSKPSKRSFIEDLLFNKVTLADAGFIKQYGDCLGDIAARDLICAQKFNGLTVLPPLLTDEMIAQYCSALLAGTITSGWTFGAGAALQIPFAMQMAYRFNGIGVTQNVLYENQKLIANQFNSAIGKIQDSLSSTATALGKLQDVVNQNAQALNTLVKQLSSNFGAISSVLNDILSRLDKVEAEVQIDRLITGRLQSLQTYVTQQLIRAAEIRASANLAATKMSECVLGQSKRVDFCGKGYHLMSFPQCAPHGVVFLHVTYVPAQEKNFTTAPAICHDGKAHFPREGVFVSNGTHWFVTQRNFYEPQIITTDNTFVSGNCDVVIGIVNNTVYDPLQPELDSFKEELDKYFKNHTSPDVDLGDISGINASVVNIQKEIDRLNEVAKNLNESLIDLQELGKYEQYIKGGGGSDIDPYKEFGSSYQLLNFLPLDFFPDLNALVDTATALYEEELTGREHCSPHHTAIRQALVCWDELTKLIAWMSSNITSEQVRTIIVNHVNDTWGLKVRQSLWFHLSCLTFGQHTVQEFLVSFGVWIRTPAPYRPPNAPILSTLPEHTVIC

SEQ ID NO: 7603 - protein, 1365 aa, Artificial Sequence
  SARS-CoV-2/Belgium/BC-03016/2020__EPI_ISL_415157 spike protein (1-1211)(T874C_S1055C) WhcAg construct
MFVFLVLLPLVSSQCVNLTTRTQLPPAYTNSFTRGVYYPDKVFRSSVLHSTQDLFLPFFSNVTWFHAIHVSGTNGTKRFDNPVLPFNDGVYFASTEKSNIIRGWIFGTTLDSKTQSLLIVNNATNVVIKVCEFQFCNDPFLGVYYHKNNKSWMESEFRVYSSANNCTFEYVSQPFLMDLEGKQGNFKNLREFVFKNIDGYFKIYSKHTPINLVRDLPQGFSALEPLVDLPIGINITRFQTLLALHRSYLTPGDSSSGWTAGAAAYYVGYLQPRTFLLKYNENGTITDAVDCALDPLSETKCTLKSFTVEKGIYQTSNFRVQPTESIVRFPNITNLCPFGEVFNATRFASVYAWNRKRISNCVADYSVLYNSASFSTFKCYGVSPTKLNDLCFTNVYADSFVIRGDEVRQIAPGQTGKIADYNYKLPDDFTGCVIAWNSNNLDSKVGGNYNYLYRLFRKSNLKPFERDISTEIYQAGSTPCNGVEGFNCYFPLQSYGFQPTNGVGYQPYRVVVLSFELLHAPATVCGPKKSTNLVKNKCVNFNFNGLTGTGVLTESNKKFLPFQQFGRDIADTTDAVRDPQTLEILDITPCSFGGVSVITPGTNTSNQVAVLYQGVNCTEVPVAIHADQLTPTWRVYSTGSNVFQTRAGCLIGAEHVNNSYECDIPIGAGICASYQTQTNSPRRARSVASQSIIAYTMSLGAENSVAYSNNSIAIPTNFTISVTTEILPVSMTKTSVDCTMYICGDSTECSNLLLQYGSFCTQLNRALTGIAVEQDKNTQEVFAQVKQIYKTPPIKDFGGFNFSQILPDPSKPSKRSFIEDLLFNKVTLADAGFIKQYGDCLGDIAARDLICAQKFNGLTVLPPLLTDEMIAQYCSALLAGTITSGWTFGAGAALQIPFAMQMAYRFNGIGVTQNVLYENQKLIANQFNSAIGKIQDSLSSTAPALGKLQDVVNQNAQALNTLVKQLSSNFGAISSVLNDILSRLDKVEAEVQIDRLITGRLQSLQTYVTQQLIRAAEIRASANLAATKMSECVLGQSKRVDFCGKGYHLMSFPQCAPHGVVFLHVTYVPAQEKNFTTAPAICHDGKAHFPREGVFVSNGTHWFVTQRNFYEPQIITTDNTFVSGNCDVVIGIVNNTVYDPLQPELDSFKEELDKYFKNHTSPDVDLGDISGINASVVNIQKEIDRLNEVAKNLNESLIDLQELGKYEQYIKGGGGSDIDPYKEFGSSYQLLNFLPLDFFPDLNALVDTATALYEEELTGREHCSPHHTAIRQALVCWDELTKLIAWMSSNITSEQVRTIIVNHVNDTWGLKVRQSLWFHLSCLTFGQHTVQEFLVSFGVWIRTPAPYRPPNAPILSTLPEHTVIC

SEQ ID NO: 7604 - protein, 1365 aa, Artificial Sequence
  SARS-CoV-2/Germany/BavPat3/2020__EPI_ISL_414521 spike protein (1-1211)(T874C_S1055C) WhcAg construct
MFVFLVLLPLVSSQCVNLTTRTQLPPAYTNSFTRGVYYPDKVFRSSVLHSTQDLFLPFFSNVTWFHAIHVSGTNGTKRFDNPVLPFNDGVYFASTEKSNIIRGWIFGTTLDSKTQSLLIVNNATNVVIKVCEFQFCNDPFLGVYYHKNNKSWMESEFRVYSSANNCTFEYVSQPFLMDLEGKQGNFKNLREFVFKNIDGYFKIYSKHTPINLVRDLPQGFSALEPLVDLPIGINITRFQTLLALHRSYLTPGDSSSGWTAGAAAYYVGYLQPRTFLLKYNENGTITDAVDCALDPLSETKCTLKSFTVEKGIYQTSNFRVQPTESIVRFPNITNLCPFGEVFNATRFASVYAWNRKRISNCVADYSVLYNSASFSTFKCYGVSPTKLNDLCFTNVYADSFVIRGDEVRQIAPGQTGKIADYNYKLPDDFTGCVIAWNSNNLDSKVGGNYNYLYRLFRKSNLKPFERDISTEIYQAGSTPCNGVEGFNCYFPLQSYGFQPTNGVGYQPYRVVVLSFELLHAPATVCGPKKSTNLVKNKCVNFNFNGLTGTGVLTESNKKFLPFQQFGRDIADTTDAVRDPQTLEILDITPCSFGGVSVITPGTNTSNQVAVLYQDVNCTEVPVAIHADQLTPTWRVYSTGSNVFQTRAGCLIGAEHVNNSYECDIPIGAGICASYQTQTNSPRRARSVASQSIIAYTMSLGAENSVAYSNNSIAIPTNFTISVTTEILPVSMTKTSVDCTMYICGDSTECSNLLLQYGSFCTQLNRALTGIAVEQDKNTQQVFAQVKQIYKTPPIKDFGGFNFSQILPDPSKPSKRSFIEDLLFNKVTLADAGFIKQYGDCLGDIAARDLICAQKFNGLTVLPPLLTDEMIAQYCSALLAGTITSGWTFGAGAALQIPFAMQMAYRFNGIGVTQNVLYENQKLIANQFNSAIGKIQDSLSSTASALGKLQDVVNQNAQALNTLVKQLSSNFGAISSVLNDILSRLDKVEAEVQIDRLITGRLQSLQTYVTQQLIRAAEIRASANLAATKMSECVLGQSKRVDFCGKGYHLMSFPQCAPHGVVFLHVTYVPAQEKNFTTAPAICHDGKAHFPREGVFVSNGTHWFVTQRNFYEPQIITTDNTFVSGNCDVVIGIVNNTVYDPLQPELDSFKEELDKYFKNHTSPDVDLGDISGINASVVNIQKEIDRLNEVAKNLNESLIDLQELGKYEQYIKGGGGSDIDPYKEFGSSYQLLNFLPLDFFPDLNALVDTATALYEEELTGREHCSPHHTAIRQALVCWDELTKLIAWMSSNITSEQVRTIIVNHVNDTWGLKVRQSLWFHLSCLTFGQHTVQEFLVSFGVWIRTPAPYRPPNAPILSTLPEHTVIC

SEQ ID NO: 7605 - protein, 1365 aa, Artificial Sequence
  SARS-CoV-2/France/HF1805/2020__EPI_ISL_414628 spike protein (1-1211)(T874C_S1055C) WhcAg construct
MFVFLVLLPLVSSQCVNLTTRTQLPPAYTNSFTRGVYYPDKVFRSSVLHSTQDLFLPFFSNVTWFHAIHVSGTNGTKRFDNPVLPFNDGVYFASTEKSNIIRGWIFGTTLDSKTQSLLIVNNATNVVIKVCEFQFCNDPFLGVYYHKNNKSWMESEFRVYSSANNCTFEYVSQPFLMDLEGKQGNFKNLREFVFKNIDGYFKIYSKHTPINLVRDLPQGFSALEPLVDLPIGINITRFQTLLALHRSYLTPGDSSSGWTAGAAAYYVGYLQPRTFLLKYNENGTITDAVDCALDPLSETKCTLKSFTVEKGIYQTSNFRVQPTESIVRFPNITNLCPFGEVFNATRFASVYAWNRKRISNCVADYSVLYNSASFSTFKCYGVSPTKLNDLCFTNVYADSFVIRGDEVRQIAPGQTGKIADYNYKLPDDFTGCVIAWNSNNLDSKVGGNYNYLYRLFRKSNLKPFERDISTEIYQAGSTPCNGVEGFNCYFPLQSYGFQPTNGVGYQPYRVVVLSFELLHAPATVCGPKKSTNLVKNKCVNFNFNGLTGTGVLTESNKKFLPFQQFGRDIADTTDAVRDPQTLEILDITPCSFGGVSVITPGTNTSNQVAVLYQGVNCTEVPVAIHADQLTPTWRVYSTGSNVFQTRAGCLIGAEHVNNSYECDIPIGAGICASYQTQTNSPRRARSVASQSIIAYTMSLGAENSVAYSNNSIAIPTNFTISVTTEILPVSMTKTSVDCTMYICGDSTECSNLLLQYGSFCTQLNRALTGIAVEQDKNTQEVFAQVKQIYKTPPIKDFGGFNFSQILPDPSKPSKRSFIEDLLFNKVTLADAGFIKQYGDCLGDIAARDLICAQKFNGLTVLPPLLTDEMIAQYCSALLAGTITSGWTFGAGAALQIPFAMQMAYRFNGIGVTQNVLYENQKLIANQFNSAIGKIQDSLSSTASALGKLQDVVNQNAQALNTLVKQLSSNFGAISSVLNDILSRLDKVEAEVQIDRLITGRLQSLQTYVTQQLIRAAEIRASANLAATKMSECVLGQSKRVDFCGKGYHLMSFPQCAPHGVVFLHVTYVPAQEKNFTTAPAICHDGKAHFPREGVFVSNGTHWFVTQRNFYEPQIITTDNTFVSGNCDVVIGVVNNTVYDPLQPELDSFKEELDKYFKNHTSPDVDLGDISGINASVVNIQKEIDRLNEVAKNLNESLIDLQELGKYEQYIKGGGGSDIDPYKEFGSSYQLLNFLPLDFFPDLNALVDTATALYEEELTGREHCSPHHTAIRQALVCWDELTKLIAWMSSNITSEQVRTIIVNHVNDTWGLKVRQSLWFHLSCLTFGQHTVQEFLVSFGVWIRTPAPYRPPNAPILSTLPEHTVIC

SEQ ID NO: 7606 - protein, 1365 aa, Artificial Sequence
  SARS-CoV-2/Netherlands/ZuidHolland_9/2020__EPI_ISL_414445 spike protein (1-1211)(T874C_S1055C) WhcAg construct
MFVFLVLLPLVSSQCVNLTTRTQLPPAYTNSFTRGVYYPDKVFRSSVLHSTQDLFLPFFSNVTWFHAIHVSGTNGTKRFDNPVLPFNDGVYFASTEKSNIIRGWIFGTTLDSKTQSLLIVNNATNVVIKVCEFQFCNDPFLGVYYHKNNKSWMESEFRVYSSANNCTFEYVSQPFLMDLEGKQGNFKNLREFVFKNIDGYFKIYSKHTPINLVRDLPQGFSALEPLVDLPIGINITRFQTLLALHRSYLTPGDSSSGWTAGAAAYYVGYLQPRTFLLKYNENGTITDAVDCALDPLSETKCTLKSFTVEKGIYQTSNFRVQPTESIVRFPNITNLCPFGEVFNATRFASVYAWNRKRISNCVADYSVLYNSASFSTFKCYGVSPTKLNDLCFTNVYADSFVIRGDEVRQIAPGQTGKIADYNYKLPDDFTGCVIAWNSNNLDSKVGGNYNYLYRLFRKSNLKPFERDISTEIYQAGSTPCNGVEGFNCYFPLQSYGFQPTNGVGYQPYRVVVLSFELLHAPATVCGPKKSTNLVKNKCVNFNFNGLTGTGVLTESNKKFLPFQQFGRDIADTTDAVRDPQTLEILDITPCSFGGVSVITPGTNTSNQVAVLYQGVNCTEVPVAIHADQLTPTWRVYSTGSNVFQTRAGCLIGAEHVNNSYECDIPIGAGICASYQTQTNSPRRARSVASQSIIAYTMSLGAENSVAYSNNSIAIPTNFTISVTTEILPVSMTKTSVDCTMYICGDSTECSNLLLQYGSFCTQLNRALTGIAVEQDKNTQEVFAQVKQIYKTPPIKDFGGFNFSQILPDPSKPSKRSFIEDLLFNKVTLADAGFIKQYGDCLGDIAARDLICVQKFNGLTVLPPLLTDEMIAQYCSALLAGTITSGWTFGAGAALQIPFAMQMAYRFNGIGVTQNVLYENQKLIANQFNSAIGKIQDSLSSTASALGKLQDVVNQNAQALNTLVKQLSSNFGAISSVLNDILSRLDKVEAEVQIDRLITGRLQSLQTYVTQQLIRAAEIRASANLAATKMSECVLGQSKRVDFCGKGYHLMSFPQCAPHGVVFLHVTYVPAQEKNFTTAPAICHDGKAHFPREGVFVSNGTHWFVTQRNFYEPQIITTDNTFVSGNCDVVIGIVNNTVYDPLQPELDSFKEELDKYFKNHTSPDVDLGDISGINASVVNIQKEIDRLNEVAKNLNESLIDLQELGKYEQYIKGGGGSDIDPYKEFGSSYQLLNFLPLDFFPDLNALVDTATALYEEELTGREHCSPHHTAIRQALVCWDELTKLIAWMSSNITSEQVRTIIVNHVNDTWGLKVRQSLWFHLSCLTFGQHTVQEFLVSFGVWIRTPAPYRPPNAPILSTLPEHTVIC

SEQ ID NO: 7607 - protein, 1365 aa, Artificial Sequence
  SARS-CoV-2/Finland/FIN03032020A/2020__EPI_ISL_413602 spike protein (1-1211)(T874C_S1055C) WhcAg construct
MFVFLVLLPLVSSQCVNLTTRTQLPPAYTNSFTRGVYYPDKVFRSSVLHSTQDLFLPFFSNVTWFHAIHVSGTNGTKRFDNPVLPFNDGVYFASTEKSNIIRGWIFGTTLDSKTQSLLIVNNATNVVIKVCEFQFCNDPFLGVYYHKNNKSWMESEFRVYSSANNCTFEYVSQPFLMDLEGKQGNFKNLREFVFKNIDGYFKIYSKHTPINLVRDLPQGFSALEPLVDLPIGINITRFQTLLALHRSYLTPGDSSSGWTAGAAAYYVGYLQPRTFLLKYNENGTITDAVDCALDPLSETKCTLKSFTVEKGIYQTSNFRVQPTESIVRFPNITNLCPFGEVFNATRFASVYAWNRKRISNCVADYSVLYNSASFSTFKCYGVSPTKLNDLCFTNVYADSFVIRGDEVRQIAPGQTGKIADYNYKLPDDFTGCVISWNSNNLDSKVGGNYNYLYRLFRKSNLKPFERDISTEIYQAGSTPCNGVEGFNCYFPLQSYGFQPTNGVGYQPYRVVVLSFELLHAPATVCGPKKSTNLVKNKCVNFNFNGLTGTGVLTESNKKFLPFQQFGRDIADTTDAVRDPQTLEILDITPCSFGGVSVITPGTNTSNQVAVLYQGVNCTEVPVAIHADQLTPTWRVYSTGSNVFQTRAGCLIGAEHVNNSYECDIPIGAGICASYQTQTNSPRRARSVASQSIIAYTMSLGAENSVAYSNNSIAIPTNFTISVTTEILPVSMTKTSVDCTMYICGDSTECSNLLLQYGSFCTQLNRALTGIAVEQDKNTQEVFAQVKQIYKTPPIKDFGGFNFSQILPDPSKPSKRSFIEDLLFNKVTLADAGFIKQYGDCLGDIAARDLICAQKFNGLTVLPPLLTDEMIAQYCSALLAGTITSGWTFGAGAALQIPFAMQMAYRFNGIGVTQNVLYENQKLIANQFNSAIGKIQDSLSSTASALGKLQDVVNQNAQALNTLVKQLSSNFGAISSVLNDILSRLDKVEAEVQIDRLITGRLQSLQTYVTQQLIRAAEIRASANLAATKMSECVLGQSKRVDFCGKGYHLMSFPQCAPHGVVFLHVTYVPAQEKNFTTAPAICHDGKAHFPREGVFVSNGTHWFVTQRNFYEPQIITTDNTFVSGNCDVVIGIVNNTVYDPLQPELDSFKEELDKYFKNHTSPDVDLGDISGINASVVNIQKEIDRLNEVAKNLNESLIDLQELGKYEQYIKGGGGSDIDPYKEFGSSYQLLNFLPLDFFPDLNALVDTATALYEEELTGREHCSPHHTAIRQALVCWDELTKLIAWMSSNITSEQVRTIIVNHVNDTWGLKVRQSLWFHLSCLTFGQHTVQEFLVSFGVWIRTPAPYRPPNAPILSTLPEHTVIC

SEQ ID NO: 7608 - protein, 1365 aa, Artificial Sequence
  SARS-CoV-2/France/GE1977/2020__EPI_ISL_414632 spike protein (1-1211)(T874C_S1055C) WhcAg construct
MFVFLVLLPLVSSQCVNLTTRTQLPPAYTNSFTRGVYYPDKVFRSSVLHSTQDLFLPFFSNVTWFHAIHVSGTNGTKRFDNPVLPFNDGVYFASTEKSNIIRGWIFGTTLDSKTQSLLIVNNATNVVIKVCEFQFCNDPFLGVYYHKNNKSWMESEFRVYSSANNCTFEYVSQPFLMDLEGKQGNFKNLREFVFKNIDGYFKIYSKHTPINLVRDLPQGFSALEPLVDLPIGINITRFQTLLALHRSYLTPGDSSSGWTAGAAAYYVGYLQPRTFLLKYNENGTITDAVDCALDPLSETKCTLKSFTVEKGIYQTSNFRVQPTESIVRFPNITNLCPFGEVFNATRFASVYAWNRKRISNCVADYSVLYNSASFSTFKCYGVSPTKLNDLCFTNVYADSFVIRGDEVRQIAPGQTGKIADYNYKLPDDFTGCVIAWNSNNLDSKVGGNYNYLYRLFRKSNLKPFERDISTEIYQAGSTPCNGVEGFNCYFPLQSYGFQPTNGVGYQPYRVVVLSFELLHAPATVCGPKKSTNLVKNKCVNFNFNGLTGTGVLTESNKKFLPFQQFGRDIADTTDAVRDPQTLEILDITPCSFGGVSVITPGTNTSNQVAVLYQGVNCTEVPVAIHADQLTPTWRVYSTGSNVFQTRAGCLIGAEHVNNSYECDIPIGAGICASYQTQTNSPRRARSVASQSIIAYTMSLGAENSVAYSNNSIAIPTNFTISVTTEILPVSMTKTSVDCTMYICGDSTECSNLLLQYGSFCTQLNRALTGIAVEQDKNTQEVFAQVKQIYKTPPIKDFGGFNFSQILPDPSKPSKRSFIEDLLFNKVTLADAGFIKQYGDCLGDIAARDLICAQKFNGLTVLPPLLTDEMIAQYCSALLAGTITSGWTFGAGAALQIPFAMQMAYRFNGIGVTQNVLYENQKLIANQFNSAIGKIQDSLFSTASALGKLQDVVNQNAQALNTLVKQLSSNFGAISSVLNDILSRLDKVEAEVQIDRLITGRLQSLQTYVTQQLIRAAEIRASANLAATKMSECVLGQSKRVDFCGKGYHLMSFPQCAPHGVVFLHVTYVPAQEKNFTTAPAICHDGKAHFPREGVFVSNGTHWFVTQRNFYEPQIITTDNTFVSGNCDVVIGIVNNTVYDPLQPELDSFKEELDKYFKNHTSPDVDLGDISGINASVVNIQKEIDRLNEVAKNLNESLIDLQELGKYEQYIKGGGGSDIDPYKEFGSSYQLLNFLPLDFFPDLNALVDTATALYEEELTGREHCSPHHTAIRQALVCWDELTKLIAWMSSNITSEQVRTIIVNHVNDTWGLKVRQSLWFHLSCLTFGQHTVQEFLVSFGVWIRTPAPYRPPNAPILSTLPEHTVIC

SEQ ID NO: 7609 - protein, 1365 aa, Artificial Sequence
  SARS-CoV-2/Finland/FIN-313/2020__EPI_ISL_414641 spike protein (1-1211)(T874C_S1055C) WhcAg construct
MFVFLVLLPLVSSQCVNLTTRTQLPPAYTNSFTRGVYYPDKVFRSSVLHSTQDLFLPFFSNVTWFHAIHVSGTNGTKRFDNPVLPFNDGVYFASTEKSNIIRGWIFGTTLDSKTQSLLIVNNATNVVIKVCEFQFCNDPFLGVYYHKNNKSWMESEFRVYSSANNCTFEYVSQPFLMDLEGKQGNFKNLREFVFKNIDGYFKIYSKHTPINLVRDLPQGFSALEPLVDLPIGINITRFKTLLALHRSYLTPGDSSSGWTAGAAAYYVGYLQPRTFLLKYNENGTITDAVDCALDPLSETKCTLKSFTVEKGIYQTSNFRVQPTESIVRFPNITNLCPFGEVFNATRFASVYAWNRKRISNCVADYSVLYNSASFSTFKCYGVSPTKLNDLCFTNVYADSFVIRGDEVRQIAPGQTGKIADYNYKLPDDFTGCVIAWNSNNLDSKVGGNYNYLYRLFRKSNLKPFERDISTEIYQAGSTPCNGVEGFNCYFPLQSYGFQPTNGVGYQPYRVVVLSFELLHAPATVCGPKKSTNLVKNKCVNFNFNGLTGTGVLTESNKKFLPFQQFGRDIADTTDAVRDPQTLEILDITPCSFGGVSVITPGTNTSNQVAVLYQGVNCTEVPVAIHADQLTPTWRVYSTGSNVFQTRAGCLIGAEHVNNSYECDIPIGAGICASYQTQTNSPRRARSVASQSIIAYTMSLGAENSVAYSNNSIAIPTNFTISVTTEILPVSMTKTSVDCTMYICGDSTECSNLLLQYGSFCTQLNRALTGIAVEQDKNTQEVFAQVKQIYKTPPIKDFGGFNFSQILPDPSKPSKRSFIEDLLFNKVTLADAGFIKQYGDCLGDIAARDLICAQKFNGLTVLPPLLTDEMIAQYCSALLAGTITSGWTFGAGAALQIPFAMQMAYRFNGIGVTQNVLYENQKLIANQFNSAIGKIQDSLSSTASALGKLQDVVNQNAQALNTLVKQLSSNFGAISSVLNDILSRLDKVEAEVQIDRLITGRLQSLQTYVTQQLIRAAEIRASANLAATKMSECVLGQSKRVDFCGKGYHLMSFPQCAPHGVVFLHVTYVPAQEKNFTTAPAICHDGKAHFPREGVFVSNGTHWFVTQRNFYEPQIITTDNTFVSGNCDVVIGIVNNTVYDPLQPELDSFKEELDKYFKNHTSPDVDLGDISGINASVVNIQKEIDRLNEVAKNLNESLIDLQELGKYEQYIKGGGGSDIDPYKEFGSSYQLLNFLPLDFFPDLNALVDTATALYEEELTGREHCSPHHTAIRQALVCWDELTKLIAWMSSNITSEQVRTIIVNHVNDTWGLKVRQSLWFHLSCLTFGQHTVQEFLVSFGVWIRTPAPYRPPNAPILSTLPEHTVIC

SEQ ID NO: 7610 - protein, 1365 aa, Artificial Sequence
  SARS-CoV-2/Netherlands/ZuidHolland_2/2020__EPI_ISL_414556 spike protein (1-1211)(T874C_S1055C) WhcAg construct
MFVFLVLLPLVSSQCVNLTTRTQLPPAYTNSFTRGVYYPDKVFRSSVLHSTQDLFLPFFSNVTWFHAIHVSGTNGTKRFDNPVLPFNDGVYFASTEKSNIIRGWIFGTTLDSKTQSLLIVNNATNVVIKVCEFQFCNDPFLGVYYHKNNKSWMESEFRVYSSANNCTFEYVSQPFLMDLEGKQGNFKNLREFVFKNIDGYFKIYSKHTPINLVRDLPQGFSALEPLVDLPIGINITRFQTLLALHRSYLTPGDSSSGWTAGAAAYYVGYLQPRTFLLKYNENGTITDAVDCALDPLSETKCTLKSFTVEKGIYQTSNFRVQPTESIVRFPNITNLCPFGEVFNATRFASVYAWNRKRISNCVADYSVLYNSASFSTFKCYGVSPTKLNDLCFTNVYADSFVIRGDEVRQIAPGQTGKIADYNYKLPDDFTGCVIAWNSNNLDSKVGGNYNYLYRLFRKSNLKPFERDISTEIYQAGSTPCNGVEGFNCYFPLQSYGFQPTNGVGYQPYRVVVLSFELLHAPATVCGPKKSTNLVKNKCVNFNFNGLTGTGVLTESNKKFLPFQQFGRDIADTTDAVRDPQTLEILDITPCSFGGVSVITPGTNTSNQVAVLYQGVNCTEVPVAIHADQLTPTWRVYSTGSNVFQTRAGCLIGAEHVNNSYECDIPIGAGICASYQTQTNSPRRARSVASQSIIAYTMSLGAENSVAYSNNSIAIPTNFTISVTTEILPVSMTKTSVDCTMYICGDSTECSNLLLQYGSFCTQLNRALTGIALEQDKNTQEVFAQVKQIYKTPPIKDFGGFNFSQILPDPSKPSKRSFIEDLLFNKVTLADAGFIKQYGDCLGDIAARDLICAQKFNGLTVLPPLLTDEMIAQYCSALLAGTITSGWTFGAGAALQIPFAMQMAYRFNGIGVTQNVLYENQKLIANQFNSAIGKIQDSLSSTASALGKLQDVVNQNAQALNTLVKQLSSNFGAISSVLNDILSRLDKVEAEVQIDRLITGRLQSLQTYVTQQLIRAAEIRASANLAATKMSECVLGQSKRVDFCGKGYHLMSFPQCAPHGVVFLHVTYVPAQEKNFTTAPAICHDGKAHFPREGVFVSNGTHWFVTQRNFYEPQIITTDNTFVSGNCDVVIGIVNNTVYDPLQPELDSFKEELDKYFKNHTSPDVDLGDISGINASVVNIQKEIDRLNEVAKNLNESLIDLQELGKYEQYIKGGGGSDIDPYKEFGSSYQLLNFLPLDFFPDLNALVDTATALYEEELTGREHCSPHHTAIRQALVCWDELTKLIAWMSSNITSEQVRTIIVNHVNDTWGLKVRQSLWFHLSCLTFGQHTVQEFLVSFGVWIRTPAPYRPPNAPILSTLPEHTVIC

SEQ ID NO: 7611 - protein, 1365 aa, Artificial Sequence
  SARS-CoV-2/USA/WA-UW31/2020__EPI_ISL_414618 spike protein (1-1211)(T874C_S1055C) WhcAg construct
MFVFLVLLPLVSSQCVNLTTRTQLPPAYTNSFTRGVYYPDKVFRSSVLHSTQDLFLPFFSNVTWFHAIHVSGTNGTKRFDNPVLPFNDGVYFASTEKSNIIRGWIFGTTLDSKTQSLLIVNNATNVVIKVCEFQFCNDPFLGVYYHKNNKSWMESEFRVYSSANNCTFEYVSQPFLMDLEGKQGNFKNLREFVFKNIDGYFKIYSKHTPINLVRDLPQGFSALEPLVDLPIGINITRFQTLLALHRSYLTPGDSSSGWTAGAAAYYVGYLQPRTFLLKYNENGTITDAVDCALDPLSETKCTLKSFTVEKGIYQTSNFRVQPTESIVRFPNITNLCPFGEVFNATRFASVYAWNRKRISNCVADYSVLYNSASFSTFKCYGVSPTKLNDLCFTNVYADSFVIRGDEVRQIAPGQTGKIADYNYKLPDDFTGCVIAWNSNNLDSKVGGNYNYLYRLFRKSNLKPFERDISTEIYQAGSTPCNGAEGFNCYFPLQSYGFQPTNGVGYQPYRVVVLSFELLHAPATVCGPKKSTNLVKNKCVNFNFNGLTGTGVLTESNKKFLPFQQFGRDIADTTDAVRDPQTLEILDITPCSFGGVSVITPGTNTSNQVAVLYQDVNCTEVPVAIHADQLTPTWRVYSTGSNVFQTRAGCLIGAEHVNNSYECDIPIGAGICASYQTQTNSPRRARSVASQSIIAYTMSLGAENSVAYSNNSIAIPTNFTISVTTEILPVSMTKTSVDCTMYICGDSTECSNLLLQYGSFCTQLNRALTGIAVEQDKNTQEVFAQVKQIYKTPPIKDFGGFNFSQILPDPSKPSKRSFIEDLLFNKVTLADAGFIKQYGDCLGDIAARDLICAQKFNGLTVLPPLLTDEMIAQYCSALLAGTITSGWTFGAGAALQIPFAMQMAYRFNGIGVTQNVLYENQKLIANQFNSAIGKIQDSLSSTASALGKLQDVVNQNAQALNTLVKQLSSNFGAISSVLNDILSRLDKVEAEVQIDRLITGRLQSLQTYVTQQLIRAAEIRASANLAATKMSECVLGQSKRVDFCGKGYHLMSFPQCAPHGVVFLHVTYVPAQEKNFTTAPAICHDGKAHFPREGVFVSNGTHWFVTQRNFYEPQIITTDNTFVSGNCDVVIGIVNNTVYDPLQPELDSFKEELDKYFKNHTSPDVDLGDISGINASVVNIQKEIDRLNEVAKNLNESLIDLQELGKYEQYIKGGGGSDIDPYKEFGSSYQLLNFLPLDFFPDLNALVDTATALYEEELTGREHCSPHHTAIRQALVCWDELTKLIAWMSSNITSEQVRTIIVNHVNDTWGLKVRQSLWFHLSCLTFGQHTVQEFLVSFGVWIRTPAPYRPPNAPILSTLPEHTVIC

SEQ ID NO: 7612 - protein, 1365 aa, Artificial Sequence
  SARS-CoV-2/South Korea/SNU01/2020__EPI_ISL_411929 spike protein (1-1211)(T874C_S1055C) WhcAg construct
MFVFLVLLPLVSSQCVNLTTRTQLPPAYTNSFTRGVYYPDKVFRSSVLHSTQDLFLPFFSNVTWFHAIHVSGTNGTKRFDNPVLPFNDGVYFASTEKSNIIRGWIFGTTLDSKTQSLLIVNNATNVVIKVCEFQFCNDPFLGVYYHKNNKSWMESEFRVYSSANNCTFEYVSQPFLMDLEGKQGNFKNLREFVFKNIDGYFKIYSKHTPINLVRDLPQGFWALEPLVDLPIGINITRFQTLLALHRSYLTPGDSSSGWTAGAAAYYVGYLQPRTFLLKYNENGTITDAVDCALDPLSETKCTLKSFTVEKGIYQTSNFRVQPTESIVRFPNITNLCPFGEVFNATRFASVYAWNRKRISNCVADYSVLYNSASFSTFKCYGVSPTKLNDLCFTNVYADSFVIRGDEVRQIAPGQTGKIADYNYKLPDDFTGCVIAWNSNNLDSKVGGNYNYLYRLFRKSNLKPFERDISTEIYQAGSTPCNGVEGFNCYFPLQSYGFQPTNGVGYQPYRVVVLSFELLHAPATVCGPKKSTNLVKNKCVNFNFNGLTGTGVLTESNKKFLPFQQFGRDIADTTDAVRDPQTLEILDITPCSFGGVSVITPGTNTSNQVAVLYQDVNCTEVPVAIHADQLTPTWRVYSTGSNVFQTRAGCLIGAEHVNNSYECDIPIGAGICASYQTQTNSPRRARSVASQSIIAYTMSLGAENSVAYSNNSIAIPTNFTISVTTEILPVSMTKTSVDCTMYICGDSTECSNLLLQYGSFCTQLNRALTGIAVEQDKNTQEVFAQVKQIYKTPPIKDFGGFNFSQILPDPSKPSKRSFIEDLLFNKVTLADAGFIKQYGDCLGDIAARDLICAQKFNGLTVLPPLLTDEMIAQYCSALLAGTITSGWTFGAGAALQIPFAMQMAYRFNGIGVTQNVLYENQKLIANQFNSAIGKIQDSLSSTASALGKLQDVVNQNAQALNTLVKQLSSNFGAISSVLNDILSRLDKVEAEVQIDRLITGRLQSLQTYVTQQLIRAAEIRASANLAATKMSECVLGQSKRVDFCGKGYHLMSFPQCAPHGVVFLHVTYVPAQEKNFTTAPAICHDGKAHFPREGVFVSNGTHWFVTQRNFYEPQIITTDNTFVSGNCDVVIGIVNNTVYDPLQPELDSFKEELDKYFKNHTSPDVDLGDISGINASVVNIQKEIDRLNEVAKNLNESLIDLQELGKYEQYIKGGGGSDIDPYKEFGSSYQLLNFLPLDFFPDLNALVDTATALYEEELTGREHCSPHHTAIRQALVCWDELTKLIAWMSSNITSEQVRTIIVNHVNDTWGLKVRQSLWFHLSCLTFGQHTVQEFLVSFGVWIRTPAPYRPPNAPILSTLPEHTVIC

SEQ ID NO: 7613 - protein, 1365 aa, Artificial Sequence
  SARS-CoV-2/China/WF0004/2020__EPI_ISL_413694 spike protein (1-1211)(T874C_S1055C) WhcAg construct
MFVFLVLLPLVSSQCVNLTTRTQLPPAYTNSFTRGVYYPDKVFRSSVLHSTQDLFLPFFSNVTWFHAIHVSGTNGTKRFDNPVLPFNDGVYFASTEKSNIIRGWIFGTTLDSKTQSLLIVNNATNVVIKVCEFQFCNDPFLGVYYHKNNKSWTESEFRVYSSANNCTFEYVSQPFLMDLEGKQGNFKNLREFVFKNIDGYFKIYSKHTPINLVRDLPQGFSALEPLVDLPIGINITRFQTLLALHRSYLTPGDSSSGWTAGAAAYYVGYLQPRTFLLKYNENGTITDAVDCALDPLSETKCTLKSFTVEKGIYQTSNFRVQPTESIVRFPNITNLCPFGEVFNATRFASVYAWNRKRISNCVADYSVLYNSASFSTFKCYGVSPTKLNDLCFTNVYADSFVIRGDEVRQIAPGQTGKIADYNYKLPDDFTGCVIAWNSNNLDSKVGGNYNYLYRLFRKSNLKPFERDISTEIYQAGSTPCNGVEGFNCYFPLQSYGFQPTNGVGYQPYRVVVLSFELLHAPATVCGPKKSTNLVKNKCVNFNFNGLTGTGVLTESNKKFLPFQQFGRDIADTTDAVRDPQTLEILDITPCSFGGVSVITPGTNTSNQVAVLYQDVNCTEVPVAIHADQLTPTWRVYSTGSNVFQTRAGCLIGAEHVNNSYECDIPIGAGICASYQTQTNSPRRARSVASQSIIAYTMSLGAENSVAYSNNSIAIPTNFTISVTTEILPVSMTKTSVDCTMYICGDSTECSNLLLQYGSFCTQLNRALTGIAVEQDKNTQEVFAQVKQIYKTPPIKDFGGFNFSQILPDPSKPSKRSFIEDLLFNKVTLADAGFIKQYGDCLGDIAARDLICAQKFNGLTVLPPLLTDEMIAQYCSALLAGTITSGWTFGAGAALQIPFAMQMAYRFNGIGVTQNVLYENQKLIANQFNSAIGKIQDSLSSTASALGKLQDVVNQNAQALNTLVKQLSSNFGAISSVLNDILSRLDKVEAEVQIDRLITGRLQSLQTYVTQQLIRAAEIRASANLAATKMSECVLGQSKRFDFCGKGYHLMSFPQCAPHGVVFLHVTYVPAQEKNFTTAPAICHDGKAHFPREGVFVSNGTHWFVTQRNFYEPQIITTDNTFVSGNCDVVIGIVNNTVYDPLQPELDSFKEELDKYFKNHTSPDVDLGDISGINASVVNIQKEIDRLNEVAKNLNESLIDLQELGKYEQYIKGGGGSDIDPYKEFGSSYQLLNFLPLDFFPDLNALVDTATALYEEELTGREHCSPHHTAIRQALVCWDELTKLIAWMSSNITSEQVRTIIVNHVNDTWGLKVRQSLWFHLSCLTFGQHTVQEFLVSFGVWIRTPAPYRPPNAPILSTLPEHTVIC

SEQ ID NO: 7614 - protein, 1365 aa, Artificial Sequence
  SARS-CoV-2/China/WF0028/2020__EPI_ISL_413791 spike protein (1-1211)(T874C_S1055C) WhcAg construct
MFVFLVLLPLVSSQCVNLTTRTQLPPAYTNSFTRGVYYPDKVFRSSVLHSTQDLFLPFFSNVTWFHAIHVSGTNGTKRFDNPVLPFNDGVYFASTEKSNIIRGWIFGTTLDSKTQSLLIVNNATNVVIKVCEFQFCNDPFLGVYYHKNNKSWMESEFRVYSSANNCTFEYVSQPFLMDLEGKQGNFKNLREFVFKNIDGYFKIYSKHTPINLVRDLPQGFSALEPLVDLPIGINITRFQTLLALHRSYLTPGDSSSGWTAGAAAYYVGYLQPRTFLLKYNENGTITDAVDCALDPLSETKCTLKSFTVEKGIYQTSNFRVQPTESIVRFPNITNLCPFGEVFNATRFASVYAWNRKRISNCVADYSVLYNSASFSTFKCYGVSPTKLNDLCFTNVYADSFVIRGDEVRQIAPGQTGKIADYNYKLPDDFTGCVIAWNSNNLDSKVGGNYNYLYRLFRKSNLKPFERDISTEIYQAGSTPCNGVEGFNCYFPLQSYGFQPTNGVGYQPYRVVVLSFELLHAPATVCGPKKSTNLVKNKCVNFNFNGLTGTGVLTESNKKFLPFQQFGRDIADTTDAVRDPQTLEILDITPCSFGGVSVITPGTNTSNQVAVLYQDVNCTEVPVAIHADQLTPTWRVYSTGSNVFQTRAGCLIGAEHVNNSYECDIPIGAGICASYQTQTNSPRRARSVASQSIIAYTMSLGAENSVAYSNNSIAIPTNFTISVTTEILPVSMTKTSVDCTMYICGDSTECSNLLLQYGSFCTQLNRALTGIAVEQDKNTQEVFAQVKQIYKTPPIKDFGGFNFSQILPDPSKPSKRSFIEDLLFNKVTLADAGFIKQYGDCLGDIAARDLICAQKFNGLTVLPPLLTDEMIAQYCSALLAGTITSGWTFGAGAALQIPFAMQMAYRFNGIGVTQNVLYENQKLIANQFNSAIGKIQDSLSSTASALGKLQDVVNQNAQALNTLVKQLSSNFGAISSVLNDILSRLDKVEAEVQIDRLITGRLQSLQTYVTQQLIRAAEIRASANLAATKMSECVLGQSKRVDFCGKGYHLMSFPQCAPHGVVFLHVTYVPAQEKNFTTAPAICHDGKAHFPREGVFVSNGTHWFVTQRNFYEPQIITTDNTFVSGNCDVVIGIVNNTVYDPLQPELESFKEELDKYFKNHTSPDVDLGDISGINASVVNIQKEIDRLNEVAKNLNESLIDLQELGKYEQYIKGGGGSDIDPYKEFGSSYQLLNFLPLDFFPDLNALVDTATALYEEELTGREHCSPHHTAIRQALVCWDELTKLIAWMSSNITSEQVRTIIVNHVNDTWGLKVRQSLWFHLSCLTFGQHTVQEFLVSFGVWIRTPAPYRPPNAPILSTLPEHTVIC

SEQ ID NO: 7615 - protein, 1365 aa, Artificial Sequence
  SARS-CoV-2/2019-nCoV/USA-CruiseA-18/2020__MT159716.1 spike protein (1-1211)(T874C_S1055C) WhcAg construct
MFVFLVLLPLVSSQCVNLTTRTQLPPAYTNSFTRGVYYPDKVFRSSVLHSTQDLFLPFFSNVTWFHAIHVSGTNGTKRFDNPVLPFNDGVYFASTEKSNIIRGWIFGTTLDSKTQSLLIVNNATNVVIKVCEFQFCNDPFLGVYYHKNNKSWMESELRVYSSANNCTFEYVSQPFLMDLEGKQGNFKNLREFVFKNIDGYFKIYSKHTPINLVRDLPQGFSALEPLVDLPIGINITRFQTLLALHRSYLTPGDSSSGWTAGAAAYYVGYLQPRTFLLKYNENGTITDAVDCALDPLSETKCTLKSFTVEKGIYQTSNFRVQPTESIVRFPNITNLCPFGEVFNATRFASVYAWNRKRISNCVADYSVLYNSASFSTFKCYGVSPTKLNDLCFTNVYADSFVIRGDEVRQIAPGQTGKIADYNYKLPDDFTGCVIAWNSNNLDSKVGGNYNYLYRLFRKSNLKPFERDISTEIYQAGSTPCNGVEGFNCYFPLQSYGFQPTNGVGYQPYRVVVLSFELLHAPATVCGPKKSTNLVKNKCVNFNFNGLTGTGVLTESNKKFLPFQQFGRDIADTTDAVRDPQTLEILDITPCSFGGVSVITPGTNTSNQVAVLYQDVNCTEVPVAIHADQLTPTWRVYSTGSNVFQTRAGCLIGAEHVNNSYECDIPIGAGICASYQTQTNSPRRARSVASQSIIAYTMSLGAENSVAYSNNSIAIPTNFTISVTTEILPVSMTKTSVDCTMYICGDSTECSNLLLQYGSFCTQLNRALTGIAVEQDKNTQEVFAQVKQIYKTPPIKDFGGFNFSQILPDPSKPSKRSFIEDLLFNKVTLADAGFIKQYGDCLGDIAARDLICAQKFNGLTVLPPLLTDEMIAQYCSALLAGTITSGWTFGAGAALQIPFAMQMAYRFNGIGVTQNVLYENQKLIANQFNSAIGKIQDSLSSTASALGKLQDVVNQNAQALNTLVKQLSSNFGAISSVLNDILSRLDKVEAEVQIDRLITGRLQSLQTYVTQQLIRAAEIRASANLAATKMSECVLGQSKRVDFCGKGYHLMSFPQCAPHGVVFLHVTYVPAQEKNFTTAPAICHDGKAHFPREGVFVSNGTHWFVTQRNFYEPQIITTDNTFVSGNCDVVIGIVNNTVYDPLQPELDSFKEELDKYFKNHTSPDVDLGDISGINASVVNIQKEIDRLNEVAKNLNESLIDLQELGKYEQYIKGGGGSDIDPYKEFGSSYQLLNFLPLDFFPDLNALVDTATALYEEELTGREHCSPHHTAIRQALVCWDELTKLIAWMSSNITSEQVRTIIVNHVNDTWGLKVRQSLWFHLSCLTFGQHTVQEFLVSFGVWIRTPAPYRPPNAPILSTLPEHTVIC

SEQ ID NO: 7616 - protein, 1365 aa, Artificial Sequence
  SARS-CoV-2/SARS-CoV-2/Yunnan-01/human/2020/CHN__MT049951.1 spike protein (1-1211)(T874C_S1055C) WhcAg construct
MFVFLVLLPLVSSQCVNLTTRTQLPPANTNSFTRGVYYPDKVFRSSVLHSTQDLFLPFFSNVTWFHAIHVSGTNGTKRFDNPVLPFNDGVYFASTEKSNIIRGWIFGTTLDSKTQSLLIVNNATNVVIKVCEFQFCNDPFLGVYYHKNNKSWMESEFRVYSSANNCTFEYVSQPFLMDLEGKQGNFKNLREFVFKNIDGYFKIYSKHTPINLVRDLPQGFSALEPLVDLPIGINITRFQTLLALHRSYLTPGDSSSGWTAGAAAYYVGYLQPRTFLLKYNENGTITDAVDCALDPLSETKCTLKSFTVEKGIYQTSNFRVQPTESIVRFPNITNLCPFGEVFNATRFASVYAWNRKRISNCVADYSVLYNSASFSTFKCYGVSPTKLNDLCFTNVYADSFVIRGDEVRQIAPGQTGKIADYNYKLPDDFTGCVIAWNSNNLDSKVGGNYNYLYRLFRKSNLKPFERDISTEIYQAGSTPCNGVEGFNCYFPLQSYGFQPTNGVGYQPYRVVVLSFELLHAPATVCGPKKSTNLVKNKCVNFNFNGLTGTGVLTESNKKFLPFQQFGRDIADTTDAVRDPQTLEILDITPCSFGGVSVITPGTNTSNQVAVLYQDVNCTEVPVAIHADQLTPTWRVYSTGSNVFQTRAGCLIGAEHVNNSYECDIPIGAGICASYQTQTNSPRRARSVASQSIIAYTMSLGAENSVAYSNNSIAIPTNFTISVTTEILPVSMTKTSVDCTMYICGDSTECSNLLLQYGSFCTQLNRALTGIAVEQDKNTQEVFAQVKQIYKTPPIKDFGGFNFSQILPDPSKPSKRSFIEDLLFNKVTLADAGFIKQYGDCLGDIAARDLICAQKFNGLTVLPPLLTDEMIAQYCSALLAGTITSGWTFGAGAALQIPFAMQMAYRFNGIGVTQNVLYENQKLIANQFNSAIGKIQDSLSSTASALGKLQDVVNQNAQALNTLVKQLSSNFGAISSVLNDILSRLDKVEAEVQIDRLITGRLQSLQTYVTQQLIRAAEIRASANLAATKMSECVLGQSKRVDFCGKGYHLMSFPQCAPHGVVFLHVTYVPAQEKNFTTAPAICHDGKAHFPREGVFVSNGTHWFVTQRNFYEPQIITTDNTFVSGNCDVVIGIVNNTVYDPLQPELDSFKEELDKYFKNHTSPDVDLGDISGINASVVNIQKEIDRLNEVAKNLNESLIDLQELGKYEQYIKGGGGSDIDPYKEFGSSYQLLNFLPLDFFPDLNALVDTATALYEEELTGREHCSPHHTAIRQALVCWDELTKLIAWMSSNITSEQVRTIIVNHVNDTWGLKVRQSLWFHLSCLTFGQHTVQEFLVSFGVWIRTPAPYRPPNAPILSTLPEHTVIC

SEQ ID NO: 7617 - protein, 1365 aa, Artificial Sequence
  SARS-CoV-2/USA/WA-UW292/2020__EPI_ISL_418077 spike protein (1-1211)(T874C_S1055C) WhcAg construct
MFVFLVLLPLVSSQCVNLTTRTQLPPAYTNSFTRGVYYPDKVFRSSVLHSTQDLFLPFFSNVTWFHAIHVSGTNGTKRFDNPVLPFNDGVYFASTEKSNIIRGWIFGTTLDSKTQSLLIVNNATNVVIKVCEFQFCNDPFLGVYYHKNNKSWMESEFRVYSSANNCTFEYVSQPFLMDLEGKQGNFKNLREFVFKNIDGYFKIYSKHTPINLVRDLPQGFSALEPLVDLPIGINITRFQTLLALHRSYLTPGDSSSGWTAGAAAYYVGYLQPRTFLLKYNENGTITDAVDCALDPLSETKCTLKSFTVEKGIYQTSNFRVQPTESIVRFPNITNLCPFGEVFNATRFASVYAWNRKRISNCVADYSVLYNSASFSTFKCYGVSPTKLNDLCFTNVYADSFVIRGDEVRQIAPGQTGKIADYNYKLPDDFTGCVIAWNSNNLDSKVGGNYNYLYRLFRKSNLKPFERDISTEIYQASSTPCNGVEGFNCYFPLQSYGFQPTNGVGYQPYRVVVLSFELLHAPATVCGPKKSTNLVKNKCVNFNFNGLTGTGVLTESNKKFLPFQQFGRDIADTTDAVRDPQTLEILDITPCSFGGVSVITPGTNTSNQVAVLYQDVNCTEVPVAIHADQLTPTWRVYSTGSNVFQTRAGCLIGAEHVNNSYECDIPIGAGICASYQTQTNSPRRARSVASQSIIAYTMSLGAENSVAYSNNSIAIPTNFTISVTTEILPVSMTKTSVDCTMYICGDSTECSNLLLQYGSFCTQLNRALTGIAVEQDKNTQEVFAQVKQIYKTPPIKDFGGFNFSQILPDPSKPSKRSFIEDLLFNKVTLADAGFIKQYGDCLGDIAARDLICAQKFNGLTVLPPLLTDEMIAQYCSALLAGTITSGWTFGAGAALQIPFAMQMAYRFNGIGVTQNVLYENQKLIANQFNSAIGKIQDSLSSTASALGKLQDVVNQNAQALNTLVKQLSSNFGAISSVLNDILSRLDKVEAEVQIDRLITGRLQSLQTYVTQQLIRAAEIRASANLAATKMSECVLGQSKRVDFCGKGYHLMSFPQCAPHGVVFLHVTYVPAQEKNFTTAPAICHDGKAHFPREGVFVSNGTHWFVTQRNFYEPQIITTDNTFVSGNCDVVIGIVNNTVYDPLQPELDSFKEELDKYFKNHTSPDVDLGDISGINASVVNIQKEIDRLNEVAKNLNESLIDLQELGKYEQYIKGGGGSDIDPYKEFGSSYQLLNFLPLDFFPDLNALVDTATALYEEELTGREHCSPHHTAIRQALVCWDELTKLIAWMSSNITSEQVRTIIVNHVNDTWGLKVRQSLWFHLSCLTFGQHTVQEFLVSFGVWIRTPAPYRPPNAPILSTLPEHTVIC

SEQ ID NO: 7618 - protein, 1365 aa, Artificial Sequence
  SARS-CoV-2/Iceland/192/2020__EPI_ISL_417819 spike protein (1-1211)(T874C_S1055C) WhcAg construct
MFVFFVLLPLVSSQCVNLTTRTQLPPAYTNSFTRGVYYPDKVFRSSVLHSTQDLFLPFFSNVTWFHAIHVSGTNGTKRFDNPVLPFNDGVYFASTEKSNIIRGWIFGTTLDSKTQSLLIVNNATNVVIKVCEFQFCNDPFLGVYYHKNNKSWMESEFRVYSSANNCTFEYVSQPFLMDLEGKQGNFKNLREFVFKNIDGYFKIYSKHTPINLVRDLPQGFSALEPLVDLPIGINITRFQTLLALHRSYLTPGDSSSGWTAGAAAYYVGYLQPRTFLLKYNENGTITDAVDCALDPLSETKCTLKSFTVEKGIYQTSNFRVQPTESIVRFPNITNLCPFGEVFNATRFASVYAWNRKRISNCVADYSVLYNSASFSTFKCYGVSPTKLNDLCFTNVYADSFVIRGDEVRQIAPGQTGKIADYNYKLPDDFTGCVIAWNSNNLDSKVGGNYNYLYRLFRKSNLKPFERDISTEIYQAGSTPCNGVEGFNCYFPLQSYGFQPTNGVGYQPYRVVVLSFELLHAPATVCGPKKSTNLVKNKCVNFNFNGLTGTGVLTESNKKFLPFQQFGRDIADTTDAVRDPQTLEILDITPCSFGGVSVITPGTNTSNQVAVLYQGVNCTEVPVAIHADQLTPTWRVYSTGSNVFQTRAGCLIGAEHVNNSYECDIPIGAGICASYQTQTNSPRRARSVASQSIIAYTMSLGAENSVAYSNNSIAIPTNFTISVTTEILPVSMTKTSVDCTMYICGDSTECSNLLLQYGSFCTQLNRALTGIAVEQDKNTQEVFAQVKQIYKTPPIKDFGGFNFSQILPDPSKPSKRSFIEDLLFNKVTLADAGFIKQYGDCLGDIAARDLICAQKFNGLTVLPPLLTDEMIAQYCSALLAGTITSGWTFGAGAALQIPFAMQMAYRFNGIGVTQNVLYENQKLIANQFNSAIGKIQDSLSSTASALGKLQDVVNQNAQALNTLVKQLSSNFGAISSVLNDILSRLDKVEAEVQIDRLITGRLQSLQTYVTQQLIRAAEIRASANLAATKMSECVLGQSKRVDFCGKGYHLMSFPQCAPHGVVFLHVTYVPAQEKNFTTAPAICHDGKAHFPREGVFVSNGTHWFVTQRNFYEPQIITTDNTFVSGNCDVVIGIVNNTVYDPLQPELDSFKEELDKYFKNHTSPDVDLGDISGINASVVNIQKEIDRLNEVAKNLNESLIDLQELGKYEQYIKGGGGSDIDPYKEFGSSYQLLNFLPLDFFPDLNALVDTATALYEEELTGREHCSPHHTAIRQALVCWDELTKLIAWMSSNITSEQVRTIIVNHVNDTWGLKVRQSLWFHLSCLTFGQHTVQEFLVSFGVWIRTPAPYRPPNAPILSTLPEHTVIC

SEQ ID NO: 7619 - protein, 1365 aa, Artificial Sequence
  SARS-CoV-2/Belgium/ULG-6939/2020__EPI_ISL_417020 spike protein (1-1211)(T874C_S1055C) WhcAg construct
MFVFLVLLPLVSSQCVNLTTRTQLPPAYTNSFTRGVYYPDKVFRSSVLHSTQDLFLPFFSNVTWFHAIHVSGTNGTKRFDNPVLPFNDGVYFASTEKSNIIRGWIFGTTLDSKTQSLLIVNNATNVVIKVCEFQFCNDPFLGVYYHKNNKSWMESEFRVYSSANNCTFEYVSQPFLMDLEGKQGNFKNLREFVFKNIDGYFKIYSKHTPINLVRDLPQGFSALEPLVDLPIGINITRFQTLLALHRSYLTPGDSSSGWTAGAAAYYVGYLQPRTFLLKYNENGTITDAVDCALDPLSETKCTLKSFTVEKGIYQTSNFRVQPTESIVRFPNITNLCPFGEVFNATRFASVYAWNRKRISNCVADYSVLYNSASFSTFKCYGVSPTKLNDLCFTNVYADSFVIRGDEVRQIAPGQTGKIADYNYKLPDDFTGCVIAWNSNNLDSKVGGNYNYLYRLFRKSNLKPFERDISTEIYQAGSTPCNGVEGFNCYFPLQSYGFQPTNGVGYQPYRVVVLSFELLHAPATVCGPKKSTNLVKNKCVNFNFNGLTGTGVLTESNKKFLPFQQFGRDIADTTDAVRDPQTLEILDITPCSFGGVSVITPGTNTSNQVAVLYQGVNCTEVPVAIHADQLTPTWRVYSTGSNVFQTRAGCLIGAEHVNNSYECDIPIGAGICASYQTQTNSPRRARSVASQSIIAYTMSLGAENSVVYSNNSIAIPTNFTISVTTEILPVSMTKTSVDCTMYICGDSTECSNLLLQYGSFCTQLNRALTGIAVEQDKNTQEVFAQVKQIYKTPPIKDFGGFNFSQILPDPSKPSKRSFIEDLLFNKVTLADAGFIKQYGDCLGDIAARDLICAQKFNGLTVLPPLLTDEMIAQYCSALLAGTITSGWTFGAGAALQIPFAMQMAYRFNGIGVTQNVLYENQKLIANQFNSAIGKIQDSLSSTASALGKLQDVVNQNAQALNTLVKQLSSNFGAISSVLNDILSRLDKVEAEVQIDRLITGRLQSLQTYVTQQLIRAAEIRASANLAATKMSECVLGQSKRVDFCGKGYHLMSFPQCAPHGVVFLHVTYVPAQEKNFTTAPAICHDGKAHFPREGVFVSNGTHWFVTQRNFYEPQIITTDNTFVSGNCDVVIGIVNNTVYDPLQPELDSFKEELDKYFKNHTSPDVDLGDISGINASVVNIQKEIDRLNEVAKNLNESLIDLQELGKYEQYIKGGGGSDIDPYKEFGSSYQLLNFLPLDFFPDLNALVDTATALYEEELTGREHCSPHHTAIRQALVCWDELTKLIAWMSSNITSEQVRTIIVNHVNDTWGLKVRQSLWFHLSCLTFGQHTVQEFLVSFGVWIRTPAPYRPPNAPILSTLPEHTVIC

SEQ ID NO: 7620 - protein, 1365 aa, Artificial Sequence
  SARS-CoV-2/France/HF2496/2020__EPI_ISL_418231 spike protein (1-1211)(T874C_S1055C) WhcAg construct
MFVFLVLLPLVSSQCVNLTTRTQLPPAYTNSFTRGVYYPDKVFRSSVLHSTQDLFLPFFSNVTWFHAIHVSGTNGTKRFDNPVLPFNDGVYFASTEKSNIIRGWIFGTTLDSKTQSLLIVNNATNVVIKVCEFQFCNDPFLGVYYHKNNKSWMESEFRVYSSANNCTFEYVSQPFLMDLEGKQGNFKNLREFVFKNIDGYFKIYSKHTPINLVRDLPQGFSALEPLVDLPIGINITRFQTLLALHRSYLTPGDSSSGWTAGAAAYYVGYLQPRTFLLKYNENGTITDAVDCALDPLSETKCTLKSFTVEKGIYQTSNFRVQPTESIVRFPNITNLCPFGEVFNATRFASVYAWNRKRISNCVADYSVLYNSASFSTFKCYGVSPTKLNDLCFTNVYADSFVIRGDEVRQIAPGQTGKIADYNYKLPDDFTGCVIAWNSNNLDSKVGGNYNYLYRLFRKSNLKPFERDISTEIYQAGSTPCNGVEGFNCYFPLQSYGFQPTNGVGYQPYRVVVLSFELLHAPATVCGPKKSTNLVKNKCVNFNFNGLTGTGVLTESNKKFLPFQQFGRDIADTTDAVRDPQTLEILDITPCSFGGVSVITPGTNTSNQVAVLYQGVNCTEVPVAIHADQLTPTWRVYSTGSNVFQTRAGCLIGAEHVNNSYECDIPIGAGICASYQTQTNSPRRARSVASQSIIAYTMSLGAENSVAYSNNSIAIPTNFTISVTTEILPVSMTKTSVDCTMYICGDSTECSNLLLQYGSFCTQLNRALTGIAVEQDKNTQEVFAQVKQIYKTPPIKDFGGFNFSQILPDPSKPSKRSFIEDLLFNKVTLADAGFIKQYGDCLGDIVARDLICAQKFNGLTVLPPLLTDEMIAQYCSALLAGTITSGWTFGAGAALQIPFAMQMAYRFNGIGVTQNVLYENQKLIANQFNSAIGKIQDSLSSTASALGKLQDVVNQNAQALNTLVKQLSSNFGAISSVLNDILSRLDKVEAEVQIDRLITGRLQSLQTYVTQQLIRAAEIRASANLAATKMSECVLGQSKRVDFCGKGYHLMSFPQCAPHGVVFLHVTYVPAQEKNFTTAPAICHDGKAHFPREGVFVSNGTHWFVTQRNFYEPQIITTDNTFVSGNCDVVIGIVNNTVYDPLQPELDSFKEELDKYFKNHTSPDVDLGDISGINASVVNIQKEIDRLNEVAKNLNESLIDLQELGKYEQYIKGGGGSDIDPYKEFGSSYQLLNFLPLDFFPDLNALVDTATALYEEELTGREHCSPHHTAIRQALVCWDELTKLIAWMSSNITSEQVRTIIVNHVNDTWGLKVRQSLWFHLSCLTFGQHTVQEFLVSFGVWIRTPAPYRPPNAPILSTLPEHTVIC

SEQ ID NO: 7621 - protein, 1365 aa, Artificial Sequence
  SARS-CoV-2/USA/WA-UW291/2020__EPI_ISL_418076 spike protein (1-1211)(T874C_S1055C) WhcAg construct
MFVFLVLLPLVSSQCVNLTTRTQLPPAYTNSFTRGVYYPDKVFRSSVLHSTQDLFLPFFSNVTWFHAIHVSGTNGTKRFDNPVLPFNDGVYFASTEKSNIIRGWIFGTTLDSKTQSLLIVNNATNVVIKVCEFQFCNDPFLGVYYHKNNKSWMESEFRVYSSANNCTFEYVSQPFLMDLEGKQGNFKNLREFVFKNIDGYFKIYSKHTPINLVRDLPQGFSALEPLVDLPIGINITRFQTLLALHRSYLTPGDSSSGWTAGAAAYYVGYLQPRTFLLKYNENGTITDAVDCALDPLSETKCTLKSFTVEKGIYQTSNFRVQPTESIVRFPNITNLCPFGEVFNATRFASVYAWNRKRISNCVADYSVLYNSASFSTFKCYGVSPTKLNDLCFTNVYADSFVIRGDEVRQIAPGQTGKIADYNYKLPDDFTGCVIAWNSNNLDSKVGGNYNYLYRLFRKSNLKPFERDISTEIYQAGSTPCNGVEGFNCYFPLQSYGFQPTNGVGYQPYRVVVLSFELLHAPATVCGPKKSTNLVKNKCVNFNFNGLTGTGVLTESNKKFLPFQQFGRDIADTTDAVRDPQTLEILDITPCSFGGVSVITPGTNTSNQVAVLYQGVNCTEVPVAIHADQLTPTWRVYSTGSNVFQTRAGCLIGAEHVNNSYECDIPIGAGICASYQTQTNSPRRARSVASQSIIAYTMSLGAENSVAYSNNSIAIPTNFTISVTTEILPVSMTKTSVDCTMYICGDSTECSNLLLQYGSFCTQLNRALTGIAVEQDKNTQEVFAQVKQIYKTPPIKDFGGFNFSQILPDPSKPSKRSFIEDLLFNKVTLADAGFIKQYGDCLGDIAARDLICAQKFNGLTVLPPLLTDEMIAQYCSALLAGTITSGWTFGAGAALQIPFAMQMAYRFNGIGVTQNVLYENQKLIANQFNSAIGKIQYSLSSTASALGKLQDVVNQNAQALNTLVKQLSSNFGAISSVLNDILSRLDKVEAEVQIDRLITGRLQSLQTYVTQQLIRAAEIRASANLAATKMSECVLGQSKRVDFCGKGYHLMSFPQCAPHGVVFLHVTYVPAQEKNFTTAPAICHDGKAHFPREGVFVSNGTHWFVTQRNFYEPQIITTDNTFVSGNCDVVIGIVNNTVYDPLQPELDSFKEELDKYFKNHTSPDVDLGDISGINASVVNIQKEIDRLNEVAKNLNESLIDLQELGKYEQYIKGGGGSDIDPYKEFGSSYQLLNFLPLDFFPDLNALVDTATALYEEELTGREHCSPHHTAIRQALVCWDELTKLIAWMSSNITSEQVRTIIVNHVNDTWGLKVRQSLWFHLSCLTFGQHTVQEFLVSFGVWIRTPAPYRPPNAPILSTLPEHTVIC

SEQ ID NO: 7622 - protein, 1365 aa, Artificial Sequence; identical to SEQ ID NO: 7585
  SARS-CoV-2/Portugal/PT0034/2020__EPI_ISL_418019 spike protein (1-1211)(T874C_S1055C) WhcAg construct

SEQ ID NO: 7623 - protein, 1365 aa, Artificial Sequence
  SARS-CoV-2/Iceland/202/2020__EPI_ISL_417750 spike protein (1-1211)(T874C_S1055C) WhcAg construct
MFVFLVLLPLVSSQCVNLTTRTQLPPAYTNSFTRGVYYPDKVFRSSVLHSTQDLFLPFFSNVTWFHAIHVSGTNGTKRFDNPVLPFNDGVYFASTEKSNIIRGWIFGTTLDSKTQSLLIVNNATNVVIKVCEFQFCNDPFLGVYYHKNNKSWMESEFRVYSSANNCTFEYVSQPFLMDLEGKQGNFKNLREFVFKNIDGYFKIYSKHTPINLVRDLPQGFSALEPLVDLPIGINITRFQTLLALHRSYLTPGDSSSGWTAGAAAYYVGYLQPRTFLLKYNENGTITDAVDCALDPLSETKCTLKSFTVEKGIYQTSNFRVQPTESIVRFPNITNLCPFGEVFNATRFASVYAWNRKRISNCVADYSVLYNSASFSTFKCYGVSPTKLNDLCFTNVYADSFVIRGDEVRQIAPGQTGKIADYNYKLPDDFTGCVIAWNSNNLDSKVGGNYNYLYRLFRKSNLKPFERDISTEIYQAGSTPCNGVEGFNCYFPLQSYGFQPTNGVGYQPYRVVVLSFELLHAPATVCGPKKSTNLVKNKCVNFNFNGLTGTGVLTESNKKFLPFQQFGRDIADTTDAVRDPQTLEILDITPCSFGGVSVITPGTNTSNQVAVLYQDVNCTEVPVAIHADQLTPTWRVYSTGSNVFQTRAGCLIGAEHVNNSYECDIPIGAGICASYQTQTNSPRRARSVASQSIIAYTMSLGAENSVAYSNNSIAIPTNFTISVTTEILPVSMTKTSVDCTMYICGDSTECSNLLLQYGSFCTQLNRALTGIAVEQDKNTQEVFAQVKQIYKTPPIKDFGGFNFSQILPDPSKPSKRSFIEDLLFNKVTLADAGFIKQYGDCLGDIAARDLICAQKFNGLTVLPPLLTDEMIAQYCSALLAGTITSGWTFGAGAALQIPFAMQMAYRFNGIGVTQNVLYENQKLIANQFNSAIGKIQDSLSSTASALGKLQDVVNQNAQALNTLVKQLSSNFGAISSVLNDILSRLDKVEAEVQIDRLITGRLQSLQTYVTQQLIRAAEIRASANLAATKMSECVLGQSKRVDFCGKGYHLMSFPQCAPHGVVFLHVTYVPAQEKNFTTAPAICHDGKAHFPREGVFVSNGTHWFVTQRNFYEPQIITTDNTFVSGNCDVVIGIVNNTVYDPLQPELDSFKEELDKYFKNHTSPDVDLGDIPGINASVVNIQKEIDRLNEVAKNLNESLIDLQELGKYEQYIKGGGGSDIDPYKEFGSSYQLLNFLPLDFFPDLNALVDTATALYEEELTGREHCSPHHTAIRQALVCWDELTKLIAWMSSNITSEQVRTIIVNHVNDTWGLKVRQSLWFHLSCLTFGQHTVQEFLVSFGVWIRTPAPYRPPNAPILSTLPEHTVIC

SEQ ID NO: 7624 - protein, 1365 aa, Artificial Sequence
  SARS-CoV-2/USA/WA-UW261/2020__EPI_ISL_418046 spike protein (1-1211)(T874C_S1055C) WhcAg construct
MFVFLVLLPLVSSQCVNLTTRTQLPPAYTNSFTRGVYYPDKVFRSSVLHSTQDLFLPFFSNVTWFHAIHVSGTNGTKRFDNPVLPFNDGVYFASTEKSNIIRGWIFGTTLDSKTQSLLIVNNATNVVIKVCEFQFCNDPFLGVYYHKNNKSWMESEFRVYSSANNCTFEYVSQPFLMDLEGKQGNFKNLREFVFKNIDGYFKIYSKHTPINLVRDLPQGFSALEPLVDLPIGINITRFQTLLALHRSYLTPGDSSSGWTAGAAAYYVGYLQPRTFLLKYNENGTITDAVDCALDPLSETKCTLKSFTVEKGIYQTSNFRVQPTESIVRFPNITNLCPFGEVFNATRFTSVYAWNRKRISNCVADYSVLYNSASFSTFKCYGVSPTKLNDLCFTNVYADSFVIRGDEVRQIAPGQTGKIADYNYKLPDDFTGCVIAWNSNNLDSKVGGNYNYLYRLFRKSNLKPFERDISTEIYQAGSTPCNGVEGFNCYFPLQSYGFQPTNGVGYQPYRVVVLSFELLHAPATVCGPKKSTNLVKNKCVNFNFNGLTGTGVLTESNKKFLPFQQFGRDIADTTDAVRDPQTLEILDITPCSFGGVSVITPGTNTSNQVAVLYQDVNCTEVPVAIHADQLTPTWRVYSTGSNVFQTRAGCLIGAEHVNNSYECDIPIGAGICASYQTQTNSPRRARSVASQSIIAYTMSLGAENSVAYSNNSIAIPTNFTISVTTEILPVSMTKTSVDCTMYICGDSTECSNLLLQYGSFCTQLNRALTGIAVEQDKNTQEVFAQVKQIYKTPPIKDFGGFNFSQILPDPSKPSKRSFIEDLLFNKVTLADAGFIKQYGDCLGDIAARDLICAQKFNGLTVLPPLLTDEMIAQYCSALLAGTITSGWTFGAGAALQIPFAMQMAYRFNGIGVTQNVLYENQKLIANQFNSAIGKIQDSLSSTASALGKLQDVVNQNAQALNTLVKQLSSNFGAISSVLNDILSRLDKVEAEVQIDRLITGRLQSLQTYVTQQLIRAAEIRASANLAATKMSECVLGQSKRVDFCGKGYHLMSFPQCAPHGVVFLHVTYVPAQEKNFTTAPAICHDGKAHFPREGVFVSNGTHWFVTQRNFYEPQIITTDNTFVSGNCDVVIGIVNNTVYDPLQPELDSFKEELDKYFKNHTSPDVDLGDISGINASVVNIQKEIDRLNEVAKNLNESLIDLQELGKYEQYIKGGGGSDIDPYKEFGSSYQLLNFLPLDFFPDLNALVDTATALYEEELTGREHCSPHHTAIRQALVCWDELTKLIAWMSSNITSEQVRTIIVNHVNDTWGLKVRQSLWFHLSCLTFGQHTVQEFLVSFGVWIRTPAPYRPPNAPILSTLPEHTVIC

SEQ ID NO: 7625 - protein, 1365 aa, Artificial Sequence
  SARS-CoV-2/Portugal/PT0035/2020__EPI_ISL_418020 spike protein (1-1211)(T874C_S1055C) WhcAg construct
MFVFLVLLPLVSSQCVNLTTRTQLPPAYTNSFTRGVYYPDKVFRSSVLHSTQDLFLPFFSNVTWFHAIHVSGTNGTKRFDNPVLPFNDGVYFASTEKSNIIRGWIFGTTLDSKTQSLLIVNNATNVVIKVCEFQFCNDPFLGVYYHKNNKSWMESEFRVYSSANNCTFEYVSQPFLMDLEGKQGNFKNLREFVFKNIDGYFKIYSKHTPINLVRDLPQGFSALEPLVDLPIGINITRFQTLLALHRSYLTPGDSSSGWTAGAAAYYVGYLQPRTFLLKYNENGTITDAVDCALDPLSETKCTLKSFTVEKGIYQTSNFRVQPTESIVRFPNITNLCPFGEVFNATRFASVYAWNRKRISNCVADYSVLYNSASFSTFKCYGVSPTKLNDLCFTNVYADSFVIRGDEVRQIAPGQTGKIADYNYKLPDDFTGCVIAWNSNNLDSKVGGNYNYLYRLFRKSNLKPFERDISTEIYQAGSTPCNGVEGFNCYFPLQSYGFQPTNGVGYQPYRVVVLSFELLHAPATVCGPKKSTNLVKNKCVNFNFNGLTGTGVLTESNKKFLPFQQFGRDIADTTDAVRDPQTLEILDITPCSFGGVSVITPGTNTSNQVAVLYQDVNCTEVPVAIHADQLTPTWRVYSTGSNVFQTRAGCLIGAEHVNNSYECDIPIGAGICASYQTQTNSPRRARSVASQSIIAYTMSLGAENSVAYSNNSIAIPTNFTISVTTEILPVSMTKTSVDCTMYICGDSTECSNLLLQYGSFCTQLNRALTGIAVEQDKNTQEVFAQVKQIYKTPPIKDFGGFNFSQILPDPSKPSKRSFIEDLLFNKVTLADAGFIKQYGDCLGDISARDLICAQKFNGLTVLPPLLTDEMIAQYCSALLAGTITSGWTFGAGAALQIPFAMQMAYRFNGIGVTQNVLYENQKLIANQFNSAIGKIQDSLSSTASALGKLQDVVNQNAQALNTLVKQLSSNFGAISSVLNDILSRLDKVEAEVQIDRLITGRLQSLQTYVTQQLIRAAEIRASANLAATKMSECVLGQSKRVDFCGKGYHLMSFPQCAPHGVVFLHVTYVPAQEKNFTTAPAICHDGKAHFPREGVFVSNGTHWFVTQRNFYEPQIITTDNTFVSGNCDVVIGIVNNTVYDPLQPELDSFKEELDKYFKNHTSPDVDLGDISGINASVVNIQKEIDRLNEVAKNLNESLIDLQELGKYEQYIKGGGGSDIDPYKEFGSSYQLLNFLPLDFFPDLNALVDTATALYEEELTGREHCSPHHTAIRQALVCWDELTKLIAWMSSNITSEQVRTIIVNHVNDTWGLKVRQSLWFHLSCLTFGQHTVQEFLVSFGVWIRTPAPYRPPNAPILSTLPEHTVIC

SEQ ID NO: 7626 - protein, 1365 aa, Artificial Sequence
  SARS-CoV-2/USA/NY-NYUMC7/2020__EPI_ISL_418192 spike protein (1-1211)(T874C_S1055C) WhcAg construct
MFVFLVLLPLVSSQCVNLTTRTQLPPAYTNSFTRGVYYPDKVFRSSVLHSTQDLFLPFFSNVTWFHAIHVSGTNGTKRFDNPVLPFNDGVYFASTEKSNIIRGWIFGTTLDSKTQSLLIVNNATNVVIKVCEFQFCNDPFLGVYHHKNNKSWMESEFRVYSSANNCTFEYVSQPFLMDLEGKQGNFKNLREFVFKNIDGYFKIYSKHTPINLVRDLPQGFSALEPLVDLPIGINITRFQTLLALHRSYLTPGDSSSGWTAGAAAYYVGYLQPRTFLLKYNENGTITDAVDCALDPLSETKCTLKSFTVEKGIYQTSNFRVQPTESIVRFPNITNLCPFGEVFNATRFASVYAWNRKRISNCVADYSVLYNSASFSTFKCYGVSPTKLNDLCFTNVYADSFVIRGDEVRQIAPGQTGKIADYNYKLPDDFTGCVIAWNSNNLDSKVGGNYNYLYRLFRKSNLKPFERDISTEIYQAGSTPCNGVEGFNCYFPLQSYGFQPTNGVGYQPYRVVVLSFELLHAPATVCGPKKSTNLVKNKCVNFNFNGLTGTGVLTESNKKFLPFQQFGRDIADTTDAVRDPQTLEILDITPCSFGGVSVITPGTNTSNQVAVLYQGVNCTEVPVAIHADQLTPTWRVYSTGSNVFQTRAGCLIGAEHVNNSYECDIPIGAGICASYQTQTNSPRRARSVASQSIIAYTMSLGAENSVAYSNNSIAIPTNFTISVTTEILPVSMTKTSVDCTMYICGDSTECSNLLLQYGSFCTQLNRALTGIAVEQDKNTQEVFAQVKQIYKTPPIKDFGGFNFSQILPDPSKPSKRSFIEDLLFNKVTLADAGFIKQYGDCLGDIAARDLICAQKFNGLTVLPPLLTDEMIAQYCSALLAGTITSGWTFGAGAALQIPFAMQMAYRFNGIGVTQNVLYENQKLIANQFNSAIGKIQDSLSSTASALGKLQDVVNQNAQALNTLVKQLSSNFGAISSVLNDILSRLDKVEAEVQIDRLITGRLQSLQTYVTQQLIRAAEIRASANLAATKMSECVLGQSKRVDFCGKGYHLMSFPQCAPHGVVFLHVTYVPAQEKNFTTAPAICHDGKAHFPREGVFVSNGTHWFVTQRNFYEPQIITTDNTFVSGNCDVVIGIVNNTVYDPLQPELDSFKEELDKYFKNHTSPDVDLGDISGINASVVNIQKEIDRLNEVAKNLNESLIDLQELGKYEQYIKGGGGSDIDPYKEFGSSYQLLNFLPLDFFPDLNALVDTATALYEEELTGREHCSPHHTAIRQALVCWDELTKLIAWMSSNITSEQVRTIIVNHVNDTWGLKVRQSLWFHLSCLTFGQHTVQEFLVSFGVWIRTPAPYRPPNAPILSTLPEHTVIC

SEQ ID NO: 7627 - protein, 1365 aa, Artificial Sequence
  SARS-CoV-2/Iceland/189/2020__EPI_ISL_417709 spike protein (1-1211)(T874C_S1055C) WhcAg construct
MFVFLVLLPLVSSQCVNLTTRTQLPPAYTNSFTRGVYYPDKVFRSSVLHSTQDLFLPFFSNVTWFHAIHVSGTNGTKRFDNPVLPFNDGVYFASTEKSNIIRGWIFGTTLDSKTQSLLIVNNATNVVIKVCEFQFCNDPFLGVYYHKNNKSWMESEFRVYSSANNCTFEYVSQPFLMDLEGKQGNFKNLREFVFKNIDGYFKIYSKHTPINLVRDLPQGFSALEPLVDLPIGINITRFQTLLALHRSYLTPGDSSSGWTAGAAAYYVGYLQPRTFLLKYNENGTITDAVDCALDPLSETKCTLKSFTVEKGIYQTSNFRVQPTESIVRFPNITNLCPFGEVFNATRFASVYAWNRKRISNCVADYSVLYNSASFSTFKCYGVSPTKLNDLCFTNVYADSFVIRGDEVRQIAPGQTGKIADYNYKLPDDFTGCVIAWNSNNLDSKVGGNYNYLYRLFRKSNLKPFERDISTEIYQAGSTPCNGVEGFNCYFPLQSYGFQPTNGVGYQPYRVVVLSFELLHAPATVCGPKKSTNLVKNKCVNFNFNGLTGTGVLTESNKKFLPFQQFGRDIADTTDAVRDPQTLEILDITPCSFGGVSVITPGTNTSNQVAVLYQGVNCTEVPVAIHADQLTPTWRVYSTGSNVFQTRAGCLIGAEHVNNSYECDIPIGAGICASYQTQTNSPRRARSVASQSIIAYTMSLGAENSVAYSNNSIAIPTNFTISVTTEILPVSMTKTSVDCTMYICGDSTECSNLLLQYGSFCTQLNRALTGIAVEQDKNTQEVFAQVKQIYKTPPIKDFGGFNFSQILPDPSKPSKRSFIEDLLFNKVTLADAGFTKQYGDCLGDIAARDLICAQKFNGLTVLPPLLTDEMIAQYCSALLAGTITSGWTFGAGAALQIPFAMQMAYRFNGIGVTQNVLYENQKLIANQFNSAIGKIQDSLSSTASALGKLQDVVNQNAQALNTLVKQLSSNFGAISSVLNDILSRLDKVEAEVQIDRLITGRLQSLQTYVTQQLIRAAEIRASANLAATKMSECVLGQSKRVDFCGKGYHLMSFPQCAPHGVVFLHVTYVPAQEKNFTTAPAICHDGKAHFPREGVFVSNGTHWFVTQRNFYEPQIITTDNTFVSGNCDVVIGIVNNTVYDPLQPELDSFKEELDKYFKNHTSPDVDLGDISGINASVVNIQKEIDRLNEVAKNLNESLIDLQELGKYEQYIKGGGGSDIDPYKEFGSSYQLLNFLPLDFFPDLNALVDTATALYEEELTGREHCSPHHTAIRQALVCWDELTKLIAWMSSNITSEQVRTIIVNHVNDTWGLKVRQSLWFHLSCLTFGQHTVQEFLVSFGVWIRTPAPYRPPNAPILSTLPEHTVIC

SEQ ID NO: 7628 - protein, 1365 aa, Artificial Sequence
  SARS-CoV-2/Australia/NSW56/2020__EPI_ISL_417408 spike protein (1-1211)(T874C_S1055C) WhcAg construct
MFVFLVLLPLVSSQCVNLTTRTQLPPAYTNSFTRGVYYPDKVFRSSVLHSTQDLFLPFFSNVTWFHAIHVSGTNGTKRFDNPVLPFNDGVYFASTEKSNIIRGWIFGTTLDSKTQSLLIVNNATNVVIKVCEFQFCNDPFLGVYYHKNNKSWMESEFRVYSSANNCTFEYVSQPFLMDLEGKQGNFKNLREFVFKNIDGYFKIYSKHTPINLVRDLPQGFSALEPLVDLPIGINITRFQTLLALHRSYLTPGDSSSGWTAGAAAYYVGYLQPRTFLLKYNENGTITDAVDCALDPLSETKCTLKSFTVEKGIYQTSNFRVQPTESIVRFPNITNLCPFGEVFNATRFASVYAWNRKRISNCVADYSVLYNSASFSTFKCYGVSPTKLNDLCFTNVYADSFVIRGDEVRQIAPGQTGKIADYNYKLPDDFTGCVIAWNSNNLDSKVGGNYNYLYRLFRKSNLKPFERDISTEIYQAGSTPCNGVEGFNCYFPLQSYGFQPTNGVGYQPYRVVVLSFELLHAPATVCGPKKSTNLVKNKCVNFNFNGLTGTGVLTESNKKFLPFQQFGRDIADTTDAVRDPQTLEILDITPCSFGGVSVITPGTNTSNQVAVLYQDVNCTEVPVAIHADQLTPTWRVYSTGSNVFQTRAGCLIGAEHVNNSYECDIPIGAGICASYQTQTNSPRRARSVASQSIIAYTMSLGAENSVAYSNNSIAIPTNFTISVTTEILPVSMTKTSVDCTMYICGDSTECSNLLLQYGSFCTQLNRALTGIAVEQDKNTQEVFAQVKQIYKTPPIKDFGGFNFSQILPDSSKPSKRSFIEDLLFNKVTLADAGFIKQYGDCLGDIAARDLICAQKFNGLTVLPPLLTDEMIAQYCSALLAGTITSGWTFGAGAALQIPFAMQMAYRFNGIGVTQNVLYENQKLIANQFNSAIGKIQDSLSSTASALGKLQDVVNQNAQALNTLVKQLSSNFGAISSVLNDILSRLDKVEAEVQIDRLITGRLQSLQTYVTQQLIRAAEIRASANLAATKMSECVLGQSKRVDFCGKGYHLMSFPQCAPHGVVFLHVTYVPAQEKNFTTAPAICHDGKAHFPREGVFVSNGTHWFVTQRNFYEPQIITTDNTFVSGNCDVVIGIVNNTVYDPLQPELDSFKEELDKYFKNHTSPDVDLGDISGINASVVNIQKEIDRLNEVAKNLNESLIDLQELGKYEQYIKGGGGSDIDPYKEFGSSYQLLNFLPLDFFPDLNALVDTATALYEEELTGREHCSPHHTAIRQALVCWDELTKLIAWMSSNITSEQVRTIIVNHVNDTWGLKVRQSLWFHLSCLTFGQHTVQEFLVSFGVWIRTPAPYRPPNAPILSTLPEHTVIC

SEQ ID NO: 7629 - protein, 1365 aa, Artificial Sequence
  SARS-CoV-2/Iceland/280/2020__EPI_ISL_417608 spike protein (1-1211)(T874C_S1055C) WhcAg construct
MFVFLVLLPLVSSQCVNLTTRTQLPPAYTNSFTRGVYYPDKVFRSSVLHSTQDLFLPFFSNVTWFHAIHVSGTNGTKRFDNPVLPFNDGVYFASTEKSNIIRGWIFGTTLDSKTQSLLIVNNATNVVIKVCEFQFCNDPFLGVYYHKNNKSWMESEFRVYSSANNCTFEYVSQPFLMDLEGKQGNFKNLREFVFKNIDGYFKIYSKHTPINLVRDLPQGFSALEPLVDLPIGINITRFQTLLALHRSYLTPGDSSSGWTAGAAAYYVGYLQPRTFLLKYNENGTITDAVDCALDPLSETKCTLKSFTVEKGIYQTSNFRVQPTESIVRFPNITNLCPFGEVFNATRFASVYAWNRKRISNCVADYSVLYNSASFSTFKCYGVSPTKLNDLCFTNVYADSFVIRGDEVRQIAPGQTGKIADYNYKLPDDFTGCVIAWNSNNLDSKVGGNYNYLYRLFRKSNLKPFERDISTEIYQAGSTPCNGVEGFNCYFPLQSYGFQPTNGVGYQPYRVVVLSFELLHAPATVCGPKKSTNLVKNKCVNFNFNGLTGTGVLTESNKKFLPFQQFGRDIADTTDAVRDPQTLEILDITPCSFGGVSVITPGTNTSNQVAVLYQGVNCTEVPVAIHADQLTPTWRVYSTGSNVFQTRAGCLIGAEHVNNSYECDIPIGAGICASYHTQTNSPRRARSVASQSIIAYTMSLGAENSVAYSNNSIAIPTNFTISVTTEILPVSMTKTSVDCTMYICGDSTECSNLLLQYGSFCTQLNRALTGIAVEQDKNTQEVFAQVKQIYKTPPIKDFGGFNFSQILPDPSKPSKRSFIEDLLFNKVTLADAGFIKQYGDCLGDIAARDLICAQKFNGLTVLPPLLTDEMIAQYCSALLAGTITSGWTFGAGAALQIPFAMQMAYRFNGIGVTQNVLYENQKLIANQFNSAIGKIQDSLSSTASALGKLQDVVNQNAQALNTLVKQLSSNFGAISSVLNDILSRLDKVEAEVQIDRLITGRLQSLQTYVTQQLIRAAEIRASANLAATKMSECVLGQSKRVDFCGKGYHLMSFPQCAPHGVVFLHVTYVPAQEKNFTTAPAICHDGKAHFPREGVFVSNGTHWFVTQRNFYEPQIITTDNTFVSGNCDVVIGIVNNTVYDPLQPELDSFKEELDKYFKNHTSPDVDLGDISGINASVVNIQKEIDRLNEVAKNLNESLIDLQELGKYEQYIKGGGGSDIDPYKEFGSSYQLLNFLPLDFFPDLNALVDTATALYEEELTGREHCSPHHTAIRQALVCWDELTKLIAWMSSNITSEQVRTIIVNHVNDTWGLKVRQSLWFHLSCLTFGQHTVQEFLVSFGVWIRTPAPYRPPNAPILSTLPEHTVIC

SEQ ID NO: 7630 - protein, 1365 aa, Artificial Sequence; identical to SEQ ID NO: 7585
  SARS-CoV-2/Iceland/247/2020__EPI_ISL_417575 spike protein (1-1211)(T874C_S1055C) WhcAg construct

SEQ ID NO: 7631 - protein, 1365 aa, Artificial Sequence
  SARS-CoV-2/Iceland/238/2020__EPI_ISL_417566 spike protein (1-1211)(T874C_S1055C) WhcAg construct
MFVFLVLLPLVSSQCVNLTTRTQLPPAYTNSFTRGVYYPDKVFRSSVLHSTQDLFLPFFSNVTWFHAIHVSGTNGTKRFDNPVLPFNDGVYFASTEKSNIIRGWIFGTTLDSKTQSLLIVNNATNVVIKVCEFQFCNDPFLGVYYHKNNKSWMESEFRVYSSANNCTFEYVSQPFLMDLEGKQGNFKNLREFVFKNIDGYFKIYSKHTPINLVRDLPQGFSALEPLVDLPIGINITRFQTLLALHRSYLTPGDSSSGWTAGAAAYYVGYLQPRTFLLKYNENGTITDAVDCALDPLSETKCTLKSFTVEKGIYQTSNFRVQPTESIVRFPNITNLCPFGEVFNATRFASVYAWNRKRISNCVADYSVLYNSASFSTFKCYGVSPTKLNDLCFTNVYADSFVIRGDEVRQIAPGQTGKIADYNYKLPDDFTGCVIAWNSNNLDSKVGGNYNYLYRLFRKSNLKPFERDISTEIYQAGSTPCNGVEGFNCYFPLQSYGFQPTNGVGYQPYRVVVLSFELLHAPATVCGPKKSTNLVKNKCVNFNFNGLTGTGVLTESNKKFLPFQQFGRDIADTTDAVRDPQTLEILDITPCSFGGVSVITPGTNTSNQVAVLYQGVNCTEVPVAIHADQLTPTWRVYSTGSNVFQTRAGCLIGAEHVNNSYECDIPIGAGICASYQTQTNSPRRARSVASQSIIAYTMSLGAENSVAYSNNSIAIPTNFTISVTTEILPVSMTKTSVDCTMYICGDSTECSNLLLQYGSFCTQLNRALTGIAVEQDKNTQEVFAQVKQIYKTPPIKDFGGFNFSQILPDPSKPSKRSFIEDLLFNKVTLADVGFIKQYGDCLGDIAARDLICAQKFNGLTVLPPLLTDEMIAQYCSALLAGTITSGWTFGAGAALQIPFAMQMAYRFNGIGVTQNVLYENQKLIANQFNSAIGKIQDSLSSTASALGKLQDVVNQNAQALNTLVKQLSSNFGAISSVLNDILSRLDKVEAEVQIDRLITGRLQSLQTYVTQQLIRAAEIRASANLAATKMSECVLGQSKRVDFCGKGYHLMSFPQCAPHGVVFLHVTYVPAQEKNFTTAPAICHDGKAHFPREGVFVSNGTHWFVTQRNFYEPQIITTDNTFVSGNCDVVIGIVNNTVYDPLQPELDSFKEELDKYFKNHTSPDVDLGDISGINASVVNIQKEIDRLNEVAKNLNESLIDLQELGKYEQYIKGGGGSDIDPYKEFGSSYQLLNFLPLDFFPDLNALVDTATALYEEELTGREHCSPHHTAIRQALVCWDELTKLIAWMSSNITSEQVRTIIVNHVNDTWGLKVRQSLWFHLSCLTFGQHTVQEFLVSFGVWIRTPAPYRPPNAPILSTLPEHTVIC

SEQ ID NO: 7632 - protein, 1365 aa, Artificial Sequence
  SARS-CoV-2/Greece/16/2020__EPI_ISL_418265 spike protein (1-1211)(T874C_S1055C) WhcAg construct
MFVFLVLLPLVSSQCVNLTTRTQLPPAYTNSFTRGVYYPDKVFRSSVLHSTQDLFLPFFSNVTWFHAIHVSGTNGTKRFDNPVLPFNDGVYFASTEKSNIIRGWIFGTTLDSKTQSLLIVNNATNVVIKVCEFQFCNDPFLGVYYHKNNKSWMESEFRVYSSANNCTFEYVSQPFLMDLEGKQGNFKNLREFVFKNVDGYFKIYSKHTPINLVRDLPQGFSALEPLVDLPIGINITRFQTLLALHRSYLTPGDSSSGWTAGAAAYYVGYLQPRTFLLKYNENGTITDAVDCALDPLSETKCTLKSFTVEKGIYQTSNFRVQPTESIVRFPNITNLCPFGEVFNATRFASVYAWNRKRISNCVADYSVLYNSASFSTFKCYGVSPTKLNDLCFTNVYADSFVIRGDEVRQIAPGQTGKIADYNYKLPDDFTGCVIAWNSNNLDSKVGGNYNYLYRLFRKSNLKPFERDISTEIYQAGSTPCNGVEGFNCYFPLQSYGFQPTNGVGYQPYRVVVLSFELLHAPATVCGPKKSTNLVKNKCVNFNFNGLTGTGVLTESNKKFLPFQQFGRDIADTTDAVRDPQTLEILDITPCSFGGVSVITPGTNTSNQVAVLYQDVNCTEVPVAIHADQLTPTWRVYSTGSNVFQTRAGCLIGAEHVNNSYECDIPIGAGICASYQTQTNSPRRARSVASQSIIAYTMSLGAENSVAYSNNSIAIPTNFTISVTTEILPVSMTKTSVDCTMYICGDSTECSNLLLQYGSFCTQLNRALTGIAVEQDKNTQEVFAQVKQIYKTPPIKDFGGFNFSQILPDPSKPSKRSFIEDLLFNKVTLADAGFIKQYGDCLGDIAARDLICAQKFNGLTVLPPLLTDEMIAQYCSALLAGTITSGWTFGAGAALQIPFAMQMAYRFNGIGVTQNVLYENQKLIANQFNSAIGKIQDSLSSTASALGKLQDVVNQNAQALNTLVKQLSSNFGAISSVLNDILSRLDKVEAEVQIDRLITGRLQSLQTYVTQQLIRAAEIRASANLAATKMSECVLGQSKRVDFCGKGYHLMSFPQCAPHGVVFLHVTYVPAQEKNFTTAPAICHDGKAHFPREGVFVSNGTHWFVTQRNFYEPQIITTDNTFVSGNCDVVIGIVNNTVYDPLQPELDSFKEELDKYFKNHTSPDVDLGDISGINASVVNIQKEIDRLNEVAKNLNESLIDLQELGKYEQYIKGGGGSDIDPYKEFGSSYQLLNFLPLDFFPDLNALVDTATALYEEELTGREHCSPHHTAIRQALVCWDELTKLIAWMSSNITSEQVRTIIVNHVNDTWGLKVRQSLWFHLSCLTFGQHTVQEFLVSFGVWIRTPAPYRPPNAPILSTLPEHTVIC

SEQ ID NO: 7633 - protein, 1365 aa, Artificial Sequence
  SARS-CoV-2/Iceland/319/2020__EPI_ISL_417648 spike protein (1-1211)(T874C_S1055C) WhcAg construct
MFVFLVLLPLVSSQCVNLTTRTQLPPAYTNSFTRGVYYPDKVFRSSVLHSTQDLFLPFFSNVTWFHAIHVSGTNGTKRFDNPVLPFNDGVYFASTEKSNIIRGWIFGTTLDSKTQSLLIVNNATNVVIKVCEFQFCNDPFLGVYYHKNNKSWMESEFRVYSSANNCTFEYVSQPFLIDLEGKQGNFKNLREFVFKNIDGYFKIYSKHTPINLVRDLPQGFSALEPLVDLPIGINITRFQTLLALHRSYLTPGDSSSGWTAGAAAYYVGYLQPRTFLLKYNENGTITDAVDCALDPLSETKCTLKSFTVEKGIYQTSNFRVQPTESIVRFPNITNLCPFGEVFNATRFASVYAWNRKRISNCVADYSVLYNSASFSTFKCYGVSPTKLNDLCFTNVYADSFVIRGDEVRQIAPGQTGKIADYNYKLPDDFTGCVIAWNSNNLDSKVGGNYNYLYRLFRKSNLKPFERDISTEIYQAGSTPCNGVEGFNCYFPLQSYGFQPTNGVGYQPYRVVVLSFELLHAPATVCGPKKSTNLVKNKCVNFNFNGLTGTGVLTESNKKFLPFQQFGRDIADTTDAVRDPQTLEILDITPCSFGGVSVITPGTNTSNQVAVLYQGVNCTEVPVAIHADQLTPTWRVYSTGSNVFQTRAGCLIGAEHVNNSYECDIPIGAGICASYQTQTNSPRRARSVASQSIIAYTMSLGAENSVAYSNNSIAIPTNFTISVTTEILPVSMTKTSVDCTMYICGDSTECSNLLLQYGSFCTQLNRALTGIAVEQDKNTQEVFAQVKQIYKTPPIKDFGGFNFSQILPDPSKPSKRSFIEDLLFNKVTLADAGFIKQYGDCLGDIAARDLICAQKFNGLTVLPPLLTDEMIAQYCSALLAGTITSGWTFGAGAALQIPFAMQMAYRFNGIGVTQNVLYENQKLIANQFNSAIGKIQDSLSSTASALGKLQDVVNQNAQALNTLVKQLSSNFGAISSVLNDILSRLDKVEAEVQIDRLITGRLQSLQTYVTQQLIRAAEIRASANLAATKMSECVLGQSKRVDFCGKGYHLMSFPQCAPHGVVFLHVTYVPAQEKNFTTAPAICHDGKAHFPREGVFVSNGTHWFVTQRNFYEPQIITTDNTFVSGNCDVVIGIVNNTVYDPLQPELDSFKEELDKYFKNHTSPDVDLGDISGINASVVNIQKEIDRLNEVAKNLNESLIDLQELGKYEQYIKGGGGSDIDPYKEFGSSYQLLNFLPLDFFPDLNALVDTATALYEEELTGREHCSPHHTAIRQALVCWDELTKLIAWMSSNITSEQVRTIIVNHVNDTWGLKVRQSLWFHLSCLTFGQHTVQEFLVSFGVWIRTPAPYRPPNAPILSTLPEHTVIC

SEQ ID NO: 7634 - protein, 1365 aa, Artificial Sequence
  SARS-CoV-2/Congo/94/2020__EPI_ISL_417947 spike protein (1-1211)(T874C_S1055C) WhcAg construct
MFVFLVLLPLVSSQCVNLTTRTQLPPAYTNSFTRGVYYPDKVFRSSVLHSTQDLFLPFFSNVTWFHAIHVSGTNGTKRFDNPVLPFNDGVYFASTEKSNIIRGWIFGTTLDSKTQSLLIVNNATNVVIKVCEFQFCNDPFLGVYYHKNNKSWMESEFRVYSSANNCTFEYVSQPFLMDLEGKQGNFKNLREFVFKNIDGYFKIYSKHTPINLVRDLPQGFSALEPLVDLPIGINITRFQTLLALHRSYLTPGDSSSGWTAGAAAYYVGYLQPRTFLLKYNENGTITDAVDCALDPLSETKCTLKSFTVEKGIYQTSNFRVQPTESIVRFPNITNLCPFGEVFNATRFASVYAWNRKRISNCVADYSVLYNSASFSTFKCYGVSPTKLNDLCFTNVYADSFVIRGDEVRQIAPGQTGKIADYNYKLPDDFTGCVIAWNSNNLDSKVGGNYNYLYRLFRKSNLKPFERDISTEIYQAGSTPCNGVEGFNCYFPLQSYGFQPTNGVGYQPYRVVVLSFELLHAPATVCGPKKSTNLVKNKCVNFNFNGLTGTGVLTESNKKFLPFQQFGRDIADTTDAVRDPQTLEILDITPCSFGGVSVITPGTNTSNQVAVLYQGVNCTEVPVAIHADQLTPTWRVYSTGSNVFQTRAGCLIGAEHVNNSYECDIPIGAGICASYQTQTNSPRRARSVASQSIIAYTMSLGAENSVAYSNNSIAIPTNFTISVTTEILPVSMTKTSVDCTMYICGDSTECSNLLLQYGSFCTQLNRALTGIAVEQDKNTQEVFAQVKQIYKTPPIKDFGGFNFSQILPDPSKPSKRSFIEDILFNKVTLADAGFIKQYGDCLGDIAARDLICAQKFNGLTVLPPLLTDEMIAQYCSALLAGTITSGWTFGAGAALQIPFAMQMAYRFNGIGVTQNVLYENQKLIANQFNSAIGKIQDSLSSTASALGKLQDVVNQNAQALNTLVKQLSSNFGAISSVLNDILSRLDKVEAEVQIDRLITGRLQSLQTYVTQQLIRAAEIRASANLAATKMSECVLGQSKRVDFCGKGYHLMSFPQCAPHGVVFLHVTYVPAQEKNFTTAPAICHDGKAHFPREGVFVSNGTHWFVTQRNFYEPQIITTDNTFVSGNCDVVIGIVNNTVYDPLQPELDSFKEELDKYFKNHTSPDVDLGDISGINASVVNIQKEIDRLNEVAKNLNESLIDLQELGKYEQYIKGGGGSDIDPYKEFGSSYQLLNFLPLDFFPDLNALVDTATALYEEELTGREHCSPHHTAIRQALVCWDELTKLIAWMSSNITSEQVRTIIVNHVNDTWGLKVRQSLWFHLSCLTFGQHTVQEFLVSFGVWIRTPAPYRPPNAPILSTLPEHTVIC

SEQ ID NO: 7635 - protein, 1365 aa, Artificial Sequence
  SARS-CoV-2/Congo/158/2020__EPI_ISL_417950 spike protein (1-1211)(T874C_S1055C) WhcAg construct
MFVFLVLLPLVSSQCVNLTTRTQLPPAYTNSFTRGVYYPDKVFRSSVLHSTQDLFLPFFSNVTWFHAIHVSGTNGTKRFDNPVLPFNDGVYFASTEKSNIIRGWIFGTTLDSKTQSLLIVNNATNVVIKVCEFQFCNDPFLGVYYHKNNKSWMESEFRVYSSANNCTFEYVSQPFLMDLEGKQGNFKNLREFVFKNIDGYFKIYSKHTPINLVRDLPQGFSALEPLVDLPIGINITRFQTLLALHRSYLTPGDSSSGWTAGAAAYYVGYLQPRTFLLKYNENGTITDAVDCALDPLSETKCTLKSFTVEKGIYQTSNFRVQPTESIVRFPNITNLCPFGEVFNATRFASVYAWNRKRISNCVADYSVLYNSASFSTFKCYGVSPTKLNDLCFTNVYADSFVIRGDEVRQIAPGQTGKIADYNYKLPDDFTGCVIAWNSNNLDSKVGGNYNYLYRLFRKSNLKPFERDISTEIYQAGSTPCNGVEGFNCYFPLQSYGFQPTNGVGYQPYRVVVLSFELLHAPATVCGPKKSTNLVKNKCVNFNFNGLTGTGVLTESNKKFLPFQQFGRDIADTTDAVRDPQTLEILDITPCSFGGVSVITPGTNTSNQVAVLYQDVNCTEVPVAIHADQLTPTWRVYSTGSNVFQTRAGCLIGAEHVNNSYECDIPIGAGICASYQTQTNSPRRARSVASQSIIAYTMSLGAENSVAYSNNSIAIPTNFTISVTTEILPVSMTKTSVDCTMYICGDSTECSNLLLQYGSFCTQLNRALTGIAVEQDKNTQEVFAQVKQIYKTPPIKDFGGFNFSQILPDPSKPSKRSFIEDLLFNKVTLADAGFIKQYGDCLGDIAARDLICAQKFNGLTVLPPLLTDEMIAQYCSALLAGTITSGWTFGAGAALQIPFAMQMAYRFNGIGVTQNVLYENQKLIANQFNSAIGKIQDSLSSTASALGKLQDVVNQNAQALNTLVKQLSSNFGAISSVLNDILSRLDKVEAEVQIDRLITGRLQSLQTYVTQQLIRAAEIRASANLAATKMSECVLGQSKRVDFCGKGYHLMSFPQCAPHGVVFLHVTYVPAQEKNFTTAPAICHDGKAHFPREGVFVSNGTHWFVTQRNFYEPQIITTDNTFLSGNCDVVIGIVNNTVYDPLQPELDSFKEELDKYFKNHTSPDVDLGDISGINASVVNIQKEIDRLNEVAKNLNESLIDLQELGKYEQYIKGGGGSDIDPYKEFGSSYQLLNFLPLDFFPDLNALVDTATALYEEELTGREHCSPHHTAIRQALVCWDELTKLIAWMSSNITSEQVRTIIVNHVNDTWGLKVRQSLWFHLSCLTFGQHTVQEFLVSFGVWIRTPAPYRPPNAPILSTLPEHTVIC

SEQ ID NO: 7636 - protein, 1365 aa, Artificial Sequence
  SARS-CoV-2/USA/UT-00034/2020__EPI_ISL_417977 spike protein (1-1211)(T874C_S1055C) WhcAg construct
MFVFLVLLPLVSSQCVNLTTRTQLPPAYTNSFTRGVYYPDKVFRSSVLHSTQDLFLPFFSNVTWFHAIHVSGTNGTKRFDNPVLPFNDGVYFASTEKSNIIRGWIFGTTLDSKTQSLLIVNNATNVVIKVCEFQFCNDPFLGVYYYKNNKSWMESEFRVYSSANNCTFEYVSQPFLMDLEGKQGNFKNLREFVFKNIDGYFKIYSKHTPINLVRDLPQGFSALEPLVDLPIGINITRFQTLLALHRSYLTPGDSSSGWTAGAAAYYVGYLQPRTFLLKYNENGTITDAVDCALDPLSETKCTLKSFTVEKGIYQTSNFRVQPTESIVRFPNITNLCPFGEVFNATRFASVYAWNRKRISNCVADYSVLYNSASFSTFKCYGVSPTKLNDLCFTNVYADSFVIRGDEVRQIAPGQTGKIADYNYKLPDDFTGCVIAWNSNNLDSKVGGNYNYLYRLFRKSNLKPFERDISTEIYQAGSTPCNGVEGFNCYFPLQSYGFQPTNGVGYQPYRVVVLSFELLHAPATVCGPKKSTNLVKNKCVNFNFNGLTGTGVLTESNKKFLPFQQFGRDIADTTDAVRDPQTLEILDITPCSFGGVSVITPGTNTSNQVAVLYQGVNCTEVPVAIHADQLTPTWRVYSTGSNVFQTRAGCLIGAEHVNNSYECDIPIGAGICASYQTQTNSPRRARSVASQSIIAYTMSLGAENSVAYSNNSIAIPTNFTISVTTEILPVSMTKTSVDCTMYICGDSTECSNLLLQYGSFCTQLNRALTGIAVEQDKNTQEVFAQVKQIYKTPPIKDFGGFNFSQILPDPSKPSKRSFIEDLLFNKVTLADAGFIKQYGDCLGDIAARDLICAQKFNGLTVLPPLLTDEMIAQYCSALLAGTITSGWTFGAGAALQIPFAMQMAYRFNGIGVTQNVLYENQKLIANQFNSAIGKIQDSLSSTASALGKLQDVVNQNAQALNTLVKQLSSNFGAISSVLNDILSRLDKVEAEVQIDRLITGRLQSLQTYVTQQLIRAAEIRASANLAATKMSECVLGQSKRVDFCGKGYHLMSFPQCAPHGVVFLHVTYVPAQEKNFTTAPAICHDGKAHFPREGVFVSNGTHWFVTQRNFYEPQIITTDNTFVSGNCDVVIGIVNNTVYDPLQPELDSFKEELDKYFKNHTSPDVDLGDISGINASVVNIQKEIDRLNEVAKNLNESLIDLQELGKYEQYIKGGGGSDIDPYKEFGSSYQLLNFLPLDFFPDLNALVDTATALYEEELTGREHCSPHHTAIRQALVCWDELTKLIAWMSSNITSEQVRTIIVNHVNDTWGLKVRQSLWFHLSCLTFGQHTVQEFLVSFGVWIRTPAPYRPPNAPILSTLPEHTVIC

SEQ ID NO: 7637 - protein, 1365 aa, Artificial Sequence
  SARS-CoV-2/USA/UT-00033/2020__EPI_ISL_417976 spike protein (1-1211)(T874C_S1055C) WhcAg construct
MFVFLVLLPLVSSQCVNLTTRTQLPPAYTNSFTRGVYYPDKVFRSSVLHSTQDLFLPFFSNVTWFHAIHVSGTNGTKRFDNPVLPFNDGVYFASTEKSNIIRGWIFGTTLDSKTQSLLIVNNATNVVIKVCEFQFCNDPFLGVYYHKNNKSWMESEFRVYSSANNCTFEYVSQPFLMDLEGKQGNFKNLREFVFKNIDGYFKIYSKHTPINLVRDLPQGFSALEPLVDLPIGINITRFQTLLALHRSYLTPGDSSSGLTAGAAAYYVGYLQPRTFLLKYNENGTITDAVDCALDPLSETKCTLKSFTVEKGIYQTSNFRVQPTESIVRFPNITNLCPFGEVFNATRFASVYAWNRKRISNCVADYSVLYNSASFSTFKCYGVSPTKLNDLCFTNVYADSFVIRGDEVRQIAPGQTGKIADYNYKLPDDFTGCVIAWNSNNLDSKVGGNYNYLYRLFRKSNLKPFERDISTEIYQAGSTPCNGVEGFNCYFPLQSYGFQPTNGVGYQPYRVVVLSFELLHAPATVCGPKKSTNLVKNKCVNFNFNGLTGTGVLTESNKKFLPFQQFGRDIADTTDAVRDPQTLEILDITPCSFGGVSVITPGTNTSNQVAVLYQGVNCTEVPVAIHADQLTPTWRVYSTGSNVFQTRAGCLIGAEHVNNSYECDIPIGAGICASYQTQTNSPRRARSVASQSIIAYTMSLGAENSVAYSNNSIAIPTNFTISVTTEILPVSMTKTSVDCTMYICGDSTECSNLLLQYGSFCTQLNRALTGIAVEQDKNTQEVFAQVKQIYKTPPIKDFGGFNFSQILPDPSKPSKRSFIEDLLFNKVTLADAGFIKQYGDCLGDIAARDLICAQKFNGLTVLPPLLTDEMIAQYCSALLAGTITSGWTFGAGAALQIPFAMQMAYRFNGIGVTQNVLYENQKLIANQFNSAIGKIQDSLSSTASALGKLQDVVNQNAQALNTLVKQLSSNFGAISSVLNDILSRLDKVEAEVQIDRLITGRLQSLQTYVTQQLIRAAEIRASANLAATKMSECVLGQSKRVDFCGKGYHLMSFPQCAPHGVVFLHVTYVPAQEKNFTTAPAICHDGKAHFPREGVFVSNGTHWFVTQRNFYEPQIITTDNTFVSGNCDVVIGIVNNTVYDPLQPELDSFKEELDKYFKNHTSPDVDLGDISGINASVVNIQKEIDRLNEVAKNLNESLIDLQELGKYEQYIKGGGGSDIDPYKEFGSSYQLLNFLPLDFFPDLNALVDTATALYEEELTGREHCSPHHTAIRQALVCWDELTKLIAWMSSNITSEQVRTIIVNHVNDTWGLKVRQSLWFHLSCLTFGQHTVQEFLVSFGVWIRTPAPYRPPNAPILSTLPEHTVIC

SEQ ID NO: 7638 - protein, 1365 aa, Artificial Sequence
  SARS-CoV-2/USA/WI-13/2020__EPI_ISL_417516 spike protein (1-1211)(T874C_S1055C) WhcAg construct
MFVFLVLLPLVSSQCVNLTTRTQLPPAYTNSFTRGVYYPDKVFRSSVLHSTQDLFLPFFSNVTWFHAIHVSGTNGTKRFDNPVLPFNDGVYFASTEKSNIIRGWIFGTTLDSKTQSLLIVNNATNVVIKVCEFQFCNDPFLGVYYHKNNKSWMESEFRVYSSANNCTFEYVSQPFLMDLEGKQGNFKNLREFVFKNIDGYFKIYSKHTPINLVRDLPQGFSALEPLVDLPIGINITRFQTLLALHRSYLTPGDSSSGWTAGAAAYYVGYLQPRTFLLKYNENGTITDAVDCALDPLSETKCTLKSFTVEKGIYQTSNFRVLPTESIVRFPNITNLCPFGEVFNATRFASVYAWNRKRISNCVADYSVLYNSASFSTFKCYGVSPTKLNDLCFTNVYADSFVIRGDEVRQIAPGQTGKIADYNYKLPDDFTGCVIAWNSNNLDSKVGGNYNYLYRLFRKSNLKPFERDISTEIYQAGSTPCNGVEGFNCYFPLQSYGFQPTNGVGYQPYRVVVLSFELLHAPATVCGPKKSTNLVKNKCVNFNFNGLTGTGVLTESNKKFLPFQQFGRDIADTTDAVRDPQTLEILDITPCSFGGVSVITPGTNTSNQVAVLYQGVNCTEVPVAIHADQLTPTWRVYSTGSNVFQTRAGCLIGAEHVNNSYECDIPIGAGICASYQTQTNSPRRARSVASQSIIAYTMSLGAENSVAYSNNSIAIPTNFTISVTTEILPVSMTKTSVDCTMYICGDSTECSNLLLQYGSFCTQLNRALTGIAVEQDKNTQEVFAQVKQIYKTPPIKDFGGFNFSQILPDPSKPSKRSFIEDLLFNKVTLADAGFIKQYGDCLGDIAARDLICAQKFNGLTVLPPLLTDEMIAQYCSALLAGTITSGWTFGAGAALQIPFAMQMAYRFNGIGVTQNVLYENQKLIANQFNSAIGKIQDSLSSTASALGKLQDVVNQNAQALNTLVKQLSSNFGAISSVLNDILSRLDKVEAEVQIDRLITGRLQSLQTYVTQQLIRAAEIRASANLAATKMSECVLGQSKRVDFCGKGYHLMSFPQCAPHGVVFLHVTYVPAQEKNFTTAPAICHDGKAHFPREGVFVSNGTHWFVTQRNFYEPQIITTDNTFVSGNCDVVIGIVNNTVYDPLQPELDSFKEELDKYFKNHTSPDVDLGDISGINASVVNIQKEIDRLNEVAKNLNESLIDLQELGKYEQYIKGGGGSDIDPYKEFGSSYQLLNFLPLDFFPDLNALVDTATALYEEELTGREHCSPHHTAIRQALVCWDELTKLIAWMSSNITSEQVRTIIVNHVNDTWGLKVRQSLWFHLSCLTFGQHTVQEFLVSFGVWIRTPAPYRPPNAPILSTLPEHTVIC

SEQ ID NO: 7639 - protein, 1364 aa, Artificial Sequence
  SARS-CoV-2/India/1-27/2020__EPI_ISL_413522 spike protein (1-1210)(T873C_S1054C) WhcAg construct
MFVFLVLLPLVSSQCVNLTTRTQLPPAYTNSFTRGVYYPDKVFRSSVLHSTQDLFLPFFSNVTWFHAIHVSGTNGTKRFDNPVLPFNDGVYFASTEKSNIIRGWIFGTTLDSKTQSLLIVNNATNVVIKVCEFQFCNDPFLGVYHKNNKSWMESEFRVYSSANNCTFEYVSQPFLMDLEGKQGNFKNLREFVFKNIDGYFKIYSKHTPINLVRDLPQGFSALEPLVDLPIGINITRFQTLLALHRSYLTPGDSSSGWTAGAAAYYVGYLQPRTFLLKYNENGTITDAVDCALDPLSETKCTLKSFTVEKGIYQTSNFRVQPTESIVRFPNITNLCPFGEVFNATRFASVYAWNRKRISNCVADYSVLYNSASFSTFKCYGVSPTKLNDLCFTNVYADSFVIRGDEVIQIAPGQTGKIADYNYKLPDDFTGCVIAWNSNNLDSKVGGNYNYLYRLFRKSNLKPFERDISTEIYQAGSTPCNGVEGFNCYFPLQSYGFQPTNGVGYQPYRVVVLSFELLHAPATVCGPKKSTNLVKNKCVNFNFNGLTGTGVLTESNKKFLPFQQFGRDIADTTDAVRDPQTLEILDITPCSFGGVSVITPGTNTSNQVAVLYQDVNCTEVPVAIHADQLTPTWRVYSTGSNVFQTRAGCLIGAEHVNNSYECDIPIGAGICASYQTQTNSPRRARSVASQSIIAYTMSLGAENSVAYSNNSIAIPTNFTISVTTEILPVSMTKTSVDCTMYICGDSTECSNLLLQYGSFCTQLNRALTGIAVEQDKNTQEVFAQVKQIYKTPPIKDFGGFNFSQILPDPSKPSKRSFIEDLLFNKVTLADAGFIKQYGDCLGDIAARDLICAQKFNGLTVLPPLLTDEMIAQYCSALLAGTITSGWTFGAGAALQIPFAMQMAYRFNGIGVTQNVLYENQKLIANQFNSAIGKIQDSLSSTASALGKLQDVVNQNAQALNTLVKQLSSNFGAISSVLNDILSRLDKVEAEVQIDRLITGRLQSLQTYVTQQLIRAAEIRASANLAATKMSECVLGQSKRVDFCGKGYHLMSFPQCAPHGVVFLHVTYVPAQEKNFTTAPAICHDGKAHFPREGVFVSNGTHWFVTQRNFYEPQIITTDNTFVSGNCDVVIGIVNNTVYDPLQPELDSFKEELDKYFKNHTSPDVDLGDISGINASVVNIQKEIDRLNEVAKNLNESLIDLQELGKYEQYIKGGGGSDIDPYKEFGSSYQLLNFLPLDFFPDLNALVDTATALYEEELTGREHCSPHHTAIRQALVCWDELTKLIAWMSSNITSEQVRTIIVNHVNDTWGLKVRQSLWFHLSCLTFGQHTVQEFLVSFGVWIRTPAPYRPPNAPILSTLPEHTVIC

SEQ ID NO: 7640 - protein, 1359 aa, Artificial Sequence
  SARS-CoV-2/pangolin/Guangxi/P4L/2017__EPI_ISL_410538 spike protein (1-1205)(T868C_S1049C) WhcAg construct
MFVFLFVLPLVSSQCVNLTTRTGIPPGYTNSSTRGVYYPDKVFRSSILHLTQDLFLPFFSNVTWFNTINYQGGFKKFDNPVLPFNDGVYFASTEKSNIIRGWIFGTTLDARTQSLLIVNNATNVVIKVCEFQFCTDPFLGVYYHNNNKTWVENEFRVYSSANNCTFEYISQPFLMDLEGKQGNFKNLREFVFKNVDGYFKIYSKHTPIDLVRDLPRGFAALEPLVDLPIGINITRFQTLLALHRSYLTPGNLESGWTTGAAAYYVGYLQQRTFLLSYNQNGTITDAVDCSLDPLSETKCTLKSLTVEKGIYQTSNFRVQPTISIVRFPNITNLCPFGEVFNASKFASVYAWNRKRISNCVADYSVLYNSTSFSTFKCYGVSPTKLNDLCFTNVYADSFVVKGDEVRQIAPGQTGVIADYNYKLPDDFTGCVIAWNSVKQDALTGGNYGYLYRLFRKSKLKPFERDISTEIYQAGSTPCNGQVGLNCYYPLERYGFHPTTGVNYQPFRVVVLSFELLNGPATVCGPKLSTTLVKDKCVNFNFNGLTGTGVLTTSKKQFLPFQQFGRDISDTTDAVRDPQTLEILDITPCSFGGVSVITPGTNTSNQVAVLYQDVNCTEVPMAIHAEQLTPAWRVYSAGANVFQTRAGCLVGAEHVNNSYECDIPVGAGICASYHSMSSLRSVNQRSIIAYTMSLGAENSVAYSNNSIAIPTNFTISVTTEILPVSMTKTSVDCTMYICGDSIECSNLLLQYGSFCTQLNRALTGIAVEQDKNTQEVFAQVKQIYKTPPIKDFGGFNFSQILPDPSKPSKRSFIEDLLFNKVTLADAGFIKQYGDCLGDIAARDLICAQKFNGLTVLPPLLTDEMIAQYCSALLAGTITSGWTFGAGAALQIPFAMQMAYRFNGIGVTQNVLYENQKLIANQFNSAIGKIQDSLSSTASALGKLQDVVNQNAQALNTLVKQLSSNFGAISSVLNDILSRLDKVEAEVQIDRLITGRLQSLQTYVTQQLIRAAEIRASANLAATKMSECVLGQSKRVDFCGKGYHLMSFPQCAPHGVVFLHVTYVPAQEKNFTTAPAICHEGKAHFPREGVFVSNGTHWFITQRNFYEPQIITTDNTFVSGSCDVVIGIVNNTVYDPLQPELDSFKEELDKYFKNHTSPDVDLGDISGINASVVNIQKEIDRLNEVAKNLNESPIDLQELGKYEQYIKGGGGSDIDPYKEFGSSYQLLNFLPLDFFPDLNALVDTATALYEEELTGREHCSPHHTAIRQALVCWDELTKLIAWMSSNITSEQVRTIIVNHVNDTWGLKVRQSLWFHLSCLTFGQHTVQEFLVSFGVWIRTPAPYRPPNAPILSTLPEHTVIC

SEQ ID NO: 7641 - protein, 1359 aa, Artificial Sequence
  SARS-CoV-2/pangolin/Guangxi/P5L/2017__EPI_ISL_410540 spike protein (1-1205)(T868C_S1049C) WhcAg construct
MFVFLFVLPLVSSQCVNLTTRTGIPPGYTNSSTRGVYYPDKVFRSSILHLTQDLFLPFFSNVTWFNTINYQGGFKKFDNPVLPFNDGVYFASTEKSNIIRGWIFGTTLDARTQSLLIVNNATNVVIKVCEFQFCTDPFLGVYYHNNNKTWVENEFRVYSSANNCTFEYISQPFLMDLEGKQGNFKNLREFVFKNVDGYFKIYSKHTPIDLVRDLPRGFAALEPLVDLPIGINITRFQTLLALHRSYLTPGKLESGWTTGAAAYYVGYLQQRTFLLSYNQNGTITDAVDCSLDPLSETKCTLKSLTVEKGIYQTSNFRVQPTISIVRFPNITNLCPFGEVFNASKFASVYAWNRKRISNCVADYSVLYNSTSFSTFKCYGVSPTKLNDLCFTNVYADSFVVKGDEVRQIAPGQTGVIADYNYKLPDDFTGCVIAWNSVKQDALTGGNYGYLYRLFRKSKLKPFERDISTEIYQAGSTPCNGQVGLNCYYPLERYGFHPTTGVNYQPFRVVVLSFELLNGPATVCGPKLSTTLVKDKCVNFNFNGLTGTGVLTTSKKQFLPFQQFGRDISDTTDAVRDPQTLEILDITPCSFGGVSVITPGTNTSNQVAVLYQDVNCTEVPMAIHAEQLTPAWRVYSAGANVFQTRAGCLVGAEHVNNSYECDIPVGAGICASYHSMSSFRSVNQRSIIAYTMSLGAENSVAYSNNSIAIPTNFTISVTTEILPVSMTKTSVDCTMYICGDSIECSNLLLQYGSFCTQLNRALTGIAVEQDKNTQEVFAQVKQIYKTPPIKDFGGFNFSQILPDPSKPSKRSFIEDLLFNKVTLADAGFIKQYGDCLGDIAARDLICAQKFNGLTVLPPLLTDEMIAQYCSALLAGTITSGWTFGAGAALQIPFAMQMAYRFNGIGVTQNVLYENQKLIANQFNSAIGKIQDSLSSTASALGKLQDVVNQNAQALNTLVKQLSSNFGAISSVLNDILSRLDKVEAEVQIDRLITGRLQSLQTYVTQQLIRAAEIRASANLAATKMSECVLGQSKRVDFCGKGYHLMSFPQCAPHGVVFLHVTYVPAQEKNFTTAPAICHEGKAHFPREGVFVSNGTHWFITQRNFYEPQIITTDNTFVSGSCDVVIGIVNNTVYDPLQPELDSFKEELDKYFKNHTSPDVDLGDISGINASVVNIQKEIDRLNEVAKNLNESLIDLQELGKYEQYIKGGGGSDIDPYKEFGSSYQLLNFLPLDFFPDLNALVDTATALYEEELTGREHCSPHHTAIRQALVCWDELTKLIAWMSSNITSEQVRTIIVNHVNDTWGLKVRQSLWFHLSCLTFGQHTVQEFLVSFGVWIRTPAPYRPPNAPILSTLPEHTVIC

SEQ ID NO: 7642 - protein, 1359 aa, Artificial Sequence
  SARS-CoV-2/pangolin/Guangxi/P5E/2017__EPI_ISL_410541 spike protein (1-1205)(T868C_S1049C) WhcAg construct
MFVFLFVLPLVSSQCVNLTTRTGIPPGYTNSSTRGVYYPDKVFRSSILHLTQDLFLPFFSNVTWFNTITYQGGSKKFDNPVLPFNDGVYFASTEKSNIIRGWIFGTTLDARTQSLLIVNNATNVVIKVCEFQFCTDPFLGVYYHNNNKTWVENEFRVYSSANNCTFEYISQPFLMDLEGKQGNFKNLREFVFKNVDGYFKIYSKHTPIDLVRDLPRGFAALEPLVDLPIGINITRFQTLLALHRSYLTPGKLESGWTTGAAAYYVGYLQQRTFLLSYNQNGTITDAVDCSLDPLSETKCTLKSLTVEKGIYQTSNFRVQPTISIVRFPNITNLCPFGEVFNASKFASVYAWNRKRISNCVADYSVLYNSTSFSTFKCYGVSPTKLNDLCFTNVYADSFVVKGDEVRQIAPGQTGVIADYNYKLPDDFTGCVIAWNSVKQDALTGDNYGYLYRLFRKSKLKPFERDISTEIYQAGSTPCNGQVGLNCYYPLERYGFHPTTGVNYQPFRVVVLSFELLNGPATVCGPKLSTTLVKDKCVNFNFNGLTGTGVLTTSKKQFLPFQQFGRDISDTTDAVRDPQTLEILDITPCSFGGVSVITPGTNTSNQVAVLYQDVNCTEVPMAIHAEQLTPAWRVYSAGANVFQTRAGCLVGAEHVNNSYECDIPVGAGICASYHSMSSFRSVNQRSIIAYTMSLGAENSVAYSNNSIAIPTNFTISVTTEILPVSMTKTSVDCTMYICGDSIECSNLLLQYGSFCTQLNRALTGIAVEQDKNTQEVFAQVKQIYKTPPIKDFGGFNFSQILPDPSKPSKRSFIEDLLFNKVTLADAGFIKQYGDCLGDIAARDLICAQKFNGLTVLPPLLTDEMIAQYCSALLAGTITSGWTFGAGAALQIPFAMQMAYRFNGIGVTQNVLYENQKLIANQFNSAIGKIQDSLSSTASALGKLQDVVNQNAQALNTLVKQLSSNFGAISSVLNDILSRLDKVEAEVQIDRLITGRLQSLQTYVTQQLIRAAEIRASANLAATKMSECVLGQSKRVDFCGKGYHLMSFPQCAPHGVVFLHVTYVPAQEKNFTTAPAICHEGKAHFPREGVFVSNGTHWFITQRNFYEPQIITTDNTFVSGSCDVVIGIVNNTVYDPLQPELDSFKEELDKYFKNHTSPDVDLGDISGINASVVNIQKEIDRLNEVAKNLNESLIDLQELGKYEQYIKGGGGSDIDPYKEFGSSYQLLNFLPLDFFPDLNALVDTATALYEEELTGREHCSPHHTAIRQALVCWDELTKLIAWMSSNITSEQVRTIIVNHVNDTWGLKVRQSLWFHLSCLTFGQHTVQEFLVSFGVWIRTPAPYRPPNAPILSTLPEHTVIC

SEQ ID NO: 7643 - protein, 1357 aa, Artificial Sequence
  SARS-CoV-2/pangolin/Guangxi/P1E/2017__EPI_ISL_410539 spike protein (1-1203)(T866C_S1047C) WhcAg construct
MFVFLFVLPLVSSQCVNLTTRTGIQPGYTNSSTRGVYYPDKVFRSSILHLTQDLFLPFFSNVTWFNTINYQGGFKKFDNPVLPFNDGVYFASTEKSNIIRGWIFGTTLDARTQSLLIVNNATNVVIKVCEFQFCTDPFLGVYYHNNNKTWVENEFRVYSSANNCTFEYISQPFLMDLEGKQGNFKNLREFVFKNVDGYFKIYSKHTPIDLVRDLPRGFAALEPLVDLPIGINITRFQTLLALHRSYLTPGKLESGWTTGAAAYYVGYLQQRTFLLSYNQNGTITDAVDCSLDPLSETKCTLKSLTVEKGIYQTSNFRVQPTISIVRFPNITNLCPFGEVFNASKFASVYAWNRKRISNCVADYSVLYNSTSFSTFKCYGVSPTKLNDLCFTNVYADSFVVKGDEVRQIAPGQTGVIADYNYKLPDDFTGCVIAWNSVKQDALTGGNYLYRLFRKSKLKPFERDISTEIYQAGSTPCNGQVGLNCYYPLERYGFHPTTGVNYQPFRVVVLSFELLNGPATVCGPKLSTTLVKDKCVNFNFNGLTGTGVLTTSKKQFLPFQQFGRDISDTTDAVRDPQTLEILDITPCSFGGVSVITPGTNTSNQVAVLYQDVNCTEVPMAIHAEQLTPAWRVYSAGANVFQTRAGCLVGAEHVNNSYECDIPVGAGICASYHSMSSLRSVNQRSIIAYTMSLGAENSVAYSNNSIAIPTNFTISVTTEILPVSMTKTSVDCTMYICGDSIECSNLLLQYGSFCTQLNRALTGIAVEQDKNTQEVFAQVKQIYKTPPIKDFGGFNFSQILPDPSKPSKRSFIEDLLFNKVTLADAGFIKQYGDCLGDIAARDLICAQKFNGLTVLPPLLTDEMIAQYCSALLAGTITSGWTFGAGAALQIPFAMQMAYRFNGIGVTQNVLYENQKLIANQFNSAIGKIQDSLSSTASALGKLQDVVNQNAQALNTLVKQLSSNFGAISSVLNDILSRLDKVEAEVQIDRLITGRLQSLQTYVTQQLIRAAEIRASANLAATKMSECVLGQSKRVDFCGKGYHLMSFPQCAPHGVVFLHVTYVPAQEKNFTTAPAICHEGKAHFPREGVFVSNGTHWFITQRNFYEPQIITTDNTFVSGSCDVVIGIVNNTVYDPLQPELDSFKEELDKYFKNHTSPDVDLGDISGINASVVNIQKEIDRLNEVAKNLNESLIDLQELGKYEQYIKGGGGSDIDPYKEFGSSYQLLNFLPLDFFPDLNALVDTATALYEEELTGREHCSPHHTAIRQALVCWDELTKLIAWMSSNITSEQVRTIIVNHVNDTWGLKVRQSLWFHLSCLTFGQHTVQEFLVSFGVWIRTPAPYRPPNAPILSTLPEHTVIC

SEQ ID NO: 7644 - protein, 1307 aa, Artificial Sequence
  SARS-CoV-2/Wuhan/WIV05/2019__EPI_ISL_402128 spike protein (1-1147) LumSynth construct
MFVFLVLLPLVSSQCVNLTTRTQLPPAYTNSFTRGVYYPDKVFRSSVLHSTQDLFLPFFSNVTWFHAIHVSGTNGTKRFDNPVLPFNDGVYFASTEKSNIIRGWIFGTTLDSKTQSLLIVNNATNVVIKVCEFQFCNDPFLGVYYHKNNKSWMESEFRVYSSANNCTFEYVSQPFLMDLEGKQGNFKNLREFVFKNIDGYFKIYSKHTPINLVRDLPQGFSALEPLVDLPIGINITRFQTLLALHRSYLTPGDSSSGWTAGAAAYYVGYLQPRTFLLKYNENGTITDAVDCALDPLSETKCTLKSFTVEKGIYQTSNFRVQPTESIVRFPNITNLCPFGEVFNATRFASVYAWNRKRISNCVADYSVLYNSASFSTFKCYGVSPTKLNDLCFTNVYADSFVIRGDEVRQIAPGQTGKIADYNYKLPDDFTGCVIAWNSNNLDSKVGGNYNYLYRLFRKSNLKPFERDISTEIYQAGSTPCNGVEGFNCYFPLQSYGFQPTNGVGYQPYRVVVLSFELLHAPATVCGPKKSTNLVKNKCVNFNFNGLTGTGVLTESNKKFLPFQQFGRDIADTTDAVRDPQTLEILDITPCSFGGVSVITPGTNTSNQVAVLYQDVNCTEVPVAIHADQLTPTWRVYSTGSNVFQTRAGCLIGAEHVNNSYECDIPIGAGICASYQTQTNSPRRARSVASQSIIAYTMSLGAENSVAYSNNSIAIPTNFTISVTTEILPVSMTKTSVDCTMYICGDSTECSNLLLQYGSFCTQLNRALTGIAVEQDKNTQEVFAQVKQIYKTPPIKDFGGFNFSQILPDPSKPSKRSFIEDLLFNKVTLADAGFIKQYGDCLGDIAARDLICAQKFNGLTVLPPLLTDEMIAQYTSALLAGTITSGWTFGAGAALQIPFAMQMAYRFNGIGVTQNVLYENQKLIANQFNSAIGKIQDSLSSTASALGKLQDVVNQNAQALNTLVKQLSSNFGAISSVLNDILSRLDKVEAEVQIDRLITGRLQSLQTYVTQQLIRAAEIRASANLAATKMSECVLGQSKRVDFCGKGYHLMSFPQSAPHGVVFLHVTYVPAQEKNFTTAPAICHDGKAHFPREGVFVSNGTHWFVTQRNFYEPQIITTDNTFVSGNCDVVIGIVNNTVYDPLQPELDSGGGSGGGQIYEGKLTAEGLRFGIVASRFNHALVDRLVEGAIDAIVRHGGREEDITLVRVPGSWEIPVAAGELARKEDIDAVIAIGVLIRGATPHFDYIASEVSKGLADLSLELRKPITFGVITADTLEQAIERAGTKHGNKGWEAALSAIEMANLFKSLR

SEQ ID NO: 7645 - protein, 1303 aa, Artificial Sequence
  SARS-CoV-2/bat/Yunnan/RaTG13/2013__EPI_ISL_402131 spike protein (1-1143) LumSynth construct
MFVFLVLLPLVSSQCVNLTTRTQLPPAYTNSSTRGVYYPDKVFRSSVLHLTQDLFLPFFSNVTWFHAIHVSGTNGIKRFDNPVLPFNDGVYFASTEKSNIIRGWIFGTTLDSKTQSLLIVNNATNVVIKVCEFQFCNDPFLGVYYHKNNKSWMESEFRVYSSANNCTFEYVSQPFLMDLEGKQGNFKNLREFVFKNIDGYFKIYSKHTPINLVRDLPPGFSALEPLVDLPIGINITRFQTLLALHRSYLTPGDSSSGWTAGAAAYYVGYLQPRTFLLKYNENGTITDAVDCALDPLSETKCTLKSFTVEKGIYQTSNFRVQPTDSIVRFPNITNLCPFGEVFNATTFASVYAWNRKRISNCVADYSVLYNSTSFSTFKCYGVSPTKLNDLCFTNVYADSFVITGDEVRQIAPGQTGKIADYNYKLPDDFTGCVIAWNSKHIDAKEGGNFNYLYRLFRKANLKPFERDISTEIYQAGSKPCNGQTGLNCYYPLYRYGFYPTDGVGHQPYRVVVLSFELLNAPATVCGPKKSTNLVKNKCVNFNFNGLTGTGVLTESNKKFLPFQQFGRDIADTTDAVRDPQTLEILDITPCSFGGVSVITPGTNASNQVAVLYQDVNCTEVPVAIHADQLTPTWRVYSTGSNVFQTRAGCLIGAEHVNNSYECDIPIGAGICASYQTQTNSRSVASQSIIAYTMSLGAENSVAYSNNSIAIPTNFTISVTTEILPVSMTKTSVDCTMYICGDSTECSNLLLQYGSFCTQLNRALTGIAVEQDKNTQEVFAQVKQIYKTPPIKDFGGFNFSQILPDPSKPSKRSFIEDLLFNKVTLADAGFIKQYGDCLGDIAARDLICAQKFNGLTVLPPLLTDEMIAQYTSALLAGTITSGWTFGAGAALQIPFAMQMAYRFNGIGVTQNVLYENQKLIANQFNSAIGKIQDSLSSTASALGKLQDVVNQNAQALNTLVKQLSSNFGAISSVLNDILSRLDKVEAEVQIDRLITGRLQSLQTYVTQQLIRAAEIRASANLAATKMSECVLGQSKRVDFCGKGYHLMSFPQSAPHGVVFLHVTYVPAQEKNFTTAPAICHDGKAHFPREGVFVSNGTHWFVTQRNFYEPQIITTDNTFVSGSCDVVIGIVNNTVYDPLQPELDSGGGSGGGQIYEGKLTAEGLRFGIVASRFNHALVDRLVEGAIDAIVRHGGREEDITLVRVPGSWEIPVAAGELARKEDIDAVIAIGVLIRGATPHFDYIASEVSKGLADLSLELRKPITFGVITADTLEQAIERAGTKHGNKGWEAALSAIEMANLFKSLR

SEQ ID NO: 7646 - protein, 1307 aa, Artificial Sequence
  SARS-CoV-2/Wuhan/HBCDC-HB-01/2019__EPI_ISL_402132 spike protein (1-1147) LumSynth construct
MFVFLVLLPLVSSQCVNLTTRTQLPPAYTNSITRGVYYPDKVFRSSVLHSTQDLFLPFFSNVTWFHAIHVSGTNGTKRFDNPVLPFNDGVYFASTEKSNIIRGWIFGTTLDSKTQSLLIVNNATNVVIKVCEFQFCNDPFLGVYYHKNNKSWMESEFRVYSSANNCTFEYVSQPFLMDLEGKQGNFKNLREFVFKNIDGYFKIYSKHTPINLVRDLPQGFSALEPLVDLPIGINITRFQTLLALHRSYLTPGDSSSGWTAGAAAYYVGYLQPRTFLLKYNENGTITDAVDCALDPLSETKCTLKSFTVEKGIYQTSNFRVQPTESIVRFPNITNLCPFGEVFNATRFASVYAWNRKRISNCVADYSVLYNSASFSTFKCYGVSPTKLNDLCFTNVYADSFVIRGDEVRQIAPGQTGKIADYNYKLPDDFTGCVIAWNSNNLDSKVGGNYNYLYRLFRKSNLKPFERDISTEIYQAGSTPCNGVEGFNCYFPLQSYGFQPTNGVGYQPYRVVVLSFELLHAPATVCGPKKSTNLVKNKCVNFNFNGLTGTGVLTESNKKFLPFQQFGRDIADTTDAVRDPQTLEILDITPCSFGGVSVITPGTNTSNQVAVLYQDVNCTEVPVAIHADQLTPTWRVYSTGSNVFQTRAGCLIGAEHVNNSYECDIPIGAGICASYQTQTNSPRRARSVASQSIIAYTMSLGAENSVAYSNNSIAIPTNFTISVTTEILPVSMTKTSVDCTMYICGDSTECSNLLLQYGSFCTQLNRALTGIAVEQDKNTQEVFAQVKQIYKTPPIKDFGGFNFSQILPDPSKPSKRSFIEDLLFNKVTLADAGFIKQYGDCLGDIAARDLICAQKFNGLTVLPPLLTDEMIAQYTSALLAGTITSGWTFGAGAALQIPFAMQMAYRFNGIGVTQNVLYENQKLIANQFNSAIGKIQDSLSSTASALGKLQDVVNQNAQALNTLVKQLSSNFGAISSVLNDILSRLDKVEAEVQIDRLITGRLQSLQTYVTQQLIRAAEIRASANLAATKMSECVLGQSKRVDFCGKGYHLMSFPQSAPHGVVFLHVTYVPAQEKNFTTAPAICHDGKAHFPREGVFVSNGTHWFVTQRNFYEPQIITTDNTFVSGNCDVVIGIVNNTVYDPLQPELDSGGGSGGGQIYEGKLTAEGLRFGIVASRFNHALVDRLVEGAIDAIVRHGGREEDITLVRVPGSWEIPVAAGELARKEDIDAVIAIGVLIRGATPHFDYIASEVSKGLADLSLELRKPITFGVITADTLEQAIERAGTKHGNKGWEAALSAIEMANLFKSLR

SEQ ID NO: 7647 - protein, 1307 aa, Artificial Sequence
  SARS-CoV-2/Guangdong/20SF028/2020__EPI_ISL_403936 spike protein (1-1147) LumSynth construct
MFVFLVLLPLVSSQCVNLTTRTQLPPAYTNSFTRGVYYPDKVFRSSVLYSTQDLFLPFFSNVTWFHAIHVSGTNGTKRFDNPVLPFNDGVYFASTEKSNIIRGWIFGTTLDSKTQSLLIVNNATNVVIKVCEFQFCNDPFLGVYYHKNNKSWMESEFRVYSSANNCTFEYVSQPFLMDLEGKQGNFKNLREFVFKNIDGYFKIYSKHTPINLVRDLPQGFSALEPLVDLPIGINITRFQTLLALHRSYLTPGDSSSGWTAGAAAYYVGYLQPRTFLLKYNENGTITDAVDCALDPLSETKCTLKSFTVEKGIYQTSNFRVQPTESIVRFPNITNLCPFGEVFNATRFASVYAWNRKRISNCVADYSVLYNSASFSTFKCYGVSPTKLNDLCFTNVYADSFVIRGDEVRQIAPGQTGKIADYNYKLPDDFTGCVIAWNSNNLDSKVGGNYNYLYRLFRKSNLKPFERDISTEIYQAGSTPCNGVEGFNCYFPLQSYGFQPTNGVGYQPYRVVVLSFELLHAPATVCGPKKSTNLVKNKCVNFNFNGLTGTGVLTESNKKFLPFQQFGRDIADTTDAVRDPQTLEILDITPCSFGGVSVITPGTNTSNQVAVLYQDVNCTEVPVAIHADQLTPTWRVYSTGSNVFQTRAGCLIGAEHVNNSYECDIPIGAGICASYQTQTNSPRRARSVASQSIIAYTMSLGAENSVAYSNNSIAIPTNFTISVTTEILPVSMTKTSVDCTMYICGDSTECSNLLLQYGSFCTQLNRALTGIAVEQDKNTQEVFAQVKQIYKTPPIKDFGGFNFSQILPDPSKPSKRSFIEDLLFNKVTLADAGFIKQYGDCLGDIAARDLICAQKFNGLTVLPPLLTDEMIAQYTSALLAGTITSGWTFGAGAALQIPFAMQMAYRFNGIGVTQNVLYENQKLIANQFNSAIGKIQDSLSSTASALGKLQDVVNQNAQALNTLVKQLSSNFGAISSVLNDILSRLDKVEAEVQIDRLITGRLQSLQTYVTQQLIRAAEIRASANLAATKMSECVLGQSKRVDFCGKGYHLMSFPQSAPHGVVFLHVTYVPAQEKNFTTAPAICHDGKAHFPREGVFVSNGTHWFVTQRNFYEPQIITTDNTFVSGNCDVVIGIVNNTVYDPLQPELDSGGGSGGGQIYEGKLTAEGLRFGIVASRFNHALVDRLVEGAIDAIVRHGGREEDITLVRVPGSWEIPVAAGELARKEDIDAVIAIGVLIRGATPHFDYIASEVSKGLADLSLELRKPITFGVITADTLEQAIERAGTKHGNKGWEAALSAIEMANLFKSLR

SEQ ID NO: 7648 - protein, 1307 aa, Artificial Sequence
  SARS-CoV-2/Shenzhen/SZTH-001/2020__EPI_ISL_406592 spike protein (1-1147) LumSynth construct
MFVFLVLLPLVSSQCVNLTTRTQLPPAYTNSFTRGVYYPDKVFRSSVLHSTQDLFLPFFSNVTWFHAIHVSGTNGTKRFDNPVLPFNDGVYFASTEKSNIIRGWIFGTTLDSKTQSLLIVNNATNVVIKVCEFQFCNDPFLGVYYHKNNKSWMESEFRVYSSANNCTFEYVSQPFLMDLEGKQGNFKNLREFVFKNIDGYFKIYSKHTPINLVRDLPQGFSALEPLVDLPIGINITRFQTLLALHRSYLTPGDSSSGWTAGAAAYYVGYLQPRTFLLKYNENGTITDAVDCALDPLSETKCTLKSFTVEKGIYQTSNFRVQPTESIVRFPNITNLCPFGEVFNATRFASVYAWNRKRISNCVADYSVLYNSASFSTFKCYGVSPTKLNDLCFTNVYADSFVIRGDEVRQIAPGQTGKIADYNYKLPDDFTGCVIAWNSNNLDSKVGGNYNYLYRLFRKSNLKPFERDISTEIYQAGSTPCNGVEGFNCYFPLQSYGFQPTNGVGYQPYRVVVLSFELLHAPATVCGPKKSTNLVKNKCVNFNFNGLTGTGVLTESNKKFLPFQQFGRDIADTTDAVRDPQTLEILDITPCSFGGVSVITPGTNTSNQVAVLYQDVNCTEVPVAIHADQLTPTWRVYSTGSNVFQTRAGCLIGAEHVNNSYECDIPIGAGICASYQTQTNSPRRARSVASQSIIAYTMSLGAENSVAYSNNSIAIPTNFTISVTTEILPVSMTKTSVDCTMYICGDSTECSNLLLQYGSFCTQLNRALTGIAVEQDKNTQEVFAQVKQIYKTPPIKDFGGFNFSQILPDPSKPSKRSFIEDLLFNKVTLADAGFIKQYGDCLGDIAARDLICAQKFNGLTVLPPLLTDEMIAQYTSALLAGTITSGWTFGAGAALQIPFAMQMAYRFNGIGVTQNVLYENQKLIANQFNSAIGKIQDSLSSTASALGKLQDVVNQNAQALNTLVKQLSSNFGAISSVLNDILSRLDKVEAEVQIDRLITGRLQSLQTYVTQQLIRAAEIRASANLAATKMSECVLGQSKRVDFCGKGYHLMSFPQSAPHGVVFLHVTYVPAQEKNFTTAPAICHDGKAHFPREGVFVSNGTHWFVTQRNFYEPQIITTDNTFVSGNCDVLIGIVNNTVYDPLQPELDSGGGSGGGQIYEGKLTAEGLRFGIVASRFNHALVDRLVEGAIDAIVRHGGREEDITLVRVPGSWEIPVAAGELARKEDIDAVIAIGVLIRGATPHFDYIASEVSKGLADLSLELRKPITFGVITADTLEQAIERAGTKHGNKGWEAALSAIEMANLFKSLR

SEQ ID NO: 7649 - protein, 1307 aa, Artificial Sequence
  SARS-CoV-2/Shenzhen/SZTH-004/2020__EPI_ISL_406595 spike protein (1-1147) LumSynth construct
MFVFLVLLPLVSSQCVNLTTRTQLPPAYTNSFTRGVYYPDKVFRSSVLHSTQDLFLPFFSNVTWFHAIHVSGTNGTKRFDNPVLPFNDGVYFASTEKSNIIRGWIFGTTLDSKTQSLLIVNNATNVVIKVCEFQFCNDPFLGVYYHKNNKSWMESEFRVYSSANNCTFEYVSQPFLMDLEGKQGNFKNLREFVFKNIDGYFKIYSKHTPINLVRDLPQGFSALEPLVDLPIGINITRFQTLLALHRSYLTPGDSSSGWTAGAAAYYVGYLQPRTFLLKYNENGTITDAVDCALDPLSETKCTLKSFTVEKGIYQTSNFRVQPTESIVRFPNITNLCPFGEVFNATRFASVYAWDRKRISNCVAYYSVLYNSASFSTFKCYGVSPTKLNDLCFTNVYADSFVIRGDEVRQIAPGQTGKIADYNYKLPDDFTGCVIAWNSNNLDSKVGGNYNYLYRLFRKSNLKPFERDISTEIYQAGSTPCNGVEGFNCYFPLQSYGFQPTNGVGYQPYRVVVLSFELLHAPATVCGPKKSTNLVKNKCVNFNFNGLTGTGVLTESNKKFLPFQQFGRDIADTTDAVRDPQTLEILDITPCSFGGVSVITPGTNTSNQVAVLYQDVNCTEVPVAIHADQLTPTWRVYSTGSNVFQTRAGCLIGAEHVNNSYECDIPIGAGICASYQTQTNSPRRARSVASQSIIAYTMSLGAENSVAYSNNSIAIPTNFTISVTTEILPVSMTKTSVDCTMYICGDSTECSNLLLQYGSFCTQLNRALTGIAVEQDKNTQEVFAQVKQIYKTPPIKDFGGFNFSQILPDPSKPSKRSFIEDLLFNKVTLADAGFIKQYGDCLGDIAARDLICAQKFNGLTVLPPLLTDEMIAQYTSALLAGTITSGWTFGAGAALQIPFAMQMAYRFNGIGVTQNVLYENQKLIANQFNSAIGKIQDSLSSTASALGKLQDVVNQNAQALNTLVKQLSSNFGAISSVLNDILSRLDKVEAEVQIDRLITGRLQSLQTYVTQQLIRAAEIRASANLAATKMSECVLGQSKRVDFCGKGYHLMSFPQSAPHGVVFLHVTYVPAQEKNFTTAPAICHDGKAHFPREGVFVSNGTHWFVTQRNFYEPQIITTDNTFVSGNCDVVIGIVNNTVYDPLQPELDSGGGSGGGQIYEGKLTAEGLRFGIVASRFNHALVDRLVEGAIDAIVRHGGREEDITLVRVPGSWEIPVAAGELARKEDIDAVIAIGVLIRGATPHFDYIASEVSKGLADLSLELRKPITFGVITADTLEQAIERAGTKHGNKGWEAALSAIEMANLFKSLR

SEQ ID NO: 7650 - protein, 1307 aa, Artificial Sequence
  SARS-CoV-2/France/IDF0372/2020__EPI_ISL_406596 spike protein (1-1147) LumSynth construct
MFVFLVLLPLVSSQCVNLTTRTQLPPAYTNSFTRGVYYPDKVFRSSVLHSTQDLFLPFFSNVTWFHAIHVSGTNGTKRFDNPVLPFNDGVYFASTEKSNIIRGWIFGTTLDSKTQSLLIVNNATNVVIKVCEFQFCNDPFLGVYYHKNNKSWMESEFRVYSSANNCTFEYVSQPFLMDLEGKQGNFKNLREFVFKNIDGYFKIYSKHTPINLVRDLPQGFSALEPLVDLPIGINITRFQTLLALHRSYLTPGDSSSGWTAGAAAYYVGYLQPRTFLLKYNENGTITDAVDCALDPLSETKCTLKSFTVEKGIYQTSNFRVQPTESIVRFPNITNLCPFGEVFNATRFASVYAWNRKRISNCVADYSFLYNSASFSTFKCYGVSPTKLNDLCFTNVYADSFVIRGDEVRQIAPGQTGKIADYNYKLPDDFTGCVIAWNSNNLDSKVGGNYNYLYRLFRKSNLKPFERDISTEIYQAGSTPCNGVEGFNCYFPLQSYGFQPTNGVGYQPYRVVVLSFELLHAPATVCGPKKSTNLVKNKCVNFNFNGLTGTGVLTESNKKFLPFQQFGRDIADTTDAVRDPQTLEILDITPCSFGGVSVITPGTNTSNQVAVLYQDVNCTEVPVAIHADQLTPTWRVYSTGSNVFQTRAGCLIGAEHVNNSYECDIPIGAGICASYQTQTNSPRRARSVASQSIIAYTMSLGAENSVAYSNNSIAIPTNFTISVTTEILPVSMTKTSVDCTMYICGDSTECSNLLLQYGSFCTQLNRALTGIAVEQDKNTQEVFAQVKQIYKTPPIKDFGGFNFSQILPDPSKPSKRSFIEDLLFNKVTLADAGFIKQYGDCLGDIAARDLICAQKFNGLTVLPPLLTDEMIAQYTSALLAGTITSGWTFGAGAALQIPFAMQMAYRFNGIGVTQNVLYENQKLIANQFNSAIGKIQDSLSSTASALGKLQDVVNQNAQALNTLVKQLSSNFGAISSVLNDILSRLDKVEAEVQIDRLITGRLQSLQTYVTQQLIRAAEIRASANLAATKMSECVLGQSKRVDFCGKGYHLMSFPQSAPHGVVFLHVTYVPAQEKNFTTAPAICHDGKAHFPREGVFVSNGTHWFVTQRNFYEPQIITTDNTFVSGNCDVVIGIVNNTVYDPLQPELDSGGGSGGGQIYEGKLTAEGLRFGIVASRFNHALVDRLVEGAIDAIVRHGGREEDITLVRVPGSWEIPVAAGELARKEDIDAVIAIGVLIRGATPHFDYIASEVSKGLADLSLELRKPITFGVITADTLEQAIERAGTKHGNKGWEAALSAIEMANLFKSLR

SEQ ID NO: 7651 - protein, 1307 aa, Artificial Sequence
  SARS-CoV-2/Australia/VIC01/2020__EPI_ISL_406844 spike protein (1-1147) LumSynth construct
MFVFLVLLPLVSSQCVNLTTRTQLPPAYTNSFTRGVYYPDKVFRSSVLHSTQDLFLPFFSNVTWFHAIHVSGTNGTKRFDNPVLPFNDGVYFASTEKSNIIRGWIFGTTLDSKTQSLLIVNNATNVVIKVCEFQFCNDPFLGVYYHKNNKSWMESEFRVYSSANNCTFEYVSQPFLMDLEGKQGNFKNLREFVFKNIDGYFKIYSKHTPINLVRDLPQGFSALEPLVDLPIGINITRFQTLLALHRRYLTPGDSSSGWTAGAAAYYVGYLQPRTFLLKYNENGTITDAVDCALDPLSETKCTLKSFTVEKGIYQTSNFRVQPTESIVRFPNITNLCPFGEVFNATRFASVYAWNRKRISNCVADYSVLYNSASFSTFKCYGVSPTKLNDLCFTNVYADSFVIRGDEVRQIAPGQTGKIADYNYKLPDDFTGCVIAWNSNNLDSKVGGNYNYLYRLFRKSNLKPFERDISTEIYQAGSTPCNGVEGFNCYFPLQSYGFQPTNGVGYQPYRVVVLSFELLHAPATVCGPKKSTNLVKNKCVNFNFNGLTGTGVLTESNKKFLPFQQFGRDIADTTDAVRDPQTLEILDITPCSFGGVSVITPGTNTSNQVAVLYQDVNCTEVPVAIHADQLTPTWRVYSTGSNVFQTRAGCLIGAEHVNNSYECDIPIGAGICASYQTQTNSPRRARSVASQSIIAYTMSLGAENSVAYSNNSIAIPTNFTISVTTEILPVSMTKTSVDCTMYICGDSTECSNLLLQYGSFCTQLNRALTGIAVEQDKNTQEVFAQVKQIYKTPPIKDFGGFNFSQILPDPSKPSKRSFIEDLLFNKVTLADAGFIKQYGDCLGDIAARDLICAQKFNGLTVLPPLLTDEMIAQYTSALLAGTITSGWTFGAGAALQIPFAMQMAYRFNGIGVTQNVLYENQKLIANQFNSAIGKIQDSLSSTASALGKLQDVVNQNAQALNTLVKQLSSNFGAISSVLNDILSRLDKVEAEVQIDRLITGRLQSLQTYVTQQLIRAAEIRASANLAATKMSECVLGQSKRVDFCGKGYHLMSFPQSAPHGVVFLHVTYVPAQEKNFTTAPAICHDGKAHFPREGVFVSNGTHWFVTQRNFYEPQIITTDNTFVSGNCDVVIGIVNNTVYDPLQPELDSGGGSGGGQIYEGKLTAEGLRFGIVASRFNHALVDRLVEGAIDAIVRHGGREEDITLVRVPGSWEIPVAAGELARKEDIDAVIAIGVLIRGATPHFDYIASEVSKGLADLSLELRKPITFGVITADTLEQAIERAGTKHGNKGWEAALSAIEMANLFKSLR

SEQ ID NO: 7652 - protein, 1307 aa, Artificial Sequence
  SARS-CoV-2/Germany/BavPat1/2020__EPI_ISL_406862 spike protein (1-1147) LumSynth construct
MFVFLVLLPLVSSQCVNLTTRTQLPPAYTNSFTRGVYYPDKVFRSSVLHSTQDLFLPFFSNVTWFHAIHVSGTNGTKRFDNPVLPFNDGVYFASTEKSNIIRGWIFGTTLDSKTQSLLIVNNATNVVIKVCEFQFCNDPFLGVYYHKNNKSWMESEFRVYSSANNCTFEYVSQPFLMDLEGKQGNFKNLREFVFKNIDGYFKIYSKHTPINLVRDLPQGFSALEPLVDLPIGINITRFQTLLALHRSYLTPGDSSSGWTAGAAAYYVGYLQPRTFLLKYNENGTITDAVDCALDPLSETKCTLKSFTVEKGIYQTSNFRVQPTESIVRFPNITNLCPFGEVFNATRFASVYAWNRKRISNCVADYSVLYNSASFSTFKCYGVSPTKLNDLCFTNVYADSFVIRGDEVRQIAPGQTGKIADYNYKLPDDFTGCVIAWNSNNLDSKVGGNYNYLYRLFRKSNLKPFERDISTEIYQAGSTPCNGVEGFNCYFPLQSYGFQPTNGVGYQPYRVVVLSFELLHAPATVCGPKKSTNLVKNKCVNFNFNGLTGTGVLTESNKKFLPFQQFGRDIADTTDAVRDPQTLEILDITPCSFGGVSVITPGTNTSNQVAVLYQGVNCTEVPVAIHADQLTPTWRVYSTGSNVFQTRAGCLIGAEHVNNSYECDIPIGAGICASYQTQTNSPRRARSVASQSIIAYTMSLGAENSVAYSNNSIAIPTNFTISVTTEILPVSMTKTSVDCTMYICGDSTECSNLLLQYGSFCTQLNRALTGIAVEQDKNTQEVFAQVKQIYKTPPIKDFGGFNFSQILPDPSKPSKRSFIEDLLFNKVTLADAGFIKQYGDCLGDIAARDLICAQKFNGLTVLPPLLTDEMIAQYTSALLAGTITSGWTFGAGAALQIPFAMQMAYRFNGIGVTQNVLYENQKLIANQFNSAIGKIQDSLSSTASALGKLQDVVNQNAQALNTLVKQLSSNFGAISSVLNDILSRLDKVEAEVQIDRLITGRLQSLQTYVTQQLIRAAEIRASANLAATKMSECVLGQSKRVDFCGKGYHLMSFPQSAPHGVVFLHVTYVPAQEKNFTTAPAICHDGKAHFPREGVFVSNGTHWFVTQRNFYEPQIITTDNTFVSGNCDVVIGIVNNTVYDPLQPELDSGGGSGGGQIYEGKLTAEGLRFGIVASRFNHALVDRLVEGAIDAIVRHGGREEDITLVRVPGSWEIPVAAGELARKEDIDAVIAIGVLIRGATPHFDYIASEVSKGLADLSLELRKPITFGVITADTLEQAIERAGTKHGNKGWEAALSAIEMANLFKSLR

SEQ ID NO: 7653 - protein, 1307 aa, Artificial Sequence
  SARS-CoV-2/Wuhan/HBCDC-HB-02/2020__EPI_ISL_412978 spike protein (1-1147) LumSynth construct
MFVFLVLLPLVSSQCVNLTTRTQLPPAYTNSFTRGVYYPDKVFRSSVLHSTQDLFLPFFSNVTWFHAIHVSGTNGTKRFDNPVLPFNDGVYFASTEKSNIIRGWIFGTTLDSKTQSLLIVNNATNVVIKVCEFQFCNDPFLGVYYHKNNKSWMESEFRVYSSANNCTFEYVSQPFLMDLEGKQGNFKNLREFVFKNIDGYFKIYSKHTPINLVRDLPQGFSALEPLVDLPIGINITRFQTLLALHRSYLTPGDSSSGWTAGAAAYYVGYLQPRTFLLKYNENGTITDAVDCALDPLSETKCTLKSFTVEKGIYQTSNFRVQPTESIVRFPNITNLCPFGEVFNATRFASVYAWNRKRISNCVADYSVLYNSASFSTFKCYGVSPTKLNDLCFTNVYADSFVIRGDEVRQIAPGQTGKIADYNYKLPDDFTGCVIAWNSNNLDSKVGGNYNYLYRLFRKSNLKPFERDISTEIYQAGSTPCNGVEGFNCYFPLQSYGFQPTNGVGYQPYRVVVLSFELLHAPATVCGPKKSTNLVKNKCVNFNFNGLTGTGVLTESNKKFLPFQQFGRDIADTTDAVRDPQTLEILDITPCSFGGVSVITPGTNTSNQVAVLYQDVNCTEVPVAIHADQLTPTWRVYSTGSNVFQTRAGCLIGAEHVNNSYECDIPIGAGICASYQTQTNSPRRARSVASQSIIAYTMSLGAENSVAYSNNSIAIPTNFTISVTTEILPVSMTKTSVDCTMYICGDSTECSNFLLQYGSFCTQLNRALTGIAVEQDKNTQEVFAQVKQIYKTPPIKDFGGFNFSQILPDPSKPSKRSFIEDLLFNKVTLADAGFIKQYGDCLGDIAARDLICAQKFNGLTVLPPLLTDEMIAQYTSALLAGTITSGWTFGAGAALQIPFAMQMAYRFNGIGVTQNVLYENQKLIANQFNSAIGKIQDSLSSTASALGKLQDVVNQNAQALNTLVKQLSSNFGAISSVLNDILSRLDKVEAEVQIDRLITGRLQSLQTYVTQQLIRAAEIRASANLAATKMSECVLGQSKRVDFCGKGYHLMSFPQSAPHGVVFLHVTYVPAQEKNFTTAPAICHDGKAHFPREGVFVSNGTHWFVTQRNFYEPQIITTDNTFVSGNCDVVIGIVNNTVYDPLQPELDSGGGSGGGQIYEGKLTAEGLRFGIVASRFNHALVDRLVEGAIDAIVRHGGREEDITLVRVPGSWEIPVAAGELARKEDIDAVIAIGVLIRGATPHFDYIASEVSKGLADLSLELRKPITFGVITADTLEQAIERAGTKHGNKGWEAALSAIEMANLFKSLR

SEQ ID NO: 7654 - protein, 1307 aa, Artificial Sequence
  SARS-CoV-2/Australia/QLD02/2020__EPI_ISL_407896 spike protein (1-1147) LumSynth construct
MFVFLVLLPLVSSQCVNLTTRTQLPPAYTNSFTRGVYYPDKVFRSSVLHSTQDLFLPFFSNVTWFHAIHVSGTNGTKRFDNPVLPFNDGVYFASTEKSNIIRGWIFGTTLDSKTQSLLIVNNATNVVIKVCEFQFCNDPFLGVYYHKNNKSWMESEFRVYSSANNCTFEYVSQPFLMDLEGKQGNFKNLREFVFKNIDGYFKIYSKHTPINLVRDLPQGFSALEPLVDLPIGINITRFQTLLALHRSYLTPGDSSSGWTAGAAAYYVGYLQPRTFLLKYNENGTITDAVDCALDPLSETKCTLKSFTVEKGIYQTSNFRVQPTESIVRFPNITNLCPFGEVFNATRFASVYAWNRKRISNCVADYSVLYNSASFSTFKCYGVSPTKLNDLCFTNVYADSFVIRGDEVRQIAPGQTGKIADYNYKLPDDFTGCVIAWNSNNLDSKVGGNYNYLYRLFRKSNLKPFERDISTEIYQAGSTPCNGVEGFNCYFPLQSYGFQPTNGVGYQPYRVVVLSFELLHAPATVCGPKKSTNLVKNKCVNFNFNGLTGTGVLTESNKKFLPFQQFGRDIADTTDAVRDPQTLEILDITPCSFGGVSVITPGTNTSNQVAVLYQDVNCTEVPVAIHADQLTPTWRVYSTGSNVFQTRAGCLIGAEHVNNSYECDIPIGAGICASYQTQTNSPRRARSVASQSIIAYTMSLGAENSVAYSNNSIAIPTNFTISVTTEILPVSMTKTSVDCTMYICGDSTECSNLLLQYGSFCTQLNRALTGIAVEQDKNTQEVFAQVKQIYKTPPIKDFGGFNFSQILPDPSKPSKRSFIEDLLFNKVTLADAGFIKQYGDCLGDIAARDLICAQKFNGLTVLPPLLTDEMIAQYTSALLAGTITSGWTFGAGAALQIPFAMQMAYRFNGIGVTQNVLYENQKLIANQFNSAIGKIQDSLSSTASALGKLQDVVNQNAQALNTLVKQLSSNFGAISSVLNDILSRLDKVEAEVQIDRLITGRLQSLQTYVTQQLIRAAEIRASANLAATKMSECVLGQSKRVDFCGKGYHLMSFPQSAPHGVVFLHVTYVPAQEKNFTTAPAICHDGKAHFPREGVFVSNGTHWFVTQRNFYEPQIITTDNTFVSGNCDVVIGIVNNTVYDPLQLELDSGGGSGGGQIYEGKLTAEGLRFGIVASRFNHALVDRLVEGAIDAIVRHGGREEDITLVRVPGSWEIPVAAGELARKEDIDAVIAIGVLIRGATPHFDYIASEVSKGLADLSLELRKPITFGVITADTLEQAIERAGTKHGNKGWEAALSAIEMANLFKSLR

SEQ ID NO: 7655 - protein, 1307 aa, Artificial Sequence
  SARS-CoV-2/India/1-31/2020__EPI_ISL_413523 spike protein (1-1147) LumSynth construct
MFVFLVLLPLVSSQCVNLTTRTQLPPAYTNSFTRGVYYPDKVFRSSVLHSTQDLFLPFFSNVTWFHAIHVSGTNGTKRFDNPVLPFNDGVYFASTEKSNIIRGWIFGTTLDSKTQSLLIVNNATNVVIKVCEFQFCNDPFLGVYYHKNNKSWMESEFRVYSSANNCTFEYVSQPFLMDLEGKQGNFKNLREFVFKNIDGYFKIYSKHTPINLVRDLPQGFSALEPLVDLPIGINITRFQTLLALHRSYLTPGDSSSGWTAGAAAYYVGYLQPRTFLLKYNENGTITDAVDCALDPLSETKCTLKSFTVEKGIYQTSNFRVQPTESIVRFPNITNLCPFGEVFNATRFASVYAWNRKRISNCVADYSVLYNSASFSTFKCYGVSPTKLNDLCFTNVYADSFVIRGDEVRQIAPGQTGKIADYNYKLPDDFTGCVIAWNSNNLDSKVGGNYNYLYRLFRKSNLKPFERDISTEIYQAGSTPCNGVEGFNCYFPLQSYGFQPTNGVGYQPYRVVVLSFELLHAPATVCGPKKSTNLVKNKCVNFNFNGLTGTGVLTESNKKFLPFQQFGRDIADTTDAVRDPQTLEILDITPCSFGGVSVITPGTNTSNQVAVLYQDVNCTEVPVAIHADQLTPTWRVYSTGSNVFQTRAGCLIGAEHVNNSYECDIPIGAGICASYQTQTNSPRRARSVASQSIIAYTMSLGAENSVAYSNNSIAIPTNFTISVTTEILPVSMTKTSVDCTMYICGDSTECSNLLLQYGSFCTQLNRALTGIAVEQDKNTQEVFAQVKQIYKTPPIKDFGGFNFSQILPDPSKPSKRSFIEDLLFNKVTLADAGFIKQYGDCLGDIAARDLICAQKFNGLTVLPPLLTDEMIAQYTSALLAGTITSGWTFGAGAALQIPFAMQMAYRFNGIGVTQNVLYENQKLIANQFNSVIGKIQDSLSSTASALGKLQDVVNQNAQALNTLVKQLSSNFGAISSVLNDILSRLDKVEAEVQIDRLITGRLQSLQTYVTQQLIRAAEIRASANLAATKMSECVLGQSKRVDFCGKGYHLMSFPQSAPHGVVFLHVTYVPAQEKNFTTAPAICHDGKAHFPREGVFVSNGTHWFVTQRNFYEPQIITTDNTFVSGNCDVVIGIVNNTVYDPLQPELDSGGGSGGGQIYEGKLTAEGLRFGIVASRFNHALVDRLVEGAIDAIVRHGGREEDITLVRVPGSWEIPVAAGELARKEDIDAVIAIGVLIRGATPHFDYIASEVSKGLADLSLELRKPITFGVITADTLEQAIERAGTKHGNKGWEAALSAIEMANLFKSLR

SEQ ID NO: 7656 - protein, 1307 aa, Artificial Sequence
  SARS-CoV-2/Guangdong/GD2020087-P0008/2020__EPI_ISL_413863 spike protein (1-1147) LumSynth construct
MFVFLVLLPLVSSQCVNLTTRTQLPPAYTNSFTRGVYYPDKVFRSSVLHSTQDLFLPFFSNVTWFHAIHVSGTNGTKRFDNPVLPFNDGVYFASTEKSNIIRGWIFGTTLDSKTQSLLIVNNATNVVIKVCEFQFCNDPFLGVYYHKNNKSWMESEFRVYSSANNCTFEYVSQPFLMDLEGKQGNFKNLREFVFKNIDGYFKIYSKHTPINLVRDLPQGFSALEPLVDLPIGINITRFQTLLALHRSYLTPGDSSSGWTAGAAAYYVGYLQPRTFLLKYNENGTITDAVDCALDPLSETKCTLKSFTVEKGIYQTSNFRVQPTESIVRFPNITNLCPFGEVFNATRFASVYAWNRKRISNCVADYSVLYNSASFSTFKCYGVSPTKLNDLCFTNVYADSFVIRGDEVREIAPGQTGKIADYNYKLPDDFTGCVIAWNSNNLDSKVGGNYNYLYRLFRKSNLKPFERDISTEIYQAGSTPCNGVEGFNCYFPLQSYGFQPTNGVGYQPYRVVVLSFELLHAPATVCGPKKSTNLVKNKCVNFNFNGLTGTGVLTESNKKFLPFQQFGRDIADTTDAVRDPQTLEILDITPCSFGGVSVITPGTNTSNQVAVLYQDVNCTEVPVAIHADQLTPTWRVYSTGSNVFQTRAGCLIGAEHVNNSYECDIPIGAGICASYQTQTNSPRRARSVASQSIIAYTMSLGAENSVAYSNNSIAIPTNFTISVTTEILPVSMTKTSVDCTMYICGDSTECSNLLLQYGSFCTQLNRALTGIAVEQDKNTQEVFAQVKQIYKTPPIKDFGGFNFSQILPDPSKPSKRSFIEDLLFNKVTLADAGFIKQYGDCLGDIAARDLICAQKFNGLTVLPPLLTDEMIAQYTSALLAGTITSGWTFGAGAALQIPFAMQMAYRFNGIGVTQNVLYENQKLIANQFNSAIGKIQDSLSSTASALGKLQDVVNQNAQALNTLVKQLSSNFGAISSVLNDILSRLDKVEAEVQIDRLITGRLQSLQTYVTQQLIRAAEIRASANLAATKMSECVLGQSKRVDFCGKGYHLMSFPQSAPHGVVFLHVTYVPAQEKNFTTAPAICHDGKAHFPREGVFVSNGTHWFVTQRNFYEPQIITTDNTFVSGNCDVVIGIVNNTVYDPLQPELDSGGGSGGGQIYEGKLTAEGLRFGIVASRFNHALVDRLVEGAIDAIVRHGGREEDITLVRVPGSWEIPVAAGELARKEDIDAVIAIGVLIRGATPHFDYIASEVSKGLADLSLELRKPITFGVITADTLEQAIERAGTKHGNKGWEAALSAIEMANLFKSLR

SEQ ID NO: 7657 - protein, 1307 aa, Artificial Sequence
  SARS-CoV-2/Sweden/01/2020__EPI_ISL_411951 spike protein (1-1147) LumSynth construct
MFVFLVLLPLVSSQCVNLTTRTQLPPAYTNSFTRGVYYPDKVFRSSVLHSTQDLFLPFFSNVTWFHAIHVSGTNGTKRFDNPVLPFNDGVYFASTEKSNIIRGWIFGTTLDSKTQSLLIVNNATNVVIKVCEFQFCNDPFLGVYYHKNNKSWMESEFRVYSSANNCTFEYVSQPFLMDLEGKQGNFKNLREFVFKNIDGYFKIYSKHTPINLVRDLPQGFSALEPLVDLPIGINITRFQTLLALHRSYLTPGDSSSGWTAGAAAYYVGYLQPRTFLLKYNENGTITDAVDCALDPLSETKCTLKSFTVEKGIYQTSNFRVQPTESIVRFPNITNLCPFGEVFNATRFASVYAWNRKRISNCVADYSVLYNSASFSTFKCYGVSPTKLNDLCFTNVYADSFVIRGDEVRQIAPGQTGKIADYNYKLPDDFTGCVIAWNSNNLDSKVGGNYNYLYRLFRKSNLKPFERDISTEIYQAGSTPCNGVEGFNCYFPLQSYGFQPTNGVGYQPYRVVVLSFELLHAPATVCGPKKSTNLVKNKCVNFNFNGLTGTGVLTESNKKFLPFQQFGRDIADTTDAVRDPQTLEILDITPCSFGGVSVITPGTNTSNQVAVLYQDVNCTEVPVAIHADQLTPTWRVYSTGSNVFQTRAGCLIGAEHVNNSYECDIPIGAGICASYQTQTNSPRRARSVASQSIIAYTMSLGAENSVAYSNNSIAIPTNFTISVTTEILPVSMTKTSVDCTMYICGDSTECSNLLLQYGSFCTQLNRALTGIAVEQDKNTQEVFAQVKQIYKTPPIKDCGGFNFSQILPDPSKPSKRSFIEDLLFNKVTLADAGFIKQYGDCLGDIAARDLICAQKFNGLTVLPPLLTDEMIAQYTSALLAGTITSGWTFGAGAALQIPFAMQMAYRFNGIGVTQNVLYENQKLIANQFNSAIGKIQDSLSSTASALGKLQDVVNQNAQALNTLVKQLSSNFGAISSVLNDILSRLDKVEAEVQIDRLITGRLQSLQTYVTQQLIRAAEIRASANLAATKMSECVLGQSKRVDFCGKGYHLMSFPQSAPHGVVFLHVTYVPAQEKNFTTAPAICHDGKAHFPREGVFVSNGTHWFVTQRNFYEPQIITTDNTFVSGNCDVVIGIVNNTVYDPLQPELDSGGGSGGGQIYEGKLTAEGLRFGIVASRFNHALVDRLVEGAIDAIVRHGGREEDITLVRVPGSWEIPVAAGELARKEDIDAVIAIGVLIRGATPHFDYIASEVSKGLADLSLELRKPITFGVITADTLEQAIERAGTKHGNKGWEAALSAIEMANLFKSLR

SEQ ID NO: 7658 - protein, 1307 aa, Artificial Sequence
  SARS-CoV-2/Tianmen/HBCDC-HB-07/2020__EPI_ISL_412983 spike protein (1-1147) LumSynth construct
MFVFLVLLPLVSSQCVNLTTRTQLPPAYTNSFTRGVYYPDKVFRSSVLHSTQDLFLPFFSNVTWFHAIHVSGTNGTKRFDNPVLPFNDGVYFASTEKSNIIRGWIFGTTLDSKTQSLLIVNNATNVVIKVCEFQFCNDPFLGVYYHKNNKSWMESEFRVYSSANNCTFEYVSQPFLMDLEGKQGNFKNLREFVFKNIDGYFKIYSKHTPINLVRDLPQGFSALEPLVDLPIGINITRFQTLLALHRSYLTPGDSSSGWTAGAAAYYVGYLQPRTFLLKYNENGTITDAVDCALDPLSETKCTLKSFTVEKGIYQTSNFRVQPTESIVRFPNITNLCPFGEVFNATRFASVYAWNRKRISNCVADYSVLYNSASFSTFKCYGVSPTKLNDLCFTNVYADSFVIRGDEVRQIAPGQTGKIADYNYKLPDDFTGCVIAWNSNNLDSKVGGNYNYLYRLFRKSNLKPFERDISTEIYQAGSTPCNGVEGFNCYFPLQSYGFQPTNGVGYQPYRVVVLSFELLHAPATVCGPKKSTNLVKNKCVNFNFNGLTGTGVLTESNKKFLPFQQFGRDIADTTDAVRDPQTLEILDITPCSFGGVSVITPGTNTSNQVAVLYQDLNCTEVPVAIHADQLTPTWRVYSTGSNVFQTRAGCLIGAEHVNNSYECDIPIGAGICASYQTQTNSPRRARSVASQSIIAYTMSLGAENSVAYSNNSIAIPTNFTISVTTEILPVSMTKTSVDCTMYICGDSTECSNLLLQYGSFCTQLNRALTGIAVEQDKNTQEVFAQVKQIYKTPPIKDFGGFNFSQILPDPSKPSKRSFIEDLLFNKVTLADAGFIKQYGDCLGDIAARDLICAQKFNGLTVLPPLLTDEMIAQYTSALLAGTITSGWTFGAGAALQIPFAMQMAYRFNGIGVTQNVLYENQKLIANQFNSAIGKIQDSLSSTASALGKLQDVVNQNAQALNTLVKQLSSNFGAISSVLNDILSRLDKVEAEVQIDRLITGRLQSLQTYVTQQLIRAAEIRASANLAATKMSECVLGQSKRVDFCGKGYHLMSFPQSAPHGVVFLHVTYVPAQEKNFTTAPAICHDGKAHFPREGVFVSNGTHWFVTQRNFYEPQIITTDNTFVSGNCDVVIGIVNNTVYDPLQPELDSGGGSGGGQIYEGKLTAEGLRFGIVASRFNHALVDRLVEGAIDAIVRHGGREEDITLVRVPGSWEIPVAAGELARKEDIDAVIAIGVLIRGATPHFDYIASEVSKGLADLSLELRKPITFGVITADTLEQAIERAGTKHGNKGWEAALSAIEMANLFKSLR

SEQ ID NO: 7659 - protein, 1307 aa, Artificial Sequence
  SARS-CoV-2/Hong Kong/case42_VM20002493/2020__EPI_ISL_414527 spike protein (1-1147) LumSynth construct
MFVFLVLLPLVSSQCVNLTTRTQLPPAYTNSFTRGVYYPDKVFRSSVLHSTQDLFLPFFSNVTWFHAIHVSGTNGTKRFDNPVLPFNDGVYFASTEKSNIIRGWIFGTTLDSKTQSLLIVNNATNVVIKVCEFQFCNDPFLGVYYHKNNKSWMESEFRVYSSANNCTFEYVSQPFLMDLEGKQGNFKNLREFVFKNIDGYFKIYSKHTPINLVRDLPQGFSALEPLVDLPIGINITRFQTLLALHRSYLTPGDSSSGWTAGAAAYYVGYLQPRTFLLKYNENGTITDAVDCALDPLSETKCTLKSFTVEKGIYQTSNFRVQPTESIVRFPNITNLCPFGEVFNATRFASVYAWNRKRISNCVADYSVLYNSASFSTFKCYGVSPTKLNDLCFTNVYADSFVIRGDEVRQIAPGQTGKIADYNYKLPDDFTGCVIAWNSNNLDSKVGGNYNYLYRLFRKSNLKPFERDISTEIYQAGSTPCNGVEGFNCYFPLQSYGFQPTNGVGYQPYRVVVLSFELLHAPATVCGPKKSTNLVKNKCVNFNFNGLTGTGVLTESNKKFLPFQQFGRDIADTTDAVRDPQTLEILDITPCSFGGVSVITPGTNTSNQVAVLYQDVNCTEVPVAIHADQLTPTWRVYSTGSNVFQTRAGCLIGAEHVNNSYECDIPIGAGICASYQTQTNSPRRARSVASQSIIAYTMSLGAENSVAYSNNSIAIPTNFAISVTTEILPVSMTKTSVDCTMYICGDSTECSNLLLQYGSFCTQLNRALTGIAVEQDKNTQEVFAQVKQIYKTPPIKDFGGFNFSQILPDPSKPSKRSFIEDLLFNKVTLADAGFIKQYGDCLGDIAARDLICAQKFNGLTVLPPLLTDEMIAQYTSALLAGTITSGWTFGAGAALQIPFAMQMAYRFNGIGVTQNVLYENQKLIANQFNSAIGKIQDSLSSTASALGKLQDVVNQNAQALNTLVKQLSSNFGAISSVLNDILSRLDKVEAEVQIDRLITGRLQSLQTYVTQQLIRAAEIRASANLAATKMSECVLGQSKRVDFCGKGYHLMSFPQSAPHGVVFLHVTYVPAQEKNFTTAPAICHDGKAHFPREGVFVSNGTHWFVTQRNFYEPQIITTDNTFVSGNCDVVIGIVNNTVYDPLQPELDSGGGSGGGQIYEGKLTAEGLRFGIVASRFNHALVDRLVEGAIDAIVRHGGREEDITLVRVPGSWEIPVAAGELARKEDIDAVIAIGVLIRGATPHFDYIASEVSKGLADLSLELRKPITFGVITADTLEQAIERAGTKHGNKGWEAALSAIEMANLFKSLR

SEQ ID NO: 7660 - protein, 1307 aa, Artificial Sequence
  SARS-CoV-2/USA/CruiseA-23/2020__EPI_ISL_414482 spike protein (1-1147) LumSynth construct
MFVFLVLLPLVSSQCVNLTTRTQLPPAYTNSFTRGVYYPDKVFRSSVLHSTQDLFLPFFSNVTWFHAIHVSGTNGTKRFDNPVLPFNDGVYFASTEKSNIIRGWIFGTTLDSKTQSLLIVNNATNVVIKVCEFQFCNDPFLGVYYHKNNKSWMESEFRVYSSANNCTFEYVSQPFLMDLEVKQGNFKNLREFVFKNIDGYFKIYSKHTPINLVRDLPQGFSALEPLVDLPIGINITRFQTLLALHRSYLTPGDSSSGWTAGAAAYYVGYLQPRTFLLKYNENGTITDAVDCALDPLSETKCTLKSFTVEKGIYQTSNFRVQPTESIVRFPNITNLCPFGEVFNATRFASVYAWNRKRISNCVADYSVLYNSASFSTFKCYGVSPTKLNDLCFTNVYADSFVIRGDEVRQIAPGQTGKIADYNYKLPDDFTGCVIAWNSNNLDSKVGGNYNYLYRLFRKSNLKPFERDISTEIYQAGSTPCNGVEGFNCYFPLQSYGFQPTNGVGYQPYRVVVLSFELLHAPATVCGPKKSTNLVKNKCVNFNFNGLTGTGVLTESNKKFLPFQQFGRDIADTTDAVRDPQTLEILDITPCSFGGVSVITPGTNTSNQVAVLYQDVNCTEVPVAIHADQLTPTWRVYSTGSNVFQTRAGCLIGAEHVNNSYECDIPIGAGICASYQTQTNSPRRARSVASQSIIAYTMSLGAENSVAYSNNSIAIPTNFTISVTTEILPVSMTKTSVDCTMYICGDSTECSNLLLQYGSFCTQLNRALTGIAVEQDKNTQEVFAQVKQIYKTPPIKDFGGFNFSQILPDPSKPSKRSFIEDLLFNKVTLADAGFIKQYGDCLGDIAARDLICAQKFNGLTVLPPLLTDEMIAQYTSALLAGTITSGWTFGAGAALQIPFAMQMAYRFNGIGVTQNVLYENQKLIANQFNSAIGKIQDSLSSTASALGKLQDVVNQNAQALNTLVKQLSSNFGAISSVLNDILSRLDKVEAEVQIDRLITGRLQSLQTYVTQQLIRAAEIRASANLAATKMSECVLGQSKRVDFCGKGYHLMSFPQSAPHGVVFLHVTYVPAQEKNFTTAPAICHDGKAHFPREGVFVSNGTHWFVTQRNFYEPQIITTDNTFVSGNCDVVIGIVNNTVYDPLQPELDSGGGSGGGQIYEGKLTAEGLRFGIVASRFNHALVDRLVEGAIDAIVRHGGREEDITLVRVPGSWEIPVAAGELARKEDIDAVIAIGVLIRGATPHFDYIASEVSKGLADLSLELRKPITFGVITADTLEQAIERAGTKHGNKGWEAALSAIEMANLFKSLR

SEQ ID NO: 7661 - protein, 1307 aa, Artificial Sequence
  SARS-CoV-2/Hong Kong/case85_VM20002868/2020__EPI_ISL_414519 spike protein (1-1147) LumSynth construct
MFVFLVLVPLVSSQCVNLTTRTQLPPAYTNSFTRGVYYPDKVFRSSVLHSTQDLFLPFFSNVTWFHAIHVSGTNGTKRFDNPVLPFNDGVYFASTEKSNIIRGWIFGTTLDSKTQSLLIVNNATNVVIKVCEFQFCNDPFLGVYYHKNNKSWMESEFRVYSSANNCTFEYVSQPFLMDLEGKQGNFKNLREFVFKNIDGYFKIYSKHTPINLVRDLPQGFSALEPLVDLPIGINITRFQTLLALHRSYLTPGDSSSGWTAGAAAYYVGYLQPRTFLLKYNENGTITDAVDCALDPLSETKCTLKSFTVEKGIYQTSNFRVQPTESIVRFPNITNLCPFGEVFNATRFASVYAWNRKRISNCVADYSVLYNSASFSTFKCYGVSPTKLNDLCFTNVYADSFVIRGDEVRQIAPGQTGKIADYNYKLPDDFTGCVIAWNSNNLDSKVGGNYNYLYRLFRKSNLKPFERDISTEIYQAGSTPCNGVEGFNCYFPLQSYGFQPTNGVGYQPYRVVVLSFELLHAPATVCGPKKSTNLVKNKCVNFNFNGLTGTGVLTESNKKFLPFQQFGRDIADTTDAVRDPQTLEILDITPCSFGGVSVITPGTNTSNQVAVLYQDVNCTEVPVAIHADQLTPTWRVYSTGSNVFQTRAGCLIGAEHVNNSYECDIPIGAGICASYQTQTNSPRRARSVASQSIIAYTMSLGAENSVAYSNNSIAIPTNFTISVTTEILPVSMTKTSVDCTMYICGDSTECSNLLLQYGSFCTQLNRALTGIAVEQDKNTQEVFAQVKQIYKTPPIKDFGGFNFSQILPDPSKPSKRSFIEDLLFNKVTLADAGFIKQYGDCLGDIAARDLICAQKFNGLTVLPPLLTDEMIAQYTSALLAGTITSGWTFGAGAALQIPFAMQMAYRFNGIGVTQNVLYENQKLIANQFNSAIGKIQDSLSSTASALGKLQDVVNQNAQALNTLVKQLSSNFGAISSVLNDILSRLDKVEAEVQIDRLITGRLQSLQTYVTQQLIRAAEIRASANLAATKMSECVLGQSKRVDFCGKGYHLMSFPQSAPHGVVFLHVTYVPAQEKNFTTAPAICHDGKAHFPREGVFVSNGTHWFVTQRNFYEPQIITTDNTFVSGNCDVVIGIVNNTVYDPLQPELDSGGGSGGGQIYEGKLTAEGLRFGIVASRFNHALVDRLVEGAIDAIVRHGGREEDITLVRVPGSWEIPVAAGELARKEDIDAVIAIGVLIRGATPHFDYIASEVSKGLADLSLELRKPITFGVITADTLEQAIERAGTKHGNKGWEAALSAIEMANLFKSLR

SEQ ID NO: 7662 - protein, 1307 aa, Artificial Sequence; identical to SEQ ID NO: 7652
  SARS-CoV-2/England/200990660/2020__EPI_ISL_414523 spike protein (1-1147) LumSynth construct

SEQ ID NO: 7663 - protein, 1307 aa, Artificial Sequence
  SARS-CoV-2/Australia/NSW09/2020__EPI_ISL_413595 spike protein (1-1147) LumSynth construct
MFVFLVLLPLVSSQCVNLTTRTQLPPAYTNSFTRGVYYPDKVFRSSVLHSTQDLFLPFFSNVTWFHAIHVSGTNGTKRFDNPVLPFNDGVYFASTEKSNIIRGWIFGTTLDSKTQSLLIVNNATNVVIKVCEFQFCNDPFLGVYYHKNNKSWMESEFRVYSSANNCTFEYVSQPFLMDLEGKQGNFKNLREFVFKNIDGYFKIYSKHTPINLVRDLPQGFSALEPLVDLPIGINITRFQTLLALHRSYLTPGDSSSGWTAGAAAYYVGYLQPRTFLLKYNENGTITDAVDCALDPLSETKCTLKSFTVEKGIYQTSNFRVQPTESIVRFPNITNLCPFGEVFNATRFASVYAWNRKRISNCVADYSVLYNSASFSTFKCYGVSPTKLNDLCFTNVYADSFVIRGDEVRQIAPGQTGKIADYNYKLPDDFTGCVIAWNSNNLDSKVGGNYNYLYRLFRKSNLKPFERDISTEIYQAGSTPCNGVEGFNCYFPLQSYGFQPTNGVGYQPYRVVVLSFELLHAPATVCGPKKSTNLVKNKCVNFNFNGLTGTGVLTESNKKFLPFQQFGRDIADTTDAVRDPQTLEILDITPCSFGGVSVITPGTNTSNQVAVLYQDVNCTEVPVAIHADQLTPTWRVYSTGSNVFQTRAGCLIGAEHVNNSYECDIPIGAGICASYQTQTNSPRRARSVASQSIIAYTMSLGAENSVAYSNNSIAIPTNFTISVTTEILPVSMTKTSVDCTMYICGDSTECSNLLLQYGSFCTQLNRALTGIAVEQDKNTQEVFAQVKQIYKTPPIKDFGGFNFSQILPDPSKPSKRSFIEDLLFNKVTLADAGFIKQYGDCLGDIAARDLICAQKFNGLTVLPPLLTDEMIAQYTSALLAGTITSGWTFGAGAALQIPFAMQMAYRFNGIGVTQNVLYENQKLIANQFNSAIGKIQDSLSFTASALGKLQDVVNQNAQALNTLVKQLSSNFGAISSVLNDILSRLDKVEAEVQIDRLITGRLQSLQTYVTQQLIRAAEIRASANLAATKMSECVLGQSKRVDFCGKGYHLMSFPQSAPHGVVFLHVTYVPAQEKNFTTAPAICHDGKAHFPREGVFVSNGTHWFVTQRNFYEPQIITTDNTFVSGNCDVVIGIVNNTVYDPLQPELDSGGGSGGGQIYEGKLTAEGLRFGIVASRFNHALVDRLVEGAIDAIVRHGGREEDITLVRVPGSWEIPVAAGELARKEDIDAVIAIGVLIRGATPHFDYIASEVSKGLADLSLELRKPITFGVITADTLEQAIERAGTKHGNKGWEAALSAIEMANLFKSLR

SEQ ID NO: 7664 - protein, 1307 aa, Artificial Sequence; identical to SEQ ID NO: 7644
  SARS-CoV-2/Australia/NSW10/2020__EPI_ISL_413596 spike protein (1-1147) LumSynth construct

SEQ ID NO: 7665 - protein, 1307 aa, Artificial Sequence
  SARS-CoV-2/Switzerland/1000477797/2020__EPI_ISL_413023 spike protein (1-1147) LumSynth construct
MFVFLVLLPLVSSQCVNLTTRTQLPPAYTNSFTRGVYYPDKVFRSSVLHSTQDLFLPFFSNVTWFHAIHVSGTNGTKRFDNPVLPFNDGVYFASTEKSNIIRGWIFGTTLDSKTQSLLIVNNATNVVIKVCEFQFCNDPFLGVYYHKNNKSWMESEFRVYSSANNCTFEYVSQPFLMDLEGKQGNFKNLREFVFKNIDGYFNIYSKHTPINLVRDLPQGFSALEPLVDLPIGINITRFQTLLALHRSYLTPGDSSSGWTAGAAAYYVGYLQPRTFLLKYNENGTITDAVDCALDPLSETKCTLKSFTVEKGIYQTSNFRVQPTESIVRFPNITNLCPFGEVFNATRFASVYAWNRKRISNCVADYSVLYNSASFSTFKCYGVSPTKLNDLCFTNVYADSFVIRGDEVRQIAPGQTGKIADYNYKLPDDFTGCVIAWNSNNLDSKVGGNYNYLYRLFRKSNLKPFERDISTEIYQAGSTPCNGVEGFNCYFPLQSYGFQPTNGVGYQPYRVVVLSFELLHAPATVCGPKKSTNLVKNKCVNFNFNGLTGTGVLTESNKKFLPFQQFGRDIADTTDAVRDPQTLEILDITPCSFGGVSVITPGTNTSNQVAVLYQGVNCTEVPVAIHADQLTPTWRVYSTGSNVFQTRAGCLIGAEHVNNSYECDIPIGAGICASYQTQTNSPRRARSVASQSIIAYTMSLGAENSVAYSNNSIAIPTNFTISVTTEILPVSMTKTSVDCTMYICGDSTECSNLLLQYGSFCTQLNRALTGIAVEQDKNTQEVFAQVKQIYKTPPIKDFGGFNFSQILPDPSKPSKRSFIEDLLFNKVTLADAGFIKQYGDCLGDIAARDLICAQKFNGLTVLPPLLTDEMIAQYTSALLAGTITSGWTFGAGAALQIPFAMQMAYRFNGIGVTQNVLYENQKLIANQFNSAIGKIQDSLSSTASALGKLQDVVNQNAQALNTLVKQLSSNFGAISSVLNDILSRLDKVEAEVQIDRLITGRLQSLQTYVTQQLIRAAEIRASANLAATKMSECVLGQSKRVDFCGKGYHLMSFPQSAPHGVVFLHVTYVPAQEKNFTTAPAICHDGKAHFPREGVFVSNGTHWFVTQRNFYEPQIITTDNTFVSGNCDVVIGIVNNTVYDPLQPELDSGGGSGGGQIYEGKLTAEGLRFGIVASRFNHALVDRLVEGAIDAIVRHGGREEDITLVRVPGSWEIPVAAGELARKEDIDAVIAIGVLIRGATPHFDYIASEVSKGLADLSLELRKPITFGVITADTLEQAIERAGTKHGNKGWEAALSAIEMANLFKSLR

SEQ ID NO: 7666 - protein, 1307 aa, Artificial Sequence
  SARS-CoV-2/Belgium/BA-02291/2020__EPI_ISL_415159 spike protein (1-1147) LumSynth construct
MFVFLVLLPLVSSQCVNLTTRTQLPPAYTNSFTRGVYYPDKVFRSSVLHSTQDLFLPFFSNVTWFHAIHVSGTNGTKRFDNPVLPFNDGVYFASTEKSNIIRGWIFGTTLDSKTQSLLIVNNATNVVIKVCEFQFCNDPFLGVYYHKNNKSWMESEFRVYSSANNCTFEYVSQPFLMDLEGKQGNFKNLREFVFKNIDGYFKIYSKHTPINLVRDLPQGFSALEPLVDLPIGINITRFQTLLALHRSYLTPGDSSSGWTAGAAAYYVGYLQPRTFLLKYNENGTITDAVDCALDPLSETKCTLKSFTVEKGIYQTSNFRVQPTESIVRFPNITNLCPFGEVFNATRFASVYAWNRKRISNCVADYSVLYNSASFSTFKCYGVSPTKLNDLCFTNVYADSFVIRGDEVRQIAPGQTGKIADYNYKLPDDFTGCVIAWNSNNLDSKVGGNYNYLYRLFRRSNLKPFERDISTEIYQAGSTPCNGVEGFNCYFPLQSYGFQPTNGVGYQPYRVVVLSFELLPAPATVCGPKKSTNLVKNKCVNFNFNGLTGTGVLTESNKKFLPFQQFGRDIADTTDAVRDPQTLEILDITPCSFGGVSVITPGTNTSNQVAVLYQGVNCTEVPVAIHADQLTPTWRVYSTGSNVFQTRAGCLIGAEHVNNSYECDIPIGAGICASYQTQTNSPRRARSVASQSIIAYTMSLGAENSVAYSNNSIAIPTNFTISVTTEILPVSMTKTSVDCTMYICGDSTECSNLLLQYGSFCTQLNRALTGIAVEQDKNTQEVFAQVKQIYKTPPIKDFGGFNFSQILPDPSKPSKRSFIEDLLFNKVTLADAGFIKQYGDCLGDIAARDLICAQKFNGLTVLPPLLTDEMIAQYTSALLAGTITSGWTFGAGAALQIPFAMQMAYRFNGIGVTQNVLYENQKLIANQFNSAIGKIQDSLSSAAPALGKLQDVVNQNAQALNTLVKQLSSNFGAISSVLNDILSRLDKVEAEVQIDRLITGRLQSLQTYVTQQLIRAAEIRASANLAATKMSECVLGQSKRVDFCGKGYHLMSFPQSAPHGVVFLHVTYVPAQEKNFTTAPAICHDGKAHFPREGVFVSNGTHWFVTQRNFYEPQIITTDNTFVSGNCDVVIGIVNNTVYDPLQPELDSGGGSGGGQIYEGKLTAEGLRFGIVASRFNHALVDRLVEGAIDAIVRHGGREEDITLVRVPGSWEIPVAAGELARKEDIDAVIAIGVLIRGATPHFDYIASEVSKGLADLSLELRKPITFGVITADTLEQAIERAGTKHGNKGWEAALSAIEMANLFKSLR

SEQ ID NO: 7667 - protein, 1307 aa, Artificial Sequence
  SARS-CoV-2/USA/WA8-UW5/2020__EPI_ISL_413486 spike protein (1-1147) LumSynth construct
MFVFLVLLPLVSSQCVNLTTRTQLPPAYTNSFTRGVYYPDKVFRSSVLHSTQDLFLPFFSNVTWFHAIHVSGTNGTKRFDNPVLPFNDGVYFASTEKSNIIRGWIFGTTLDSKTQSLLIVNNATNVVIKVCEFQFCNDPFLGVYYHKNNKSWMESEFRVYSSANNCTFEYVSQPFLMDLEGKQGNFKNLREFVFKNIDGYFKIYSKHTPINLVRDLPQGFSALEPLVDLPIGINITRFQTLLALHRSYLTPGDSSSGWTAGAAAYYVGYLQPRTFLLKYNENGTITDAVDCALDPLSETKCTLKSFTVEKGIYQTSNFRVQPTESIVRFPNITNLCPFGEVFNATRFASVYAWNRKRISNCVADYSVLYNSASFSTFKCYGVSPTKLNDLCFTNVYADSFVIRGDEVRQIAPGQTGKIADYNYKLPDDFTGCVIAWNSNNLDSKVGGNYNYLYRLFRKSNLKPFERDISTEIYQAGSTPCNGVEGFNCYFPLQSYGFQPTNGVGYQPYRVVVLSFELLHAPATVCGPKKSTNLVKNKCVNFNFNGLTGTGVLTESNKKFLPFQQFGRDIADTTDAVRDPQTLEILDITPCSFGGVSVITPGTNTSNQVAVLYQDVNCTEVPVAIHADQLTPTWRVYSTGSNVFQTRAGCLIGAEYVNNSYECDIPIGAGICASYQTQTNSPRRARSVASQSIIAYTMSLGAENSVAYSNNSIAIPTNFTISVTTEILPVSMTKTSVDCTMYICGDSTECSNLLLQYGSFCTQLNRALTGIAVEQDKNTQEVFAQVKQIYKTPPIKDFGGFNFSQILPDPSKPSKRSFIEDLLFNKVTLADAGFIKQYGDCLGDIAARDLICAQKFNGLTVLPPLLTDEMIAQYTSALLAGTITSGWTFGAGAALQIPFAMQMAYRFNGIGVTQNVLYENQKLIANQFNSAIGKIQDSLSSTASALGKLQDVVNQNAQALNTLVKQLSSNFGAISSVLNDILSRLDKVEAEVQIDRLITGRLQSLQTYVTQQLIRAAEIRASANLAATKMSECVLGQSKRVDFCGKGYHLMSFPQSAPHGVVFLHVTYVPAQEKNFTTAPAICHDGKAHFPREGVFVSNGTHWFVTQRNFYEPQIITTDNTFVSGNCDVVIGIVNNTVYDPLQPELDSGGGSGGGQIYEGKLTAEGLRFGIVASRFNHALVDRLVEGAIDAIVRHGGREEDITLVRVPGSWEIPVAAGELARKEDIDAVIAIGVLIRGATPHFDYIASEVSKGLADLSLELRKPITFGVITADTLEQAIERAGTKHGNKGWEAALSAIEMANLFKSLR

SEQ ID NO: 7668 - protein, 1307 aa, Artificial Sequence
  SARS-CoV-2/England/20102000506/2020__EPI_ISL_415147 spike protein (1-1147) LumSynth construct
MFVFLVLLPLVSSQCVNLTTRTQLPPAYTNSFTRGVYYPDKVFRSSVLHSTQDLFLPFFSNVTWFHAIHVSGTNGTKRFDNPVLPFNDGVYFASTEKSNIIRGWIFGTTLDSKTQSLLIVNNATNVVIKVCEFQFCNDPFLGVYYHKNNKSWMESEFRVYSSANNCTFEYVSQPFLMDLEGKQGNFKNLREFVFKNIDGYFKIYSKHTPINLVRDLPQGFSALEPLVDLPIGINITRFQTLLALHRSYLTPGDSSSGWTAGAAAYYVGYLQPRTFLLKYNENGTITDAVDCALDPLSETKCTLKSFTVEKGIYQTSNFRVQPTESIVRFPNITNLCPFGEVFNATRFASVYAWNRKRISNCVADYSVLYNSASFSTFKCYGVSPTKLNDLCFTNVYADSFVIRGDEVRQIAPGQTGKIADYNYKLPDDFTGCVIAWNSNNLDSKVGGNYNYLYRLFRKSNLKPFERDISTEIYQAGSTPCNGVEGFNCYFPLQSYGFQPTNGVGYQPYRVVVLSFELLHAPATVCGPKKSTNLVKNKCVNFNFNGLTGTGVLTESNKKFLPFQQFGRDIADTTDAVRDPQTLEILDITPCSFGGVSVITPGTNTSNQVAVLYQGVNCTEVPVAIHADQLTPTWRVYSTGSNVFQTRAGCLIGAEHVNNSYECDIPIGAGICASYQTQTNSPRRARSVASQSIIAYTMSLGAENSVAYSNNSIAIPTNFTISVTTEILPVSMTKTSVDCTMYICGDSTECSNLLLQYGSFCTQLNRALTGIAVEQDKNTQEVFAQVKQIYKTPPIKDFGGFNFSQILPDPSKPSKRSFIEDLLFNKVTLADAGFIKQYGYCLGDIAARDLICAQKFNGLTVLPPLLTDEMIAQYTSALLAGTITSGWTFGAGAALQIPFAMQMAYRFNGIGVTQNVLYENQKLIANQFNSAIGKIQDSLSSTASALGKLQDVVNQNAQALNTLVKQLSSNFGAISSVLNDILSRLDKVEAEVQIDRLITGRLQSLQTYVTQQLIRAAEIRASANLAATKMSECVLGQSKRVDFCGKGYHLMSFPQSAPHGVVFLHVTYVPAQEKNFTTAPAICHDGKAHFPREGVFVSNGTHWFVTQRNFYEPQIITTDNTFVSGNCDVVIGIVNNTVYDPLQPELDSGGGSGGGQIYEGKLTAEGLRFGIVASRFNHALVDRLVEGAIDAIVRHGGREEDITLVRVPGSWEIPVAAGELARKEDIDAVIAIGVLIRGATPHFDYIASEVSKGLADLSLELRKPITFGVITADTLEQAIERAGTKHGNKGWEAALSAIEMANLFKSLR

SEQ ID NO: 7669 - protein, 1307 aa, Artificial Sequence
  SARS-CoV-2/Belgium/VAG-03013/2020__EPI_ISL_415155 spike protein (1-1147) LumSynth construct
MFVFLVLLPLVSSQCVNLTTRTQLPPAYTNSFTRGVYYPDKVFRSSVLHSTQDLFLPFFSNVTWFHAIHVSGTNGTKRFDNPVLPFNDGVYFASTEKSNIIRGWIFGTTLDSKTQSLLIVNNATNVVIKVCEFQFCNDPFLGVYYHKNNKSWMESEFRVYSSANNCTFEYVSQPFLMDLEGKQGNFKNLREFVFKNIDGYFKIYSKHTPINLVRDLPQGFSALEPLVDLPIGINITRFQTLLALHRSYLTPGDSSSGWTAGAAAYYVGYLQPRTFLLKYNENGTITDAVDCALDPLSETKCTLKSFTVEKGIYQTSNFRVQPTESIVRFPNITNLCPFGEVFNATRFASVYAWNRKRISNCVADYSVLYNSASFSTFKCYGVSPTKLNDLCFTNVYADSFVIRGDEVRQIAPGQTGKIADYNYKLPDDFTGCVIAWNSNNLDSKVGGNYNYLYRLFRKSNLKPFERDISTEIYQAGSTPCNGVEGFNCYFPLQSYGFQPTNGVGYQPYRVVVLSFELLHAPATVCGPKKSTNLVKNKCVNFNFNGLTGTGVLTESNKKFLPFQQFGRDIADTTDAVRDPQTLEILDITPCSFGGVSVITPGTNTSNQVAVLYQGVNCTEVPVAIHADQLTPTWRVYSTGSNVFQTRAGCLIGAEHVNNSYECDIPIGAGICASYQTQTNSPRRARSVASQSIIAYTMSLGAENSVAYSNNSIAIPTNFTISVTTEILPVSMTKTSVDCTMYICGDSTECSNLLLQYGSFCTQLNRALTGIAVEQDKNTQEVFAQVKQIYKTPPIKDFGGFNFSQILPDPSKPSKRSFIEDLLFNKVTLADAGFIKQYGDCLGDIAARDLICAQKFNGLTVLPPLLTDEMIAQYTSALLAGTITSGWTFGAGAALQIPFAMQMAYRFNGIGVTQNVLYENQKLIANQFNSAIGKIQDSLSSTATALGKLQDVVNQNAQALNTLVKQLSSNFGAISSVLNDILSRLDKVEAEVQIDRLITGRLQSLQTYVTQQLIRAAEIRASANLAATKMSECVLGQSKRVDFCGKGYHLMSFPQSAPHGVVFLHVTYVPAQEKNFTTAPAICHDGKAHFPREGVFVSNGTHWFVTQRNFYEPQIITTDNTFVSGNCDVVIGIVNNTVYDPLQPELDSGGGSGGGQIYEGKLTAEGLRFGIVASRFNHALVDRLVEGAIDAIVRHGGREEDITLVRVPGSWEIPVAAGELARKEDIDAVIAIGVLIRGATPHFDYIASEVSKGLADLSLELRKPITFGVITADTLEQAIERAGTKHGNKGWEAALSAIEMANLFKSLR

SEQ ID NO: 7670 - protein, 1307 aa, Artificial Sequence
  SARS-CoV-2/Belgium/BC-03016/2020__EPI_ISL_415157 spike protein (1-1147) LumSynth construct
MFVFLVLLPLVSSQCVNLTTRTQLPPAYTNSFTRGVYYPDKVFRSSVLHSTQDLFLPFFSNVTWFHAIHVSGTNGTKRFDNPVLPFNDGVYFASTEKSNIIRGWIFGTTLDSKTQSLLIVNNATNVVIKVCEFQFCNDPFLGVYYHKNNKSWMESEFRVYSSANNCTFEYVSQPFLMDLEGKQGNFKNLREFVFKNIDGYFKIYSKHTPINLVRDLPQGFSALEPLVDLPIGINITRFQTLLALHRSYLTPGDSSSGWTAGAAAYYVGYLQPRTFLLKYNENGTITDAVDCALDPLSETKCTLKSFTVEKGIYQTSNFRVQPTESIVRFPNITNLCPFGEVFNATRFASVYAWNRKRISNCVADYSVLYNSASFSTFKCYGVSPTKLNDLCFTNVYADSFVIRGDEVRQIAPGQTGKIADYNYKLPDDFTGCVIAWNSNNLDSKVGGNYNYLYRLFRKSNLKPFERDISTEIYQAGSTPCNGVEGFNCYFPLQSYGFQPTNGVGYQPYRVVVLSFELLHAPATVCGPKKSTNLVKNKCVNFNFNGLTGTGVLTESNKKFLPFQQFGRDIADTTDAVRDPQTLEILDITPCSFGGVSVITPGTNTSNQVAVLYQGVNCTEVPVAIHADQLTPTWRVYSTGSNVFQTRAGCLIGAEHVNNSYECDIPIGAGICASYQTQTNSPRRARSVASQSIIAYTMSLGAENSVAYSNNSIAIPTNFTISVTTEILPVSMTKTSVDCTMYICGDSTECSNLLLQYGSFCTQLNRALTGIAVEQDKNTQEVFAQVKQIYKTPPIKDFGGFNFSQILPDPSKPSKRSFIEDLLFNKVTLADAGFIKQYGDCLGDIAARDLICAQKFNGLTVLPPLLTDEMIAQYTSALLAGTITSGWTFGAGAALQIPFAMQMAYRFNGIGVTQNVLYENQKLIANQFNSAIGKIQDSLSSTAPALGKLQDVVNQNAQALNTLVKQLSSNFGAISSVLNDILSRLDKVEAEVQIDRLITGRLQSLQTYVTQQLIRAAEIRASANLAATKMSECVLGQSKRVDFCGKGYHLMSFPQSAPHGVVFLHVTYVPAQEKNFTTAPAICHDGKAHFPREGVFVSNGTHWFVTQRNFYEPQIITTDNTFVSGNCDVVIGIVNNTVYDPLQPELDSGGGSGGGQIYEGKLTAEGLRFGIVASRFNHALVDRLVEGAIDAIVRHGGREEDITLVRVPGSWEIPVAAGELARKEDIDAVIAIGVLIRGATPHFDYIASEVSKGLADLSLELRKPITFGVITADTLEQAIERAGTKHGNKGWEAALSAIEMANLFKSLR

SEQ ID NO: 7671 - protein, 1307 aa, Artificial Sequence
  SARS-CoV-2/Germany/BavPat3/2020__EPI_ISL_414521 spike protein (1-1147) LumSynth construct
MFVFLVLLPLVSSQCVNLTTRTQLPPAYTNSFTRGVYYPDKVFRSSVLHSTQDLFLPFFSNVTWFHAIHVSGTNGTKRFDNPVLPFNDGVYFASTEKSNIIRGWIFGTTLDSKTQSLLIVNNATNVVIKVCEFQFCNDPFLGVYYHKNNKSWMESEFRVYSSANNCTFEYVSQPFLMDLEGKQGNFKNLREFVFKNIDGYFKIYSKHTPINLVRDLPQGFSALEPLVDLPIGINITRFQTLLALHRSYLTPGDSSSGWTAGAAAYYVGYLQPRTFLLKYNENGTITDAVDCALDPLSETKCTLKSFTVEKGIYQTSNFRVQPTESIVRFPNITNLCPFGEVFNATRFASVYAWNRKRISNCVADYSVLYNSASFSTFKCYGVSPTKLNDLCFTNVYADSFVIRGDEVRQIAPGQTGKIADYNYKLPDDFTGCVIAWNSNNLDSKVGGNYNYLYRLFRKSNLKPFERDISTEIYQAGSTPCNGVEGFNCYFPLQSYGFQPTNGVGYQPYRVVVLSFELLHAPATVCGPKKSTNLVKNKCVNFNFNGLTGTGVLTESNKKFLPFQQFGRDIADTTDAVRDPQTLEILDITPCSFGGVSVITPGTNTSNQVAVLYQDVNCTEVPVAIHADQLTPTWRVYSTGSNVFQTRAGCLIGAEHVNNSYECDIPIGAGICASYQTQTNSPRRARSVASQSIIAYTMSLGAENSVAYSNNSIAIPTNFTISVTTEILPVSMTKTSVDCTMYICGDSTECSNLLLQYGSFCTQLNRALTGIAVEQDKNTQQVFAQVKQIYKTPPIKDFGGFNFSQILPDPSKPSKRSFIEDLLFNKVTLADAGFIKQYGDCLGDIAARDLICAQKFNGLTVLPPLLTDEMIAQYTSALLAGTITSGWTFGAGAALQIPFAMQMAYRFNGIGVTQNVLYENQKLIANQFNSAIGKIQDSLSSTASALGKLQDVVNQNAQALNTLVKQLSSNFGAISSVLNDILSRLDKVEAEVQIDRLITGRLQSLQTYVTQQLIRAAEIRASANLAATKMSECVLGQSKRVDFCGKGYHLMSFPQSAPHGVVFLHVTYVPAQEKNFTTAPAICHDGKAHFPREGVFVSNGTHWFVTQRNFYEPQIITTDNTFVSGNCDVVIGIVNNTVYDPLQPELDSGGGSGGGQIYEGKLTAEGLRFGIVASRFNHALVDRLVEGAIDAIVRHGGREEDITLVRVPGSWEIPVAAGELARKEDIDAVIAIGVLIRGATPHFDYIASEVSKGLADLSLELRKPITFGVITADTLEQAIERAGTKHGNKGWEAALSAIEMANLFKSLR

SEQ ID NO: 7672 - protein, 1307 aa, Artificial Sequence
  SARS-CoV-2/France/HF1805/2020__EPI_ISL_414628 spike protein (1-1147) LumSynth construct
MFVFLVLLPLVSSQCVNLTTRTQLPPAYTNSFTRGVYYPDKVFRSSVLHSTQDLFLPFFSNVTWFHAIHVSGTNGTKRFDNPVLPFNDGVYFASTEKSNIIRGWIFGTTLDSKTQSLLIVNNATNVVIKVCEFQFCNDPFLGVYYHKNNKSWMESEFRVYSSANNCTFEYVSQPFLMDLEGKQGNFKNLREFVFKNIDGYFKIYSKHTPINLVRDLPQGFSALEPLVDLPIGINITRFQTLLALHRSYLTPGDSSSGWTAGAAAYYVGYLQPRTFLLKYNENGTITDAVDCALDPLSETKCTLKSFTVEKGIYQTSNFRVQPTESIVRFPNITNLCPFGEVFNATRFASVYAWNRKRISNCVADYSVLYNSASFSTFKCYGVSPTKLNDLCFTNVYADSFVIRGDEVRQIAPGQTGKIADYNYKLPDDFTGCVIAWNSNNLDSKVGGNYNYLYRLFRKSNLKPFERDISTEIYQAGSTPCNGVEGFNCYFPLQSYGFQPTNGVGYQPYRVVVLSFELLHAPATVCGPKKSTNLVKNKCVNFNFNGLTGTGVLTESNKKFLPFQQFGRDIADTTDAVRDPQTLEILDITPCSFGGVSVITPGTNTSNQVAVLYQGVNCTEVPVAIHADQLTPTWRVYSTGSNVFQTRAGCLIGAEHVNNSYECDIPIGAGICASYQTQTNSPRRARSVASQSIIAYTMSLGAENSVAYSNNSIAIPTNFTISVTTEILPVSMTKTSVDCTMYICGDSTECSNLLLQYGSFCTQLNRALTGIAVEQDKNTQEVFAQVKQIYKTPPIKDFGGFNFSQILPDPSKPSKRSFIEDLLFNKVTLADAGFIKQYGDCLGDIAARDLICAQKFNGLTVLPPLLTDEMIAQYTSALLAGTITSGWTFGAGAALQIPFAMQMAYRFNGIGVTQNVLYENQKLIANQFNSAIGKIQDSLSSTASALGKLQDVVNQNAQALNTLVKQLSSNFGAISSVLNDILSRLDKVEAEVQIDRLITGRLQSLQTYVTQQLIRAAEIRASANLAATKMSECVLGQSKRVDFCGKGYHLMSFPQSAPHGVVFLHVTYVPAQEKNFTTAPAICHDGKAHFPREGVFVSNGTHWFVTQRNFYEPQIITTDNTFVSGNCDVVIGVVNNTVYDPLQPELDSGGGSGGGQIYEGKLTAEGLRFGIVASRFNHALVDRLVEGAIDAIVRHGGREEDITLVRVPGSWEIPVAAGELARKEDIDAVIAIGVLIRGATPHFDYIASEVSKGLADLSLELRKPITFGVITADTLEQAIERAGTKHGNKGWEAALSAIEMANLFKSLR

SEQ ID NO: 7673 - protein, 1307 aa, Artificial Sequence
  SARS-CoV-2/Netherlands/ZuidHolland_9/2020__EPI_ISL_414445 spike protein (1-1147) LumSynth construct
MFVFLVLLPLVSSQCVNLTTRTQLPPAYTNSFTRGVYYPDKVFRSSVLHSTQDLFLPFFSNVTWFHAIHVSGTNGTKRFDNPVLPFNDGVYFASTEKSNIIRGWIFGTTLDSKTQSLLIVNNATNVVIKVCEFQFCNDPFLGVYYHKNNKSWMESEFRVYSSANNCTFEYVSQPFLMDLEGKQGNFKNLREFVFKNIDGYFKIYSKHTPINLVRDLPQGFSALEPLVDLPIGINITRFQTLLALHRSYLTPGDSSSGWTAGAAAYYVGYLQPRTFLLKYNENGTITDAVDCALDPLSETKCTLKSFTVEKGIYQTSNFRVQPTESIVRFPNITNLCPFGEVFNATRFASVYAWNRKRISNCVADYSVLYNSASFSTFKCYGVSPTKLNDLCFTNVYADSFVIRGDEVRQIAPGQTGKIADYNYKLPDDFTGCVIAWNSNNLDSKVGGNYNYLYRLFRKSNLKPFERDISTEIYQAGSTPCNGVEGFNCYFPLQSYGFQPTNGVGYQPYRVVVLSFELLHAPATVCGPKKSTNLVKNKCVNFNFNGLTGTGVLTESNKKFLPFQQFGRDIADTTDAVRDPQTLEILDITPCSFGGVSVITPGTNTSNQVAVLYQGVNCTEVPVAIHADQLTPTWRVYSTGSNVFQTRAGCLIGAEHVNNSYECDIPIGAGICASYQTQTNSPRRARSVASQSIIAYTMSLGAENSVAYSNNSIAIPTNFTISVTTEILPVSMTKTSVDCTMYICGDSTECSNLLLQYGSFCTQLNRALTGIAVEQDKNTQEVFAQVKQIYKTPPIKDFGGFNFSQILPDPSKPSKRSFIEDLLFNKVTLADAGFIKQYGDCLGDIAARDLICVQKFNGLTVLPPLLTDEMIAQYTSALLAGTITSGWTFGAGAALQIPFAMQMAYRFNGIGVTQNVLYENQKLIANQFNSAIGKIQDSLSSTASALGKLQDVVNQNAQALNTLVKQLSSNFGAISSVLNDILSRLDKVEAEVQIDRLITGRLQSLQTYVTQQLIRAAEIRASANLAATKMSECVLGQSKRVDFCGKGYHLMSFPQSAPHGVVFLHVTYVPAQEKNFTTAPAICHDGKAHFPREGVFVSNGTHWFVTQRNFYEPQIITTDNTFVSGNCDVVIGIVNNTVYDPLQPELDSGGGSGGGQIYEGKLTAEGLRFGIVASRFNHALVDRLVEGAIDAIVRHGGREEDITLVRVPGSWEIPVAAGELARKEDIDAVIAIGVLIRGATPHFDYIASEVSKGLADLSLELRKPITFGVITADTLEQAIERAGTKHGNKGWEAALSAIEMANLFKSLR

SEQ ID NO: 7674 - protein, 1307 aa, Artificial Sequence
  SARS-CoV-2/Finland/FIN03032020A/2020__EPI_ISL_413602 spike protein (1-1147) LumSynth construct
MFVFLVLLPLVSSQCVNLTTRTQLPPAYTNSFTRGVYYPDKVFRSSVLHSTQDLFLPFFSNVTWFHAIHVSGTNGTKRFDNPVLPFNDGVYFASTEKSNIIRGWIFGTTLDSKTQSLLIVNNATNVVIKVCEFQFCNDPFLGVYYHKNNKSWMESEFRVYSSANNCTFEYVSQPFLMDLEGKQGNFKNLREFVFKNIDGYFKIYSKHTPINLVRDLPQGFSALEPLVDLPIGINITRFQTLLALHRSYLTPGDSSSGWTAGAAAYYVGYLQPRTFLLKYNENGTITDAVDCALDPLSETKCTLKSFTVEKGIYQTSNFRVQPTESIVRFPNITNLCPFGEVFNATRFASVYAWNRKRISNCVADYSVLYNSASFSTFKCYGVSPTKLNDLCFTNVYADSFVIRGDEVRQIAPGQTGKIADYNYKLPDDFTGCVISWNSNNLDSKVGGNYNYLYRLFRKSNLKPFERDISTEIYQAGSTPCNGVEGFNCYFPLQSYGFQPTNGVGYQPYRVVVLSFELLHAPATVCGPKKSTNLVKNKCVNFNFNGLTGTGVLTESNKKFLPFQQFGRDIADTTDAVRDPQTLEILDITPCSFGGVSVITPGTNTSNQVAVLYQGVNCTEVPVAIHADQLTPTWRVYSTGSNVFQTRAGCLIGAEHVNNSYECDIPIGAGICASYQTQTNSPRRARSVASQSIIAYTMSLGAENSVAYSNNSIAIPTNFTISVTTEILPVSMTKTSVDCTMYICGDSTECSNLLLQYGSFCTQLNRALTGIAVEQDKNTQEVFAQVKQIYKTPPIKDFGGFNFSQILPDPSKPSKRSFIEDLLFNKVTLADAGFIKQYGDCLGDIAARDLICAQKFNGLTVLPPLLTDEMIAQYTSALLAGTITSGWTFGAGAALQIPFAMQMAYRFNGIGVTQNVLYENQKLIANQFNSAIGKIQDSLSSTASALGKLQDVVNQNAQALNTLVKQLSSNFGAISSVLNDILSRLDKVEAEVQIDRLITGRLQSLQTYVTQQLIRAAEIRASANLAATKMSECVLGQSKRVDFCGKGYHLMSFPQSAPHGVVFLHVTYVPAQEKNFTTAPAICHDGKAHFPREGVFVSNGTHWFVTQRNFYEPQIITTDNTFVSGNCDVVIGIVNNTVYDPLQPELDSGGGSGGGQIYEGKLTAEGLRFGIVASRFNHALVDRLVEGAIDAIVRHGGREEDITLVRVPGSWEIPVAAGELARKEDIDAVIAIGVLIRGATPHFDYIASEVSKGLADLSLELRKPITFGVITADTLEQAIERAGTKHGNKGWEAALSAIEMANLFKSLR

SEQ ID NO: 7675 - protein, 1307 aa, Artificial Sequence
  SARS-CoV-2/France/GE1977/2020__EPI_ISL_414632 spike protein (1-1147) LumSynth construct
MFVFLVLLPLVSSQCVNLTTRTQLPPAYTNSFTRGVYYPDKVFRSSVLHSTQDLFLPFFSNVTWFHAIHVSGTNGTKRFDNPVLPFNDGVYFASTEKSNIIRGWIFGTTLDSKTQSLLIVNNATNVVIKVCEFQFCNDPFLGVYYHKNNKSWMESEFRVYSSANNCTFEYVSQPFLMDLEGKQGNFKNLREFVFKNIDGYFKIYSKHTPINLVRDLPQGFSALEPLVDLPIGINITRFQTLLALHRSYLTPGDSSSGWTAGAAAYYVGYLQPRTFLLKYNENGTITDAVDCALDPLSETKCTLKSFTVEKGIYQTSNFRVQPTESIVRFPNITNLCPFGEVFNATRFASVYAWNRKRISNCVADYSVLYNSASFSTFKCYGVSPTKLNDLCFTNVYADSFVIRGDEVRQIAPGQTGKIADYNYKLPDDFTGCVIAWNSNNLDSKVGGNYNYLYRLFRKSNLKPFERDISTEIYQAGSTPCNGVEGFNCYFPLQSYGFQPTNGVGYQPYRVVVLSFELLHAPATVCGPKKSTNLVKNKCVNFNFNGLTGTGVLTESNKKFLPFQQFGRDIADTTDAVRDPQTLEILDITPCSFGGVSVITPGTNTSNQVAVLYQGVNCTEVPVAIHADQLTPTWRVYSTGSNVFQTRAGCLIGAEHVNNSYECDIPIGAGICASYQTQTNSPRRARSVASQSIIAYTMSLGAENSVAYSNNSIAIPTNFTISVTTEILPVSMTKTSVDCTMYICGDSTECSNLLLQYGSFCTQLNRALTGIAVEQDKNTQEVFAQVKQIYKTPPIKDFGGFNFSQILPDPSKPSKRSFIEDLLFNKVTLADAGFIKQYGDCLGDIAARDLICAQKFNGLTVLPPLLTDEMIAQYTSALLAGTITSGWTFGAGAALQIPFAMQMAYRFNGIGVTQNVLYENQKLIANQFNSAIGKIQDSLFSTASALGKLQDVVNQNAQALNTLVKQLSSNFGAISSVLNDILSRLDKVEAEVQIDRLITGRLQSLQTYVTQQLIRAAEIRASANLAATKMSECVLGQSKRVDFCGKGYHLMSFPQSAPHGVVFLHVTYVPAQEKNFTTAPAICHDGKAHFPREGVFVSNGTHWFVTQRNFYEPQIITTDNTFVSGNCDVVIGIVNNTVYDPLQPELDSGGGSGGGQIYEGKLTAEGLRFGIVASRFNHALVDRLVEGAIDAIVRHGGREEDITLVRVPGSWEIPVAAGELARKEDIDAVIAIGVLIRGATPHFDYIASEVSKGLADLSLELRKPITFGVITADTLEQAIERAGTKHGNKGWEAALSAIEMANLFKSLR

SEQ ID NO: 7676 - protein, 1307 aa, Artificial Sequence
  SARS-CoV-2/Finland/FIN-313/2020__EPI_ISL_414641 spike protein (1-1147) LumSynth construct
MFVFLVLLPLVSSQCVNLTTRTQLPPAYTNSFTRGVYYPDKVFRSSVLHSTQDLFLPFFSNVTWFHAIHVSGTNGTKRFDNPVLPFNDGVYFASTEKSNIIRGWIFGTTLDSKTQSLLIVNNATNVVIKVCEFQFCNDPFLGVYYHKNNKSWMESEFRVYSSANNCTFEYVSQPFLMDLEGKQGNFKNLREFVFKNIDGYFKIYSKHTPINLVRDLPQGFSALEPLVDLPIGINITRFKTLLALHRSYLTPGDSSSGWTAGAAAYYVGYLQPRTFLLKYNENGTITDAVDCALDPLSETKCTLKSFTVEKGIYQTSNFRVQPTESIVRFPNITNLCPFGEVFNATRFASVYAWNRKRISNCVADYSVLYNSASFSTFKCYGVSPTKLNDLCFTNVYADSFVIRGDEVRQIAPGQTGKIADYNYKLPDDFTGCVIAWNSNNLDSKVGGNYNYLYRLFRKSNLKPFERDISTEIYQAGSTPCNGVEGFNCYFPLQSYGFQPTNGVGYQPYRVVVLSFELLHAPATVCGPKKSTNLVKNKCVNFNFNGLTGTGVLTESNKKFLPFQQFGRDIADTTDAVRDPQTLEILDITPCSFGGVSVITPGTNTSNQVAVLYQGVNCTEVPVAIHADQLTPTWRVYSTGSNVFQTRAGCLIGAEHVNNSYECDIPIGAGICASYQTQTNSPRRARSVASQSIIAYTMSLGAENSVAYSNNSIAIPTNFTISVTTEILPVSMTKTSVDCTMYICGDSTECSNLLLQYGSFCTQLNRALTGIAVEQDKNTQEVFAQVKQIYKTPPIKDFGGFNFSQILPDPSKPSKRSFIEDLLFNKVTLADAGFIKQYGDCLGDIAARDLICAQKFNGLTVLPPLLTDEMIAQYTSALLAGTITSGWTFGAGAALQIPFAMQMAYRFNGIGVTQNVLYENQKLIANQFNSAIGKIQDSLSSTASALGKLQDVVNQNAQALNTLVKQLSSNFGAISSVLNDILSRLDKVEAEVQIDRLITGRLQSLQTYVTQQLIRAAEIRASANLAATKMSECVLGQSKRVDFCGKGYHLMSFPQSAPHGVVFLHVTYVPAQEKNFTTAPAICHDGKAHFPREGVFVSNGTHWFVTQRNFYEPQIITTDNTFVSGNCDVVIGIVNNTVYDPLQPELDSGGGSGGGQIYEGKLTAEGLRFGIVASRFNHALVDRLVEGAIDAIVRHGGREEDITLVRVPGSWEIPVAAGELARKEDIDAVIAIGVLIRGATPHFDYIASEVSKGLADLSLELRKPITFGVITADTLEQAIERAGTKHGNKGWEAALSAIEMANLFKSLR

SEQ ID NO: 7677 - protein, 1307 aa, Artificial Sequence
  SARS-CoV-2/Netherlands/ZuidHolland_2/2020__EPI_ISL_414556 spike protein (1-1147) LumSynth construct
MFVFLVLLPLVSSQCVNLTTRTQLPPAYTNSFTRGVYYPDKVFRSSVLHSTQDLFLPFFSNVTWFHAIHVSGTNGTKRFDNPVLPFNDGVYFASTEKSNIIRGWIFGTTLDSKTQSLLIVNNATNVVIKVCEFQFCNDPFLGVYYHKNNKSWMESEFRVYSSANNCTFEYVSQPFLMDLEGKQGNFKNLREFVFKNIDGYFKIYSKHTPINLVRDLPQGFSALEPLVDLPIGINITRFQTLLALHRSYLTPGDSSSGWTAGAAAYYVGYLQPRTFLLKYNENGTITDAVDCALDPLSETKCTLKSFTVEKGIYQTSNFRVQPTESIVRFPNITNLCPFGEVFNATRFASVYAWNRKRISNCVADYSVLYNSASFSTFKCYGVSPTKLNDLCFTNVYADSFVIRGDEVRQIAPGQTGKIADYNYKLPDDFTGCVIAWNSNNLDSKVGGNYNYLYRLFRKSNLKPFERDISTEIYQAGSTPCNGVEGFNCYFPLQSYGFQPTNGVGYQPYRVVVLSFELLHAPATVCGPKKSTNLVKNKCVNFNFNGLTGTGVLTESNKKFLPFQQFGRDIADTTDAVRDPQTLEILDITPCSFGGVSVITPGTNTSNQVAVLYQGVNCTEVPVAIHADQLTPTWRVYSTGSNVFQTRAGCLIGAEHVNNSYECDIPIGAGICASYQTQTNSPRRARSVASQSIIAYTMSLGAENSVAYSNNSIAIPTNFTISVTTEILPVSMTKTSVDCTMYICGDSTECSNLLLQYGSFCTQLNRALTGIALEQDKNTQEVFAQVKQIYKTPPIKDFGGFNFSQILPDPSKPSKRSFIEDLLFNKVTLADAGFIKQYGDCLGDIAARDLICAQKFNGLTVLPPLLTDEMIAQYTSALLAGTITSGWTFGAGAALQIPFAMQMAYRFNGIGVTQNVLYENQKLIANQFNSAIGKIQDSLSSTASALGKLQDVVNQNAQALNTLVKQLSSNFGAISSVLNDILSRLDKVEAEVQIDRLITGRLQSLQTYVTQQLIRAAEIRASANLAATKMSECVLGQSKRVDFCGKGYHLMSFPQSAPHGVVFLHVTYVPAQEKNFTTAPAICHDGKAHFPREGVFVSNGTHWFVTQRNFYEPQIITTDNTFVSGNCDVVIGIVNNTVYDPLQPELDSGGGSGGGQIYEGKLTAEGLRFGIVASRFNHALVDRLVEGAIDAIVRHGGREEDITLVRVPGSWEIPVAAGELARKEDIDAVIAIGVLIRGATPHFDYIASEVSKGLADLSLELRKPITFGVITADTLEQAIERAGTKHGNKGWEAALSAIEMANLFKSLR

SEQ ID NO: 7678 - protein, 1307 aa, Artificial Sequence
  SARS-CoV-2/USA/WA-UW31/2020__EPI_ISL_414618 spike protein (1-1147) LumSynth construct
MFVFLVLLPLVSSQCVNLTTRTQLPPAYTNSFTRGVYYPDKVFRSSVLHSTQDLFLPFFSNVTWFHAIHVSGTNGTKRFDNPVLPFNDGVYFASTEKSNIIRGWIFGTTLDSKTQSLLIVNNATNVVIKVCEFQFCNDPFLGVYYHKNNKSWMESEFRVYSSANNCTFEYVSQPFLMDLEGKQGNFKNLREFVFKNIDGYFKIYSKHTPINLVRDLPQGFSALEPLVDLPIGINITRFQTLLALHRSYLTPGDSSSGWTAGAAAYYVGYLQPRTFLLKYNENGTITDAVDCALDPLSETKCTLKSFTVEKGIYQTSNFRVQPTESIVRFPNITNLCPFGEVFNATRFASVYAWNRKRISNCVADYSVLYNSASFSTFKCYGVSPTKLNDLCFTNVYADSFVIRGDEVRQIAPGQTGKIADYNYKLPDDFTGCVIAWNSNNLDSKVGGNYNYLYRLFRKSNLKPFERDISTEIYQAGSTPCNGAEGFNCYFPLQSYGFQPTNGVGYQPYRVVVLSFELLHAPATVCGPKKSTNLVKNKCVNFNFNGLTGTGVLTESNKKFLPFQQFGRDIADTTDAVRDPQTLEILDITPCSFGGVSVITPGTNTSNQVAVLYQDVNCTEVPVAIHADQLTPTWRVYSTGSNVFQTRAGCLIGAEHVNNSYECDIPIGAGICASYQTQTNSPRRARSVASQSIIAYTMSLGAENSVAYSNNSIAIPTNFTISVTTEILPVSMTKTSVDCTMYICGDSTECSNLLLQYGSFCTQLNRALTGIAVEQDKNTQEVFAQVKQIYKTPPIKDFGGFNFSQILPDPSKPSKRSFIEDLLFNKVTLADAGFIKQYGDCLGDIAARDLICAQKFNGLTVLPPLLTDEMIAQYTSALLAGTITSGWTFGAGAALQIPFAMQMAYRFNGIGVTQNVLYENQKLIANQFNSAIGKIQDSLSSTASALGKLQDVVNQNAQALNTLVKQLSSNFGAISSVLNDILSRLDKVEAEVQIDRLITGRLQSLQTYVTQQLIRAAEIRASANLAATKMSECVLGQSKRVDFCGKGYHLMSFPQSAPHGVVFLHVTYVPAQEKNFTTAPAICHDGKAHFPREGVFVSNGTHWFVTQRNFYEPQIITTDNTFVSGNCDVVIGIVNNTVYDPLQPELDSGGGSGGGQIYEGKLTAEGLRFGIVASRFNHALVDRLVEGAIDAIVRHGGREEDITLVRVPGSWEIPVAAGELARKEDIDAVIAIGVLIRGATPHFDYIASEVSKGLADLSLELRKPITFGVITADTLEQAIERAGTKHGNKGWEAALSAIEMANLFKSLR

SEQ ID NO: 7679 - protein, 1307 aa, Artificial Sequence
  SARS-CoV-2/South Korea/SNU01/2020__EPI_ISL_411929 spike protein (1-1147) LumSynth construct
MFVFLVLLPLVSSQCVNLTTRTQLPPAYTNSFTRGVYYPDKVFRSSVLHSTQDLFLPFFSNVTWFHAIHVSGTNGTKRFDNPVLPFNDGVYFASTEKSNIIRGWIFGTTLDSKTQSLLIVNNATNVVIKVCEFQFCNDPFLGVYYHKNNKSWMESEFRVYSSANNCTFEYVSQPFLMDLEGKQGNFKNLREFVFKNIDGYFKIYSKHTPINLVRDLPQGFWALEPLVDLPIGINITRFQTLLALHRSYLTPGDSSSGWTAGAAAYYVGYLQPRTFLLKYNENGTITDAVDCALDPLSETKCTLKSFTVEKGIYQTSNFRVQPTESIVRFPNITNLCPFGEVFNATRFASVYAWNRKRISNCVADYSVLYNSASFSTFKCYGVSPTKLNDLCFTNVYADSFVIRGDEVRQIAPGQTGKIADYNYKLPDDFTGCVIAWNSNNLDSKVGGNYNYLYRLFRKSNLKPFERDISTEIYQAGSTPCNGVEGFNCYFPLQSYGFQPTNGVGYQPYRVVVLSFELLHAPATVCGPKKSTNLVKNKCVNFNFNGLTGTGVLTESNKKFLPFQQFGRDIADTTDAVRDPQTLEILDITPCSFGGVSVITPGTNTSNQVAVLYQDVNCTEVPVAIHADQLTPTWRVYSTGSNVFQTRAGCLIGAEHVNNSYECDIPIGAGICASYQTQTNSPRRARSVASQSIIAYTMSLGAENSVAYSNNSIAIPTNFTISVTTEILPVSMTKTSVDCTMYICGDSTECSNLLLQYGSFCTQLNRALTGIAVEQDKNTQEVFAQVKQIYKTPPIKDFGGFNFSQILPDPSKPSKRSFIEDLLFNKVTLADAGFIKQYGDCLGDIAARDLICAQKFNGLTVLPPLLTDEMIAQYTSALLAGTITSGWTFGAGAALQIPFAMQMAYRFNGIGVTQNVLYENQKLIANQFNSAIGKIQDSLSSTASALGKLQDVVNQNAQALNTLVKQLSSNFGAISSVLNDILSRLDKVEAEVQIDRLITGRLQSLQTYVTQQLIRAAEIRASANLAATKMSECVLGQSKRVDFCGKGYHLMSFPQSAPHGVVFLHVTYVPAQEKNFTTAPAICHDGKAHFPREGVFVSNGTHWFVTQRNFYEPQIITTDNTFVSGNCDVVIGIVNNTVYDPLQPELDSGGGSGGGQIYEGKLTAEGLRFGIVASRFNHALVDRLVEGAIDAIVRHGGREEDITLVRVPGSWEIPVAAGELARKEDIDAVIAIGVLIRGATPHFDYIASEVSKGLADLSLELRKPITFGVITADTLEQAIERAGTKHGNKGWEAALSAIEMANLFKSLR

SEQ ID NO: 7680 - protein, 1307 aa, Artificial Sequence
  SARS-CoV-2/China/WF0004/2020__EPI_ISL_413694 spike protein (1-1147) LumSynth construct
MFVFLVLLPLVSSQCVNLTTRTQLPPAYTNSFTRGVYYPDKVFRSSVLHSTQDLFLPFFSNVTWFHAIHVSGTNGTKRFDNPVLPFNDGVYFASTEKSNIIRGWIFGTTLDSKTQSLLIVNNATNVVIKVCEFQFCNDPFLGVYYHKNNKSWTESEFRVYSSANNCTFEYVSQPFLMDLEGKQGNFKNLREFVFKNIDGYFKIYSKHTPINLVRDLPQGFSALEPLVDLPIGINITRFQTLLALHRSYLTPGDSSSGWTAGAAAYYVGYLQPRTFLLKYNENGTITDAVDCALDPLSETKCTLKSFTVEKGIYQTSNFRVQPTESIVRFPNITNLCPFGEVFNATRFASVYAWNRKRISNCVADYSVLYNSASFSTFKCYGVSPTKLNDLCFTNVYADSFVIRGDEVRQIAPGQTGKIADYNYKLPDDFTGCVIAWNSNNLDSKVGGNYNYLYRLFRKSNLKPFERDISTEIYQAGSTPCNGVEGFNCYFPLQSYGFQPTNGVGYQPYRVVVLSFELLHAPATVCGPKKSTNLVKNKCVNFNFNGLTGTGVLTESNKKFLPFQQFGRDIADTTDAVRDPQTLEILDITPCSFGGVSVITPGTNTSNQVAVLYQDVNCTEVPVAIHADQLTPTWRVYSTGSNVFQTRAGCLIGAEHVNNSYECDIPIGAGICASYQTQTNSPRRARSVASQSIIAYTMSLGAENSVAYSNNSIAIPTNFTISVTTEILPVSMTKTSVDCTMYICGDSTECSNLLLQYGSFCTQLNRALTGIAVEQDKNTQEVFAQVKQIYKTPPIKDFGGFNFSQILPDPSKPSKRSFIEDLLFNKVTLADAGFIKQYGDCLGDIAARDLICAQKFNGLTVLPPLLTDEMIAQYTSALLAGTITSGWTFGAGAALQIPFAMQMAYRFNGIGVTQNVLYENQKLIANQFNSAIGKIQDSLSSTASALGKLQDVVNQNAQALNTLVKQLSSNFGAISSVLNDILSRLDKVEAEVQIDRLITGRLQSLQTYVTQQLIRAAEIRASANLAATKMSECVLGQSKRFDFCGKGYHLMSFPQSAPHGVVFLHVTYVPAQEKNFTTAPAICHDGKAHFPREGVFVSNGTHWFVTQRNFYEPQIITTDNTFVSGNCDVVIGIVNNTVYDPLQPELDSGGGSGGGQIYEGKLTAEGLRFGIVASRFNHALVDRLVEGAIDAIVRHGGREEDITLVRVPGSWEIPVAAGELARKEDIDAVIAIGVLIRGATPHFDYIASEVSKGLADLSLELRKPITFGVITADTLEQAIERAGTKHGNKGWEAALSAIEMANLFKSLR

SEQ ID NO: 7681 - protein, 1307 aa, Artificial Sequence
  SARS-CoV-2/China/WF0028/2020__EPI_ISL_413791 spike protein (1-1147) LumSynth construct
MFVFLVLLPLVSSQCVNLTTRTQLPPAYTNSFTRGVYYPDKVFRSSVLHSTQDLFLPFFSNVTWFHAIHVSGTNGTKRFDNPVLPFNDGVYFASTEKSNIIRGWIFGTTLDSKTQSLLIVNNATNVVIKVCEFQFCNDPFLGVYYHKNNKSWMESEFRVYSSANNCTFEYVSQPFLMDLEGKQGNFKNLREFVFKNIDGYFKIYSKHTPINLVRDLPQGFSALEPLVDLPIGINITRFQTLLALHRSYLTPGDSSSGWTAGAAAYYVGYLQPRTFLLKYNENGTITDAVDCALDPLSETKCTLKSFTVEKGIYQTSNFRVQPTESIVRFPNITNLCPFGEVFNATRFASVYAWNRKRISNCVADYSVLYNSASFSTFKCYGVSPTKLNDLCFTNVYADSFVIRGDEVRQIAPGQTGKIADYNYKLPDDFTGCVIAWNSNNLDSKVGGNYNYLYRLFRKSNLKPFERDISTEIYQAGSTPCNGVEGFNCYFPLQSYGFQPTNGVGYQPYRVVVLSFELLHAPATVCGPKKSTNLVKNKCVNFNFNGLTGTGVLTESNKKFLPFQQFGRDIADTTDAVRDPQTLEILDITPCSFGGVSVITPGTNTSNQVAVLYQDVNCTEVPVAIHADQLTPTWRVYSTGSNVFQTRAGCLIGAEHVNNSYECDIPIGAGICASYQTQTNSPRRARSVASQSIIAYTMSLGAENSVAYSNNSIAIPTNFTISVTTEILPVSMTKTSVDCTMYICGDSTECSNLLLQYGSFCTQLNRALTGIAVEQDKNTQEVFAQVKQIYKTPPIKDFGGFNFSQILPDPSKPSKRSFIEDLLFNKVTLADAGFIKQYGDCLGDIAARDLICAQKFNGLTVLPPLLTDEMIAQYTSALLAGTITSGWTFGAGAALQIPFAMQMAYRFNGIGVTQNVLYENQKLIANQFNSAIGKIQDSLSSTASALGKLQDVVNQNAQALNTLVKQLSSNFGAISSVLNDILSRLDKVEAEVQIDRLITGRLQSLQTYVTQQLIRAAEIRASANLAATKMSECVLGQSKRVDFCGKGYHLMSFPQSAPHGVVFLHVTYVPAQEKNFTTAPAICHDGKAHFPREGVFVSNGTHWFVTQRNFYEPQIITTDNTFVSGNCDVVIGIVNNTVYDPLQPELESGGGSGGGQIYEGKLTAEGLRFGIVASRFNHALVDRLVEGAIDAIVRHGGREEDITLVRVPGSWEIPVAAGELARKEDIDAVIAIGVLIRGATPHFDYIASEVSKGLADLSLELRKPITFGVITADTLEQAIERAGTKHGNKGWEAALSAIEMANLFKSLR

SEQ ID NO: 7682 - protein, 1307 aa, Artificial Sequence
  SARS-CoV-2/2019-nCoV/USA-CruiseA-18/2020__MT159716.1 spike protein (1-1147) LumSynth construct
MFVFLVLLPLVSSQCVNLTTRTQLPPAYTNSFTRGVYYPDKVFRSSVLHSTQDLFLPFFSNVTWFHAIHVSGTNGTKRFDNPVLPFNDGVYFASTEKSNIIRGWIFGTTLDSKTQSLLIVNNATNVVIKVCEFQFCNDPFLGVYYHKNNKSWMESELRVYSSANNCTFEYVSQPFLMDLEGKQGNFKNLREFVFKNIDGYFKIYSKHTPINLVRDLPQGFSALEPLVDLPIGINITRFQTLLALHRSYLTPGDSSSGWTAGAAAYYVGYLQPRTFLLKYNENGTITDAVDCALDPLSETKCTLKSFTVEKGIYQTSNFRVQPTESIVRFPNITNLCPFGEVFNATRFASVYAWNRKRISNCVADYSVLYNSASFSTFKCYGVSPTKLNDLCFTNVYADSFVIRGDEVRQIAPGQTGKIADYNYKLPDDFTGCVIAWNSNNLDSKVGGNYNYLYRLFRKSNLKPFERDISTEIYQAGSTPCNGVEGFNCYFPLQSYGFQPTNGVGYQPYRVVVLSFELLHAPATVCGPKKSTNLVKNKCVNFNFNGLTGTGVLTESNKKFLPFQQFGRDIADTTDAVRDPQTLEILDITPCSFGGVSVITPGTNTSNQVAVLYQDVNCTEVPVAIHADQLTPTWRVYSTGSNVFQTRAGCLIGAEHVNNSYECDIPIGAGICASYQTQTNSPRRARSVASQSIIAYTMSLGAENSVAYSNNSIAIPTNFTISVTTEILPVSMTKTSVDCTMYICGDSTECSNLLLQYGSFCTQLNRALTGIAVEQDKNTQEVFAQVKQIYKTPPIKDFGGFNFSQILPDPSKPSKRSFIEDLLFNKVTLADAGFIKQYGDCLGDIAARDLICAQKFNGLTVLPPLLTDEMIAQYTSALLAGTITSGWTFGAGAALQIPFAMQMAYRFNGIGVTQNVLYENQKLIANQFNSAIGKIQDSLSSTASALGKLQDVVNQNAQALNTLVKQLSSNFGAISSVLNDILSRLDKVEAEVQIDRLITGRLQSLQTYVTQQLIRAAEIRASANLAATKMSECVLGQSKRVDFCGKGYHLMSFPQSAPHGVVFLHVTYVPAQEKNFTTAPAICHDGKAHFPREGVFVSNGTHWFVTQRNFYEPQIITTDNTFVSGNCDVVIGIVNNTVYDPLQPELDSGGGSGGGQIYEGKLTAEGLRFGIVASRFNHALVDRLVEGAIDAIVRHGGREEDITLVRVPGSWEIPVAAGELARKEDIDAVIAIGVLIRGATPHFDYIASEVSKGLADLSLELRKPITFGVITADTLEQAIERAGTKHGNKGWEAALSAIEMANLFKSLR

SEQ ID NO: 7683 - protein, 1307 aa, Artificial Sequence
  SARS-CoV-2/SARS-CoV-2/Yunnan-01/human/2020/CHN__MT049951.1 spike protein (1-1147) LumSynth construct
MFVFLVLLPLVSSQCVNLTTRTQLPPANTNSFTRGVYYPDKVFRSSVLHSTQDLFLPFFSNVTWFHAIHVSGTNGTKRFDNPVLPFNDGVYFASTEKSNIIRGWIFGTTLDSKTQSLLIVNNATNVVIKVCEFQFCNDPFLGVYYHKNNKSWMESEFRVYSSANNCTFEYVSQPFLMDLEGKQGNFKNLREFVFKNIDGYFKIYSKHTPINLVRDLPQGFSALEPLVDLPIGINITRFQTLLALHRSYLTPGDSSSGWTAGAAAYYVGYLQPRTFLLKYNENGTITDAVDCALDPLSETKCTLKSFTVEKGIYQTSNFRVQPTESIVRFPNITNLCPFGEVFNATRFASVYAWNRKRISNCVADYSVLYNSASFSTFKCYGVSPTKLNDLCFTNVYADSFVIRGDEVRQIAPGQTGKIADYNYKLPDDFTGCVIAWNSNNLDSKVGGNYNYLYRLFRKSNLKPFERDISTEIYQAGSTPCNGVEGFNCYFPLQSYGFQPTNGVGYQPYRVVVLSFELLHAPATVCGPKKSTNLVKNKCVNFNFNGLTGTGVLTESNKKFLPFQQFGRDIADTTDAVRDPQTLEILDITPCSFGGVSVITPGTNTSNQVAVLYQDVNCTEVPVAIHADQLTPTWRVYSTGSNVFQTRAGCLIGAEHVNNSYECDIPIGAGICASYQTQTNSPRRARSVASQSIIAYTMSLGAENSVAYSNNSIAIPTNFTISVTTEILPVSMTKTSVDCTMYICGDSTECSNLLLQYGSFCTQLNRALTGIAVEQDKNTQEVFAQVKQIYKTPPIKDFGGFNFSQILPDPSKPSKRSFIEDLLFNKVTLADAGFIKQYGDCLGDIAARDLICAQKFNGLTVLPPLLTDEMIAQYTSALLAGTITSGWTFGAGAALQIPFAMQMAYRFNGIGVTQNVLYENQKLIANQFNSAIGKIQDSLSSTASALGKLQDVVNQNAQALNTLVKQLSSNFGAISSVLNDILSRLDKVEAEVQIDRLITGRLQSLQTYVTQQLIRAAEIRASANLAATKMSECVLGQSKRVDFCGKGYHLMSFPQSAPHGVVFLHVTYVPAQEKNFTTAPAICHDGKAHFPREGVFVSNGTHWFVTQRNFYEPQIITTDNTFVSGNCDVVIGIVNNTVYDPLQPELDSGGGSGGGQIYEGKLTAEGLRFGIVASRFNHALVDRLVEGAIDAIVRHGGREEDITLVRVPGSWEIPVAAGELARKEDIDAVIAIGVLIRGATPHFDYIASEVSKGLADLSLELRKPITFGVITADTLEQAIERAGTKHGNKGWEAALSAIEMANLFKSLR

SEQ ID NO: 7684 - protein, 1307 aa, Artificial Sequence
  SARS-CoV-2/USA/WA-UW292/2020__EPI_ISL_418077 spike protein (1-1147) LumSynth construct
MFVFLVLLPLVSSQCVNLTTRTQLPPAYTNSFTRGVYYPDKVFRSSVLHSTQDLFLPFFSNVTWFHAIHVSGTNGTKRFDNPVLPFNDGVYFASTEKSNIIRGWIFGTTLDSKTQSLLIVNNATNVVIKVCEFQFCNDPFLGVYYHKNNKSWMESEFRVYSSANNCTFEYVSQPFLMDLEGKQGNFKNLREFVFKNIDGYFKIYSKHTPINLVRDLPQGFSALEPLVDLPIGINITRFQTLLALHRSYLTPGDSSSGWTAGAAAYYVGYLQPRTFLLKYNENGTITDAVDCALDPLSETKCTLKSFTVEKGIYQTSNFRVQPTESIVRFPNITNLCPFGEVFNATRFASVYAWNRKRISNCVADYSVLYNSASFSTFKCYGVSPTKLNDLCFTNVYADSFVIRGDEVRQIAPGQTGKIADYNYKLPDDFTGCVIAWNSNNLDSKVGGNYNYLYRLFRKSNLKPFERDISTEIYQASSTPCNGVEGFNCYFPLQSYGFQPTNGVGYQPYRVVVLSFELLHAPATVCGPKKSTNLVKNKCVNFNFNGLTGTGVLTESNKKFLPFQQFGRDIADTTDAVRDPQTLEILDITPCSFGGVSVITPGTNTSNQVAVLYQDVNCTEVPVAIHADQLTPTWRVYSTGSNVFQTRAGCLIGAEHVNNSYECDIPIGAGICASYQTQTNSPRRARSVASQSIIAYTMSLGAENSVAYSNNSIAIPTNFTISVTTEILPVSMTKTSVDCTMYICGDSTECSNLLLQYGSFCTQLNRALTGIAVEQDKNTQEVFAQVKQIYKTPPIKDFGGFNFSQILPDPSKPSKRSFIEDLLFNKVTLADAGFIKQYGDCLGDIAARDLICAQKFNGLTVLPPLLTDEMIAQYTSALLAGTITSGWTFGAGAALQIPFAMQMAYRFNGIGVTQNVLYENQKLIANQFNSAIGKIQDSLSSTASALGKLQDVVNQNAQALNTLVKQLSSNFGAISSVLNDILSRLDKVEAEVQIDRLITGRLQSLQTYVTQQLIRAAEIRASANLAATKMSECVLGQSKRVDFCGKGYHLMSFPQSAPHGVVFLHVTYVPAQEKNFTTAPAICHDGKAHFPREGVFVSNGTHWFVTQRNFYEPQIITTDNTFVSGNCDVVIGIVNNTVYDPLQPELDSGGGSGGGQIYEGKLTAEGLRFGIVASRFNHALVDRLVEGAIDAIVRHGGREEDITLVRVPGSWEIPVAAGELARKEDIDAVIAIGVLIRGATPHFDYIASEVSKGLADLSLELRKPITFGVITADTLEQAIERAGTKHGNKGWEAALSAIEMANLFKSLR

SEQ ID NO: 7685 - protein, 1307 aa, Artificial Sequence
  SARS-CoV-2/Iceland/192/2020__EPI_ISL_417819 spike protein (1-1147) LumSynth construct
MFVFFVLLPLVSSQCVNLTTRTQLPPAYTNSFTRGVYYPDKVFRSSVLHSTQDLFLPFFSNVTWFHAIHVSGTNGTKRFDNPVLPFNDGVYFASTEKSNIIRGWIFGTTLDSKTQSLLIVNNATNVVIKVCEFQFCNDPFLGVYYHKNNKSWMESEFRVYSSANNCTFEYVSQPFLMDLEGKQGNFKNLREFVFKNIDGYFKIYSKHTPINLVRDLPQGFSALEPLVDLPIGINITRFQTLLALHRSYLTPGDSSSGWTAGAAAYYVGYLQPRTFLLKYNENGTITDAVDCALDPLSETKCTLKSFTVEKGIYQTSNFRVQPTESIVRFPNITNLCPFGEVFNATRFASVYAWNRKRISNCVADYSVLYNSASFSTFKCYGVSPTKLNDLCFTNVYADSFVIRGDEVRQIAPGQTGKIADYNYKLPDDFTGCVIAWNSNNLDSKVGGNYNYLYRLFRKSNLKPFERDISTEIYQAGSTPCNGVEGFNCYFPLQSYGFQPTNGVGYQPYRVVVLSFELLHAPATVCGPKKSTNLVKNKCVNFNFNGLTGTGVLTESNKKFLPFQQFGRDIADTTDAVRDPQTLEILDITPCSFGGVSVITPGTNTSNQVAVLYQGVNCTEVPVAIHADQLTPTWRVYSTGSNVFQTRAGCLIGAEHVNNSYECDIPIGAGICASYQTQTNSPRRARSVASQSIIAYTMSLGAENSVAYSNNSIAIPTNFTISVTTEILPVSMTKTSVDCTMYICGDSTECSNLLLQYGSFCTQLNRALTGIAVEQDKNTQEVFAQVKQIYKTPPIKDFGGFNFSQILPDPSKPSKRSFIEDLLFNKVTLADAGFIKQYGDCLGDIAARDLICAQKFNGLTVLPPLLTDEMIAQYTSALLAGTITSGWTFGAGAALQIPFAMQMAYRFNGIGVTQNVLYENQKLIANQFNSAIGKIQDSLSSTASALGKLQDVVNQNAQALNTLVKQLSSNFGAISSVLNDILSRLDKVEAEVQIDRLITGRLQSLQTYVTQQLIRAAEIRASANLAATKMSECVLGQSKRVDFCGKGYHLMSFPQSAPHGVVFLHVTYVPAQEKNFTTAPAICHDGKAHFPREGVFVSNGTHWFVTQRNFYEPQIITTDNTFVSGNCDVVIGIVNNTVYDPLQPELDSGGGSGGGQIYEGKLTAEGLRFGIVASRFNHALVDRLVEGAIDAIVRHGGREEDITLVRVPGSWEIPVAAGELARKEDIDAVIAIGVLIRGATPHFDYIASEVSKGLADLSLELRKPITFGVITADTLEQAIERAGTKHGNKGWEAALSAIEMANLFKSLR

SEQ ID NO: 7686 - protein, 1307 aa, Artificial Sequence
  SARS-CoV-2/Belgium/ULG-6939/2020__EPI_ISL_417020 spike protein (1-1147) LumSynth construct
MFVFLVLLPLVSSQCVNLTTRTQLPPAYTNSFTRGVYYPDKVFRSSVLHSTQDLFLPFFSNVTWFHAIHVSGTNGTKRFDNPVLPFNDGVYFASTEKSNIIRGWIFGTTLDSKTQSLLIVNNATNVVIKVCEFQFCNDPFLGVYYHKNNKSWMESEFRVYSSANNCTFEYVSQPFLMDLEGKQGNFKNLREFVFKNIDGYFKIYSKHTPINLVRDLPQGFSALEPLVDLPIGINITRFQTLLALHRSYLTPGDSSSGWTAGAAAYYVGYLQPRTFLLKYNENGTITDAVDCALDPLSETKCTLKSFTVEKGIYQTSNFRVQPTESIVRFPNITNLCPFGEVFNATRFASVYAWNRKRISNCVADYSVLYNSASFSTFKCYGVSPTKLNDLCFTNVYADSFVIRGDEVRQIAPGQTGKIADYNYKLPDDFTGCVIAWNSNNLDSKVGGNYNYLYRLFRKSNLKPFERDISTEIYQAGSTPCNGVEGFNCYFPLQSYGFQPTNGVGYQPYRVVVLSFELLHAPATVCGPKKSTNLVKNKCVNFNFNGLTGTGVLTESNKKFLPFQQFGRDIADTTDAVRDPQTLEILDITPCSFGGVSVITPGTNTSNQVAVLYQGVNCTEVPVAIHADQLTPTWRVYSTGSNVFQTRAGCLIGAEHVNNSYECDIPIGAGICASYQTQTNSPRRARSVASQSIIAYTMSLGAENSVVYSNNSIAIPTNFTISVTTEILPVSMTKTSVDCTMYICGDSTECSNLLLQYGSFCTQLNRALTGIAVEQDKNTQEVFAQVKQIYKTPPIKDFGGFNFSQILPDPSKPSKRSFIEDLLFNKVTLADAGFIKQYGDCLGDIAARDLICAQKFNGLTVLPPLLTDEMIAQYTSALLAGTITSGWTFGAGAALQIPFAMQMAYRFNGIGVTQNVLYENQKLIANQFNSAIGKIQDSLSSTASALGKLQDVVNQNAQALNTLVKQLSSNFGAISSVLNDILSRLDKVEAEVQIDRLITGRLQSLQTYVTQQLIRAAEIRASANLAATKMSECVLGQSKRVDFCGKGYHLMSFPQSAPHGVVFLHVTYVPAQEKNFTTAPAICHDGKAHFPREGVFVSNGTHWFVTQRNFYEPQIITTDNTFVSGNCDVVIGIVNNTVYDPLQPELDSGGGSGGGQIYEGKLTAEGLRFGIVASRFNHALVDRLVEGAIDAIVRHGGREEDITLVRVPGSWEIPVAAGELARKEDIDAVIAIGVLIRGATPHFDYIASEVSKGLADLSLELRKPITFGVITADTLEQAIERAGTKHGNKGWEAALSAIEMANLFKSLR

SEQ ID NO: 7687 - protein, 1307 aa, Artificial Sequence
  SARS-CoV-2/France/HF2496/2020__EPI_ISL_418231 spike protein (1-1147) LumSynth construct
MFVFLVLLPLVSSQCVNLTTRTQLPPAYTNSFTRGVYYPDKVFRSSVLHSTQDLFLPFFSNVTWFHAIHVSGTNGTKRFDNPVLPFNDGVYFASTEKSNIIRGWIFGTTLDSKTQSLLIVNNATNVVIKVCEFQFCNDPFLGVYYHKNNKSWMESEFRVYSSANNCTFEYVSQPFLMDLEGKQGNFKNLREFVFKNIDGYFKIYSKHTPINLVRDLPQGFSALEPLVDLPIGINITRFQTLLALHRSYLTPGDSSSGWTAGAAAYYVGYLQPRTFLLKYNENGTITDAVDCALDPLSETKCTLKSFTVEKGIYQTSNFRVQPTESIVRFPNITNLCPFGEVFNATRFASVYAWNRKRISNCVADYSVLYNSASFSTFKCYGVSPTKLNDLCFTNVYADSFVIRGDEVRQIAPGQTGKIADYNYKLPDDFTGCVIAWNSNNLDSKVGGNYNYLYRLFRKSNLKPFERDISTEIYQAGSTPCNGVEGFNCYFPLQSYGFQPTNGVGYQPYRVVVLSFELLHAPATVCGPKKSTNLVKNKCVNFNFNGLTGTGVLTESNKKFLPFQQFGRDIADTTDAVRDPQTLEILDITPCSFGGVSVITPGTNTSNQVAVLYQGVNCTEVPVAIHADQLTPTWRVYSTGSNVFQTRAGCLIGAEHVNNSYECDIPIGAGICASYQTQTNSPRRARSVASQSIIAYTMSLGAENSVAYSNNSIAIPTNFTISVTTEILPVSMTKTSVDCTMYICGDSTECSNLLLQYGSFCTQLNRALTGIAVEQDKNTQEVFAQVKQIYKTPPIKDFGGFNFSQILPDPSKPSKRSFIEDLLFNKVTLADAGFIKQYGDCLGDIVARDLICAQKFNGLTVLPPLLTDEMIAQYTSALLAGTITSGWTFGAGAALQIPFAMQMAYRFNGIGVTQNVLYENQKLIANQFNSAIGKIQDSLSSTASALGKLQDVVNQNAQALNTLVKQLSSNFGAISSVLNDILSRLDKVEAEVQIDRLITGRLQSLQTYVTQQLIRAAEIRASANLAATKMSECVLGQSKRVDFCGKGYHLMSFPQSAPHGVVFLHVTYVPAQEKNFTTAPAICHDGKAHFPREGVFVSNGTHWFVTQRNFYEPQIITTDNTFVSGNCDVVIGIVNNTVYDPLQPELDSGGGSGGGQIYEGKLTAEGLRFGIVASRFNHALVDRLVEGAIDAIVRHGGREEDITLVRVPGSWEIPVAAGELARKEDIDAVIAIGVLIRGATPHFDYIASEVSKGLADLSLELRKPITFGVITADTLEQAIERAGTKHGNKGWEAALSAIEMANLFKSLR

SEQ ID NO: 7688 - protein, 1307 aa, Artificial Sequence
  SARS-CoV-2/USA/WA-UW291/2020__EPI_ISL_418076 spike protein (1-1147) LumSynth construct
MFVFLVLLPLVSSQCVNLTTRTQLPPAYTNSFTRGVYYPDKVFRSSVLHSTQDLFLPFFSNVTWFHAIHVSGTNGTKRFDNPVLPFNDGVYFASTEKSNIIRGWIFGTTLDSKTQSLLIVNNATNVVIKVCEFQFCNDPFLGVYYHKNNKSWMESEFRVYSSANNCTFEYVSQPFLMDLEGKQGNFKNLREFVFKNIDGYFKIYSKHTPINLVRDLPQGFSALEPLVDLPIGINITRFQTLLALHRSYLTPGDSSSGWTAGAAAYYVGYLQPRTFLLKYNENGTITDAVDCALDPLSETKCTLKSFTVEKGIYQTSNFRVQPTESIVRFPNITNLCPFGEVFNATRFASVYAWNRKRISNCVADYSVLYNSASFSTFKCYGVSPTKLNDLCFTNVYADSFVIRGDEVRQIAPGQTGKIADYNYKLPDDFTGCVIAWNSNNLDSKVGGNYNYLYRLFRKSNLKPFERDISTEIYQAGSTPCNGVEGFNCYFPLQSYGFQPTNGVGYQPYRVVVLSFELLHAPATVCGPKKSTNLVKNKCVNFNFNGLTGTGVLTESNKKFLPFQQFGRDIADTTDAVRDPQTLEILDITPCSFGGVSVITPGTNTSNQVAVLYQGVNCTEVPVAIHADQLTPTWRVYSTGSNVFQTRAGCLIGAEHVNNSYECDIPIGAGICASYQTQTNSPRRARSVASQSIIAYTMSLGAENSVAYSNNSIAIPTNFTISVTTEILPVSMTKTSVDCTMYICGDSTECSNLLLQYGSFCTQLNRALTGIAVEQDKNTQEVFAQVKQIYKTPPIKDFGGFNFSQILPDPSKPSKRSFIEDLLFNKVTLADAGFIKQYGDCLGDIAARDLICAQKFNGLTVLPPLLTDEMIAQYTSALLAGTITSGWTFGAGAALQIPFAMQMAYRFNGIGVTQNVLYENQKLIANQFNSAIGKIQYSLSSTASALGKLQDVVNQNAQALNTLVKQLSSNFGAISSVLNDILSRLDKVEAEVQIDRLITGRLQSLQTYVTQQLIRAAEIRASANLAATKMSECVLGQSKRVDFCGKGYHLMSFPQSAPHGVVFLHVTYVPAQEKNFTTAPAICHDGKAHFPREGVFVSNGTHWFVTQRNFYEPQIITTDNTFVSGNCDVVIGIVNNTVYDPLQPELDSGGGSGGGQIYEGKLTAEGLRFGIVASRFNHALVDRLVEGAIDAIVRHGGREEDITLVRVPGSWEIPVAAGELARKEDIDAVIAIGVLIRGATPHFDYIASEVSKGLADLSLELRKPITFGVITADTLEQAIERAGTKHGNKGWEAALSAIEMANLFKSLR

SEQ ID NO: 7689 - protein, 1307 aa, Artificial Sequence; identical to SEQ ID NO: 7652
  SARS-CoV-2/Portugal/PT0034/2020__EPI_ISL_418019 spike protein (1-1147) LumSynth construct

SEQ ID NO: 7690 - protein, 1307 aa, Artificial Sequence; identical to SEQ ID NO: 7644
  SARS-CoV-2/Iceland/202/2020__EPI_ISL_417750 spike protein (1-1147) LumSynth construct

SEQ ID NO: 7691 - protein, 1307 aa, Artificial Sequence
  SARS-CoV-2/USA/WA-UW261/2020__EPI_ISL_418046 spike protein (1-1147) LumSynth construct
MFVFLVLLPLVSSQCVNLTTRTQLPPAYTNSFTRGVYYPDKVFRSSVLHSTQDLFLPFFSNVTWFHAIHVSGTNGTKRFDNPVLPFNDGVYFASTEKSNIIRGWIFGTTLDSKTQSLLIVNNATNVVIKVCEFQFCNDPFLGVYYHKNNKSWMESEFRVYSSANNCTFEYVSQPFLMDLEGKQGNFKNLREFVFKNIDGYFKIYSKHTPINLVRDLPQGFSALEPLVDLPIGINITRFQTLLALHRSYLTPGDSSSGWTAGAAAYYVGYLQPRTFLLKYNENGTITDAVDCALDPLSETKCTLKSFTVEKGIYQTSNFRVQPTESIVRFPNITNLCPFGEVFNATRFTSVYAWNRKRISNCVADYSVLYNSASFSTFKCYGVSPTKLNDLCFTNVYADSFVIRGDEVRQIAPGQTGKIADYNYKLPDDFTGCVIAWNSNNLDSKVGGNYNYLYRLFRKSNLKPFERDISTEIYQAGSTPCNGVEGFNCYFPLQSYGFQPTNGVGYQPYRVVVLSFELLHAPATVCGPKKSTNLVKNKCVNFNFNGLTGTGVLTESNKKFLPFQQFGRDIADTTDAVRDPQTLEILDITPCSFGGVSVITPGTNTSNQVAVLYQDVNCTEVPVAIHADQLTPTWRVYSTGSNVFQTRAGCLIGAEHVNNSYECDIPIGAGICASYQTQTNSPRRARSVASQSIIAYTMSLGAENSVAYSNNSIAIPTNFTISVTTEILPVSMTKTSVDCTMYICGDSTECSNLLLQYGSFCTQLNRALTGIAVEQDKNTQEVFAQVKQIYKTPPIKDFGGFNFSQILPDPSKPSKRSFIEDLLFNKVTLADAGFIKQYGDCLGDIAARDLICAQKFNGLTVLPPLLTDEMIAQYTSALLAGTITSGWTFGAGAALQIPFAMQMAYRFNGIGVTQNVLYENQKLIANQFNSAIGKIQDSLSSTASALGKLQDVVNQNAQALNTLVKQLSSNFGAISSVLNDILSRLDKVEAEVQIDRLITGRLQSLQTYVTQQLIRAAEIRASANLAATKMSECVLGQSKRVDFCGKGYHLMSFPQSAPHGVVFLHVTYVPAQEKNFTTAPAICHDGKAHFPREGVFVSNGTHWFVTQRNFYEPQIITTDNTFVSGNCDVVIGIVNNTVYDPLQPELDSGGGSGGGQIYEGKLTAEGLRFGIVASRFNHALVDRLVEGAIDAIVRHGGREEDITLVRVPGSWEIPVAAGELARKEDIDAVIAIGVLIRGATPHFDYIASEVSKGLADLSLELRKPITFGVITADTLEQAIERAGTKHGNKGWEAALSAIEMANLFKSLR

SEQ ID NO: 7692 - protein, 1307 aa, Artificial Sequence
  SARS-CoV-2/Portugal/PT0035/2020__EPI_ISL_418020 spike protein (1-1147) LumSynth construct
MFVFLVLLPLVSSQCVNLTTRTQLPPAYTNSFTRGVYYPDKVFRSSVLHSTQDLFLPFFSNVTWFHAIHVSGTNGTKRFDNPVLPFNDGVYFASTEKSNIIRGWIFGTTLDSKTQSLLIVNNATNVVIKVCEFQFCNDPFLGVYYHKNNKSWMESEFRVYSSANNCTFEYVSQPFLMDLEGKQGNFKNLREFVFKNIDGYFKIYSKHTPINLVRDLPQGFSALEPLVDLPIGINITRFQTLLALHRSYLTPGDSSSGWTAGAAAYYVGYLQPRTFLLKYNENGTITDAVDCALDPLSETKCTLKSFTVEKGIYQTSNFRVQPTESIVRFPNITNLCPFGEVFNATRFASVYAWNRKRISNCVADYSVLYNSASFSTFKCYGVSPTKLNDLCFTNVYADSFVIRGDEVRQIAPGQTGKIADYNYKLPDDFTGCVIAWNSNNLDSKVGGNYNYLYRLFRKSNLKPFERDISTEIYQAGSTPCNGVEGFNCYFPLQSYGFQPTNGVGYQPYRVVVLSFELLHAPATVCGPKKSTNLVKNKCVNFNFNGLTGTGVLTESNKKFLPFQQFGRDIADTTDAVRDPQTLEILDITPCSFGGVSVITPGTNTSNQVAVLYQDVNCTEVPVAIHADQLTPTWRVYSTGSNVFQTRAGCLIGAEHVNNSYECDIPIGAGICASYQTQTNSPRRARSVASQSIIAYTMSLGAENSVAYSNNSIAIPTNFTISVTTEILPVSMTKTSVDCTMYICGDSTECSNLLLQYGSFCTQLNRALTGIAVEQDKNTQEVFAQVKQIYKTPPIKDFGGFNFSQILPDPSKPSKRSFIEDLLFNKVTLADAGFIKQYGDCLGDISARDLICAQKFNGLTVLPPLLTDEMIAQYTSALLAGTITSGWTFGAGAALQIPFAMQMAYRFNGIGVTQNVLYENQKLIANQFNSAIGKIQDSLSSTASALGKLQDVVNQNAQALNTLVKQLSSNFGAISSVLNDILSRLDKVEAEVQIDRLITGRLQSLQTYVTQQLIRAAEIRASANLAATKMSECVLGQSKRVDFCGKGYHLMSFPQSAPHGVVFLHVTYVPAQEKNFTTAPAICHDGKAHFPREGVFVSNGTHWFVTQRNFYEPQIITTDNTFVSGNCDVVIGIVNNTVYDPLQPELDSGGGSGGGQIYEGKLTAEGLRFGIVASRFNHALVDRLVEGAIDAIVRHGGREEDITLVRVPGSWEIPVAAGELARKEDIDAVIAIGVLIRGATPHFDYIASEVSKGLADLSLELRKPITFGVITADTLEQAIERAGTKHGNKGWEAALSAIEMANLFKSLR

SEQ ID NO: 7693 - protein, 1307 aa, Artificial Sequence
  SARS-CoV-2/USA/NY-NYUMC7/2020__EPI_ISL_418192 spike protein (1-1147) LumSynth construct
MFVFLVLLPLVSSQCVNLTTRTQLPPAYTNSFTRGVYYPDKVFRSSVLHSTQDLFLPFFSNVTWFHAIHVSGTNGTKRFDNPVLPFNDGVYFASTEKSNIIRGWIFGTTLDSKTQSLLIVNNATNVVIKVCEFQFCNDPFLGVYHHKNNKSWMESEFRVYSSANNCTFEYVSQPFLMDLEGKQGNFKNLREFVFKNIDGYFKIYSKHTPINLVRDLPQGFSALEPLVDLPIGINITRFQTLLALHRSYLTPGDSSSGWTAGAAAYYVGYLQPRTFLLKYNENGTITDAVDCALDPLSETKCTLKSFTVEKGIYQTSNFRVQPTESIVRFPNITNLCPFGEVFNATRFASVYAWNRKRISNCVADYSVLYNSASFSTFKCYGVSPTKLNDLCFTNVYADSFVIRGDEVRQIAPGQTGKIADYNYKLPDDFTGCVIAWNSNNLDSKVGGNYNYLYRLFRKSNLKPFERDISTEIYQAGSTPCNGVEGFNCYFPLQSYGFQPTNGVGYQPYRVVVLSFELLHAPATVCGPKKSTNLVKNKCVNFNFNGLTGTGVLTESNKKFLPFQQFGRDIADTTDAVRDPQTLEILDITPCSFGGVSVITPGTNTSNQVAVLYQGVNCTEVPVAIHADQLTPTWRVYSTGSNVFQTRAGCLIGAEHVNNSYECDIPIGAGICASYQTQTNSPRRARSVASQSIIAYTMSLGAENSVAYSNNSIAIPTNFTISVTTEILPVSMTKTSVDCTMYICGDSTECSNLLLQYGSFCTQLNRALTGIAVEQDKNTQEVFAQVKQIYKTPPIKDFGGFNFSQILPDPSKPSKRSFIEDLLFNKVTLADAGFIKQYGDCLGDIAARDLICAQKFNGLTVLPPLLTDEMIAQYTSALLAGTITSGWTFGAGAALQIPFAMQMAYRFNGIGVTQNVLYENQKLIANQFNSAIGKIQDSLSSTASALGKLQDVVNQNAQALNTLVKQLSSNFGAISSVLNDILSRLDKVEAEVQIDRLITGRLQSLQTYVTQQLIRAAEIRASANLAATKMSECVLGQSKRVDFCGKGYHLMSFPQSAPHGVVFLHVTYVPAQEKNFTTAPAICHDGKAHFPREGVFVSNGTHWFVTQRNFYEPQIITTDNTFVSGNCDVVIGIVNNTVYDPLQPELDSGGGSGGGQIYEGKLTAEGLRFGIVASRFNHALVDRLVEGAIDAIVRHGGREEDITLVRVPGSWEIPVAAGELARKEDIDAVIAIGVLIRGATPHFDYIASEVSKGLADLSLELRKPITFGVITADTLEQAIERAGTKHGNKGWEAALSAIEMANLFKSLR

SEQ ID NO: 7694 - protein, 1307 aa, Artificial Sequence
  SARS-CoV-2/Iceland/189/2020__EPI_ISL_417709 spike protein (1-1147) LumSynth construct
MFVFLVLLPLVSSQCVNLTTRTQLPPAYTNSFTRGVYYPDKVFRSSVLHSTQDLFLPFFSNVTWFHAIHVSGTNGTKRFDNPVLPFNDGVYFASTEKSNIIRGWIFGTTLDSKTQSLLIVNNATNVVIKVCEFQFCNDPFLGVYYHKNNKSWMESEFRVYSSANNCTFEYVSQPFLMDLEGKQGNFKNLREFVFKNIDGYFKIYSKHTPINLVRDLPQGFSALEPLVDLPIGINITRFQTLLALHRSYLTPGDSSSGWTAGAAAYYVGYLQPRTFLLKYNENGTITDAVDCALDPLSETKCTLKSFTVEKGIYQTSNFRVQPTESIVRFPNITNLCPFGEVFNATRFASVYAWNRKRISNCVADYSVLYNSASFSTFKCYGVSPTKLNDLCFTNVYADSFVIRGDEVRQIAPGQTGKIADYNYKLPDDFTGCVIAWNSNNLDSKVGGNYNYLYRLFRKSNLKPFERDISTEIYQAGSTPCNGVEGFNCYFPLQSYGFQPTNGVGYQPYRVVVLSFELLHAPATVCGPKKSTNLVKNKCVNFNFNGLTGTGVLTESNKKFLPFQQFGRDIADTTDAVRDPQTLEILDITPCSFGGVSVITPGTNTSNQVAVLYQGVNCTEVPVAIHADQLTPTWRVYSTGSNVFQTRAGCLIGAEHVNNSYECDIPIGAGICASYQTQTNSPRRARSVASQSIIAYTMSLGAENSVAYSNNSIAIPTNFTISVTTEILPVSMTKTSVDCTMYICGDSTECSNLLLQYGSFCTQLNRALTGIAVEQDKNTQEVFAQVKQIYKTPPIKDFGGFNFSQILPDPSKPSKRSFIEDLLFNKVTLADAGFTKQYGDCLGDIAARDLICAQKFNGLTVLPPLLTDEMIAQYTSALLAGTITSGWTFGAGAALQIPFAMQMAYRFNGIGVTQNVLYENQKLIANQFNSAIGKIQDSLSSTASALGKLQDVVNQNAQALNTLVKQLSSNFGAISSVLNDILSRLDKVEAEVQIDRLITGRLQSLQTYVTQQLIRAAEIRASANLAATKMSECVLGQSKRVDFCGKGYHLMSFPQSAPHGVVFLHVTYVPAQEKNFTTAPAICHDGKAHFPREGVFVSNGTHWFVTQRNFYEPQIITTDNTFVSGNCDVVIGIVNNTVYDPLQPELDSGGGSGGGQIYEGKLTAEGLRFGIVASRFNHALVDRLVEGAIDAIVRHGGREEDITLVRVPGSWEIPVAAGELARKEDIDAVIAIGVLIRGATPHFDYIASEVSKGLADLSLELRKPITFGVITADTLEQAIERAGTKHGNKGWEAALSAIEMANLFKSLR

SEQ ID NO: 7695 - protein, 1307 aa, Artificial Sequence
  SARS-CoV-2/Australia/NSW56/2020__EPI_ISL_417408 spike protein (1-1147) LumSynth construct
MFVFLVLLPLVSSQCVNLTTRTQLPPAYTNSFTRGVYYPDKVFRSSVLHSTQDLFLPFFSNVTWFHAIHVSGTNGTKRFDNPVLPFNDGVYFASTEKSNIIRGWIFGTTLDSKTQSLLIVNNATNVVIKVCEFQFCNDPFLGVYYHKNNKSWMESEFRVYSSANNCTFEYVSQPFLMDLEGKQGNFKNLREFVFKNIDGYFKIYSKHTPINLVRDLPQGFSALEPLVDLPIGINITRFQTLLALHRSYLTPGDSSSGWTAGAAAYYVGYLQPRTFLLKYNENGTITDAVDCALDPLSETKCTLKSFTVEKGIYQTSNFRVQPTESIVRFPNITNLCPFGEVFNATRFASVYAWNRKRISNCVADYSVLYNSASFSTFKCYGVSPTKLNDLCFTNVYADSFVIRGDEVRQIAPGQTGKIADYNYKLPDDFTGCVIAWNSNNLDSKVGGNYNYLYRLFRKSNLKPFERDISTEIYQAGSTPCNGVEGFNCYFPLQSYGFQPTNGVGYQPYRVVVLSFELLHAPATVCGPKKSTNLVKNKCVNFNFNGLTGTGVLTESNKKFLPFQQFGRDIADTTDAVRDPQTLEILDITPCSFGGVSVITPGTNTSNQVAVLYQDVNCTEVPVAIHADQLTPTWRVYSTGSNVFQTRAGCLIGAEHVNNSYECDIPIGAGICASYQTQTNSPRRARSVASQSIIAYTMSLGAENSVAYSNNSIAIPTNFTISVTTEILPVSMTKTSVDCTMYICGDSTECSNLLLQYGSFCTQLNRALTGIAVEQDKNTQEVFAQVKQIYKTPPIKDFGGFNFSQILPDSSKPSKRSFIEDLLFNKVTLADAGFIKQYGDCLGDIAARDLICAQKFNGLTVLPPLLTDEMIAQYTSALLAGTITSGWTFGAGAALQIPFAMQMAYRFNGIGVTQNVLYENQKLIANQFNSAIGKIQDSLSSTASALGKLQDVVNQNAQALNTLVKQLSSNFGAISSVLNDILSRLDKVEAEVQIDRLITGRLQSLQTYVTQQLIRAAEIRASANLAATKMSECVLGQSKRVDFCGKGYHLMSFPQSAPHGVVFLHVTYVPAQEKNFTTAPAICHDGKAHFPREGVFVSNGTHWFVTQRNFYEPQIITTDNTFVSGNCDVVIGIVNNTVYDPLQPELDSGGGSGGGQIYEGKLTAEGLRFGIVASRFNHALVDRLVEGAIDAIVRHGGREEDITLVRVPGSWEIPVAAGELARKEDIDAVIAIGVLIRGATPHFDYIASEVSKGLADLSLELRKPITFGVITADTLEQAIERAGTKHGNKGWEAALSAIEMANLFKSLR

SEQ ID NO: 7696 - protein, 1307 aa, Artificial Sequence
  SARS-CoV-2/Iceland/280/2020__EPI_ISL_417608 spike protein (1-1147) LumSynth construct
MFVFLVLLPLVSSQCVNLTTRTQLPPAYTNSFTRGVYYPDKVFRSSVLHSTQDLFLPFFSNVTWFHAIHVSGTNGTKRFDNPVLPFNDGVYFASTEKSNIIRGWIFGTTLDSKTQSLLIVNNATNVVIKVCEFQFCNDPFLGVYYHKNNKSWMESEFRVYSSANNCTFEYVSQPFLMDLEGKQGNFKNLREFVFKNIDGYFKIYSKHTPINLVRDLPQGFSALEPLVDLPIGINITRFQTLLALHRSYLTPGDSSSGWTAGAAAYYVGYLQPRTFLLKYNENGTITDAVDCALDPLSETKCTLKSFTVEKGIYQTSNFRVQPTESIVRFPNITNLCPFGEVFNATRFASVYAWNRKRISNCVADYSVLYNSASFSTFKCYGVSPTKLNDLCFTNVYADSFVIRGDEVRQIAPGQTGKIADYNYKLPDDFTGCVIAWNSNNLDSKVGGNYNYLYRLFRKSNLKPFERDISTEIYQAGSTPCNGVEGFNCYFPLQSYGFQPTNGVGYQPYRVVVLSFELLHAPATVCGPKKSTNLVKNKCVNFNFNGLTGTGVLTESNKKFLPFQQFGRDIADTTDAVRDPQTLEILDITPCSFGGVSVITPGTNTSNQVAVLYQGVNCTEVPVAIHADQLTPTWRVYSTGSNVFQTRAGCLIGAEHVNNSYECDIPIGAGICASYHTQTNSPRRARSVASQSIIAYTMSLGAENSVAYSNNSIAIPTNFTISVTTEILPVSMTKTSVDCTMYICGDSTECSNLLLQYGSFCTQLNRALTGIAVEQDKNTQEVFAQVKQIYKTPPIKDFGGFNFSQILPDPSKPSKRSFIEDLLFNKVTLADAGFIKQYGDCLGDIAARDLICAQKFNGLTVLPPLLTDEMIAQYTSALLAGTITSGWTFGAGAALQIPFAMQMAYRFNGIGVTQNVLYENQKLIANQFNSAIGKIQDSLSSTASALGKLQDVVNQNAQALNTLVKQLSSNFGAISSVLNDILSRLDKVEAEVQIDRLITGRLQSLQTYVTQQLIRAAEIRASANLAATKMSECVLGQSKRVDFCGKGYHLMSFPQSAPHGVVFLHVTYVPAQEKNFTTAPAICHDGKAHFPREGVFVSNGTHWFVTQRNFYEPQIITTDNTFVSGNCDVVIGIVNNTVYDPLQPELDSGGGSGGGQIYEGKLTAEGLRFGIVASRFNHALVDRLVEGAIDAIVRHGGREEDITLVRVPGSWEIPVAAGELARKEDIDAVIAIGVLIRGATPHFDYIASEVSKGLADLSLELRKPITFGVITADTLEQAIERAGTKHGNKGWEAALSAIEMANLFKSLR

SEQ ID NO: 7697 - protein, 1307 aa, Artificial Sequence; identical to SEQ ID NO: 7652
  SARS-CoV-2/Iceland/247/2020__EPI_ISL_417575 spike protein (1-1147) LumSynth construct

SEQ ID NO: 7698 - protein, 1307 aa, Artificial Sequence
  SARS-CoV-2/Iceland/238/2020__EPI_ISL_417566 spike protein (1-1147) LumSynth construct
MFVFLVLLPLVSSQCVNLTTRTQLPPAYTNSFTRGVYYPDKVFRSSVLHSTQDLFLPFFSNVTWFHAIHVSGTNGTKRFDNPVLPFNDGVYFASTEKSNIIRGWIFGTTLDSKTQSLLIVNNATNVVIKVCEFQFCNDPFLGVYYHKNNKSWMESEFRVYSSANNCTFEYVSQPFLMDLEGKQGNFKNLREFVFKNIDGYFKIYSKHTPINLVRDLPQGFSALEPLVDLPIGINITRFQTLLALHRSYLTPGDSSSGWTAGAAAYYVGYLQPRTFLLKYNENGTITDAVDCALDPLSETKCTLKSFTVEKGIYQTSNFRVQPTESIVRFPNITNLCPFGEVFNATRFASVYAWNRKRISNCVADYSVLYNSASFSTFKCYGVSPTKLNDLCFTNVYADSFVIRGDEVRQIAPGQTGKIADYNYKLPDDFTGCVIAWNSNNLDSKVGGNYNYLYRLFRKSNLKPFERDISTEIYQAGSTPCNGVEGFNCYFPLQSYGFQPTNGVGYQPYRVVVLSFELLHAPATVCGPKKSTNLVKNKCVNFNFNGLTGTGVLTESNKKFLPFQQFGRDIADTTDAVRDPQTLEILDITPCSFGGVSVITPGTNTSNQVAVLYQGVNCTEVPVAIHADQLTPTWRVYSTGSNVFQTRAGCLIGAEHVNNSYECDIPIGAGICASYQTQTNSPRRARSVASQSIIAYTMSLGAENSVAYSNNSIAIPTNFTISVTTEILPVSMTKTSVDCTMYICGDSTECSNLLLQYGSFCTQLNRALTGIAVEQDKNTQEVFAQVKQIYKTPPIKDFGGFNFSQILPDPSKPSKRSFIEDLLFNKVTLADVGFIKQYGDCLGDIAARDLICAQKFNGLTVLPPLLTDEMIAQYTSALLAGTITSGWTFGAGAALQIPFAMQMAYRFNGIGVTQNVLYENQKLIANQFNSAIGKIQDSLSSTASALGKLQDVVNQNAQALNTLVKQLSSNFGAISSVLNDILSRLDKVEAEVQIDRLITGRLQSLQTYVTQQLIRAAEIRASANLAATKMSECVLGQSKRVDFCGKGYHLMSFPQSAPHGVVFLHVTYVPAQEKNFTTAPAICHDGKAHFPREGVFVSNGTHWFVTQRNFYEPQIITTDNTFVSGNCDVVIGIVNNTVYDPLQPELDSGGGSGGGQIYEGKLTAEGLRFGIVASRFNHALVDRLVEGAIDAIVRHGGREEDITLVRVPGSWEIPVAAGELARKEDIDAVIAIGVLIRGATPHFDYIASEVSKGLADLSLELRKPITFGVITADTLEQAIERAGTKHGNKGWEAALSAIEMANLFKSLR

SEQ ID NO: 7699 - protein, 1307 aa, Artificial Sequence
  SARS-CoV-2/Greece/16/2020__EPI_ISL_418265 spike protein (1-1147) LumSynth construct
MFVFLVLLPLVSSQCVNLTTRTQLPPAYTNSFTRGVYYPDKVFRSSVLHSTQDLFLPFFSNVTWFHAIHVSGTNGTKRFDNPVLPFNDGVYFASTEKSNIIRGWIFGTTLDSKTQSLLIVNNATNVVIKVCEFQFCNDPFLGVYYHKNNKSWMESEFRVYSSANNCTFEYVSQPFLMDLEGKQGNFKNLREFVFKNVDGYFKIYSKHTPINLVRDLPQGFSALEPLVDLPIGINITRFQTLLALHRSYLTPGDSSSGWTAGAAAYYVGYLQPRTFLLKYNENGTITDAVDCALDPLSETKCTLKSFTVEKGIYQTSNFRVQPTESIVRFPNITNLCPFGEVFNATRFASVYAWNRKRISNCVADYSVLYNSASFSTFKCYGVSPTKLNDLCFTNVYADSFVIRGDEVRQIAPGQTGKIADYNYKLPDDFTGCVIAWNSNNLDSKVGGNYNYLYRLFRKSNLKPFERDISTEIYQAGSTPCNGVEGFNCYFPLQSYGFQPTNGVGYQPYRVVVLSFELLHAPATVCGPKKSTNLVKNKCVNFNFNGLTGTGVLTESNKKFLPFQQFGRDIADTTDAVRDPQTLEILDITPCSFGGVSVITPGTNTSNQVAVLYQDVNCTEVPVAIHADQLTPTWRVYSTGSNVFQTRAGCLIGAEHVNNSYECDIPIGAGICASYQTQTNSPRRARSVASQSIIAYTMSLGAENSVAYSNNSIAIPTNFTISVTTEILPVSMTKTSVDCTMYICGDSTECSNLLLQYGSFCTQLNRALTGIAVEQDKNTQEVFAQVKQIYKTPPIKDFGGFNFSQILPDPSKPSKRSFIEDLLFNKVTLADAGFIKQYGDCLGDIAARDLICAQKFNGLTVLPPLLTDEMIAQYTSALLAGTITSGWTFGAGAALQIPFAMQMAYRFNGIGVTQNVLYENQKLIANQFNSAIGKIQDSLSSTASALGKLQDVVNQNAQALNTLVKQLSSNFGAISSVLNDILSRLDKVEAEVQIDRLITGRLQSLQTYVTQQLIRAAEIRASANLAATKMSECVLGQSKRVDFCGKGYHLMSFPQSAPHGVVFLHVTYVPAQEKNFTTAPAICHDGKAHFPREGVFVSNGTHWFVTQRNFYEPQIITTDNTFVSGNCDVVIGIVNNTVYDPLQPELDSGGGSGGGQIYEGKLTAEGLRFGIVASRFNHALVDRLVEGAIDAIVRHGGREEDITLVRVPGSWEIPVAAGELARKEDIDAVIAIGVLIRGATPHFDYIASEVSKGLADLSLELRKPITFGVITADTLEQAIERAGTKHGNKGWEAALSAIEMANLFKSLR

SEQ ID NO: 7700 - protein, 1307 aa, Artificial Sequence
  SARS-CoV-2/Iceland/319/2020__EPI_ISL_417648 spike protein (1-1147) LumSynth construct
MFVFLVLLPLVSSQCVNLTTRTQLPPAYTNSFTRGVYYPDKVFRSSVLHSTQDLFLPFFSNVTWFHAIHVSGTNGTKRFDNPVLPFNDGVYFASTEKSNIIRGWIFGTTLDSKTQSLLIVNNATNVVIKVCEFQFCNDPFLGVYYHKNNKSWMESEFRVYSSANNCTFEYVSQPFLIDLEGKQGNFKNLREFVFKNIDGYFKIYSKHTPINLVRDLPQGFSALEPLVDLPIGINITRFQTLLALHRSYLTPGDSSSGWTAGAAAYYVGYLQPRTFLLKYNENGTITDAVDCALDPLSETKCTLKSFTVEKGIYQTSNFRVQPTESIVRFPNITNLCPFGEVFNATRFASVYAWNRKRISNCVADYSVLYNSASFSTFKCYGVSPTKLNDLCFTNVYADSFVIRGDEVRQIAPGQTGKIADYNYKLPDDFTGCVIAWNSNNLDSKVGGNYNYLYRLFRKSNLKPFERDISTEIYQAGSTPCNGVEGFNCYFPLQSYGFQPTNGVGYQPYRVVVLSFELLHAPATVCGPKKSTNLVKNKCVNFNFNGLTGTGVLTESNKKFLPFQQFGRDIADTTDAVRDPQTLEILDITPCSFGGVSVITPGTNTSNQVAVLYQGVNCTEVPVAIHADQLTPTWRVYSTGSNVFQTRAGCLIGAEHVNNSYECDIPIGAGICASYQTQTNSPRRARSVASQSIIAYTMSLGAENSVAYSNNSIAIPTNFTISVTTEILPVSMTKTSVDCTMYICGDSTECSNLLLQYGSFCTQLNRALTGIAVEQDKNTQEVFAQVKQIYKTPPIKDFGGFNFSQILPDPSKPSKRSFIEDLLFNKVTLADAGFIKQYGDCLGDIAARDLICAQKFNGLTVLPPLLTDEMIAQYTSALLAGTITSGWTFGAGAALQIPFAMQMAYRFNGIGVTQNVLYENQKLIANQFNSAIGKIQDSLSSTASALGKLQDVVNQNAQALNTLVKQLSSNFGAISSVLNDILSRLDKVEAEVQIDRLITGRLQSLQTYVTQQLIRAAEIRASANLAATKMSECVLGQSKRVDFCGKGYHLMSFPQSAPHGVVFLHVTYVPAQEKNFTTAPAICHDGKAHFPREGVFVSNGTHWFVTQRNFYEPQIITTDNTFVSGNCDVVIGIVNNTVYDPLQPELDSGGGSGGGQIYEGKLTAEGLRFGIVASRFNHALVDRLVEGAIDAIVRHGGREEDITLVRVPGSWEIPVAAGELARKEDIDAVIAIGVLIRGATPHFDYIASEVSKGLADLSLELRKPITFGVITADTLEQAIERAGTKHGNKGWEAALSAIEMANLFKSLR

SEQ ID NO: 7701 - protein, 1307 aa, Artificial Sequence
  SARS-CoV-2/Congo/94/2020__EPI_ISL_417947 spike protein (1-1147) LumSynth construct
MFVFLVLLPLVSSQCVNLTTRTQLPPAYTNSFTRGVYYPDKVFRSSVLHSTQDLFLPFFSNVTWFHAIHVSGTNGTKRFDNPVLPFNDGVYFASTEKSNIIRGWIFGTTLDSKTQSLLIVNNATNVVIKVCEFQFCNDPFLGVYYHKNNKSWMESEFRVYSSANNCTFEYVSQPFLMDLEGKQGNFKNLREFVFKNIDGYFKIYSKHTPINLVRDLPQGFSALEPLVDLPIGINITRFQTLLALHRSYLTPGDSSSGWTAGAAAYYVGYLQPRTFLLKYNENGTITDAVDCALDPLSETKCTLKSFTVEKGIYQTSNFRVQPTESIVRFPNITNLCPFGEVFNATRFASVYAWNRKRISNCVADYSVLYNSASFSTFKCYGVSPTKLNDLCFTNVYADSFVIRGDEVRQIAPGQTGKIADYNYKLPDDFTGCVIAWNSNNLDSKVGGNYNYLYRLFRKSNLKPFERDISTEIYQAGSTPCNGVEGFNCYFPLQSYGFQPTNGVGYQPYRVVVLSFELLHAPATVCGPKKSTNLVKNKCVNFNFNGLTGTGVLTESNKKFLPFQQFGRDIADTTDAVRDPQTLEILDITPCSFGGVSVITPGTNTSNQVAVLYQGVNCTEVPVAIHADQLTPTWRVYSTGSNVFQTRAGCLIGAEHVNNSYECDIPIGAGICASYQTQTNSPRRARSVASQSIIAYTMSLGAENSVAYSNNSIAIPTNFTISVTTEILPVSMTKTSVDCTMYICGDSTECSNLLLQYGSFCTQLNRALTGIAVEQDKNTQEVFAQVKQIYKTPPIKDFGGFNFSQILPDPSKPSKRSFIEDILFNKVTLADAGFIKQYGDCLGDIAARDLICAQKFNGLTVLPPLLTDEMIAQYTSALLAGTITSGWTFGAGAALQIPFAMQMAYRFNGIGVTQNVLYENQKLIANQFNSAIGKIQDSLSSTASALGKLQDVVNQNAQALNTLVKQLSSNFGAISSVLNDILSRLDKVEAEVQIDRLITGRLQSLQTYVTQQLIRAAEIRASANLAATKMSECVLGQSKRVDFCGKGYHLMSFPQSAPHGVVFLHVTYVPAQEKNFTTAPAICHDGKAHFPREGVFVSNGTHWFVTQRNFYEPQIITTDNTFVSGNCDVVIGIVNNTVYDPLQPELDSGGGSGGGQIYEGKLTAEGLRFGIVASRFNHALVDRLVEGAIDAIVRHGGREEDITLVRVPGSWEIPVAAGELARKEDIDAVIAIGVLIRGATPHFDYIASEVSKGLADLSLELRKPITFGVITADTLEQAIERAGTKHGNKGWEAALSAIEMANLFKSLR

SEQ ID NO: 7702 - protein, 1307 aa, Artificial Sequence
  SARS-CoV-2/Congo/158/2020__EPI_ISL_417950 spike protein (1-1147) LumSynth construct
MFVFLVLLPLVSSQCVNLTTRTQLPPAYTNSFTRGVYYPDKVFRSSVLHSTQDLFLPFFSNVTWFHAIHVSGTNGTKRFDNPVLPFNDGVYFASTEKSNIIRGWIFGTTLDSKTQSLLIVNNATNVVIKVCEFQFCNDPFLGVYYHKNNKSWMESEFRVYSSANNCTFEYVSQPFLMDLEGKQGNFKNLREFVFKNIDGYFKIYSKHTPINLVRDLPQGFSALEPLVDLPIGINITRFQTLLALHRSYLTPGDSSSGWTAGAAAYYVGYLQPRTFLLKYNENGTITDAVDCALDPLSETKCTLKSFTVEKGIYQTSNFRVQPTESIVRFPNITNLCPFGEVFNATRFASVYAWNRKRISNCVADYSVLYNSASFSTFKCYGVSPTKLNDLCFTNVYADSFVIRGDEVRQIAPGQTGKIADYNYKLPDDFTGCVIAWNSNNLDSKVGGNYNYLYRLFRKSNLKPFERDISTEIYQAGSTPCNGVEGFNCYFPLQSYGFQPTNGVGYQPYRVVVLSFELLHAPATVCGPKKSTNLVKNKCVNFNFNGLTGTGVLTESNKKFLPFQQFGRDIADTTDAVRDPQTLEILDITPCSFGGVSVITPGTNTSNQVAVLYQDVNCTEVPVAIHADQLTPTWRVYSTGSNVFQTRAGCLIGAEHVNNSYECDIPIGAGICASYQTQTNSPRRARSVASQSIIAYTMSLGAENSVAYSNNSIAIPTNFTISVTTEILPVSMTKTSVDCTMYICGDSTECSNLLLQYGSFCTQLNRALTGIAVEQDKNTQEVFAQVKQIYKTPPIKDFGGFNFSQILPDPSKPSKRSFIEDLLFNKVTLADAGFIKQYGDCLGDIAARDLICAQKFNGLTVLPPLLTDEMIAQYTSALLAGTITSGWTFGAGAALQIPFAMQMAYRFNGIGVTQNVLYENQKLIANQFNSAIGKIQDSLSSTASALGKLQDVVNQNAQALNTLVKQLSSNFGAISSVLNDILSRLDKVEAEVQIDRLITGRLQSLQTYVTQQLIRAAEIRASANLAATKMSECVLGQSKRVDFCGKGYHLMSFPQSAPHGVVFLHVTYVPAQEKNFTTAPAICHDGKAHFPREGVFVSNGTHWFVTQRNFYEPQIITTDNTFLSGNCDVVIGIVNNTVYDPLQPELDSGGGSGGGQIYEGKLTAEGLRFGIVASRFNHALVDRLVEGAIDAIVRHGGREEDITLVRVPGSWEIPVAAGELARKEDIDAVIAIGVLIRGATPHFDYIASEVSKGLADLSLELRKPITFGVITADTLEQAIERAGTKHGNKGWEAALSAIEMANLFKSLR

SEQ ID NO: 7703 - protein, 1307 aa, Artificial Sequence
  SARS-CoV-2/USA/UT-00034/2020__EPI_ISL_417977 spike protein (1-1147) LumSynth construct
MFVFLVLLPLVSSQCVNLTTRTQLPPAYTNSFTRGVYYPDKVFRSSVLHSTQDLFLPFFSNVTWFHAIHVSGTNGTKRFDNPVLPFNDGVYFASTEKSNIIRGWIFGTTLDSKTQSLLIVNNATNVVIKVCEFQFCNDPFLGVYYYKNNKSWMESEFRVYSSANNCTFEYVSQPFLMDLEGKQGNFKNLREFVFKNIDGYFKIYSKHTPINLVRDLPQGFSALEPLVDLPIGINITRFQTLLALHRSYLTPGDSSSGWTAGAAAYYVGYLQPRTFLLKYNENGTITDAVDCALDPLSETKCTLKSFTVEKGIYQTSNFRVQPTESIVRFPNITNLCPFGEVFNATRFASVYAWNRKRISNCVADYSVLYNSASFSTFKCYGVSPTKLNDLCFTNVYADSFVIRGDEVRQIAPGQTGKIADYNYKLPDDFTGCVIAWNSNNLDSKVGGNYNYLYRLFRKSNLKPFERDISTEIYQAGSTPCNGVEGFNCYFPLQSYGFQPTNGVGYQPYRVVVLSFELLHAPATVCGPKKSTNLVKNKCVNFNFNGLTGTGVLTESNKKFLPFQQFGRDIADTTDAVRDPQTLEILDITPCSFGGVSVITPGTNTSNQVAVLYQGVNCTEVPVAIHADQLTPTWRVYSTGSNVFQTRAGCLIGAEHVNNSYECDIPIGAGICASYQTQTNSPRRARSVASQSIIAYTMSLGAENSVAYSNNSIAIPTNFTISVTTEILPVSMTKTSVDCTMYICGDSTECSNLLLQYGSFCTQLNRALTGIAVEQDKNTQEVFAQVKQIYKTPPIKDFGGFNFSQILPDPSKPSKRSFIEDLLFNKVTLADAGFIKQYGDCLGDIAARDLICAQKFNGLTVLPPLLTDEMIAQYTSALLAGTITSGWTFGAGAALQIPFAMQMAYRFNGIGVTQNVLYENQKLIANQFNSAIGKIQDSLSSTASALGKLQDVVNQNAQALNTLVKQLSSNFGAISSVLNDILSRLDKVEAEVQIDRLITGRLQSLQTYVTQQLIRAAEIRASANLAATKMSECVLGQSKRVDFCGKGYHLMSFPQSAPHGVVFLHVTYVPAQEKNFTTAPAICHDGKAHFPREGVFVSNGTHWFVTQRNFYEPQIITTDNTFVSGNCDVVIGIVNNTVYDPLQPELDSGGGSGGGQIYEGKLTAEGLRFGIVASRFNHALVDRLVEGAIDAIVRHGGREEDITLVRVPGSWEIPVAAGELARKEDIDAVIAIGVLIRGATPHFDYIASEVSKGLADLSLELRKPITFGVITADTLEQAIERAGTKHGNKGWEAALSAIEMANLFKSLR

SEQ ID NO: 7704 - protein, 1307 aa, Artificial Sequence
  SARS-CoV-2/USA/UT-00033/2020__EPI_ISL_417976 spike protein (1-1147) LumSynth construct
MFVFLVLLPLVSSQCVNLTTRTQLPPAYTNSFTRGVYYPDKVFRSSVLHSTQDLFLPFFSNVTWFHAIHVSGTNGTKRFDNPVLPFNDGVYFASTEKSNIIRGWIFGTTLDSKTQSLLIVNNATNVVIKVCEFQFCNDPFLGVYYHKNNKSWMESEFRVYSSANNCTFEYVSQPFLMDLEGKQGNFKNLREFVFKNIDGYFKIYSKHTPINLVRDLPQGFSALEPLVDLPIGINITRFQTLLALHRSYLTPGDSSSGLTAGAAAYYVGYLQPRTFLLKYNENGTITDAVDCALDPLSETKCTLKSFTVEKGIYQTSNFRVQPTESIVRFPNITNLCPFGEVFNATRFASVYAWNRKRISNCVADYSVLYNSASFSTFKCYGVSPTKLNDLCFTNVYADSFVIRGDEVRQIAPGQTGKIADYNYKLPDDFTGCVIAWNSNNLDSKVGGNYNYLYRLFRKSNLKPFERDISTEIYQAGSTPCNGVEGFNCYFPLQSYGFQPTNGVGYQPYRVVVLSFELLHAPATVCGPKKSTNLVKNKCVNFNFNGLTGTGVLTESNKKFLPFQQFGRDIADTTDAVRDPQTLEILDITPCSFGGVSVITPGTNTSNQVAVLYQGVNCTEVPVAIHADQLTPTWRVYSTGSNVFQTRAGCLIGAEHVNNSYECDIPIGAGICASYQTQTNSPRRARSVASQSIIAYTMSLGAENSVAYSNNSIAIPTNFTISVTTEILPVSMTKTSVDCTMYICGDSTECSNLLLQYGSFCTQLNRALTGIAVEQDKNTQEVFAQVKQIYKTPPIKDFGGFNFSQILPDPSKPSKRSFIEDLLFNKVTLADAGFIKQYGDCLGDIAARDLICAQKFNGLTVLPPLLTDEMIAQYTSALLAGTITSGWTFGAGAALQIPFAMQMAYRFNGIGVTQNVLYENQKLIANQFNSAIGKIQDSLSSTASALGKLQDVVNQNAQALNTLVKQLSSNFGAISSVLNDILSRLDKVEAEVQIDRLITGRLQSLQTYVTQQLIRAAEIRASANLAATKMSECVLGQSKRVDFCGKGYHLMSFPQSAPHGVVFLHVTYVPAQEKNFTTAPAICHDGKAHFPREGVFVSNGTHWFVTQRNFYEPQIITTDNTFVSGNCDVVIGIVNNTVYDPLQPELDSGGGSGGGQIYEGKLTAEGLRFGIVASRFNHALVDRLVEGAIDAIVRHGGREEDITLVRVPGSWEIPVAAGELARKEDIDAVIAIGVLIRGATPHFDYIASEVSKGLADLSLELRKPITFGVITADTLEQAIERAGTKHGNKGWEAALSAIEMANLFKSLR

SEQ ID NO: 7705 - protein, 1307 aa, Artificial Sequence
  SARS-CoV-2/USA/WI-13/2020__EPI_ISL_417516 spike protein (1-1147) LumSynth construct
MFVFLVLLPLVSSQCVNLTTRTQLPPAYTNSFTRGVYYPDKVFRSSVLHSTQDLFLPFFSNVTWFHAIHVSGTNGTKRFDNPVLPFNDGVYFASTEKSNIIRGWIFGTTLDSKTQSLLIVNNATNVVIKVCEFQFCNDPFLGVYYHKNNKSWMESEFRVYSSANNCTFEYVSQPFLMDLEGKQGNFKNLREFVFKNIDGYFKIYSKHTPINLVRDLPQGFSALEPLVDLPIGINITRFQTLLALHRSYLTPGDSSSGWTAGAAAYYVGYLQPRTFLLKYNENGTITDAVDCALDPLSETKCTLKSFTVEKGIYQTSNFRVLPTESIVRFPNITNLCPFGEVFNATRFASVYAWNRKRISNCVADYSVLYNSASFSTFKCYGVSPTKLNDLCFTNVYADSFVIRGDEVRQIAPGQTGKIADYNYKLPDDFTGCVIAWNSNNLDSKVGGNYNYLYRLFRKSNLKPFERDISTEIYQAGSTPCNGVEGFNCYFPLQSYGFQPTNGVGYQPYRVVVLSFELLHAPATVCGPKKSTNLVKNKCVNFNFNGLTGTGVLTESNKKFLPFQQFGRDIADTTDAVRDPQTLEILDITPCSFGGVSVITPGTNTSNQVAVLYQGVNCTEVPVAIHADQLTPTWRVYSTGSNVFQTRAGCLIGAEHVNNSYECDIPIGAGICASYQTQTNSPRRARSVASQSIIAYTMSLGAENSVAYSNNSIAIPTNFTISVTTEILPVSMTKTSVDCTMYICGDSTECSNLLLQYGSFCTQLNRALTGIAVEQDKNTQEVFAQVKQIYKTPPIKDFGGFNFSQILPDPSKPSKRSFIEDLLFNKVTLADAGFIKQYGDCLGDIAARDLICAQKFNGLTVLPPLLTDEMIAQYTSALLAGTITSGWTFGAGAALQIPFAMQMAYRFNGIGVTQNVLYENQKLIANQFNSAIGKIQDSLSSTASALGKLQDVVNQNAQALNTLVKQLSSNFGAISSVLNDILSRLDKVEAEVQIDRLITGRLQSLQTYVTQQLIRAAEIRASANLAATKMSECVLGQSKRVDFCGKGYHLMSFPQSAPHGVVFLHVTYVPAQEKNFTTAPAICHDGKAHFPREGVFVSNGTHWFVTQRNFYEPQIITTDNTFVSGNCDVVIGIVNNTVYDPLQPELDSGGGSGGGQIYEGKLTAEGLRFGIVASRFNHALVDRLVEGAIDAIVRHGGREEDITLVRVPGSWEIPVAAGELARKEDIDAVIAIGVLIRGATPHFDYIASEVSKGLADLSLELRKPITFGVITADTLEQAIERAGTKHGNKGWEAALSAIEMANLFKSLR

SEQ ID NO: 7706 - protein, 1306 aa, Artificial Sequence
  SARS-CoV-2/India/1-27/2020__EPI_ISL_413522 spike protein (1-1146) LumSynth construct
MFVFLVLLPLVSSQCVNLTTRTQLPPAYTNSFTRGVYYPDKVFRSSVLHSTQDLFLPFFSNVTWFHAIHVSGTNGTKRFDNPVLPFNDGVYFASTEKSNIIRGWIFGTTLDSKTQSLLIVNNATNVVIKVCEFQFCNDPFLGVYHKNNKSWMESEFRVYSSANNCTFEYVSQPFLMDLEGKQGNFKNLREFVFKNIDGYFKIYSKHTPINLVRDLPQGFSALEPLVDLPIGINITRFQTLLALHRSYLTPGDSSSGWTAGAAAYYVGYLQPRTFLLKYNENGTITDAVDCALDPLSETKCTLKSFTVEKGIYQTSNFRVQPTESIVRFPNITNLCPFGEVFNATRFASVYAWNRKRISNCVADYSVLYNSASFSTFKCYGVSPTKLNDLCFTNVYADSFVIRGDEVIQIAPGQTGKIADYNYKLPDDFTGCVIAWNSNNLDSKVGGNYNYLYRLFRKSNLKPFERDISTEIYQAGSTPCNGVEGFNCYFPLQSYGFQPTNGVGYQPYRVVVLSFELLHAPATVCGPKKSTNLVKNKCVNFNFNGLTGTGVLTESNKKFLPFQQFGRDIADTTDAVRDPQTLEILDITPCSFGGVSVITPGTNTSNQVAVLYQDVNCTEVPVAIHADQLTPTWRVYSTGSNVFQTRAGCLIGAEHVNNSYECDIPIGAGICASYQTQTNSPRRARSVASQSIIAYTMSLGAENSVAYSNNSIAIPTNFTISVTTEILPVSMTKTSVDCTMYICGDSTECSNLLLQYGSFCTQLNRALTGIAVEQDKNTQEVFAQVKQIYKTPPIKDFGGFNFSQILPDPSKPSKRSFIEDLLFNKVTLADAGFIKQYGDCLGDIAARDLICAQKFNGLTVLPPLLTDEMIAQYTSALLAGTITSGWTFGAGAALQIPFAMQMAYRFNGIGVTQNVLYENQKLIANQFNSAIGKIQDSLSSTASALGKLQDVVNQNAQALNTLVKQLSSNFGAISSVLNDILSRLDKVEAEVQIDRLITGRLQSLQTYVTQQLIRAAEIRASANLAATKMSECVLGQSKRVDFCGKGYHLMSFPQSAPHGVVFLHVTYVPAQEKNFTTAPAICHDGKAHFPREGVFVSNGTHWFVTQRNFYEPQIITTDNTFVSGNCDVVIGIVNNTVYDPLQPELDSGGGSGGGQIYEGKLTAEGLRFGIVASRFNHALVDRLVEGAIDAIVRHGGREEDITLVRVPGSWEIPVAAGELARKEDIDAVIAIGVLIRGATPHFDYIASEVSKGLADLSLELRKPITFGVITADTLEQAIERAGTKHGNKGWEAALSAIEMANLFKSLR

SEQ ID NO: 7707 - protein, 1301 aa, Artificial Sequence
  SARS-CoV-2/pangolin/Guangxi/P4L/2017__EPI_ISL_410538 spike protein (1-1141) LumSynth construct
MFVFLFVLPLVSSQCVNLTTRTGIPPGYTNSSTRGVYYPDKVFRSSILHLTQDLFLPFFSNVTWFNTINYQGGFKKFDNPVLPFNDGVYFASTEKSNIIRGWIFGTTLDARTQSLLIVNNATNVVIKVCEFQFCTDPFLGVYYHNNNKTWVENEFRVYSSANNCTFEYISQPFLMDLEGKQGNFKNLREFVFKNVDGYFKIYSKHTPIDLVRDLPRGFAALEPLVDLPIGINITRFQTLLALHRSYLTPGNLESGWTTGAAAYYVGYLQQRTFLLSYNQNGTITDAVDCSLDPLSETKCTLKSLTVEKGIYQTSNFRVQPTISIVRFPNITNLCPFGEVFNASKFASVYAWNRKRISNCVADYSVLYNSTSFSTFKCYGVSPTKLNDLCFTNVYADSFVVKGDEVRQIAPGQTGVIADYNYKLPDDFTGCVIAWNSVKQDALTGGNYGYLYRLFRKSKLKPFERDISTEIYQAGSTPCNGQVGLNCYYPLERYGFHPTTGVNYQPFRVVVLSFELLNGPATVCGPKLSTTLVKDKCVNFNFNGLTGTGVLTTSKKQFLPFQQFGRDISDTTDAVRDPQTLEILDITPCSFGGVSVITPGTNTSNQVAVLYQDVNCTEVPMAIHAEQLTPAWRVYSAGANVFQTRAGCLVGAEHVNNSYECDIPVGAGICASYHSMSSLRSVNQRSIIAYTMSLGAENSVAYSNNSIAIPTNFTISVTTEILPVSMTKTSVDCTMYICGDSIECSNLLLQYGSFCTQLNRALTGIAVEQDKNTQEVFAQVKQIYKTPPIKDFGGFNFSQILPDPSKPSKRSFIEDLLFNKVTLADAGFIKQYGDCLGDIAARDLICAQKFNGLTVLPPLLTDEMIAQYTSALLAGTITSGWTFGAGAALQIPFAMQMAYRFNGIGVTQNVLYENQKLIANQFNSAIGKIQDSLSSTASALGKLQDVVNQNAQALNTLVKQLSSNFGAISSVLNDILSRLDKVEAEVQIDRLITGRLQSLQTYVTQQLIRAAEIRASANLAATKMSECVLGQSKRVDFCGKGYHLMSFPQSAPHGVVFLHVTYVPAQEKNFTTAPAICHEGKAHFPREGVFVSNGTHWFITQRNFYEPQIITTDNTFVSGSCDVVIGIVNNTVYDPLQPELDSGGGSGGGQIYEGKLTAEGLRFGIVASRFNHALVDRLVEGAIDAIVRHGGREEDITLVRVPGSWEIPVAAGELARKEDIDAVIAIGVLIRGATPHFDYIASEVSKGLADLSLELRKPITFGVITADTLEQAIERAGTKHGNKGWEAALSAIEMANLFKSLR

SEQ ID NO: 7708 - protein, 1301 aa, Artificial Sequence
  SARS-CoV-2/pangolin/Guangxi/P5L/2017__EPI_ISL_410540 spike protein (1-1141) LumSynth construct
MFVFLFVLPLVSSQCVNLTTRTGIPPGYTNSSTRGVYYPDKVFRSSILHLTQDLFLPFFSNVTWFNTINYQGGFKKFDNPVLPFNDGVYFASTEKSNIIRGWIFGTTLDARTQSLLIVNNATNVVIKVCEFQFCTDPFLGVYYHNNNKTWVENEFRVYSSANNCTFEYISQPFLMDLEGKQGNFKNLREFVFKNVDGYFKIYSKHTPIDLVRDLPRGFAALEPLVDLPIGINITRFQTLLALHRSYLTPGKLESGWTTGAAAYYVGYLQQRTFLLSYNQNGTITDAVDCSLDPLSETKCTLKSLTVEKGIYQTSNFRVQPTISIVRFPNITNLCPFGEVFNASKFASVYAWNRKRISNCVADYSVLYNSTSFSTFKCYGVSPTKLNDLCFTNVYADSFVVKGDEVRQIAPGQTGVIADYNYKLPDDFTGCVIAWNSVKQDALTGGNYGYLYRLFRKSKLKPFERDISTEIYQAGSTPCNGQVGLNCYYPLERYGFHPTTGVNYQPFRVVVLSFELLNGPATVCGPKLSTTLVKDKCVNFNFNGLTGTGVLTTSKKQFLPFQQFGRDISDTTDAVRDPQTLEILDITPCSFGGVSVITPGTNTSNQVAVLYQDVNCTEVPMAIHAEQLTPAWRVYSAGANVFQTRAGCLVGAEHVNNSYECDIPVGAGICASYHSMSSFRSVNQRSIIAYTMSLGAENSVAYSNNSIAIPTNFTISVTTEILPVSMTKTSVDCTMYICGDSIECSNLLLQYGSFCTQLNRALTGIAVEQDKNTQEVFAQVKQIYKTPPIKDFGGFNFSQILPDPSKPSKRSFIEDLLFNKVTLADAGFIKQYGDCLGDIAARDLICAQKFNGLTVLPPLLTDEMIAQYTSALLAGTITSGWTFGAGAALQIPFAMQMAYRFNGIGVTQNVLYENQKLIANQFNSAIGKIQDSLSSTASALGKLQDVVNQNAQALNTLVKQLSSNFGAISSVLNDILSRLDKVEAEVQIDRLITGRLQSLQTYVTQQLIRAAEIRASANLAATKMSECVLGQSKRVDFCGKGYHLMSFPQSAPHGVVFLHVTYVPAQEKNFTTAPAICHEGKAHFPREGVFVSNGTHWFITQRNFYEPQIITTDNTFVSGSCDVVIGIVNNTVYDPLQPELDSGGGSGGGQIYEGKLTAEGLRFGIVASRFNHALVDRLVEGAIDAIVRHGGREEDITLVRVPGSWEIPVAAGELARKEDIDAVIAIGVLIRGATPHFDYIASEVSKGLADLSLELRKPITFGVITADTLEQAIERAGTKHGNKGWEAALSAIEMANLFKSLR

SEQ ID NO: 7709 - protein, 1301 aa, Artificial Sequence
  SARS-CoV-2/pangolin/Guangxi/P5E/2017__EPI_ISL_410541 spike protein (1-1141) LumSynth construct
MFVFLFVLPLVSSQCVNLTTRTGIPPGYTNSSTRGVYYPDKVFRSSILHLTQDLFLPFFSNVTWFNTITYQGGSKKFDNPVLPFNDGVYFASTEKSNIIRGWIFGTTLDARTQSLLIVNNATNVVIKVCEFQFCTDPFLGVYYHNNNKTWVENEFRVYSSANNCTFEYISQPFLMDLEGKQGNFKNLREFVFKNVDGYFKIYSKHTPIDLVRDLPRGFAALEPLVDLPIGINITRFQTLLALHRSYLTPGKLESGWTTGAAAYYVGYLQQRTFLLSYNQNGTITDAVDCSLDPLSETKCTLKSLTVEKGIYQTSNFRVQPTISIVRFPNITNLCPFGEVFNASKFASVYAWNRKRISNCVADYSVLYNSTSFSTFKCYGVSPTKLNDLCFTNVYADSFVVKGDEVRQIAPGQTGVIADYNYKLPDDFTGCVIAWNSVKQDALTGDNYGYLYRLFRKSKLKPFERDISTEIYQAGSTPCNGQVGLNCYYPLERYGFHPTTGVNYQPFRVVVLSFELLNGPATVCGPKLSTTLVKDKCVNFNFNGLTGTGVLTTSKKQFLPFQQFGRDISDTTDAVRDPQTLEILDITPCSFGGVSVITPGTNTSNQVAVLYQDVNCTEVPMAIHAEQLTPAWRVYSAGANVFQTRAGCLVGAEHVNNSYECDIPVGAGICASYHSMSSFRSVNQRSIIAYTMSLGAENSVAYSNNSIAIPTNFTISVTTEILPVSMTKTSVDCTMYICGDSIECSNLLLQYGSFCTQLNRALTGIAVEQDKNTQEVFAQVKQIYKTPPIKDFGGFNFSQILPDPSKPSKRSFIEDLLFNKVTLADAGFIKQYGDCLGDIAARDLICAQKFNGLTVLPPLLTDEMIAQYTSALLAGTITSGWTFGAGAALQIPFAMQMAYRFNGIGVTQNVLYENQKLIANQFNSAIGKIQDSLSSTASALGKLQDVVNQNAQALNTLVKQLSSNFGAISSVLNDILSRLDKVEAEVQIDRLITGRLQSLQTYVTQQLIRAAEIRASANLAATKMSECVLGQSKRVDFCGKGYHLMSFPQSAPHGVVFLHVTYVPAQEKNFTTAPAICHEGKAHFPREGVFVSNGTHWFITQRNFYEPQIITTDNTFVSGSCDVVIGIVNNTVYDPLQPELDSGGGSGGGQIYEGKLTAEGLRFGIVASRFNHALVDRLVEGAIDAIVRHGGREEDITLVRVPGSWEIPVAAGELARKEDIDAVIAIGVLIRGATPHFDYIASEVSKGLADLSLELRKPITFGVITADTLEQAIERAGTKHGNKGWEAALSAIEMANLFKSLR

SEQ ID NO: 7710 - protein, 1299 aa, Artificial Sequence
  SARS-CoV-2/pangolin/Guangxi/P1E/2017__EPI_ISL_410539 spike protein (1-1139) LumSynth construct
MFVFLFVLPLVSSQCVNLTTRTGIQPGYTNSSTRGVYYPDKVFRSSILHLTQDLFLPFFSNVTWFNTINYQGGFKKFDNPVLPFNDGVYFASTEKSNIIRGWIFGTTLDARTQSLLIVNNATNVVIKVCEFQFCTDPFLGVYYHNNNKTWVENEFRVYSSANNCTFEYISQPFLMDLEGKQGNFKNLREFVFKNVDGYFKIYSKHTPIDLVRDLPRGFAALEPLVDLPIGINITRFQTLLALHRSYLTPGKLESGWTTGAAAYYVGYLQQRTFLLSYNQNGTITDAVDCSLDPLSETKCTLKSLTVEKGIYQTSNFRVQPTISIVRFPNITNLCPFGEVFNASKFASVYAWNRKRISNCVADYSVLYNSTSFSTFKCYGVSPTKLNDLCFTNVYADSFVVKGDEVRQIAPGQTGVIADYNYKLPDDFTGCVIAWNSVKQDALTGGNYLYRLFRKSKLKPFERDISTEIYQAGSTPCNGQVGLNCYYPLERYGFHPTTGVNYQPFRVVVLSFELLNGPATVCGPKLSTTLVKDKCVNFNFNGLTGTGVLTTSKKQFLPFQQFGRDISDTTDAVRDPQTLEILDITPCSFGGVSVITPGTNTSNQVAVLYQDVNCTEVPMAIHAEQLTPAWRVYSAGANVFQTRAGCLVGAEHVNNSYECDIPVGAGICASYHSMSSLRSVNQRSIIAYTMSLGAENSVAYSNNSIAIPTNFTISVTTEILPVSMTKTSVDCTMYICGDSIECSNLLLQYGSFCTQLNRALTGIAVEQDKNTQEVFAQVKQIYKTPPIKDFGGFNFSQILPDPSKPSKRSFIEDLLFNKVTLADAGFIKQYGDCLGDIAARDLICAQKFNGLTVLPPLLTDEMIAQYTSALLAGTITSGWTFGAGAALQIPFAMQMAYRFNGIGVTQNVLYENQKLIANQFNSAIGKIQDSLSSTASALGKLQDVVNQNAQALNTLVKQLSSNFGAISSVLNDILSRLDKVEAEVQIDRLITGRLQSLQTYVTQQLIRAAEIRASANLAATKMSECVLGQSKRVDFCGKGYHLMSFPQSAPHGVVFLHVTYVPAQEKNFTTAPAICHEGKAHFPREGVFVSNGTHWFITQRNFYEPQIITTDNTFVSGSCDVVIGIVNNTVYDPLQPELDSGGGSGGGQIYEGKLTAEGLRFGIVASRFNHALVDRLVEGAIDAIVRHGGREEDITLVRVPGSWEIPVAAGELARKEDIDAVIAIGVLIRGATPHFDYIASEVSKGLADLSLELRKPITFGVITADTLEQAIERAGTKHGNKGWEAALSAIEMANLFKSLR

SEQ ID NO: 7711 - protein, 1307 aa, Artificial Sequence
  SARS-CoV-2/Wuhan/WIV05/2019__EPI_ISL_402128 spike protein (1-1147)(K986P_V987P) LumSynth construct
MFVFLVLLPLVSSQCVNLTTRTQLPPAYTNSFTRGVYYPDKVFRSSVLHSTQDLFLPFFSNVTWFHAIHVSGTNGTKRFDNPVLPFNDGVYFASTEKSNIIRGWIFGTTLDSKTQSLLIVNNATNVVIKVCEFQFCNDPFLGVYYHKNNKSWMESEFRVYSSANNCTFEYVSQPFLMDLEGKQGNFKNLREFVFKNIDGYFKIYSKHTPINLVRDLPQGFSALEPLVDLPIGINITRFQTLLALHRSYLTPGDSSSGWTAGAAAYYVGYLQPRTFLLKYNENGTITDAVDCALDPLSETKCTLKSFTVEKGIYQTSNFRVQPTESIVRFPNITNLCPFGEVFNATRFASVYAWNRKRISNCVADYSVLYNSASFSTFKCYGVSPTKLNDLCFTNVYADSFVIRGDEVRQIAPGQTGKIADYNYKLPDDFTGCVIAWNSNNLDSKVGGNYNYLYRLFRKSNLKPFERDISTEIYQAGSTPCNGVEGFNCYFPLQSYGFQPTNGVGYQPYRVVVLSFELLHAPATVCGPKKSTNLVKNKCVNFNFNGLTGTGVLTESNKKFLPFQQFGRDIADTTDAVRDPQTLEILDITPCSFGGVSVITPGTNTSNQVAVLYQDVNCTEVPVAIHADQLTPTWRVYSTGSNVFQTRAGCLIGAEHVNNSYECDIPIGAGICASYQTQTNSPRRARSVASQSIIAYTMSLGAENSVAYSNNSIAIPTNFTISVTTEILPVSMTKTSVDCTMYICGDSTECSNLLLQYGSFCTQLNRALTGIAVEQDKNTQEVFAQVKQIYKTPPIKDFGGFNFSQILPDPSKPSKRSFIEDLLFNKVTLADAGFIKQYGDCLGDIAARDLICAQKFNGLTVLPPLLTDEMIAQYTSALLAGTITSGWTFGAGAALQIPFAMQMAYRFNGIGVTQNVLYENQKLIANQFNSAIGKIQDSLSSTASALGKLQDVVNQNAQALNTLVKQLSSNFGAISSVLNDILSRLDPPEAEVQIDRLITGRLQSLQTYVTQQLIRAAEIRASANLAATKMSECVLGQSKRVDFCGKGYHLMSFPQSAPHGVVFLHVTYVPAQEKNFTTAPAICHDGKAHFPREGVFVSNGTHWFVTQRNFYEPQIITTDNTFVSGNCDVVIGIVNNTVYDPLQPELDSGGGSGGGQIYEGKLTAEGLRFGIVASRFNHALVDRLVEGAIDAIVRHGGREEDITLVRVPGSWEIPVAAGELARKEDIDAVIAIGVLIRGATPHFDYIASEVSKGLADLSLELRKPITFGVITADTLEQAIERAGTKHGNKGWEAALSAIEMANLFKSLR

SEQ ID NO: 7712 - protein, 1303 aa, Artificial Sequence
  SARS-CoV-2/bat/Yunnan/RaTG13/2013__EPI_ISL_402131 spike protein (1-1143)(K982P_V983P) LumSynth construct
MFVFLVLLPLVSSQCVNLTTRTQLPPAYTNSSTRGVYYPDKVFRSSVLHLTQDLFLPFFSNVTWFHAIHVSGTNGIKRFDNPVLPFNDGVYFASTEKSNIIRGWIFGTTLDSKTQSLLIVNNATNVVIKVCEFQFCNDPFLGVYYHKNNKSWMESEFRVYSSANNCTFEYVSQPFLMDLEGKQGNFKNLREFVFKNIDGYFKIYSKHTPINLVRDLPPGFSALEPLVDLPIGINITRFQTLLALHRSYLTPGDSSSGWTAGAAAYYVGYLQPRTFLLKYNENGTITDAVDCALDPLSETKCTLKSFTVEKGIYQTSNFRVQPTDSIVRFPNITNLCPFGEVFNATTFASVYAWNRKRISNCVADYSVLYNSTSFSTFKCYGVSPTKLNDLCFTNVYADSFVITGDEVRQIAPGQTGKIADYNYKLPDDFTGCVIAWNSKHIDAKEGGNFNYLYRLFRKANLKPFERDISTEIYQAGSKPCNGQTGLNCYYPLYRYGFYPTDGVGHQPYRVVVLSFELLNAPATVCGPKKSTNLVKNKCVNFNFNGLTGTGVLTESNKKFLPFQQFGRDIADTTDAVRDPQTLEILDITPCSFGGVSVITPGTNASNQVAVLYQDVNCTEVPVAIHADQLTPTWRVYSTGSNVFQTRAGCLIGAEHVNNSYECDIPIGAGICASYQTQTNSRSVASQSIIAYTMSLGAENSVAYSNNSIAIPTNFTISVTTEILPVSMTKTSVDCTMYICGDSTECSNLLLQYGSFCTQLNRALTGIAVEQDKNTQEVFAQVKQIYKTPPIKDFGGFNFSQILPDPSKPSKRSFIEDLLFNKVTLADAGFIKQYGDCLGDIAARDLICAQKFNGLTVLPPLLTDEMIAQYTSALLAGTITSGWTFGAGAALQIPFAMQMAYRFNGIGVTQNVLYENQKLIANQFNSAIGKIQDSLSSTASALGKLQDVVNQNAQALNTLVKQLSSNFGAISSVLNDILSRLDPPEAEVQIDRLITGRLQSLQTYVTQQLIRAAEIRASANLAATKMSECVLGQSKRVDFCGKGYHLMSFPQSAPHGVVFLHVTYVPAQEKNFTTAPAICHDGKAHFPREGVFVSNGTHWFVTQRNFYEPQIITTDNTFVSGSCDVVIGIVNNTVYDPLQPELDSGGGSGGGQIYEGKLTAEGLRFGIVASRFNHALVDRLVEGAIDAIVRHGGREEDITLVRVPGSWEIPVAAGELARKEDIDAVIAIGVLIRGATPHFDYIASEVSKGLADLSLELRKPITFGVITADTLEQAIERAGTKHGNKGWEAALSAIEMANLFKSLR

SEQ ID NO: 7713 - protein, 1307 aa, Artificial Sequence
  SARS-CoV-2/Wuhan/HBCDC-HB-01/2019__EPI_ISL_402132 spike protein (1-1147)(K986P_V987P) LumSynth construct
MFVFLVLLPLVSSQCVNLTTRTQLPPAYTNSITRGVYYPDKVFRSSVLHSTQDLFLPFFSNVTWFHAIHVSGTNGTKRFDNPVLPFNDGVYFASTEKSNIIRGWIFGTTLDSKTQSLLIVNNATNVVIKVCEFQFCNDPFLGVYYHKNNKSWMESEFRVYSSANNCTFEYVSQPFLMDLEGKQGNFKNLREFVFKNIDGYFKIYSKHTPINLVRDLPQGFSALEPLVDLPIGINITRFQTLLALHRSYLTPGDSSSGWTAGAAAYYVGYLQPRTFLLKYNENGTITDAVDCALDPLSETKCTLKSFTVEKGIYQTSNFRVQPTESIVRFPNITNLCPFGEVFNATRFASVYAWNRKRISNCVADYSVLYNSASFSTFKCYGVSPTKLNDLCFTNVYADSFVIRGDEVRQIAPGQTGKIADYNYKLPDDFTGCVIAWNSNNLDSKVGGNYNYLYRLFRKSNLKPFERDISTEIYQAGSTPCNGVEGFNCYFPLQSYGFQPTNGVGYQPYRVVVLSFELLHAPATVCGPKKSTNLVKNKCVNFNFNGLTGTGVLTESNKKFLPFQQFGRDIADTTDAVRDPQTLEILDITPCSFGGVSVITPGTNTSNQVAVLYQDVNCTEVPVAIHADQLTPTWRVYSTGSNVFQTRAGCLIGAEHVNNSYECDIPIGAGICASYQTQTNSPRRARSVASQSIIAYTMSLGAENSVAYSNNSIAIPTNFTISVTTEILPVSMTKTSVDCTMYICGDSTECSNLLLQYGSFCTQLNRALTGIAVEQDKNTQEVFAQVKQIYKTPPIKDFGGFNFSQILPDPSKPSKRSFIEDLLFNKVTLADAGFIKQYGDCLGDIAARDLICAQKFNGLTVLPPLLTDEMIAQYTSALLAGTITSGWTFGAGAALQIPFAMQMAYRFNGIGVTQNVLYENQKLIANQFNSAIGKIQDSLSSTASALGKLQDVVNQNAQALNTLVKQLSSNFGAISSVLNDILSRLDPPEAEVQIDRLITGRLQSLQTYVTQQLIRAAEIRASANLAATKMSECVLGQSKRVDFCGKGYHLMSFPQSAPHGVVFLHVTYVPAQEKNFTTAPAICHDGKAHFPREGVFVSNGTHWFVTQRNFYEPQIITTDNTFVSGNCDVVIGIVNNTVYDPLQPELDSGGGSGGGQIYEGKLTAEGLRFGIVASRFNHALVDRLVEGAIDAIVRHGGREEDITLVRVPGSWEIPVAAGELARKEDIDAVIAIGVLIRGATPHFDYIASEVSKGLADLSLELRKPITFGVITADTLEQAIERAGTKHGNKGWEAALSAIEMANLFKSLR

SEQ ID NO: 7714 - protein, 1307 aa, Artificial Sequence
  SARS-CoV-2/Guangdong/20SF028/2020__EPI_ISL_403936 spike protein (1-1147)(K986P_V987P) LumSynth construct
MFVFLVLLPLVSSQCVNLTTRTQLPPAYTNSFTRGVYYPDKVFRSSVLYSTQDLFLPFFSNVTWFHAIHVSGTNGTKRFDNPVLPFNDGVYFASTEKSNIIRGWIFGTTLDSKTQSLLIVNNATNVVIKVCEFQFCNDPFLGVYYHKNNKSWMESEFRVYSSANNCTFEYVSQPFLMDLEGKQGNFKNLREFVFKNIDGYFKIYSKHTPINLVRDLPQGFSALEPLVDLPIGINITRFQTLLALHRSYLTPGDSSSGWTAGAAAYYVGYLQPRTFLLKYNENGTITDAVDCALDPLSETKCTLKSFTVEKGIYQTSNFRVQPTESIVRFPNITNLCPFGEVFNATRFASVYAWNRKRISNCVADYSVLYNSASFSTFKCYGVSPTKLNDLCFTNVYADSFVIRGDEVRQIAPGQTGKIADYNYKLPDDFTGCVIAWNSNNLDSKVGGNYNYLYRLFRKSNLKPFERDISTEIYQAGSTPCNGVEGFNCYFPLQSYGFQPTNGVGYQPYRVVVLSFELLHAPATVCGPKKSTNLVKNKCVNFNFNGLTGTGVLTESNKKFLPFQQFGRDIADTTDAVRDPQTLEILDITPCSFGGVSVITPGTNTSNQVAVLYQDVNCTEVPVAIHADQLTPTWRVYSTGSNVFQTRAGCLIGAEHVNNSYECDIPIGAGICASYQTQTNSPRRARSVASQSIIAYTMSLGAENSVAYSNNSIAIPTNFTISVTTEILPVSMTKTSVDCTMYICGDSTECSNLLLQYGSFCTQLNRALTGIAVEQDKNTQEVFAQVKQIYKTPPIKDFGGFNFSQILPDPSKPSKRSFIEDLLFNKVTLADAGFIKQYGDCLGDIAARDLICAQKFNGLTVLPPLLTDEMIAQYTSALLAGTITSGWTFGAGAALQIPFAMQMAYRFNGIGVTQNVLYENQKLIANQFNSAIGKIQDSLSSTASALGKLQDVVNQNAQALNTLVKQLSSNFGAISSVLNDILSRLDPPEAEVQIDRLITGRLQSLQTYVTQQLIRAAEIRASANLAATKMSECVLGQSKRVDFCGKGYHLMSFPQSAPHGVVFLHVTYVPAQEKNFTTAPAICHDGKAHFPREGVFVSNGTHWFVTQRNFYEPQIITTDNTFVSGNCDVVIGIVNNTVYDPLQPELDSGGGSGGGQIYEGKLTAEGLRFGIVASRFNHALVDRLVEGAIDAIVRHGGREEDITLVRVPGSWEIPVAAGELARKEDIDAVIAIGVLIRGATPHFDYIASEVSKGLADLSLELRKPITFGVITADTLEQAIERAGTKHGNKGWEAALSAIEMANLFKSLR

SEQ ID NO: 7715 - protein, 1307 aa, Artificial Sequence
  SARS-CoV-2/Shenzhen/SZTH-001/2020__EPI_ISL_406592 spike protein (1-1147)(K986P_V987P) LumSynth construct
MFVFLVLLPLVSSQCVNLTTRTQLPPAYTNSFTRGVYYPDKVFRSSVLHSTQDLFLPFFSNVTWFHAIHVSGTNGTKRFDNPVLPFNDGVYFASTEKSNIIRGWIFGTTLDSKTQSLLIVNNATNVVIKVCEFQFCNDPFLGVYYHKNNKSWMESEFRVYSSANNCTFEYVSQPFLMDLEGKQGNFKNLREFVFKNIDGYFKIYSKHTPINLVRDLPQGFSALEPLVDLPIGINITRFQTLLALHRSYLTPGDSSSGWTAGAAAYYVGYLQPRTFLLKYNENGTITDAVDCALDPLSETKCTLKSFTVEKGIYQTSNFRVQPTESIVRFPNITNLCPFGEVFNATRFASVYAWNRKRISNCVADYSVLYNSASFSTFKCYGVSPTKLNDLCFTNVYADSFVIRGDEVRQIAPGQTGKIADYNYKLPDDFTGCVIAWNSNNLDSKVGGNYNYLYRLFRKSNLKPFERDISTEIYQAGSTPCNGVEGFNCYFPLQSYGFQPTNGVGYQPYRVVVLSFELLHAPATVCGPKKSTNLVKNKCVNFNFNGLTGTGVLTESNKKFLPFQQFGRDIADTTDAVRDPQTLEILDITPCSFGGVSVITPGTNTSNQVAVLYQDVNCTEVPVAIHADQLTPTWRVYSTGSNVFQTRAGCLIGAEHVNNSYECDIPIGAGICASYQTQTNSPRRARSVASQSIIAYTMSLGAENSVAYSNNSIAIPTNFTISVTTEILPVSMTKTSVDCTMYICGDSTECSNLLLQYGSFCTQLNRALTGIAVEQDKNTQEVFAQVKQIYKTPPIKDFGGFNFSQILPDPSKPSKRSFIEDLLFNKVTLADAGFIKQYGDCLGDIAARDLICAQKFNGLTVLPPLLTDEMIAQYTSALLAGTITSGWTFGAGAALQIPFAMQMAYRFNGIGVTQNVLYENQKLIANQFNSAIGKIQDSLSSTASALGKLQDVVNQNAQALNTLVKQLSSNFGAISSVLNDILSRLDPPEAEVQIDRLITGRLQSLQTYVTQQLIRAAEIRASANLAATKMSECVLGQSKRVDFCGKGYHLMSFPQSAPHGVVFLHVTYVPAQEKNFTTAPAICHDGKAHFPREGVFVSNGTHWFVTQRNFYEPQIITTDNTFVSGNCDVLIGIVNNTVYDPLQPELDSGGGSGGGQIYEGKLTAEGLRFGIVASRFNHALVDRLVEGAIDAIVRHGGREEDITLVRVPGSWEIPVAAGELARKEDIDAVIAIGVLIRGATPHFDYIASEVSKGLADLSLELRKPITFGVITADTLEQAIERAGTKHGNKGWEAALSAIEMANLFKSLR

SEQ ID NO: 7716 - protein, 1307 aa, Artificial Sequence
  SARS-CoV-2/Shenzhen/SZTH-004/2020__EPI_ISL_406595 spike protein (1-1147)(K986P_V987P) LumSynth construct
MFVFLVLLPLVSSQCVNLTTRTQLPPAYTNSFTRGVYYPDKVFRSSVLHSTQDLFLPFFSNVTWFHAIHVSGTNGTKRFDNPVLPFNDGVYFASTEKSNIIRGWIFGTTLDSKTQSLLIVNNATNVVIKVCEFQFCNDPFLGVYYHKNNKSWMESEFRVYSSANNCTFEYVSQPFLMDLEGKQGNFKNLREFVFKNIDGYFKIYSKHTPINLVRDLPQGFSALEPLVDLPIGINITRFQTLLALHRSYLTPGDSSSGWTAGAAAYYVGYLQPRTFLLKYNENGTITDAVDCALDPLSETKCTLKSFTVEKGIYQTSNFRVQPTESIVRFPNITNLCPFGEVFNATRFASVYAWDRKRISNCVAYYSVLYNSASFSTFKCYGVSPTKLNDLCFTNVYADSFVIRGDEVRQIAPGQTGKIADYNYKLPDDFTGCVIAWNSNNLDSKVGGNYNYLYRLFRKSNLKPFERDISTEIYQAGSTPCNGVEGFNCYFPLQSYGFQPTNGVGYQPYRVVVLSFELLHAPATVCGPKKSTNLVKNKCVNFNFNGLTGTGVLTESNKKFLPFQQFGRDIADTTDAVRDPQTLEILDITPCSFGGVSVITPGTNTSNQVAVLYQDVNCTEVPVAIHADQLTPTWRVYSTGSNVFQTRAGCLIGAEHVNNSYECDIPIGAGICASYQTQTNSPRRARSVASQSIIAYTMSLGAENSVAYSNNSIAIPTNFTISVTTEILPVSMTKTSVDCTMYICGDSTECSNLLLQYGSFCTQLNRALTGIAVEQDKNTQEVFAQVKQIYKTPPIKDFGGFNFSQILPDPSKPSKRSFIEDLLFNKVTLADAGFIKQYGDCLGDIAARDLICAQKFNGLTVLPPLLTDEMIAQYTSALLAGTITSGWTFGAGAALQIPFAMQMAYRFNGIGVTQNVLYENQKLIANQFNSAIGKIQDSLSSTASALGKLQDVVNQNAQALNTLVKQLSSNFGAISSVLNDILSRLDPPEAEVQIDRLITGRLQSLQTYVTQQLIRAAEIRASANLAATKMSECVLGQSKRVDFCGKGYHLMSFPQSAPHGVVFLHVTYVPAQEKNFTTAPAICHDGKAHFPREGVFVSNGTHWFVTQRNFYEPQIITTDNTFVSGNCDVVIGIVNNTVYDPLQPELDSGGGSGGGQIYEGKLTAEGLRFGIVASRFNHALVDRLVEGAIDAIVRHGGREEDITLVRVPGSWEIPVAAGELARKEDIDAVIAIGVLIRGATPHFDYIASEVSKGLADLSLELRKPITFGVITADTLEQAIERAGTKHGNKGWEAALSAIEMANLFKSLR

SEQ ID NO: 7717 - protein, 1307 aa, Artificial Sequence
  SARS-CoV-2/France/IDF0372/2020__EPI_ISL_406596 spike protein (1-1147)(K986P_V987P) LumSynth construct
MFVFLVLLPLVSSQCVNLTTRTQLPPAYTNSFTRGVYYPDKVFRSSVLHSTQDLFLPFFSNVTWFHAIHVSGTNGTKRFDNPVLPFNDGVYFASTEKSNIIRGWIFGTTLDSKTQSLLIVNNATNVVIKVCEFQFCNDPFLGVYYHKNNKSWMESEFRVYSSANNCTFEYVSQPFLMDLEGKQGNFKNLREFVFKNIDGYFKIYSKHTPINLVRDLPQGFSALEPLVDLPIGINITRFQTLLALHRSYLTPGDSSSGWTAGAAAYYVGYLQPRTFLLKYNENGTITDAVDCALDPLSETKCTLKSFTVEKGIYQTSNFRVQPTESIVRFPNITNLCPFGEVFNATRFASVYAWNRKRISNCVADYSFLYNSASFSTFKCYGVSPTKLNDLCFTNVYADSFVIRGDEVRQIAPGQTGKIADYNYKLPDDFTGCVIAWNSNNLDSKVGGNYNYLYRLFRKSNLKPFERDISTEIYQAGSTPCNGVEGFNCYFPLQSYGFQPTNGVGYQPYRVVVLSFELLHAPATVCGPKKSTNLVKNKCVNFNFNGLTGTGVLTESNKKFLPFQQFGRDIADTTDAVRDPQTLEILDITPCSFGGVSVITPGTNTSNQVAVLYQDVNCTEVPVAIHADQLTPTWRVYSTGSNVFQTRAGCLIGAEHVNNSYECDIPIGAGICASYQTQTNSPRRARSVASQSIIAYTMSLGAENSVAYSNNSIAIPTNFTISVTTEILPVSMTKTSVDCTMYICGDSTECSNLLLQYGSFCTQLNRALTGIAVEQDKNTQEVFAQVKQIYKTPPIKDFGGFNFSQILPDPSKPSKRSFIEDLLFNKVTLADAGFIKQYGDCLGDIAARDLICAQKFNGLTVLPPLLTDEMIAQYTSALLAGTITSGWTFGAGAALQIPFAMQMAYRFNGIGVTQNVLYENQKLIANQFNSAIGKIQDSLSSTASALGKLQDVVNQNAQALNTLVKQLSSNFGAISSVLNDILSRLDPPEAEVQIDRLITGRLQSLQTYVTQQLIRAAEIRASANLAATKMSECVLGQSKRVDFCGKGYHLMSFPQSAPHGVVFLHVTYVPAQEKNFTTAPAICHDGKAHFPREGVFVSNGTHWFVTQRNFYEPQIITTDNTFVSGNCDVVIGIVNNTVYDPLQPELDSGGGSGGGQIYEGKLTAEGLRFGIVASRFNHALVDRLVEGAIDAIVRHGGREEDITLVRVPGSWEIPVAAGELARKEDIDAVIAIGVLIRGATPHFDYIASEVSKGLADLSLELRKPITFGVITADTLEQAIERAGTKHGNKGWEAALSAIEMANLFKSLR

SEQ ID NO: 7718 - protein, 1307 aa, Artificial Sequence
  SARS-CoV-2/Australia/VIC01/2020__EPI_ISL_406844 spike protein (1-1147)(K986P_V987P) LumSynth construct
MFVFLVLLPLVSSQCVNLTTRTQLPPAYTNSFTRGVYYPDKVFRSSVLHSTQDLFLPFFSNVTWFHAIHVSGTNGTKRFDNPVLPFNDGVYFASTEKSNIIRGWIFGTTLDSKTQSLLIVNNATNVVIKVCEFQFCNDPFLGVYYHKNNKSWMESEFRVYSSANNCTFEYVSQPFLMDLEGKQGNFKNLREFVFKNIDGYFKIYSKHTPINLVRDLPQGFSALEPLVDLPIGINITRFQTLLALHRRYLTPGDSSSGWTAGAAAYYVGYLQPRTFLLKYNENGTITDAVDCALDPLSETKCTLKSFTVEKGIYQTSNFRVQPTESIVRFPNITNLCPFGEVFNATRFASVYAWNRKRISNCVADYSVLYNSASFSTFKCYGVSPTKLNDLCFTNVYADSFVIRGDEVRQIAPGQTGKIADYNYKLPDDFTGCVIAWNSNNLDSKVGGNYNYLYRLFRKSNLKPFERDISTEIYQAGSTPCNGVEGFNCYFPLQSYGFQPTNGVGYQPYRVVVLSFELLHAPATVCGPKKSTNLVKNKCVNFNFNGLTGTGVLTESNKKFLPFQQFGRDIADTTDAVRDPQTLEILDITPCSFGGVSVITPGTNTSNQVAVLYQDVNCTEVPVAIHADQLTPTWRVYSTGSNVFQTRAGCLIGAEHVNNSYECDIPIGAGICASYQTQTNSPRRARSVASQSIIAYTMSLGAENSVAYSNNSIAIPTNFTISVTTEILPVSMTKTSVDCTMYICGDSTECSNLLLQYGSFCTQLNRALTGIAVEQDKNTQEVFAQVKQIYKTPPIKDFGGFNFSQILPDPSKPSKRSFIEDLLFNKVTLADAGFIKQYGDCLGDIAARDLICAQKFNGLTVLPPLLTDEMIAQYTSALLAGTITSGWTFGAGAALQIPFAMQMAYRFNGIGVTQNVLYENQKLIANQFNSAIGKIQDSLSSTASALGKLQDVVNQNAQALNTLVKQLSSNFGAISSVLNDILSRLDPPEAEVQIDRLITGRLQSLQTYVTQQLIRAAEIRASANLAATKMSECVLGQSKRVDFCGKGYHLMSFPQSAPHGVVFLHVTYVPAQEKNFTTAPAICHDGKAHFPREGVFVSNGTHWFVTQRNFYEPQIITTDNTFVSGNCDVVIGIVNNTVYDPLQPELDSGGGSGGGQIYEGKLTAEGLRFGIVASRFNHALVDRLVEGAIDAIVRHGGREEDITLVRVPGSWEIPVAAGELARKEDIDAVIAIGVLIRGATPHFDYIASEVSKGLADLSLELRKPITFGVITADTLEQAIERAGTKHGNKGWEAALSAIEMANLFKSLR

SEQ ID NO: 7719 - protein, 1307 aa, Artificial Sequence
  SARS-CoV-2/Germany/BavPat1/2020__EPI_ISL_406862 spike protein (1-1147)(K986P_V987P) LumSynth construct
MFVFLVLLPLVSSQCVNLTTRTQLPPAYTNSFTRGVYYPDKVFRSSVLHSTQDLFLPFFSNVTWFHAIHVSGTNGTKRFDNPVLPFNDGVYFASTEKSNIIRGWIFGTTLDSKTQSLLIVNNATNVVIKVCEFQFCNDPFLGVYYHKNNKSWMESEFRVYSSANNCTFEYVSQPFLMDLEGKQGNFKNLREFVFKNIDGYFKIYSKHTPINLVRDLPQGFSALEPLVDLPIGINITRFQTLLALHRSYLTPGDSSSGWTAGAAAYYVGYLQPRTFLLKYNENGTITDAVDCALDPLSETKCTLKSFTVEKGIYQTSNFRVQPTESIVRFPNITNLCPFGEVFNATRFASVYAWNRKRISNCVADYSVLYNSASFSTFKCYGVSPTKLNDLCFTNVYADSFVIRGDEVRQIAPGQTGKIADYNYKLPDDFTGCVIAWNSNNLDSKVGGNYNYLYRLFRKSNLKPFERDISTEIYQAGSTPCNGVEGFNCYFPLQSYGFQPTNGVGYQPYRVVVLSFELLHAPATVCGPKKSTNLVKNKCVNFNFNGLTGTGVLTESNKKFLPFQQFGRDIADTTDAVRDPQTLEILDITPCSFGGVSVITPGTNTSNQVAVLYQGVNCTEVPVAIHADQLTPTWRVYSTGSNVFQTRAGCLIGAEHVNNSYECDIPIGAGICASYQTQTNSPRRARSVASQSIIAYTMSLGAENSVAYSNNSIAIPTNFTISVTTEILPVSMTKTSVDCTMYICGDSTECSNLLLQYGSFCTQLNRALTGIAVEQDKNTQEVFAQVKQIYKTPPIKDFGGFNFSQILPDPSKPSKRSFIEDLLFNKVTLADAGFIKQYGDCLGDIAARDLICAQKFNGLTVLPPLLTDEMIAQYTSALLAGTITSGWTFGAGAALQIPFAMQMAYRFNGIGVTQNVLYENQKLIANQFNSAIGKIQDSLSSTASALGKLQDVVNQNAQALNTLVKQLSSNFGAISSVLNDILSRLDPPEAEVQIDRLITGRLQSLQTYVTQQLIRAAEIRASANLAATKMSECVLGQSKRVDFCGKGYHLMSFPQSAPHGVVFLHVTYVPAQEKNFTTAPAICHDGKAHFPREGVFVSNGTHWFVTQRNFYEPQIITTDNTFVSGNCDVVIGIVNNTVYDPLQPELDSGGGSGGGQIYEGKLTAEGLRFGIVASRFNHALVDRLVEGAIDAIVRHGGREEDITLVRVPGSWEIPVAAGELARKEDIDAVIAIGVLIRGATPHFDYIASEVSKGLADLSLELRKPITFGVITADTLEQAIERAGTKHGNKGWEAALSAIEMANLFKSLR

SEQ ID NO: 7720 - protein, 1307 aa, Artificial Sequence
  SARS-CoV-2/Wuhan/HBCDC-HB-02/2020__EPI_ISL_412978 spike protein (1-1147)(K986P_V987P) LumSynth construct
MFVFLVLLPLVSSQCVNLTTRTQLPPAYTNSFTRGVYYPDKVFRSSVLHSTQDLFLPFFSNVTWFHAIHVSGTNGTKRFDNPVLPFNDGVYFASTEKSNIIRGWIFGTTLDSKTQSLLIVNNATNVVIKVCEFQFCNDPFLGVYYHKNNKSWMESEFRVYSSANNCTFEYVSQPFLMDLEGKQGNFKNLREFVFKNIDGYFKIYSKHTPINLVRDLPQGFSALEPLVDLPIGINITRFQTLLALHRSYLTPGDSSSGWTAGAAAYYVGYLQPRTFLLKYNENGTITDAVDCALDPLSETKCTLKSFTVEKGIYQTSNFRVQPTESIVRFPNITNLCPFGEVFNATRFASVYAWNRKRISNCVADYSVLYNSASFSTFKCYGVSPTKLNDLCFTNVYADSFVIRGDEVRQIAPGQTGKIADYNYKLPDDFTGCVIAWNSNNLDSKVGGNYNYLYRLFRKSNLKPFERDISTEIYQAGSTPCNGVEGFNCYFPLQSYGFQPTNGVGYQPYRVVVLSFELLHAPATVCGPKKSTNLVKNKCVNFNFNGLTGTGVLTESNKKFLPFQQFGRDIADTTDAVRDPQTLEILDITPCSFGGVSVITPGTNTSNQVAVLYQDVNCTEVPVAIHADQLTPTWRVYSTGSNVFQTRAGCLIGAEHVNNSYECDIPIGAGICASYQTQTNSPRRARSVASQSIIAYTMSLGAENSVAYSNNSIAIPTNFTISVTTEILPVSMTKTSVDCTMYICGDSTECSNFLLQYGSFCTQLNRALTGIAVEQDKNTQEVFAQVKQIYKTPPIKDFGGFNFSQILPDPSKPSKRSFIEDLLFNKVTLADAGFIKQYGDCLGDIAARDLICAQKFNGLTVLPPLLTDEMIAQYTSALLAGTITSGWTFGAGAALQIPFAMQMAYRFNGIGVTQNVLYENQKLIANQFNSAIGKIQDSLSSTASALGKLQDVVNQNAQALNTLVKQLSSNFGAISSVLNDILSRLDPPEAEVQIDRLITGRLQSLQTYVTQQLIRAAEIRASANLAATKMSECVLGQSKRVDFCGKGYHLMSFPQSAPHGVVFLHVTYVPAQEKNFTTAPAICHDGKAHFPREGVFVSNGTHWFVTQRNFYEPQIITTDNTFVSGNCDVVIGIVNNTVYDPLQPELDSGGGSGGGQIYEGKLTAEGLRFGIVASRFNHALVDRLVEGAIDAIVRHGGREEDITLVRVPGSWEIPVAAGELARKEDIDAVIAIGVLIRGATPHFDYIASEVSKGLADLSLELRKPITFGVITADTLEQAIERAGTKHGNKGWEAALSAIEMANLFKSLR

SEQ ID NO: 7721 - protein, 1307 aa, Artificial Sequence
  SARS-CoV-2/Australia/QLD02/2020__EPI_ISL_407896 spike protein (1-1147)(K986P_V987P) LumSynth construct
MFVFLVLLPLVSSQCVNLTTRTQLPPAYTNSFTRGVYYPDKVFRSSVLHSTQDLFLPFFSNVTWFHAIHVSGTNGTKRFDNPVLPFNDGVYFASTEKSNIIRGWIFGTTLDSKTQSLLIVNNATNVVIKVCEFQFCNDPFLGVYYHKNNKSWMESEFRVYSSANNCTFEYVSQPFLMDLEGKQGNFKNLREFVFKNIDGYFKIYSKHTPINLVRDLPQGFSALEPLVDLPIGINITRFQTLLALHRSYLTPGDSSSGWTAGAAAYYVGYLQPRTFLLKYNENGTITDAVDCALDPLSETKCTLKSFTVEKGIYQTSNFRVQPTESIVRFPNITNLCPFGEVFNATRFASVYAWNRKRISNCVADYSVLYNSASFSTFKCYGVSPTKLNDLCFTNVYADSFVIRGDEVRQIAPGQTGKIADYNYKLPDDFTGCVIAWNSNNLDSKVGGNYNYLYRLFRKSNLKPFERDISTEIYQAGSTPCNGVEGFNCYFPLQSYGFQPTNGVGYQPYRVVVLSFELLHAPATVCGPKKSTNLVKNKCVNFNFNGLTGTGVLTESNKKFLPFQQFGRDIADTTDAVRDPQTLEILDITPCSFGGVSVITPGTNTSNQVAVLYQDVNCTEVPVAIHADQLTPTWRVYSTGSNVFQTRAGCLIGAEHVNNSYECDIPIGAGICASYQTQTNSPRRARSVASQSIIAYTMSLGAENSVAYSNNSIAIPTNFTISVTTEILPVSMTKTSVDCTMYICGDSTECSNLLLQYGSFCTQLNRALTGIAVEQDKNTQEVFAQVKQIYKTPPIKDFGGFNFSQILPDPSKPSKRSFIEDLLFNKVTLADAGFIKQYGDCLGDIAARDLICAQKFNGLTVLPPLLTDEMIAQYTSALLAGTITSGWTFGAGAALQIPFAMQMAYRFNGIGVTQNVLYENQKLIANQFNSAIGKIQDSLSSTASALGKLQDVVNQNAQALNTLVKQLSSNFGAISSVLNDILSRLDPPEAEVQIDRLITGRLQSLQTYVTQQLIRAAEIRASANLAATKMSECVLGQSKRVDFCGKGYHLMSFPQSAPHGVVFLHVTYVPAQEKNFTTAPAICHDGKAHFPREGVFVSNGTHWFVTQRNFYEPQIITTDNTFVSGNCDVVIGIVNNTVYDPLQLELDSGGGSGGGQIYEGKLTAEGLRFGIVASRFNHALVDRLVEGAIDAIVRHGGREEDITLVRVPGSWEIPVAAGELARKEDIDAVIAIGVLIRGATPHFDYIASEVSKGLADLSLELRKPITFGVITADTLEQAIERAGTKHGNKGWEAALSAIEMANLFKSLR

SEQ ID NO: 7722 - protein, 1307 aa, Artificial Sequence
  SARS-CoV-2/India/1-31/2020__EPI_ISL_413523 spike protein (1-1147)(K986P_V987P) LumSynth construct
MFVFLVLLPLVSSQCVNLTTRTQLPPAYTNSFTRGVYYPDKVFRSSVLHSTQDLFLPFFSNVTWFHAIHVSGTNGTKRFDNPVLPFNDGVYFASTEKSNIIRGWIFGTTLDSKTQSLLIVNNATNVVIKVCEFQFCNDPFLGVYYHKNNKSWMESEFRVYSSANNCTFEYVSQPFLMDLEGKQGNFKNLREFVFKNIDGYFKIYSKHTPINLVRDLPQGFSALEPLVDLPIGINITRFQTLLALHRSYLTPGDSSSGWTAGAAAYYVGYLQPRTFLLKYNENGTITDAVDCALDPLSETKCTLKSFTVEKGIYQTSNFRVQPTESIVRFPNITNLCPFGEVFNATRFASVYAWNRKRISNCVADYSVLYNSASFSTFKCYGVSPTKLNDLCFTNVYADSFVIRGDEVRQIAPGQTGKIADYNYKLPDDFTGCVIAWNSNNLDSKVGGNYNYLYRLFRKSNLKPFERDISTEIYQAGSTPCNGVEGFNCYFPLQSYGFQPTNGVGYQPYRVVVLSFELLHAPATVCGPKKSTNLVKNKCVNFNFNGLTGTGVLTESNKKFLPFQQFGRDIADTTDAVRDPQTLEILDITPCSFGGVSVITPGTNTSNQVAVLYQDVNCTEVPVAIHADQLTPTWRVYSTGSNVFQTRAGCLIGAEHVNNSYECDIPIGAGICASYQTQTNSPRRARSVASQSIIAYTMSLGAENSVAYSNNSIAIPTNFTISVTTEILPVSMTKTSVDCTMYICGDSTECSNLLLQYGSFCTQLNRALTGIAVEQDKNTQEVFAQVKQIYKTPPIKDFGGFNFSQILPDPSKPSKRSFIEDLLFNKVTLADAGFIKQYGDCLGDIAARDLICAQKFNGLTVLPPLLTDEMIAQYTSALLAGTITSGWTFGAGAALQIPFAMQMAYRFNGIGVTQNVLYENQKLIANQFNSVIGKIQDSLSSTASALGKLQDVVNQNAQALNTLVKQLSSNFGAISSVLNDILSRLDPPEAEVQIDRLITGRLQSLQTYVTQQLIRAAEIRASANLAATKMSECVLGQSKRVDFCGKGYHLMSFPQSAPHGVVFLHVTYVPAQEKNFTTAPAICHDGKAHFPREGVFVSNGTHWFVTQRNFYEPQIITTDNTFVSGNCDVVIGIVNNTVYDPLQPELDSGGGSGGGQIYEGKLTAEGLRFGIVASRFNHALVDRLVEGAIDAIVRHGGREEDITLVRVPGSWEIPVAAGELARKEDIDAVIAIGVLIRGATPHFDYIASEVSKGLADLSLELRKPITFGVITADTLEQAIERAGTKHGNKGWEAALSAIEMANLFKSLR

SEQ ID NO: 7723 - protein, 1307 aa, Artificial Sequence
  SARS-CoV-2/Guangdong/GD2020087-P0008/2020__EPI_ISL_413863 spike protein (1-1147)(K986P_V987P) LumSynth construct
MFVFLVLLPLVSSQCVNLTTRTQLPPAYTNSFTRGVYYPDKVFRSSVLHSTQDLFLPFFSNVTWFHAIHVSGTNGTKRFDNPVLPFNDGVYFASTEKSNIIRGWIFGTTLDSKTQSLLIVNNATNVVIKVCEFQFCNDPFLGVYYHKNNKSWMESEFRVYSSANNCTFEYVSQPFLMDLEGKQGNFKNLREFVFKNIDGYFKIYSKHTPINLVRDLPQGFSALEPLVDLPIGINITRFQTLLALHRSYLTPGDSSSGWTAGAAAYYVGYLQPRTFLLKYNENGTITDAVDCALDPLSETKCTLKSFTVEKGIYQTSNFRVQPTESIVRFPNITNLCPFGEVFNATRFASVYAWNRKRISNCVADYSVLYNSASFSTFKCYGVSPTKLNDLCFTNVYADSFVIRGDEVREIAPGQTGKIADYNYKLPDDFTGCVIAWNSNNLDSKVGGNYNYLYRLFRKSNLKPFERDISTEIYQAGSTPCNGVEGFNCYFPLQSYGFQPTNGVGYQPYRVVVLSFELLHAPATVCGPKKSTNLVKNKCVNFNFNGLTGTGVLTESNKKFLPFQQFGRDIADTTDAVRDPQTLEILDITPCSFGGVSVITPGTNTSNQVAVLYQDVNCTEVPVAIHADQLTPTWRVYSTGSNVFQTRAGCLIGAEHVNNSYECDIPIGAGICASYQTQTNSPRRARSVASQSIIAYTMSLGAENSVAYSNNSIAIPTNFTISVTTEILPVSMTKTSVDCTMYICGDSTECSNLLLQYGSFCTQLNRALTGIAVEQDKNTQEVFAQVKQIYKTPPIKDFGGFNFSQILPDPSKPSKRSFIEDLLFNKVTLADAGFIKQYGDCLGDIAARDLICAQKFNGLTVLPPLLTDEMIAQYTSALLAGTITSGWTFGAGAALQIPFAMQMAYRFNGIGVTQNVLYENQKLIANQFNSAIGKIQDSLSSTASALGKLQDVVNQNAQALNTLVKQLSSNFGAISSVLNDILSRLDPPEAEVQIDRLITGRLQSLQTYVTQQLIRAAEIRASANLAATKMSECVLGQSKRVDFCGKGYHLMSFPQSAPHGVVFLHVTYVPAQEKNFTTAPAICHDGKAHFPREGVFVSNGTHWFVTQRNFYEPQIITTDNTFVSGNCDVVIGIVNNTVYDPLQPELDSGGGSGGGQIYEGKLTAEGLRFGIVASRFNHALVDRLVEGAIDAIVRHGGREEDITLVRVPGSWEIPVAAGELARKEDIDAVIAIGVLIRGATPHFDYIASEVSKGLADLSLELRKPITFGVITADTLEQAIERAGTKHGNKGWEAALSAIEMANLFKSLR

SEQ ID NO: 7724 - protein, 1307 aa, Artificial Sequence
  SARS-CoV-2/Sweden/01/2020__EPI_ISL_411951 spike protein (1-1147)(K986P_V987P) LumSynth construct
MFVFLVLLPLVSSQCVNLTTRTQLPPAYTNSFTRGVYYPDKVFRSSVLHSTQDLFLPFFSNVTWFHAIHVSGTNGTKRFDNPVLPFNDGVYFASTEKSNIIRGWIFGTTLDSKTQSLLIVNNATNVVIKVCEFQFCNDPFLGVYYHKNNKSWMESEFRVYSSANNCTFEYVSQPFLMDLEGKQGNFKNLREFVFKNIDGYFKIYSKHTPINLVRDLPQGFSALEPLVDLPIGINITRFQTLLALHRSYLTPGDSSSGWTAGAAAYYVGYLQPRTFLLKYNENGTITDAVDCALDPLSETKCTLKSFTVEKGIYQTSNFRVQPTESIVRFPNITNLCPFGEVFNATRFASVYAWNRKRISNCVADYSVLYNSASFSTFKCYGVSPTKLNDLCFTNVYADSFVIRGDEVRQIAPGQTGKIADYNYKLPDDFTGCVIAWNSNNLDSKVGGNYNYLYRLFRKSNLKPFERDISTEIYQAGSTPCNGVEGFNCYFPLQSYGFQPTNGVGYQPYRVVVLSFELLHAPATVCGPKKSTNLVKNKCVNFNFNGLTGTGVLTESNKKFLPFQQFGRDIADTTDAVRDPQTLEILDITPCSFGGVSVITPGTNTSNQVAVLYQDVNCTEVPVAIHADQLTPTWRVYSTGSNVFQTRAGCLIGAEHVNNSYECDIPIGAGICASYQTQTNSPRRARSVASQSIIAYTMSLGAENSVAYSNNSIAIPTNFTISVTTEILPVSMTKTSVDCTMYICGDSTECSNLLLQYGSFCTQLNRALTGIAVEQDKNTQEVFAQVKQIYKTPPIKDCGGFNFSQILPDPSKPSKRSFIEDLLFNKVTLADAGFIKQYGDCLGDIAARDLICAQKFNGLTVLPPLLTDEMIAQYTSALLAGTITSGWTFGAGAALQIPFAMQMAYRFNGIGVTQNVLYENQKLIANQFNSAIGKIQDSLSSTASALGKLQDVVNQNAQALNTLVKQLSSNFGAISSVLNDILSRLDPPEAEVQIDRLITGRLQSLQTYVTQQLIRAAEIRASANLAATKMSECVLGQSKRVDFCGKGYHLMSFPQSAPHGVVFLHVTYVPAQEKNFTTAPAICHDGKAHFPREGVFVSNGTHWFVTQRNFYEPQIITTDNTFVSGNCDVVIGIVNNTVYDPLQPELDSGGGSGGGQIYEGKLTAEGLRFGIVASRFNHALVDRLVEGAIDAIVRHGGREEDITLVRVPGSWEIPVAAGELARKEDIDAVIAIGVLIRGATPHFDYIASEVSKGLADLSLELRKPITFGVITADTLEQAIERAGTKHGNKGWEAALSAIEMANLFKSLR

SEQ ID NO: 7725 - protein, 1307 aa, Artificial Sequence
  SARS-CoV-2/Tianmen/HBCDC-HB-07/2020__EPI_ISL_412983 spike protein (1-1147)(K986P_V987P) LumSynth construct
MFVFLVLLPLVSSQCVNLTTRTQLPPAYTNSFTRGVYYPDKVFRSSVLHSTQDLFLPFFSNVTWFHAIHVSGTNGTKRFDNPVLPFNDGVYFASTEKSNIIRGWIFGTTLDSKTQSLLIVNNATNVVIKVCEFQFCNDPFLGVYYHKNNKSWMESEFRVYSSANNCTFEYVSQPFLMDLEGKQGNFKNLREFVFKNIDGYFKIYSKHTPINLVRDLPQGFSALEPLVDLPIGINITRFQTLLALHRSYLTPGDSSSGWTAGAAAYYVGYLQPRTFLLKYNENGTITDAVDCALDPLSETKCTLKSFTVEKGIYQTSNFRVQPTESIVRFPNITNLCPFGEVFNATRFASVYAWNRKRISNCVADYSVLYNSASFSTFKCYGVSPTKLNDLCFTNVYADSFVIRGDEVRQIAPGQTGKIADYNYKLPDDFTGCVIAWNSNNLDSKVGGNYNYLYRLFRKSNLKPFERDISTEIYQAGSTPCNGVEGFNCYFPLQSYGFQPTNGVGYQPYRVVVLSFELLHAPATVCGPKKSTNLVKNKCVNFNFNGLTGTGVLTESNKKFLPFQQFGRDIADTTDAVRDPQTLEILDITPCSFGGVSVITPGTNTSNQVAVLYQDLNCTEVPVAIHADQLTPTWRVYSTGSNVFQTRAGCLIGAEHVNNSYECDIPIGAGICASYQTQTNSPRRARSVASQSIIAYTMSLGAENSVAYSNNSIAIPTNFTISVTTEILPVSMTKTSVDCTMYICGDSTECSNLLLQYGSFCTQLNRALTGIAVEQDKNTQEVFAQVKQIYKTPPIKDFGGFNFSQILPDPSKPSKRSFIEDLLFNKVTLADAGFIKQYGDCLGDIAARDLICAQKFNGLTVLPPLLTDEMIAQYTSALLAGTITSGWTFGAGAALQIPFAMQMAYRFNGIGVTQNVLYENQKLIANQFNSAIGKIQDSLSSTASALGKLQDVVNQNAQALNTLVKQLSSNFGAISSVLNDILSRLDPPEAEVQIDRLITGRLQSLQTYVTQQLIRAAEIRASANLAATKMSECVLGQSKRVDFCGKGYHLMSFPQSAPHGVVFLHVTYVPAQEKNFTTAPAICHDGKAHFPREGVFVSNGTHWFVTQRNFYEPQIITTDNTFVSGNCDVVIGIVNNTVYDPLQPELDSGGGSGGGQIYEGKLTAEGLRFGIVASRFNHALVDRLVEGAIDAIVRHGGREEDITLVRVPGSWEIPVAAGELARKEDIDAVIAIGVLIRGATPHFDYIASEVSKGLADLSLELRKPITFGVITADTLEQAIERAGTKHGNKGWEAALSAIEMANLFKSLR

SEQ ID NO: 7726 - protein, 1307 aa, Artificial Sequence
  SARS-CoV-2/Hong Kong/case42_VM20002493/2020__EPI_ISL_414527 spike protein (1-1147)(K986P_V987P) LumSynth construct
MFVFLVLLPLVSSQCVNLTTRTQLPPAYTNSFTRGVYYPDKVFRSSVLHSTQDLFLPFFSNVTWFHAIHVSGTNGTKRFDNPVLPFNDGVYFASTEKSNIIRGWIFGTTLDSKTQSLLIVNNATNVVIKVCEFQFCNDPFLGVYYHKNNKSWMESEFRVYSSANNCTFEYVSQPFLMDLEGKQGNFKNLREFVFKNIDGYFKIYSKHTPINLVRDLPQGFSALEPLVDLPIGINITRFQTLLALHRSYLTPGDSSSGWTAGAAAYYVGYLQPRTFLLKYNENGTITDAVDCALDPLSETKCTLKSFTVEKGIYQTSNFRVQPTESIVRFPNITNLCPFGEVFNATRFASVYAWNRKRISNCVADYSVLYNSASFSTFKCYGVSPTKLNDLCFTNVYADSFVIRGDEVRQIAPGQTGKIADYNYKLPDDFTGCVIAWNSNNLDSKVGGNYNYLYRLFRKSNLKPFERDISTEIYQAGSTPCNGVEGFNCYFPLQSYGFQPTNGVGYQPYRVVVLSFELLHAPATVCGPKKSTNLVKNKCVNFNFNGLTGTGVLTESNKKFLPFQQFGRDIADTTDAVRDPQTLEILDITPCSFGGVSVITPGTNTSNQVAVLYQDVNCTEVPVAIHADQLTPTWRVYSTGSNVFQTRAGCLIGAEHVNNSYECDIPIGAGICASYQTQTNSPRRARSVASQSIIAYTMSLGAENSVAYSNNSIAIPTNFAISVTTEILPVSMTKTSVDCTMYICGDSTECSNLLLQYGSFCTQLNRALTGIAVEQDKNTQEVFAQVKQIYKTPPIKDFGGFNFSQILPDPSKPSKRSFIEDLLFNKVTLADAGFIKQYGDCLGDIAARDLICAQKFNGLTVLPPLLTDEMIAQYTSALLAGTITSGWTFGAGAALQIPFAMQMAYRFNGIGVTQNVLYENQKLIANQFNSAIGKIQDSLSSTASALGKLQDVVNQNAQALNTLVKQLSSNFGAISSVLNDILSRLDPPEAEVQIDRLITGRLQSLQTYVTQQLIRAAEIRASANLAATKMSECVLGQSKRVDFCGKGYHLMSFPQSAPHGVVFLHVTYVPAQEKNFTTAPAICHDGKAHFPREGVFVSNGTHWFVTQRNFYEPQIITTDNTFVSGNCDVVIGIVNNTVYDPLQPELDSGGGSGGGQIYEGKLTAEGLRFGIVASRFNHALVDRLVEGAIDAIVRHGGREEDITLVRVPGSWEIPVAAGELARKEDIDAVIAIGVLIRGATPHFDYIASEVSKGLADLSLELRKPITFGVITADTLEQAIERAGTKHGNKGWEAALSAIEMANLFKSLR

SEQ ID NO: 7727 - protein, 1307 aa, Artificial Sequence
  SARS-CoV-2/USA/CruiseA-23/2020__EPI_ISL_414482 spike protein (1-1147)(K986P_V987P) LumSynth construct
MFVFLVLLPLVSSQCVNLTTRTQLPPAYTNSFTRGVYYPDKVFRSSVLHSTQDLFLPFFSNVTWFHAIHVSGTNGTKRFDNPVLPFNDGVYFASTEKSNIIRGWIFGTTLDSKTQSLLIVNNATNVVIKVCEFQFCNDPFLGVYYHKNNKSWMESEFRVYSSANNCTFEYVSQPFLMDLEVKQGNFKNLREFVFKNIDGYFKIYSKHTPINLVRDLPQGFSALEPLVDLPIGINITRFQTLLALHRSYLTPGDSSSGWTAGAAAYYVGYLQPRTFLLKYNENGTITDAVDCALDPLSETKCTLKSFTVEKGIYQTSNFRVQPTESIVRFPNITNLCPFGEVFNATRFASVYAWNRKRISNCVADYSVLYNSASFSTFKCYGVSPTKLNDLCFTNVYADSFVIRGDEVRQIAPGQTGKIADYNYKLPDDFTGCVIAWNSNNLDSKVGGNYNYLYRLFRKSNLKPFERDISTEIYQAGSTPCNGVEGFNCYFPLQSYGFQPTNGVGYQPYRVVVLSFELLHAPATVCGPKKSTNLVKNKCVNFNFNGLTGTGVLTESNKKFLPFQQFGRDIADTTDAVRDPQTLEILDITPCSFGGVSVITPGTNTSNQVAVLYQDVNCTEVPVAIHADQLTPTWRVYSTGSNVFQTRAGCLIGAEHVNNSYECDIPIGAGICASYQTQTNSPRRARSVASQSIIAYTMSLGAENSVAYSNNSIAIPTNFTISVTTEILPVSMTKTSVDCTMYICGDSTECSNLLLQYGSFCTQLNRALTGIAVEQDKNTQEVFAQVKQIYKTPPIKDFGGFNFSQILPDPSKPSKRSFIEDLLFNKVTLADAGFIKQYGDCLGDIAARDLICAQKFNGLTVLPPLLTDEMIAQYTSALLAGTITSGWTFGAGAALQIPFAMQMAYRFNGIGVTQNVLYENQKLIANQFNSAIGKIQDSLSSTASALGKLQDVVNQNAQALNTLVKQLSSNFGAISSVLNDILSRLDPPEAEVQIDRLITGRLQSLQTYVTQQLIRAAEIRASANLAATKMSECVLGQSKRVDFCGKGYHLMSFPQSAPHGVVFLHVTYVPAQEKNFTTAPAICHDGKAHFPREGVFVSNGTHWFVTQRNFYEPQIITTDNTFVSGNCDVVIGIVNNTVYDPLQPELDSGGGSGGGQIYEGKLTAEGLRFGIVASRFNHALVDRLVEGAIDAIVRHGGREEDITLVRVPGSWEIPVAAGELARKEDIDAVIAIGVLIRGATPHFDYIASEVSKGLADLSLELRKPITFGVITADTLEQAIERAGTKHGNKGWEAALSAIEMANLFKSLR

SEQ ID NO: 7728 - protein, 1307 aa, Artificial Sequence
  SARS-CoV-2/Hong Kong/case85_VM20002868/2020__EPI_ISL_414519 spike protein (1-1147)(K986P_V987P) LumSynth construct
MFVFLVLVPLVSSQCVNLTTRTQLPPAYTNSFTRGVYYPDKVFRSSVLHSTQDLFLPFFSNVTWFHAIHVSGTNGTKRFDNPVLPFNDGVYFASTEKSNIIRGWIFGTTLDSKTQSLLIVNNATNVVIKVCEFQFCNDPFLGVYYHKNNKSWMESEFRVYSSANNCTFEYVSQPFLMDLEGKQGNFKNLREFVFKNIDGYFKIYSKHTPINLVRDLPQGFSALEPLVDLPIGINITRFQTLLALHRSYLTPGDSSSGWTAGAAAYYVGYLQPRTFLLKYNENGTITDAVDCALDPLSETKCTLKSFTVEKGIYQTSNFRVQPTESIVRFPNITNLCPFGEVFNATRFASVYAWNRKRISNCVADYSVLYNSASFSTFKCYGVSPTKLNDLCFTNVYADSFVIRGDEVRQIAPGQTGKIADYNYKLPDDFTGCVIAWNSNNLDSKVGGNYNYLYRLFRKSNLKPFERDISTEIYQAGSTPCNGVEGFNCYFPLQSYGFQPTNGVGYQPYRVVVLSFELLHAPATVCGPKKSTNLVKNKCVNFNFNGLTGTGVLTESNKKFLPFQQFGRDIADTTDAVRDPQTLEILDITPCSFGGVSVITPGTNTSNQVAVLYQDVNCTEVPVAIHADQLTPTWRVYSTGSNVFQTRAGCLIGAEHVNNSYECDIPIGAGICASYQTQTNSPRRARSVASQSIIAYTMSLGAENSVAYSNNSIAIPTNFTISVTTEILPVSMTKTSVDCTMYICGDSTECSNLLLQYGSFCTQLNRALTGIAVEQDKNTQEVFAQVKQIYKTPPIKDFGGFNFSQILPDPSKPSKRSFIEDLLFNKVTLADAGFIKQYGDCLGDIAARDLICAQKFNGLTVLPPLLTDEMIAQYTSALLAGTITSGWTFGAGAALQIPFAMQMAYRFNGIGVTQNVLYENQKLIANQFNSAIGKIQDSLSSTASALGKLQDVVNQNAQALNTLVKQLSSNFGAISSVLNDILSRLDPPEAEVQIDRLITGRLQSLQTYVTQQLIRAAEIRASANLAATKMSECVLGQSKRVDFCGKGYHLMSFPQSAPHGVVFLHVTYVPAQEKNFTTAPAICHDGKAHFPREGVFVSNGTHWFVTQRNFYEPQIITTDNTFVSGNCDVVIGIVNNTVYDPLQPELDSGGGSGGGQIYEGKLTAEGLRFGIVASRFNHALVDRLVEGAIDAIVRHGGREEDITLVRVPGSWEIPVAAGELARKEDIDAVIAIGVLIRGATPHFDYIASEVSKGLADLSLELRKPITFGVITADTLEQAIERAGTKHGNKGWEAALSAIEMANLFKSLR

SEQ ID NO: 7729 - protein, 1307 aa, Artificial Sequence; identical to SEQ ID NO: 7719
  SARS-CoV-2/England/200990660/2020__EPI_ISL_414523 spike protein (1-1147)(K986P_V987P) LumSynth construct

SEQ ID NO: 7730 - protein, 1307 aa, Artificial Sequence
  SARS-CoV-2/Australia/NSW09/2020__EPI_ISL_413595 spike protein (1-1147)(K986P_V987P) LumSynth construct
MFVFLVLLPLVSSQCVNLTTRTQLPPAYTNSFTRGVYYPDKVFRSSVLHSTQDLFLPFFSNVTWFHAIHVSGTNGTKRFDNPVLPFNDGVYFASTEKSNIIRGWIFGTTLDSKTQSLLIVNNATNVVIKVCEFQFCNDPFLGVYYHKNNKSWMESEFRVYSSANNCTFEYVSQPFLMDLEGKQGNFKNLREFVFKNIDGYFKIYSKHTPINLVRDLPQGFSALEPLVDLPIGINITRFQTLLALHRSYLTPGDSSSGWTAGAAAYYVGYLQPRTFLLKYNENGTITDAVDCALDPLSETKCTLKSFTVEKGIYQTSNFRVQPTESIVRFPNITNLCPFGEVFNATRFASVYAWNRKRISNCVADYSVLYNSASFSTFKCYGVSPTKLNDLCFTNVYADSFVIRGDEVRQIAPGQTGKIADYNYKLPDDFTGCVIAWNSNNLDSKVGGNYNYLYRLFRKSNLKPFERDISTEIYQAGSTPCNGVEGFNCYFPLQSYGFQPTNGVGYQPYRVVVLSFELLHAPATVCGPKKSTNLVKNKCVNFNFNGLTGTGVLTESNKKFLPFQQFGRDIADTTDAVRDPQTLEILDITPCSFGGVSVITPGTNTSNQVAVLYQDVNCTEVPVAIHADQLTPTWRVYSTGSNVFQTRAGCLIGAEHVNNSYECDIPIGAGICASYQTQTNSPRRARSVASQSIIAYTMSLGAENSVAYSNNSIAIPTNFTISVTTEILPVSMTKTSVDCTMYICGDSTECSNLLLQYGSFCTQLNRALTGIAVEQDKNTQEVFAQVKQIYKTPPIKDFGGFNFSQILPDPSKPSKRSFIEDLLFNKVTLADAGFIKQYGDCLGDIAARDLICAQKFNGLTVLPPLLTDEMIAQYTSALLAGTITSGWTFGAGAALQIPFAMQMAYRFNGIGVTQNVLYENQKLIANQFNSAIGKIQDSLSFTASALGKLQDVVNQNAQALNTLVKQLSSNFGAISSVLNDILSRLDPPEAEVQIDRLITGRLQSLQTYVTQQLIRAAEIRASANLAATKMSECVLGQSKRVDFCGKGYHLMSFPQSAPHGVVFLHVTYVPAQEKNFTTAPAICHDGKAHFPREGVFVSNGTHWFVTQRNFYEPQIITTDNTFVSGNCDVVIGIVNNTVYDPLQPELDSGGGSGGGQIYEGKLTAEGLRFGIVASRFNHALVDRLVEGAIDAIVRHGGREEDITLVRVPGSWEIPVAAGELARKEDIDAVIAIGVLIRGATPHFDYIASEVSKGLADLSLELRKPITFGVITADTLEQAIERAGTKHGNKGWEAALSAIEMANLFKSLR

SEQ ID NO: 7731 - protein, 1307 aa, Artificial Sequence; identical to SEQ ID NO: 7711
  SARS-CoV-2/Australia/NSW10/2020__EPI_ISL_413596 spike protein (1-1147)(K986P_V987P) LumSynth construct

SEQ ID NO: 7732 - protein, 1307 aa, Artificial Sequence
  SARS-CoV-2/Switzerland/1000477797/2020__EPI_ISL_413023 spike protein (1-1147)(K986P_V987P) LumSynth construct
MFVFLVLLPLVSSQCVNLTTRTQLPPAYTNSFTRGVYYPDKVFRSSVLHSTQDLFLPFFSNVTWFHAIHVSGTNGTKRFDNPVLPFNDGVYFASTEKSNIIRGWIFGTTLDSKTQSLLIVNNATNVVIKVCEFQFCNDPFLGVYYHKNNKSWMESEFRVYSSANNCTFEYVSQPFLMDLEGKQGNFKNLREFVFKNIDGYFNIYSKHTPINLVRDLPQGFSALEPLVDLPIGINITRFQTLLALHRSYLTPGDSSSGWTAGAAAYYVGYLQPRTFLLKYNENGTITDAVDCALDPLSETKCTLKSFTVEKGIYQTSNFRVQPTESIVRFPNITNLCPFGEVFNATRFASVYAWNRKRISNCVADYSVLYNSASFSTFKCYGVSPTKLNDLCFTNVYADSFVIRGDEVRQIAPGQTGKIADYNYKLPDDFTGCVIAWNSNNLDSKVGGNYNYLYRLFRKSNLKPFERDISTEIYQAGSTPCNGVEGFNCYFPLQSYGFQPTNGVGYQPYRVVVLSFELLHAPATVCGPKKSTNLVKNKCVNFNFNGLTGTGVLTESNKKFLPFQQFGRDIADTTDAVRDPQTLEILDITPCSFGGVSVITPGTNTSNQVAVLYQGVNCTEVPVAIHADQLTPTWRVYSTGSNVFQTRAGCLIGAEHVNNSYECDIPIGAGICASYQTQTNSPRRARSVASQSIIAYTMSLGAENSVAYSNNSIAIPTNFTISVTTEILPVSMTKTSVDCTMYICGDSTECSNLLLQYGSFCTQLNRALTGIAVEQDKNTQEVFAQVKQIYKTPPIKDFGGFNFSQILPDPSKPSKRSFIEDLLFNKVTLADAGFIKQYGDCLGDIAARDLICAQKFNGLTVLPPLLTDEMIAQYTSALLAGTITSGWTFGAGAALQIPFAMQMAYRFNGIGVTQNVLYENQKLIANQFNSAIGKIQDSLSSTASALGKLQDVVNQNAQALNTLVKQLSSNFGAISSVLNDILSRLDPPEAEVQIDRLITGRLQSLQTYVTQQLIRAAEIRASANLAATKMSECVLGQSKRVDFCGKGYHLMSFPQSAPHGVVFLHVTYVPAQEKNFTTAPAICHDGKAHFPREGVFVSNGTHWFVTQRNFYEPQIITTDNTFVSGNCDVVIGIVNNTVYDPLQPELDSGGGSGGGQIYEGKLTAEGLRFGIVASRFNHALVDRLVEGAIDAIVRHGGREEDITLVRVPGSWEIPVAAGELARKEDIDAVIAIGVLIRGATPHFDYIASEVSKGLADLSLELRKPITFGVITADTLEQAIERAGTKHGNKGWEAALSAIEMANLFKSLR

SEQ ID NO: 7733 - protein, 1307 aa, Artificial Sequence
  SARS-CoV-2/Belgium/BA-02291/2020__EPI_ISL_415159 spike protein (1-1147)(K986P_V987P) LumSynth construct
MFVFLVLLPLVSSQCVNLTTRTQLPPAYTNSFTRGVYYPDKVFRSSVLHSTQDLFLPFFSNVTWFHAIHVSGTNGTKRFDNPVLPFNDGVYFASTEKSNIIRGWIFGTTLDSKTQSLLIVNNATNVVIKVCEFQFCNDPFLGVYYHKNNKSWMESEFRVYSSANNCTFEYVSQPFLMDLEGKQGNFKNLREFVFKNIDGYFKIYSKHTPINLVRDLPQGFSALEPLVDLPIGINITRFQTLLALHRSYLTPGDSSSGWTAGAAAYYVGYLQPRTFLLKYNENGTITDAVDCALDPLSETKCTLKSFTVEKGIYQTSNFRVQPTESIVRFPNITNLCPFGEVFNATRFASVYAWNRKRISNCVADYSVLYNSASFSTFKCYGVSPTKLNDLCFTNVYADSFVIRGDEVRQIAPGQTGKIADYNYKLPDDFTGCVIAWNSNNLDSKVGGNYNYLYRLFRRSNLKPFERDISTEIYQAGSTPCNGVEGFNCYFPLQSYGFQPTNGVGYQPYRVVVLSFELLPAPATVCGPKKSTNLVKNKCVNFNFNGLTGTGVLTESNKKFLPFQQFGRDIADTTDAVRDPQTLEILDITPCSFGGVSVITPGTNTSNQVAVLYQGVNCTEVPVAIHADQLTPTWRVYSTGSNVFQTRAGCLIGAEHVNNSYECDIPIGAGICASYQTQTNSPRRARSVASQSIIAYTMSLGAENSVAYSNNSIAIPTNFTISVTTEILPVSMTKTSVDCTMYICGDSTECSNLLLQYGSFCTQLNRALTGIAVEQDKNTQEVFAQVKQIYKTPPIKDFGGFNFSQILPDPSKPSKRSFIEDLLFNKVTLADAGFIKQYGDCLGDIAARDLICAQKFNGLTVLPPLLTDEMIAQYTSALLAGTITSGWTFGAGAALQIPFAMQMAYRFNGIGVTQNVLYENQKLIANQFNSAIGKIQDSLSSAAPALGKLQDVVNQNAQALNTLVKQLSSNFGAISSVLNDILSRLDPPEAEVQIDRLITGRLQSLQTYVTQQLIRAAEIRASANLAATKMSECVLGQSKRVDFCGKGYHLMSFPQSAPHGVVFLHVTYVPAQEKNFTTAPAICHDGKAHFPREGVFVSNGTHWFVTQRNFYEPQIITTDNTFVSGNCDVVIGIVNNTVYDPLQPELDSGGGSGGGQIYEGKLTAEGLRFGIVASRFNHALVDRLVEGAIDAIVRHGGREEDITLVRVPGSWEIPVAAGELARKEDIDAVIAIGVLIRGATPHFDYIASEVSKGLADLSLELRKPITFGVITADTLEQAIERAGTKHGNKGWEAALSAIEMANLFKSLR

SEQ ID NO: 7734 - protein, 1307 aa, Artificial Sequence
  SARS-CoV-2/USA/WA8-UW5/2020__EPI_ISL_413486 spike protein (1-1147)(K986P_V987P) LumSynth construct
MFVFLVLLPLVSSQCVNLTTRTQLPPAYTNSFTRGVYYPDKVFRSSVLHSTQDLFLPFFSNVTWFHAIHVSGTNGTKRFDNPVLPFNDGVYFASTEKSNIIRGWIFGTTLDSKTQSLLIVNNATNVVIKVCEFQFCNDPFLGVYYHKNNKSWMESEFRVYSSANNCTFEYVSQPFLMDLEGKQGNFKNLREFVFKNIDGYFKIYSKHTPINLVRDLPQGFSALEPLVDLPIGINITRFQTLLALHRSYLTPGDSSSGWTAGAAAYYVGYLQPRTFLLKYNENGTITDAVDCALDPLSETKCTLKSFTVEKGIYQTSNFRVQPTESIVRFPNITNLCPFGEVFNATRFASVYAWNRKRISNCVADYSVLYNSASFSTFKCYGVSPTKLNDLCFTNVYADSFVIRGDEVRQIAPGQTGKIADYNYKLPDDFTGCVIAWNSNNLDSKVGGNYNYLYRLFRKSNLKPFERDISTEIYQAGSTPCNGVEGFNCYFPLQSYGFQPTNGVGYQPYRVVVLSFELLHAPATVCGPKKSTNLVKNKCVNFNFNGLTGTGVLTESNKKFLPFQQFGRDIADTTDAVRDPQTLEILDITPCSFGGVSVITPGTNTSNQVAVLYQDVNCTEVPVAIHADQLTPTWRVYSTGSNVFQTRAGCLIGAEYVNNSYECDIPIGAGICASYQTQTNSPRRARSVASQSIIAYTMSLGAENSVAYSNNSIAIPTNFTISVTTEILPVSMTKTSVDCTMYICGDSTECSNLLLQYGSFCTQLNRALTGIAVEQDKNTQEVFAQVKQIYKTPPIKDFGGFNFSQILPDPSKPSKRSFIEDLLFNKVTLADAGFIKQYGDCLGDIAARDLICAQKFNGLTVLPPLLTDEMIAQYTSALLAGTITSGWTFGAGAALQIPFAMQMAYRFNGIGVTQNVLYENQKLIANQFNSAIGKIQDSLSSTASALGKLQDVVNQNAQALNTLVKQLSSNFGAISSVLNDILSRLDPPEAEVQIDRLITGRLQSLQTYVTQQLIRAAEIRASANLAATKMSECVLGQSKRVDFCGKGYHLMSFPQSAPHGVVFLHVTYVPAQEKNFTTAPAICHDGKAHFPREGVFVSNGTHWFVTQRNFYEPQIITTDNTFVSGNCDVVIGIVNNTVYDPLQPELDSGGGSGGGQIYEGKLTAEGLRFGIVASRFNHALVDRLVEGAIDAIVRHGGREEDITLVRVPGSWEIPVAAGELARKEDIDAVIAIGVLIRGATPHFDYIASEVSKGLADLSLELRKPITFGVITADTLEQAIERAGTKHGNKGWEAALSAIEMANLFKSLR

SEQ ID NO: 7735 - protein, 1307 aa, Artificial Sequence
  SARS-CoV-2/England/20102000506/2020__EPI_ISL_415147 spike protein (1-1147)(K986P_V987P) LumSynth construct
MFVFLVLLPLVSSQCVNLTTRTQLPPAYTNSFTRGVYYPDKVFRSSVLHSTQDLFLPFFSNVTWFHAIHVSGTNGTKRFDNPVLPFNDGVYFASTEKSNIIRGWIFGTTLDSKTQSLLIVNNATNVVIKVCEFQFCNDPFLGVYYHKNNKSWMESEFRVYSSANNCTFEYVSQPFLMDLEGKQGNFKNLREFVFKNIDGYFKIYSKHTPINLVRDLPQGFSALEPLVDLPIGINITRFQTLLALHRSYLTPGDSSSGWTAGAAAYYVGYLQPRTFLLKYNENGTITDAVDCALDPLSETKCTLKSFTVEKGIYQTSNFRVQPTESIVRFPNITNLCPFGEVFNATRFASVYAWNRKRISNCVADYSVLYNSASFSTFKCYGVSPTKLNDLCFTNVYADSFVIRGDEVRQIAPGQTGKIADYNYKLPDDFTGCVIAWNSNNLDSKVGGNYNYLYRLFRKSNLKPFERDISTEIYQAGSTPCNGVEGFNCYFPLQSYGFQPTNGVGYQPYRVVVLSFELLHAPATVCGPKKSTNLVKNKCVNFNFNGLTGTGVLTESNKKFLPFQQFGRDIADTTDAVRDPQTLEILDITPCSFGGVSVITPGTNTSNQVAVLYQGVNCTEVPVAIHADQLTPTWRVYSTGSNVFQTRAGCLIGAEHVNNSYECDIPIGAGICASYQTQTNSPRRARSVASQSIIAYTMSLGAENSVAYSNNSIAIPTNFTISVTTEILPVSMTKTSVDCTMYICGDSTECSNLLLQYGSFCTQLNRALTGIAVEQDKNTQEVFAQVKQIYKTPPIKDFGGFNFSQILPDPSKPSKRSFIEDLLFNKVTLADAGFIKQYGYCLGDIAARDLICAQKFNGLTVLPPLLTDEMIAQYTSALLAGTITSGWTFGAGAALQIPFAMQMAYRFNGIGVTQNVLYENQKLIANQFNSAIGKIQDSLSSTASALGKLQDVVNQNAQALNTLVKQLSSNFGAISSVLNDILSRLDPPEAEVQIDRLITGRLQSLQTYVTQQLIRAAEIRASANLAATKMSECVLGQSKRVDFCGKGYHLMSFPQSAPHGVVFLHVTYVPAQEKNFTTAPAICHDGKAHFPREGVFVSNGTHWFVTQRNFYEPQIITTDNTFVSGNCDVVIGIVNNTVYDPLQPELDSGGGSGGGQIYEGKLTAEGLRFGIVASRFNHALVDRLVEGAIDAIVRHGGREEDITLVRVPGSWEIPVAAGELARKEDIDAVIAIGVLIRGATPHFDYIASEVSKGLADLSLELRKPITFGVITADTLEQAIERAGTKHGNKGWEAALSAIEMANLFKSLR

SEQ ID NO: 7736 - protein, 1307 aa, Artificial Sequence
  SARS-CoV-2/Belgium/VAG-03013/2020__EPI_ISL_415155 spike protein (1-1147)(K986P_V987P) LumSynth construct
MFVFLVLLPLVSSQCVNLTTRTQLPPAYTNSFTRGVYYPDKVFRSSVLHSTQDLFLPFFSNVTWFHAIHVSGTNGTKRFDNPVLPFNDGVYFASTEKSNIIRGWIFGTTLDSKTQSLLIVNNATNVVIKVCEFQFCNDPFLGVYYHKNNKSWMESEFRVYSSANNCTFEYVSQPFLMDLEGKQGNFKNLREFVFKNIDGYFKIYSKHTPINLVRDLPQGFSALEPLVDLPIGINITRFQTLLALHRSYLTPGDSSSGWTAGAAAYYVGYLQPRTFLLKYNENGTITDAVDCALDPLSETKCTLKSFTVEKGIYQTSNFRVQPTESIVRFPNITNLCPFGEVFNATRFASVYAWNRKRISNCVADYSVLYNSASFSTFKCYGVSPTKLNDLCFTNVYADSFVIRGDEVRQIAPGQTGKIADYNYKLPDDFTGCVIAWNSNNLDSKVGGNYNYLYRLFRKSNLKPFERDISTEIYQAGSTPCNGVEGFNCYFPLQSYGFQPTNGVGYQPYRVVVLSFELLHAPATVCGPKKSTNLVKNKCVNFNFNGLTGTGVLTESNKKFLPFQQFGRDIADTTDAVRDPQTLEILDITPCSFGGVSVITPGTNTSNQVAVLYQGVNCTEVPVAIHADQLTPTWRVYSTGSNVFQTRAGCLIGAEHVNNSYECDIPIGAGICASYQTQTNSPRRARSVASQSIIAYTMSLGAENSVAYSNNSIAIPTNFTISVTTEILPVSMTKTSVDCTMYICGDSTECSNLLLQYGSFCTQLNRALTGIAVEQDKNTQEVFAQVKQIYKTPPIKDFGGFNFSQILPDPSKPSKRSFIEDLLFNKVTLADAGFIKQYGDCLGDIAARDLICAQKFNGLTVLPPLLTDEMIAQYTSALLAGTITSGWTFGAGAALQIPFAMQMAYRFNGIGVTQNVLYENQKLIANQFNSAIGKIQDSLSSTATALGKLQDVVNQNAQALNTLVKQLSSNFGAISSVLNDILSRLDPPEAEVQIDRLITGRLQSLQTYVTQQLIRAAEIRASANLAATKMSECVLGQSKRVDFCGKGYHLMSFPQSAPHGVVFLHVTYVPAQEKNFTTAPAICHDGKAHFPREGVFVSNGTHWFVTQRNFYEPQIITTDNTFVSGNCDVVIGIVNNTVYDPLQPELDSGGGSGGGQIYEGKLTAEGLRFGIVASRFNHALVDRLVEGAIDAIVRHGGREEDITLVRVPGSWEIPVAAGELARKEDIDAVIAIGVLIRGATPHFDYIASEVSKGLADLSLELRKPITFGVITADTLEQAIERAGTKHGNKGWEAALSAIEMANLFKSLR

SEQ ID NO: 7737 - protein, 1307 aa, Artificial Sequence
  SARS-CoV-2/Belgium/BC-03016/2020__EPI_ISL_415157 spike protein (1-1147)(K986P_V987P) LumSynth construct
MFVFLVLLPLVSSQCVNLTTRTQLPPAYTNSFTRGVYYPDKVFRSSVLHSTQDLFLPFFSNVTWFHAIHVSGTNGTKRFDNPVLPFNDGVYFASTEKSNIIRGWIFGTTLDSKTQSLLIVNNATNVVIKVCEFQFCNDPFLGVYYHKNNKSWMESEFRVYSSANNCTFEYVSQPFLMDLEGKQGNFKNLREFVFKNIDGYFKIYSKHTPINLVRDLPQGFSALEPLVDLPIGINITRFQTLLALHRSYLTPGDSSSGWTAGAAAYYVGYLQPRTFLLKYNENGTITDAVDCALDPLSETKCTLKSFTVEKGIYQTSNFRVQPTESIVRFPNITNLCPFGEVFNATRFASVYAWNRKRISNCVADYSVLYNSASFSTFKCYGVSPTKLNDLCFTNVYADSFVIRGDEVRQIAPGQTGKIADYNYKLPDDFTGCVIAWNSNNLDSKVGGNYNYLYRLFRKSNLKPFERDISTEIYQAGSTPCNGVEGFNCYFPLQSYGFQPTNGVGYQPYRVVVLSFELLHAPATVCGPKKSTNLVKNKCVNFNFNGLTGTGVLTESNKKFLPFQQFGRDIADTTDAVRDPQTLEILDITPCSFGGVSVITPGTNTSNQVAVLYQGVNCTEVPVAIHADQLTPTWRVYSTGSNVFQTRAGCLIGAEHVNNSYECDIPIGAGICASYQTQTNSPRRARSVASQSIIAYTMSLGAENSVAYSNNSIAIPTNFTISVTTEILPVSMTKTSVDCTMYICGDSTECSNLLLQYGSFCTQLNRALTGIAVEQDKNTQEVFAQVKQIYKTPPIKDFGGFNFSQILPDPSKPSKRSFIEDLLFNKVTLADAGFIKQYGDCLGDIAARDLICAQKFNGLTVLPPLLTDEMIAQYTSALLAGTITSGWTFGAGAALQIPFAMQMAYRFNGIGVTQNVLYENQKLIANQFNSAIGKIQDSLSSTAPALGKLQDVVNQNAQALNTLVKQLSSNFGAISSVLNDILSRLDPPEAEVQIDRLITGRLQSLQTYVTQQLIRAAEIRASANLAATKMSECVLGQSKRVDFCGKGYHLMSFPQSAPHGVVFLHVTYVPAQEKNFTTAPAICHDGKAHFPREGVFVSNGTHWFVTQRNFYEPQIITTDNTFVSGNCDVVIGIVNNTVYDPLQPELDSGGGSGGGQIYEGKLTAEGLRFGIVASRFNHALVDRLVEGAIDAIVRHGGREEDITLVRVPGSWEIPVAAGELARKEDIDAVIAIGVLIRGATPHFDYIASEVSKGLADLSLELRKPITFGVITADTLEQAIERAGTKHGNKGWEAALSAIEMANLFKSLR

SEQ ID NO: 7738 - protein, 1307 aa, Artificial Sequence
  SARS-CoV-2/Germany/BavPat3/2020__EPI_ISL_414521 spike protein (1-1147)(K986P_V987P) LumSynth construct
MFVFLVLLPLVSSQCVNLTTRTQLPPAYTNSFTRGVYYPDKVFRSSVLHSTQDLFLPFFSNVTWFHAIHVSGTNGTKRFDNPVLPFNDGVYFASTEKSNIIRGWIFGTTLDSKTQSLLIVNNATNVVIKVCEFQFCNDPFLGVYYHKNNKSWMESEFRVYSSANNCTFEYVSQPFLMDLEGKQGNFKNLREFVFKNIDGYFKIYSKHTPINLVRDLPQGFSALEPLVDLPIGINITRFQTLLALHRSYLTPGDSSSGWTAGAAAYYVGYLQPRTFLLKYNENGTITDAVDCALDPLSETKCTLKSFTVEKGIYQTSNFRVQPTESIVRFPNITNLCPFGEVFNATRFASVYAWNRKRISNCVADYSVLYNSASFSTFKCYGVSPTKLNDLCFTNVYADSFVIRGDEVRQIAPGQTGKIADYNYKLPDDFTGCVIAWNSNNLDSKVGGNYNYLYRLFRKSNLKPFERDISTEIYQAGSTPCNGVEGFNCYFPLQSYGFQPTNGVGYQPYRVVVLSFELLHAPATVCGPKKSTNLVKNKCVNFNFNGLTGTGVLTESNKKFLPFQQFGRDIADTTDAVRDPQTLEILDITPCSFGGVSVITPGTNTSNQVAVLYQDVNCTEVPVAIHADQLTPTWRVYSTGSNVFQTRAGCLIGAEHVNNSYECDIPIGAGICASYQTQTNSPRRARSVASQSIIAYTMSLGAENSVAYSNNSIAIPTNFTISVTTEILPVSMTKTSVDCTMYICGDSTECSNLLLQYGSFCTQLNRALTGIAVEQDKNTQQVFAQVKQIYKTPPIKDFGGFNFSQILPDPSKPSKRSFIEDLLFNKVTLADAGFIKQYGDCLGDIAARDLICAQKFNGLTVLPPLLTDEMIAQYTSALLAGTITSGWTFGAGAALQIPFAMQMAYRFNGIGVTQNVLYENQKLIANQFNSAIGKIQDSLSSTASALGKLQDVVNQNAQALNTLVKQLSSNFGAISSVLNDILSRLDPPEAEVQIDRLITGRLQSLQTYVTQQLIRAAEIRASANLAATKMSECVLGQSKRVDFCGKGYHLMSFPQSAPHGVVFLHVTYVPAQEKNFTTAPAICHDGKAHFPREGVFVSNGTHWFVTQRNFYEPQIITTDNTFVSGNCDVVIGIVNNTVYDPLQPELDSGGGSGGGQIYEGKLTAEGLRFGIVASRFNHALVDRLVEGAIDAIVRHGGREEDITLVRVPGSWEIPVAAGELARKEDIDAVIAIGVLIRGATPHFDYIASEVSKGLADLSLELRKPITFGVITADTLEQAIERAGTKHGNKGWEAALSAIEMANLFKSLR

SEQ ID NO: 7739 - protein, 1307 aa, Artificial Sequence
  SARS-CoV-2/France/HF1805/2020__EPI_ISL_414628 spike protein (1-1147)(K986P_V987P) LumSynth construct
MFVFLVLLPLVSSQCVNLTTRTQLPPAYTNSFTRGVYYPDKVFRSSVLHSTQDLFLPFFSNVTWFHAIHVSGTNGTKRFDNPVLPFNDGVYFASTEKSNIIRGWIFGTTLDSKTQSLLIVNNATNVVIKVCEFQFCNDPFLGVYYHKNNKSWMESEFRVYSSANNCTFEYVSQPFLMDLEGKQGNFKNLREFVFKNIDGYFKIYSKHTPINLVRDLPQGFSALEPLVDLPIGINITRFQTLLALHRSYLTPGDSSSGWTAGAAAYYVGYLQPRTFLLKYNENGTITDAVDCALDPLSETKCTLKSFTVEKGIYQTSNFRVQPTESIVRFPNITNLCPFGEVFNATRFASVYAWNRKRISNCVADYSVLYNSASFSTFKCYGVSPTKLNDLCFTNVYADSFVIRGDEVRQIAPGQTGKIADYNYKLPDDFTGCVIAWNSNNLDSKVGGNYNYLYRLFRKSNLKPFERDISTEIYQAGSTPCNGVEGFNCYFPLQSYGFQPTNGVGYQPYRVVVLSFELLHAPATVCGPKKSTNLVKNKCVNFNFNGLTGTGVLTESNKKFLPFQQFGRDIADTTDAVRDPQTLEILDITPCSFGGVSVITPGTNTSNQVAVLYQGVNCTEVPVAIHADQLTPTWRVYSTGSNVFQTRAGCLIGAEHVNNSYECDIPIGAGICASYQTQTNSPRRARSVASQSIIAYTMSLGAENSVAYSNNSIAIPTNFTISVTTEILPVSMTKTSVDCTMYICGDSTECSNLLLQYGSFCTQLNRALTGIAVEQDKNTQEVFAQVKQIYKTPPIKDFGGFNFSQILPDPSKPSKRSFIEDLLFNKVTLADAGFIKQYGDCLGDIAARDLICAQKFNGLTVLPPLLTDEMIAQYTSALLAGTITSGWTFGAGAALQIPFAMQMAYRFNGIGVTQNVLYENQKLIANQFNSAIGKIQDSLSSTASALGKLQDVVNQNAQALNTLVKQLSSNFGAISSVLNDILSRLDPPEAEVQIDRLITGRLQSLQTYVTQQLIRAAEIRASANLAATKMSECVLGQSKRVDFCGKGYHLMSFPQSAPHGVVFLHVTYVPAQEKNFTTAPAICHDGKAHFPREGVFVSNGTHWFVTQRNFYEPQIITTDNTFVSGNCDVVIGVVNNTVYDPLQPELDSGGGSGGGQIYEGKLTAEGLRFGIVASRFNHALVDRLVEGAIDAIVRHGGREEDITLVRVPGSWEIPVAAGELARKEDIDAVIAIGVLIRGATPHFDYIASEVSKGLADLSLELRKPITFGVITADTLEQAIERAGTKHGNKGWEAALSAIEMANLFKSLR

SEQ ID NO: 7740 - protein, 1307 aa, Artificial Sequence
  SARS-CoV-2/Netherlands/ZuidHolland_9/2020__EPI_ISL_414445 spike protein (1-1147)(K986P_V987P) LumSynth construct
MFVFLVLLPLVSSQCVNLTTRTQLPPAYTNSFTRGVYYPDKVFRSSVLHSTQDLFLPFFSNVTWFHAIHVSGTNGTKRFDNPVLPFNDGVYFASTEKSNIIRGWIFGTTLDSKTQSLLIVNNATNVVIKVCEFQFCNDPFLGVYYHKNNKSWMESEFRVYSSANNCTFEYVSQPFLMDLEGKQGNFKNLREFVFKNIDGYFKIYSKHTPINLVRDLPQGFSALEPLVDLPIGINITRFQTLLALHRSYLTPGDSSSGWTAGAAAYYVGYLQPRTFLLKYNENGTITDAVDCALDPLSETKCTLKSFTVEKGIYQTSNFRVQPTESIVRFPNITNLCPFGEVFNATRFASVYAWNRKRISNCVADYSVLYNSASFSTFKCYGVSPTKLNDLCFTNVYADSFVIRGDEVRQIAPGQTGKIADYNYKLPDDFTGCVIAWNSNNLDSKVGGNYNYLYRLFRKSNLKPFERDISTEIYQAGSTPCNGVEGFNCYFPLQSYGFQPTNGVGYQPYRVVVLSFELLHAPATVCGPKKSTNLVKNKCVNFNFNGLTGTGVLTESNKKFLPFQQFGRDIADTTDAVRDPQTLEILDITPCSFGGVSVITPGTNTSNQVAVLYQGVNCTEVPVAIHADQLTPTWRVYSTGSNVFQTRAGCLIGAEHVNNSYECDIPIGAGICASYQTQTNSPRRARSVASQSIIAYTMSLGAENSVAYSNNSIAIPTNFTISVTTEILPVSMTKTSVDCTMYICGDSTECSNLLLQYGSFCTQLNRALTGIAVEQDKNTQEVFAQVKQIYKTPPIKDFGGFNFSQILPDPSKPSKRSFIEDLLFNKVTLADAGFIKQYGDCLGDIAARDLICVQKFNGLTVLPPLLTDEMIAQYTSALLAGTITSGWTFGAGAALQIPFAMQMAYRFNGIGVTQNVLYENQKLIANQFNSAIGKIQDSLSSTASALGKLQDVVNQNAQALNTLVKQLSSNFGAISSVLNDILSRLDPPEAEVQIDRLITGRLQSLQTYVTQQLIRAAEIRASANLAATKMSECVLGQSKRVDFCGKGYHLMSFPQSAPHGVVFLHVTYVPAQEKNFTTAPAICHDGKAHFPREGVFVSNGTHWFVTQRNFYEPQIITTDNTFVSGNCDVVIGIVNNTVYDPLQPELDSGGGSGGGQIYEGKLTAEGLRFGIVASRFNHALVDRLVEGAIDAIVRHGGREEDITLVRVPGSWEIPVAAGELARKEDIDAVIAIGVLIRGATPHFDYIASEVSKGLADLSLELRKPITFGVITADTLEQAIERAGTKHGNKGWEAALSAIEMANLFKSLR

SEQ ID NO: 7741 - protein, 1307 aa, Artificial Sequence
  SARS-CoV-2/Finland/FIN03032020A/2020__EPI_ISL_413602 spike protein (1-1147)(K986P_V987P) LumSynth construct
MFVFLVLLPLVSSQCVNLTTRTQLPPAYTNSFTRGVYYPDKVFRSSVLHSTQDLFLPFFSNVTWFHAIHVSGTNGTKRFDNPVLPFNDGVYFASTEKSNIIRGWIFGTTLDSKTQSLLIVNNATNVVIKVCEFQFCNDPFLGVYYHKNNKSWMESEFRVYSSANNCTFEYVSQPFLMDLEGKQGNFKNLREFVFKNIDGYFKIYSKHTPINLVRDLPQGFSALEPLVDLPIGINITRFQTLLALHRSYLTPGDSSSGWTAGAAAYYVGYLQPRTFLLKYNENGTITDAVDCALDPLSETKCTLKSFTVEKGIYQTSNFRVQPTESIVRFPNITNLCPFGEVFNATRFASVYAWNRKRISNCVADYSVLYNSASFSTFKCYGVSPTKLNDLCFTNVYADSFVIRGDEVRQIAPGQTGKIADYNYKLPDDFTGCVISWNSNNLDSKVGGNYNYLYRLFRKSNLKPFERDISTEIYQAGSTPCNGVEGFNCYFPLQSYGFQPTNGVGYQPYRVVVLSFELLHAPATVCGPKKSTNLVKNKCVNFNFNGLTGTGVLTESNKKFLPFQQFGRDIADTTDAVRDPQTLEILDITPCSFGGVSVITPGTNTSNQVAVLYQGVNCTEVPVAIHADQLTPTWRVYSTGSNVFQTRAGCLIGAEHVNNSYECDIPIGAGICASYQTQTNSPRRARSVASQSIIAYTMSLGAENSVAYSNNSIAIPTNFTISVTTEILPVSMTKTSVDCTMYICGDSTECSNLLLQYGSFCTQLNRALTGIAVEQDKNTQEVFAQVKQIYKTPPIKDFGGFNFSQILPDPSKPSKRSFIEDLLFNKVTLADAGFIKQYGDCLGDIAARDLICAQKFNGLTVLPPLLTDEMIAQYTSALLAGTITSGWTFGAGAALQIPFAMQMAYRFNGIGVTQNVLYENQKLIANQFNSAIGKIQDSLSSTASALGKLQDVVNQNAQALNTLVKQLSSNFGAISSVLNDILSRLDPPEAEVQIDRLITGRLQSLQTYVTQQLIRAAEIRASANLAATKMSECVLGQSKRVDFCGKGYHLMSFPQSAPHGVVFLHVTYVPAQEKNFTTAPAICHDGKAHFPREGVFVSNGTHWFVTQRNFYEPQIITTDNTFVSGNCDVVIGIVNNTVYDPLQPELDSGGGSGGGQIYEGKLTAEGLRFGIVASRFNHALVDRLVEGAIDAIVRHGGREEDITLVRVPGSWEIPVAAGELARKEDIDAVIAIGVLIRGATPHFDYIASEVSKGLADLSLELRKPITFGVITADTLEQAIERAGTKHGNKGWEAALSAIEMANLFKSLR

SEQ ID NO: 7742 - protein, 1307 aa, Artificial Sequence
  SARS-CoV-2/France/GE1977/2020__EPI_ISL_414632 spike protein (1-1147)(K986P_V987P) LumSynth construct
MFVFLVLLPLVSSQCVNLTTRTQLPPAYTNSFTRGVYYPDKVFRSSVLHSTQDLFLPFFSNVTWFHAIHVSGTNGTKRFDNPVLPFNDGVYFASTEKSNIIRGWIFGTTLDSKTQSLLIVNNATNVVIKVCEFQFCNDPFLGVYYHKNNKSWMESEFRVYSSANNCTFEYVSQPFLMDLEGKQGNFKNLREFVFKNIDGYFKIYSKHTPINLVRDLPQGFSALEPLVDLPIGINITRFQTLLALHRSYLTPGDSSSGWTAGAAAYYVGYLQPRTFLLKYNENGTITDAVDCALDPLSETKCTLKSFTVEKGIYQTSNFRVQPTESIVRFPNITNLCPFGEVFNATRFASVYAWNRKRISNCVADYSVLYNSASFSTFKCYGVSPTKLNDLCFTNVYADSFVIRGDEVRQIAPGQTGKIADYNYKLPDDFTGCVIAWNSNNLDSKVGGNYNYLYRLFRKSNLKPFERDISTEIYQAGSTPCNGVEGFNCYFPLQSYGFQPTNGVGYQPYRVVVLSFELLHAPATVCGPKKSTNLVKNKCVNFNFNGLTGTGVLTESNKKFLPFQQFGRDIADTTDAVRDPQTLEILDITPCSFGGVSVITPGTNTSNQVAVLYQGVNCTEVPVAIHADQLTPTWRVYSTGSNVFQTRAGCLIGAEHVNNSYECDIPIGAGICASYQTQTNSPRRARSVASQSIIAYTMSLGAENSVAYSNNSIAIPTNFTISVTTEILPVSMTKTSVDCTMYICGDSTECSNLLLQYGSFCTQLNRALTGIAVEQDKNTQEVFAQVKQIYKTPPIKDFGGFNFSQILPDPSKPSKRSFIEDLLFNKVTLADAGFIKQYGDCLGDIAARDLICAQKFNGLTVLPPLLTDEMIAQYTSALLAGTITSGWTFGAGAALQIPFAMQMAYRFNGIGVTQNVLYENQKLIANQFNSAIGKIQDSLFSTASALGKLQDVVNQNAQALNTLVKQLSSNFGAISSVLNDILSRLDPPEAEVQIDRLITGRLQSLQTYVTQQLIRAAEIRASANLAATKMSECVLGQSKRVDFCGKGYHLMSFPQSAPHGVVFLHVTYVPAQEKNFTTAPAICHDGKAHFPREGVFVSNGTHWFVTQRNFYEPQIITTDNTFVSGNCDVVIGIVNNTVYDPLQPELDSGGGSGGGQIYEGKLTAEGLRFGIVASRFNHALVDRLVEGAIDAIVRHGGREEDITLVRVPGSWEIPVAAGELARKEDIDAVIAIGVLIRGATPHFDYIASEVSKGLADLSLELRKPITFGVITADTLEQAIERAGTKHGNKGWEAALSAIEMANLFKSLR

SEQ ID NO: 7743 - protein, 1307 aa, Artificial Sequence
  SARS-CoV-2/Finland/FIN-313/2020__EPI_ISL_414641 spike protein (1-1147)(K986P_V987P) LumSynth construct
MFVFLVLLPLVSSQCVNLTTRTQLPPAYTNSFTRGVYYPDKVFRSSVLHSTQDLFLPFFSNVTWFHAIHVSGTNGTKRFDNPVLPFNDGVYFASTEKSNIIRGWIFGTTLDSKTQSLLIVNNATNVVIKVCEFQFCNDPFLGVYYHKNNKSWMESEFRVYSSANNCTFEYVSQPFLMDLEGKQGNFKNLREFVFKNIDGYFKIYSKHTPINLVRDLPQGFSALEPLVDLPIGINITRFKTLLALHRSYLTPGDSSSGWTAGAAAYYVGYLQPRTFLLKYNENGTITDAVDCALDPLSETKCTLKSFTVEKGIYQTSNFRVQPTESIVRFPNITNLCPFGEVFNATRFASVYAWNRKRISNCVADYSVLYNSASFSTFKCYGVSPTKLNDLCFTNVYADSFVIRGDEVRQIAPGQTGKIADYNYKLPDDFTGCVIAWNSNNLDSKVGGNYNYLYRLFRKSNLKPFERDISTEIYQAGSTPCNGVEGFNCYFPLQSYGFQPTNGVGYQPYRVVVLSFELLHAPATVCGPKKSTNLVKNKCVNFNFNGLTGTGVLTESNKKFLPFQQFGRDIADTTDAVRDPQTLEILDITPCSFGGVSVITPGTNTSNQVAVLYQGVNCTEVPVAIHADQLTPTWRVYSTGSNVFQTRAGCLIGAEHVNNSYECDIPIGAGICASYQTQTNSPRRARSVASQSIIAYTMSLGAENSVAYSNNSIAIPTNFTISVTTEILPVSMTKTSVDCTMYICGDSTECSNLLLQYGSFCTQLNRALTGIAVEQDKNTQEVFAQVKQIYKTPPIKDFGGFNFSQILPDPSKPSKRSFIEDLLFNKVTLADAGFIKQYGDCLGDIAARDLICAQKFNGLTVLPPLLTDEMIAQYTSALLAGTITSGWTFGAGAALQIPFAMQMAYRFNGIGVTQNVLYENQKLIANQFNSAIGKIQDSLSSTASALGKLQDVVNQNAQALNTLVKQLSSNFGAISSVLNDILSRLDPPEAEVQIDRLITGRLQSLQTYVTQQLIRAAEIRASANLAATKMSECVLGQSKRVDFCGKGYHLMSFPQSAPHGVVFLHVTYVPAQEKNFTTAPAICHDGKAHFPREGVFVSNGTHWFVTQRNFYEPQIITTDNTFVSGNCDVVIGIVNNTVYDPLQPELDSGGGSGGGQIYEGKLTAEGLRFGIVASRFNHALVDRLVEGAIDAIVRHGGREEDITLVRVPGSWEIPVAAGELARKEDIDAVIAIGVLIRGATPHFDYIASEVSKGLADLSLELRKPITFGVITADTLEQAIERAGTKHGNKGWEAALSAIEMANLFKSLR

SEQ ID NO: 7744 - protein, 1307 aa, Artificial Sequence
  SARS-CoV-2/Netherlands/ZuidHolland_2/2020__EPI_ISL_414556 spike protein (1-1147)(K986P_V987P) LumSynth construct
MFVFLVLLPLVSSQCVNLTTRTQLPPAYTNSFTRGVYYPDKVFRSSVLHSTQDLFLPFFSNVTWFHAIHVSGTNGTKRFDNPVLPFNDGVYFASTEKSNIIRGWIFGTTLDSKTQSLLIVNNATNVVIKVCEFQFCNDPFLGVYYHKNNKSWMESEFRVYSSANNCTFEYVSQPFLMDLEGKQGNFKNLREFVFKNIDGYFKIYSKHTPINLVRDLPQGFSALEPLVDLPIGINITRFQTLLALHRSYLTPGDSSSGWTAGAAAYYVGYLQPRTFLLKYNENGTITDAVDCALDPLSETKCTLKSFTVEKGIYQTSNFRVQPTESIVRFPNITNLCPFGEVFNATRFASVYAWNRKRISNCVADYSVLYNSASFSTFKCYGVSPTKLNDLCFTNVYADSFVIRGDEVRQIAPGQTGKIADYNYKLPDDFTGCVIAWNSNNLDSKVGGNYNYLYRLFRKSNLKPFERDISTEIYQAGSTPCNGVEGFNCYFPLQSYGFQPTNGVGYQPYRVVVLSFELLHAPATVCGPKKSTNLVKNKCVNFNFNGLTGTGVLTESNKKFLPFQQFGRDIADTTDAVRDPQTLEILDITPCSFGGVSVITPGTNTSNQVAVLYQGVNCTEVPVAIHADQLTPTWRVYSTGSNVFQTRAGCLIGAEHVNNSYECDIPIGAGICASYQTQTNSPRRARSVASQSIIAYTMSLGAENSVAYSNNSIAIPTNFTISVTTEILPVSMTKTSVDCTMYICGDSTECSNLLLQYGSFCTQLNRALTGIALEQDKNTQEVFAQVKQIYKTPPIKDFGGFNFSQILPDPSKPSKRSFIEDLLFNKVTLADAGFIKQYGDCLGDIAARDLICAQKFNGLTVLPPLLTDEMIAQYTSALLAGTITSGWTFGAGAALQIPFAMQMAYRFNGIGVTQNVLYENQKLIANQFNSAIGKIQDSLSSTASALGKLQDVVNQNAQALNTLVKQLSSNFGAISSVLNDILSRLDPPEAEVQIDRLITGRLQSLQTYVTQQLIRAAEIRASANLAATKMSECVLGQSKRVDFCGKGYHLMSFPQSAPHGVVFLHVTYVPAQEKNFTTAPAICHDGKAHFPREGVFVSNGTHWFVTQRNFYEPQIITTDNTFVSGNCDVVIGIVNNTVYDPLQPELDSGGGSGGGQIYEGKLTAEGLRFGIVASRFNHALVDRLVEGAIDAIVRHGGREEDITLVRVPGSWEIPVAAGELARKEDIDAVIAIGVLIRGATPHFDYIASEVSKGLADLSLELRKPITFGVITADTLEQAIERAGTKHGNKGWEAALSAIEMANLFKSLR

SEQ ID NO: 7745 - protein, 1307 aa, Artificial Sequence
  SARS-CoV-2/USA/WA-UW31/2020__EPI_ISL_414618 spike protein (1-1147)(K986P_V987P) LumSynth construct
MFVFLVLLPLVSSQCVNLTTRTQLPPAYTNSFTRGVYYPDKVFRSSVLHSTQDLFLPFFSNVTWFHAIHVSGTNGTKRFDNPVLPFNDGVYFASTEKSNIIRGWIFGTTLDSKTQSLLIVNNATNVVIKVCEFQFCNDPFLGVYYHKNNKSWMESEFRVYSSANNCTFEYVSQPFLMDLEGKQGNFKNLREFVFKNIDGYFKIYSKHTPINLVRDLPQGFSALEPLVDLPIGINITRFQTLLALHRSYLTPGDSSSGWTAGAAAYYVGYLQPRTFLLKYNENGTITDAVDCALDPLSETKCTLKSFTVEKGIYQTSNFRVQPTESIVRFPNITNLCPFGEVFNATRFASVYAWNRKRISNCVADYSVLYNSASFSTFKCYGVSPTKLNDLCFTNVYADSFVIRGDEVRQIAPGQTGKIADYNYKLPDDFTGCVIAWNSNNLDSKVGGNYNYLYRLFRKSNLKPFERDISTEIYQAGSTPCNGAEGFNCYFPLQSYGFQPTNGVGYQPYRVVVLSFELLHAPATVCGPKKSTNLVKNKCVNFNFNGLTGTGVLTESNKKFLPFQQFGRDIADTTDAVRDPQTLEILDITPCSFGGVSVITPGTNTSNQVAVLYQDVNCTEVPVAIHADQLTPTWRVYSTGSNVFQTRAGCLIGAEHVNNSYECDIPIGAGICASYQTQTNSPRRARSVASQSIIAYTMSLGAENSVAYSNNSIAIPTNFTISVTTEILPVSMTKTSVDCTMYICGDSTECSNLLLQYGSFCTQLNRALTGIAVEQDKNTQEVFAQVKQIYKTPPIKDFGGFNFSQILPDPSKPSKRSFIEDLLFNKVTLADAGFIKQYGDCLGDIAARDLICAQKFNGLTVLPPLLTDEMIAQYTSALLAGTITSGWTFGAGAALQIPFAMQMAYRFNGIGVTQNVLYENQKLIANQFNSAIGKIQDSLSSTASALGKLQDVVNQNAQALNTLVKQLSSNFGAISSVLNDILSRLDPPEAEVQIDRLITGRLQSLQTYVTQQLIRAAEIRASANLAATKMSECVLGQSKRVDFCGKGYHLMSFPQSAPHGVVFLHVTYVPAQEKNFTTAPAICHDGKAHFPREGVFVSNGTHWFVTQRNFYEPQIITTDNTFVSGNCDVVIGIVNNTVYDPLQPELDSGGGSGGGQIYEGKLTAEGLRFGIVASRFNHALVDRLVEGAIDAIVRHGGREEDITLVRVPGSWEIPVAAGELARKEDIDAVIAIGVLIRGATPHFDYIASEVSKGLADLSLELRKPITFGVITADTLEQAIERAGTKHGNKGWEAALSAIEMANLFKSLR

SEQ ID NO: 7746 - protein, 1307 aa, Artificial Sequence
  SARS-CoV-2/South Korea/SNU01/2020__EPI_ISL_411929 spike protein (1-1147)(K986P_V987P) LumSynth construct
MFVFLVLLPLVSSQCVNLTTRTQLPPAYTNSFTRGVYYPDKVFRSSVLHSTQDLFLPFFSNVTWFHAIHVSGTNGTKRFDNPVLPFNDGVYFASTEKSNIIRGWIFGTTLDSKTQSLLIVNNATNVVIKVCEFQFCNDPFLGVYYHKNNKSWMESEFRVYSSANNCTFEYVSQPFLMDLEGKQGNFKNLREFVFKNIDGYFKIYSKHTPINLVRDLPQGFWALEPLVDLPIGINITRFQTLLALHRSYLTPGDSSSGWTAGAAAYYVGYLQPRTFLLKYNENGTITDAVDCALDPLSETKCTLKSFTVEKGIYQTSNFRVQPTESIVRFPNITNLCPFGEVFNATRFASVYAWNRKRISNCVADYSVLYNSASFSTFKCYGVSPTKLNDLCFTNVYADSFVIRGDEVRQIAPGQTGKIADYNYKLPDDFTGCVIAWNSNNLDSKVGGNYNYLYRLFRKSNLKPFERDISTEIYQAGSTPCNGVEGFNCYFPLQSYGFQPTNGVGYQPYRVVVLSFELLHAPATVCGPKKSTNLVKNKCVNFNFNGLTGTGVLTESNKKFLPFQQFGRDIADTTDAVRDPQTLEILDITPCSFGGVSVITPGTNTSNQVAVLYQDVNCTEVPVAIHADQLTPTWRVYSTGSNVFQTRAGCLIGAEHVNNSYECDIPIGAGICASYQTQTNSPRRARSVASQSIIAYTMSLGAENSVAYSNNSIAIPTNFTISVTTEILPVSMTKTSVDCTMYICGDSTECSNLLLQYGSFCTQLNRALTGIAVEQDKNTQEVFAQVKQIYKTPPIKDFGGFNFSQILPDPSKPSKRSFIEDLLFNKVTLADAGFIKQYGDCLGDIAARDLICAQKFNGLTVLPPLLTDEMIAQYTSALLAGTITSGWTFGAGAALQIPFAMQMAYRFNGIGVTQNVLYENQKLIANQFNSAIGKIQDSLSSTASALGKLQDVVNQNAQALNTLVKQLSSNFGAISSVLNDILSRLDPPEAEVQIDRLITGRLQSLQTYVTQQLIRAAEIRASANLAATKMSECVLGQSKRVDFCGKGYHLMSFPQSAPHGVVFLHVTYVPAQEKNFTTAPAICHDGKAHFPREGVFVSNGTHWFVTQRNFYEPQIITTDNTFVSGNCDVVIGIVNNTVYDPLQPELDSGGGSGGGQIYEGKLTAEGLRFGIVASRFNHALVDRLVEGAIDAIVRHGGREEDITLVRVPGSWEIPVAAGELARKEDIDAVIAIGVLIRGATPHFDYIASEVSKGLADLSLELRKPITFGVITADTLEQAIERAGTKHGNKGWEAALSAIEMANLFKSLR

SEQ ID NO: 7747 - protein, 1307 aa, Artificial Sequence
  SARS-CoV-2/China/WF0004/2020__EPI_ISL_413694 spike protein (1-1147)(K986P_V987P) LumSynth construct
MFVFLVLLPLVSSQCVNLTTRTQLPPAYTNSFTRGVYYPDKVFRSSVLHSTQDLFLPFFSNVTWFHAIHVSGTNGTKRFDNPVLPFNDGVYFASTEKSNIIRGWIFGTTLDSKTQSLLIVNNATNVVIKVCEFQFCNDPFLGVYYHKNNKSWTESEFRVYSSANNCTFEYVSQPFLMDLEGKQGNFKNLREFVFKNIDGYFKIYSKHTPINLVRDLPQGFSALEPLVDLPIGINITRFQTLLALHRSYLTPGDSSSGWTAGAAAYYVGYLQPRTFLLKYNENGTITDAVDCALDPLSETKCTLKSFTVEKGIYQTSNFRVQPTESIVRFPNITNLCPFGEVFNATRFASVYAWNRKRISNCVADYSVLYNSASFSTFKCYGVSPTKLNDLCFTNVYADSFVIRGDEVRQIAPGQTGKIADYNYKLPDDFTGCVIAWNSNNLDSKVGGNYNYLYRLFRKSNLKPFERDISTEIYQAGSTPCNGVEGFNCYFPLQSYGFQPTNGVGYQPYRVVVLSFELLHAPATVCGPKKSTNLVKNKCVNFNFNGLTGTGVLTESNKKFLPFQQFGRDIADTTDAVRDPQTLEILDITPCSFGGVSVITPGTNTSNQVAVLYQDVNCTEVPVAIHADQLTPTWRVYSTGSNVFQTRAGCLIGAEHVNNSYECDIPIGAGICASYQTQTNSPRRARSVASQSIIAYTMSLGAENSVAYSNNSIAIPTNFTISVTTEILPVSMTKTSVDCTMYICGDSTECSNLLLQYGSFCTQLNRALTGIAVEQDKNTQEVFAQVKQIYKTPPIKDFGGFNFSQILPDPSKPSKRSFIEDLLFNKVTLADAGFIKQYGDCLGDIAARDLICAQKFNGLTVLPPLLTDEMIAQYTSALLAGTITSGWTFGAGAALQIPFAMQMAYRFNGIGVTQNVLYENQKLIANQFNSAIGKIQDSLSSTASALGKLQDVVNQNAQALNTLVKQLSSNFGAISSVLNDILSRLDPPEAEVQIDRLITGRLQSLQTYVTQQLIRAAEIRASANLAATKMSECVLGQSKRFDFCGKGYHLMSFPQSAPHGVVFLHVTYVPAQEKNFTTAPAICHDGKAHFPREGVFVSNGTHWFVTQRNFYEPQIITTDNTFVSGNCDVVIGIVNNTVYDPLQPELDSGGGSGGGQIYEGKLTAEGLRFGIVASRFNHALVDRLVEGAIDAIVRHGGREEDITLVRVPGSWEIPVAAGELARKEDIDAVIAIGVLIRGATPHFDYIASEVSKGLADLSLELRKPITFGVITADTLEQAIERAGTKHGNKGWEAALSAIEMANLFKSLR

SEQ ID NO: 7748 - protein, 1307 aa, Artificial Sequence
  SARS-CoV-2/China/WF0028/2020__EPI_ISL_413791 spike protein (1-1147)(K986P_V987P) LumSynth construct
MFVFLVLLPLVSSQCVNLTTRTQLPPAYTNSFTRGVYYPDKVFRSSVLHSTQDLFLPFFSNVTWFHAIHVSGTNGTKRFDNPVLPFNDGVYFASTEKSNIIRGWIFGTTLDSKTQSLLIVNNATNVVIKVCEFQFCNDPFLGVYYHKNNKSWMESEFRVYSSANNCTFEYVSQPFLMDLEGKQGNFKNLREFVFKNIDGYFKIYSKHTPINLVRDLPQGFSALEPLVDLPIGINITRFQTLLALHRSYLTPGDSSSGWTAGAAAYYVGYLQPRTFLLKYNENGTITDAVDCALDPLSETKCTLKSFTVEKGIYQTSNFRVQPTESIVRFPNITNLCPFGEVFNATRFASVYAWNRKRISNCVADYSVLYNSASFSTFKCYGVSPTKLNDLCFTNVYADSFVIRGDEVRQIAPGQTGKIADYNYKLPDDFTGCVIAWNSNNLDSKVGGNYNYLYRLFRKSNLKPFERDISTEIYQAGSTPCNGVEGFNCYFPLQSYGFQPTNGVGYQPYRVVVLSFELLHAPATVCGPKKSTNLVKNKCVNFNFNGLTGTGVLTESNKKFLPFQQFGRDIADTTDAVRDPQTLEILDITPCSFGGVSVITPGTNTSNQVAVLYQDVNCTEVPVAIHADQLTPTWRVYSTGSNVFQTRAGCLIGAEHVNNSYECDIPIGAGICASYQTQTNSPRRARSVASQSIIAYTMSLGAENSVAYSNNSIAIPTNFTISVTTEILPVSMTKTSVDCTMYICGDSTECSNLLLQYGSFCTQLNRALTGIAVEQDKNTQEVFAQVKQIYKTPPIKDFGGFNFSQILPDPSKPSKRSFIEDLLFNKVTLADAGFIKQYGDCLGDIAARDLICAQKFNGLTVLPPLLTDEMIAQYTSALLAGTITSGWTFGAGAALQIPFAMQMAYRFNGIGVTQNVLYENQKLIANQFNSAIGKIQDSLSSTASALGKLQDVVNQNAQALNTLVKQLSSNFGAISSVLNDILSRLDPPEAEVQIDRLITGRLQSLQTYVTQQLIRAAEIRASANLAATKMSECVLGQSKRVDFCGKGYHLMSFPQSAPHGVVFLHVTYVPAQEKNFTTAPAICHDGKAHFPREGVFVSNGTHWFVTQRNFYEPQIITTDNTFVSGNCDVVIGIVNNTVYDPLQPELESGGGSGGGQIYEGKLTAEGLRFGIVASRFNHALVDRLVEGAIDAIVRHGGREEDITLVRVPGSWEIPVAAGELARKEDIDAVIAIGVLIRGATPHFDYIASEVSKGLADLSLELRKPITFGVITADTLEQAIERAGTKHGNKGWEAALSAIEMANLFKSLR

SEQ ID NO: 7749 - protein, 1307 aa, Artificial Sequence
  SARS-CoV-2/2019-nCoV/USA-CruiseA-18/2020__MT159716.1 spike protein (1-1147)(K986P_V987P) LumSynth construct
MFVFLVLLPLVSSQCVNLTTRTQLPPAYTNSFTRGVYYPDKVFRSSVLHSTQDLFLPFFSNVTWFHAIHVSGTNGTKRFDNPVLPFNDGVYFASTEKSNIIRGWIFGTTLDSKTQSLLIVNNATNVVIKVCEFQFCNDPFLGVYYHKNNKSWMESELRVYSSANNCTFEYVSQPFLMDLEGKQGNFKNLREFVFKNIDGYFKIYSKHTPINLVRDLPQGFSALEPLVDLPIGINITRFQTLLALHRSYLTPGDSSSGWTAGAAAYYVGYLQPRTFLLKYNENGTITDAVDCALDPLSETKCTLKSFTVEKGIYQTSNFRVQPTESIVRFPNITNLCPFGEVFNATRFASVYAWNRKRISNCVADYSVLYNSASFSTFKCYGVSPTKLNDLCFTNVYADSFVIRGDEVRQIAPGQTGKIADYNYKLPDDFTGCVIAWNSNNLDSKVGGNYNYLYRLFRKSNLKPFERDISTEIYQAGSTPCNGVEGFNCYFPLQSYGFQPTNGVGYQPYRVVVLSFELLHAPATVCGPKKSTNLVKNKCVNFNFNGLTGTGVLTESNKKFLPFQQFGRDIADTTDAVRDPQTLEILDITPCSFGGVSVITPGTNTSNQVAVLYQDVNCTEVPVAIHADQLTPTWRVYSTGSNVFQTRAGCLIGAEHVNNSYECDIPIGAGICASYQTQTNSPRRARSVASQSIIAYTMSLGAENSVAYSNNSIAIPTNFTISVTTEILPVSMTKTSVDCTMYICGDSTECSNLLLQYGSFCTQLNRALTGIAVEQDKNTQEVFAQVKQIYKTPPIKDFGGFNFSQILPDPSKPSKRSFIEDLLFNKVTLADAGFIKQYGDCLGDIAARDLICAQKFNGLTVLPPLLTDEMIAQYTSALLAGTITSGWTFGAGAALQIPFAMQMAYRFNGIGVTQNVLYENQKLIANQFNSAIGKIQDSLSSTASALGKLQDVVNQNAQALNTLVKQLSSNFGAISSVLNDILSRLDPPEAEVQIDRLITGRLQSLQTYVTQQLIRAAEIRASANLAATKMSECVLGQSKRVDFCGKGYHLMSFPQSAPHGVVFLHVTYVPAQEKNFTTAPAICHDGKAHFPREGVFVSNGTHWFVTQRNFYEPQIITTDNTFVSGNCDVVIGIVNNTVYDPLQPELDSGGGSGGGQIYEGKLTAEGLRFGIVASRFNHALVDRLVEGAIDAIVRHGGREEDITLVRVPGSWEIPVAAGELARKEDIDAVIAIGVLIRGATPHFDYIASEVSKGLADLSLELRKPITFGVITADTLEQAIERAGTKHGNKGWEAALSAIEMANLFKSLR

SEQ ID NO: 7750 - protein, 1307 aa, Artificial Sequence
  SARS-CoV-2/SARS-CoV-2/Yunnan-01/human/2020/CHN__MT049951.1 spike protein (1-1147)(K986P_V987P) LumSynth construct
MFVFLVLLPLVSSQCVNLTTRTQLPPANTNSFTRGVYYPDKVFRSSVLHSTQDLFLPFFSNVTWFHAIHVSGTNGTKRFDNPVLPFNDGVYFASTEKSNIIRGWIFGTTLDSKTQSLLIVNNATNVVIKVCEFQFCNDPFLGVYYHKNNKSWMESEFRVYSSANNCTFEYVSQPFLMDLEGKQGNFKNLREFVFKNIDGYFKIYSKHTPINLVRDLPQGFSALEPLVDLPIGINITRFQTLLALHRSYLTPGDSSSGWTAGAAAYYVGYLQPRTFLLKYNENGTITDAVDCALDPLSETKCTLKSFTVEKGIYQTSNFRVQPTESIVRFPNITNLCPFGEVFNATRFASVYAWNRKRISNCVADYSVLYNSASFSTFKCYGVSPTKLNDLCFTNVYADSFVIRGDEVRQIAPGQTGKIADYNYKLPDDFTGCVIAWNSNNLDSKVGGNYNYLYRLFRKSNLKPFERDISTEIYQAGSTPCNGVEGFNCYFPLQSYGFQPTNGVGYQPYRVVVLSFELLHAPATVCGPKKSTNLVKNKCVNFNFNGLTGTGVLTESNKKFLPFQQFGRDIADTTDAVRDPQTLEILDITPCSFGGVSVITPGTNTSNQVAVLYQDVNCTEVPVAIHADQLTPTWRVYSTGSNVFQTRAGCLIGAEHVNNSYECDIPIGAGICASYQTQTNSPRRARSVASQSIIAYTMSLGAENSVAYSNNSIAIPTNFTISVTTEILPVSMTKTSVDCTMYICGDSTECSNLLLQYGSFCTQLNRALTGIAVEQDKNTQEVFAQVKQIYKTPPIKDFGGFNFSQILPDPSKPSKRSFIEDLLFNKVTLADAGFIKQYGDCLGDIAARDLICAQKFNGLTVLPPLLTDEMIAQYTSALLAGTITSGWTFGAGAALQIPFAMQMAYRFNGIGVTQNVLYENQKLIANQFNSAIGKIQDSLSSTASALGKLQDVVNQNAQALNTLVKQLSSNFGAISSVLNDILSRLDPPEAEVQIDRLITGRLQSLQTYVTQQLIRAAEIRASANLAATKMSECVLGQSKRVDFCGKGYHLMSFPQSAPHGVVFLHVTYVPAQEKNFTTAPAICHDGKAHFPREGVFVSNGTHWFVTQRNFYEPQIITTDNTFVSGNCDVVIGIVNNTVYDPLQPELDSGGGSGGGQIYEGKLTAEGLRFGIVASRFNHALVDRLVEGAIDAIVRHGGREEDITLVRVPGSWEIPVAAGELARKEDIDAVIAIGVLIRGATPHFDYIASEVSKGLADLSLELRKPITFGVITADTLEQAIERAGTKHGNKGWEAALSAIEMANLFKSLR

SEQ ID NO: 7751 - protein, 1307 aa, Artificial Sequence
  SARS-CoV-2/USA/WA-UW292/2020__EPI_ISL_418077 spike protein (1-1147)(K986P_V987P) LumSynth construct
MFVFLVLLPLVSSQCVNLTTRTQLPPAYTNSFTRGVYYPDKVFRSSVLHSTQDLFLPFFSNVTWFHAIHVSGTNGTKRFDNPVLPFNDGVYFASTEKSNIIRGWIFGTTLDSKTQSLLIVNNATNVVIKVCEFQFCNDPFLGVYYHKNNKSWMESEFRVYSSANNCTFEYVSQPFLMDLEGKQGNFKNLREFVFKNIDGYFKIYSKHTPINLVRDLPQGFSALEPLVDLPIGINITRFQTLLALHRSYLTPGDSSSGWTAGAAAYYVGYLQPRTFLLKYNENGTITDAVDCALDPLSETKCTLKSFTVEKGIYQTSNFRVQPTESIVRFPNITNLCPFGEVFNATRFASVYAWNRKRISNCVADYSVLYNSASFSTFKCYGVSPTKLNDLCFTNVYADSFVIRGDEVRQIAPGQTGKIADYNYKLPDDFTGCVIAWNSNNLDSKVGGNYNYLYRLFRKSNLKPFERDISTEIYQASSTPCNGVEGFNCYFPLQSYGFQPTNGVGYQPYRVVVLSFELLHAPATVCGPKKSTNLVKNKCVNFNFNGLTGTGVLTESNKKFLPFQQFGRDIADTTDAVRDPQTLEILDITPCSFGGVSVITPGTNTSNQVAVLYQDVNCTEVPVAIHADQLTPTWRVYSTGSNVFQTRAGCLIGAEHVNNSYECDIPIGAGICASYQTQTNSPRRARSVASQSIIAYTMSLGAENSVAYSNNSIAIPTNFTISVTTEILPVSMTKTSVDCTMYICGDSTECSNLLLQYGSFCTQLNRALTGIAVEQDKNTQEVFAQVKQIYKTPPIKDFGGFNFSQILPDPSKPSKRSFIEDLLFNKVTLADAGFIKQYGDCLGDIAARDLICAQKFNGLTVLPPLLTDEMIAQYTSALLAGTITSGWTFGAGAALQIPFAMQMAYRFNGIGVTQNVLYENQKLIANQFNSAIGKIQDSLSSTASALGKLQDVVNQNAQALNTLVKQLSSNFGAISSVLNDILSRLDPPEAEVQIDRLITGRLQSLQTYVTQQLIRAAEIRASANLAATKMSECVLGQSKRVDFCGKGYHLMSFPQSAPHGVVFLHVTYVPAQEKNFTTAPAICHDGKAHFPREGVFVSNGTHWFVTQRNFYEPQIITTDNTFVSGNCDVVIGIVNNTVYDPLQPELDSGGGSGGGQIYEGKLTAEGLRFGIVASRFNHALVDRLVEGAIDAIVRHGGREEDITLVRVPGSWEIPVAAGELARKEDIDAVIAIGVLIRGATPHFDYIASEVSKGLADLSLELRKPITFGVITADTLEQAIERAGTKHGNKGWEAALSAIEMANLFKSLR

SEQ ID NO: 7752 - protein, 1307 aa, Artificial Sequence
  SARS-CoV-2/Iceland/192/2020__EPI_ISL_417819 spike protein (1-1147)(K986P_V987P) LumSynth construct
MFVFFVLLPLVSSQCVNLTTRTQLPPAYTNSFTRGVYYPDKVFRSSVLHSTQDLFLPFFSNVTWFHAIHVSGTNGTKRFDNPVLPFNDGVYFASTEKSNIIRGWIFGTTLDSKTQSLLIVNNATNVVIKVCEFQFCNDPFLGVYYHKNNKSWMESEFRVYSSANNCTFEYVSQPFLMDLEGKQGNFKNLREFVFKNIDGYFKIYSKHTPINLVRDLPQGFSALEPLVDLPIGINITRFQTLLALHRSYLTPGDSSSGWTAGAAAYYVGYLQPRTFLLKYNENGTITDAVDCALDPLSETKCTLKSFTVEKGIYQTSNFRVQPTESIVRFPNITNLCPFGEVFNATRFASVYAWNRKRISNCVADYSVLYNSASFSTFKCYGVSPTKLNDLCFTNVYADSFVIRGDEVRQIAPGQTGKIADYNYKLPDDFTGCVIAWNSNNLDSKVGGNYNYLYRLFRKSNLKPFERDISTEIYQAGSTPCNGVEGFNCYFPLQSYGFQPTNGVGYQPYRVVVLSFELLHAPATVCGPKKSTNLVKNKCVNFNFNGLTGTGVLTESNKKFLPFQQFGRDIADTTDAVRDPQTLEILDITPCSFGGVSVITPGTNTSNQVAVLYQGVNCTEVPVAIHADQLTPTWRVYSTGSNVFQTRAGCLIGAEHVNNSYECDIPIGAGICASYQTQTNSPRRARSVASQSIIAYTMSLGAENSVAYSNNSIAIPTNFTISVTTEILPVSMTKTSVDCTMYICGDSTECSNLLLQYGSFCTQLNRALTGIAVEQDKNTQEVFAQVKQIYKTPPIKDFGGFNFSQILPDPSKPSKRSFIEDLLFNKVTLADAGFIKQYGDCLGDIAARDLICAQKFNGLTVLPPLLTDEMIAQYTSALLAGTITSGWTFGAGAALQIPFAMQMAYRFNGIGVTQNVLYENQKLIANQFNSAIGKIQDSLSSTASALGKLQDVVNQNAQALNTLVKQLSSNFGAISSVLNDILSRLDPPEAEVQIDRLITGRLQSLQTYVTQQLIRAAEIRASANLAATKMSECVLGQSKRVDFCGKGYHLMSFPQSAPHGVVFLHVTYVPAQEKNFTTAPAICHDGKAHFPREGVFVSNGTHWFVTQRNFYEPQIITTDNTFVSGNCDVVIGIVNNTVYDPLQPELDSGGGSGGGQIYEGKLTAEGLRFGIVASRFNHALVDRLVEGAIDAIVRHGGREEDITLVRVPGSWEIPVAAGELARKEDIDAVIAIGVLIRGATPHFDYIASEVSKGLADLSLELRKPITFGVITADTLEQAIERAGTKHGNKGWEAALSAIEMANLFKSLR

SEQ ID NO: 7753 - protein, 1307 aa, Artificial Sequence
  SARS-CoV-2/Belgium/ULG-6939/2020__EPI_ISL_417020 spike protein (1-1147)(K986P_V987P) LumSynth construct
MFVFLVLLPLVSSQCVNLTTRTQLPPAYTNSFTRGVYYPDKVFRSSVLHSTQDLFLPFFSNVTWFHAIHVSGTNGTKRFDNPVLPFNDGVYFASTEKSNIIRGWIFGTTLDSKTQSLLIVNNATNVVIKVCEFQFCNDPFLGVYYHKNNKSWMESEFRVYSSANNCTFEYVSQPFLMDLEGKQGNFKNLREFVFKNIDGYFKIYSKHTPINLVRDLPQGFSALEPLVDLPIGINITRFQTLLALHRSYLTPGDSSSGWTAGAAAYYVGYLQPRTFLLKYNENGTITDAVDCALDPLSETKCTLKSFTVEKGIYQTSNFRVQPTESIVRFPNITNLCPFGEVFNATRFASVYAWNRKRISNCVADYSVLYNSASFSTFKCYGVSPTKLNDLCFTNVYADSFVIRGDEVRQIAPGQTGKIADYNYKLPDDFTGCVIAWNSNNLDSKVGGNYNYLYRLFRKSNLKPFERDISTEIYQAGSTPCNGVEGFNCYFPLQSYGFQPTNGVGYQPYRVVVLSFELLHAPATVCGPKKSTNLVKNKCVNFNFNGLTGTGVLTESNKKFLPFQQFGRDIADTTDAVRDPQTLEILDITPCSFGGVSVITPGTNTSNQVAVLYQGVNCTEVPVAIHADQLTPTWRVYSTGSNVFQTRAGCLIGAEHVNNSYECDIPIGAGICASYQTQTNSPRRARSVASQSIIAYTMSLGAENSVVYSNNSIAIPTNFTISVTTEILPVSMTKTSVDCTMYICGDSTECSNLLLQYGSFCTQLNRALTGIAVEQDKNTQEVFAQVKQIYKTPPIKDFGGFNFSQILPDPSKPSKRSFIEDLLFNKVTLADAGFIKQYGDCLGDIAARDLICAQKFNGLTVLPPLLTDEMIAQYTSALLAGTITSGWTFGAGAALQIPFAMQMAYRFNGIGVTQNVLYENQKLIANQFNSAIGKIQDSLSSTASALGKLQDVVNQNAQALNTLVKQLSSNFGAISSVLNDILSRLDPPEAEVQIDRLITGRLQSLQTYVTQQLIRAAEIRASANLAATKMSECVLGQSKRVDFCGKGYHLMSFPQSAPHGVVFLHVTYVPAQEKNFTTAPAICHDGKAHFPREGVFVSNGTHWFVTQRNFYEPQIITTDNTFVSGNCDVVIGIVNNTVYDPLQPELDSGGGSGGGQIYEGKLTAEGLRFGIVASRFNHALVDRLVEGAIDAIVRHGGREEDITLVRVPGSWEIPVAAGELARKEDIDAVIAIGVLIRGATPHFDYIASEVSKGLADLSLELRKPITFGVITADTLEQAIERAGTKHGNKGWEAALSAIEMANLFKSLR

SEQ ID NO: 7754 - protein, 1307 aa, Artificial Sequence
  SARS-CoV-2/France/HF2496/2020__EPI_ISL_418231 spike protein (1-1147)(K986P_V987P) LumSynth construct
MFVFLVLLPLVSSQCVNLTTRTQLPPAYTNSFTRGVYYPDKVFRSSVLHSTQDLFLPFFSNVTWFHAIHVSGTNGTKRFDNPVLPFNDGVYFASTEKSNIIRGWIFGTTLDSKTQSLLIVNNATNVVIKVCEFQFCNDPFLGVYYHKNNKSWMESEFRVYSSANNCTFEYVSQPFLMDLEGKQGNFKNLREFVFKNIDGYFKIYSKHTPINLVRDLPQGFSALEPLVDLPIGINITRFQTLLALHRSYLTPGDSSSGWTAGAAAYYVGYLQPRTFLLKYNENGTITDAVDCALDPLSETKCTLKSFTVEKGIYQTSNFRVQPTESIVRFPNITNLCPFGEVFNATRFASVYAWNRKRISNCVADYSVLYNSASFSTFKCYGVSPTKLNDLCFTNVYADSFVIRGDEVRQIAPGQTGKIADYNYKLPDDFTGCVIAWNSNNLDSKVGGNYNYLYRLFRKSNLKPFERDISTEIYQAGSTPCNGVEGFNCYFPLQSYGFQPTNGVGYQPYRVVVLSFELLHAPATVCGPKKSTNLVKNKCVNFNFNGLTGTGVLTESNKKFLPFQQFGRDIADTTDAVRDPQTLEILDITPCSFGGVSVITPGTNTSNQVAVLYQGVNCTEVPVAIHADQLTPTWRVYSTGSNVFQTRAGCLIGAEHVNNSYECDIPIGAGICASYQTQTNSPRRARSVASQSIIAYTMSLGAENSVAYSNNSIAIPTNFTISVTTEILPVSMTKTSVDCTMYICGDSTECSNLLLQYGSFCTQLNRALTGIAVEQDKNTQEVFAQVKQIYKTPPIKDFGGFNFSQILPDPSKPSKRSFIEDLLFNKVTLADAGFIKQYGDCLGDIVARDLICAQKFNGLTVLPPLLTDEMIAQYTSALLAGTITSGWTFGAGAALQIPFAMQMAYRFNGIGVTQNVLYENQKLIANQFNSAIGKIQDSLSSTASALGKLQDVVNQNAQALNTLVKQLSSNFGAISSVLNDILSRLDPPEAEVQIDRLITGRLQSLQTYVTQQLIRAAEIRASANLAATKMSECVLGQSKRVDFCGKGYHLMSFPQSAPHGVVFLHVTYVPAQEKNFTTAPAICHDGKAHFPREGVFVSNGTHWFVTQRNFYEPQIITTDNTFVSGNCDVVIGIVNNTVYDPLQPELDSGGGSGGGQIYEGKLTAEGLRFGIVASRFNHALVDRLVEGAIDAIVRHGGREEDITLVRVPGSWEIPVAAGELARKEDIDAVIAIGVLIRGATPHFDYIASEVSKGLADLSLELRKPITFGVITADTLEQAIERAGTKHGNKGWEAALSAIEMANLFKSLR

SEQ ID NO: 7755 - protein, 1307 aa, Artificial Sequence
  SARS-CoV-2/USA/WA-UW291/2020__EPI_ISL_418076 spike protein (1-1147)(K986P_V987P) LumSynth construct
MFVFLVLLPLVSSQCVNLTTRTQLPPAYTNSFTRGVYYPDKVFRSSVLHSTQDLFLPFFSNVTWFHAIHVSGTNGTKRFDNPVLPFNDGVYFASTEKSNIIRGWIFGTTLDSKTQSLLIVNNATNVVIKVCEFQFCNDPFLGVYYHKNNKSWMESEFRVYSSANNCTFEYVSQPFLMDLEGKQGNFKNLREFVFKNIDGYFKIYSKHTPINLVRDLPQGFSALEPLVDLPIGINITRFQTLLALHRSYLTPGDSSSGWTAGAAAYYVGYLQPRTFLLKYNENGTITDAVDCALDPLSETKCTLKSFTVEKGIYQTSNFRVQPTESIVRFPNITNLCPFGEVFNATRFASVYAWNRKRISNCVADYSVLYNSASFSTFKCYGVSPTKLNDLCFTNVYADSFVIRGDEVRQIAPGQTGKIADYNYKLPDDFTGCVIAWNSNNLDSKVGGNYNYLYRLFRKSNLKPFERDISTEIYQAGSTPCNGVEGFNCYFPLQSYGFQPTNGVGYQPYRVVVLSFELLHAPATVCGPKKSTNLVKNKCVNFNFNGLTGTGVLTESNKKFLPFQQFGRDIADTTDAVRDPQTLEILDITPCSFGGVSVITPGTNTSNQVAVLYQGVNCTEVPVAIHADQLTPTWRVYSTGSNVFQTRAGCLIGAEHVNNSYECDIPIGAGICASYQTQTNSPRRARSVASQSIIAYTMSLGAENSVAYSNNSIAIPTNFTISVTTEILPVSMTKTSVDCTMYICGDSTECSNLLLQYGSFCTQLNRALTGIAVEQDKNTQEVFAQVKQIYKTPPIKDFGGFNFSQILPDPSKPSKRSFIEDLLFNKVTLADAGFIKQYGDCLGDIAARDLICAQKFNGLTVLPPLLTDEMIAQYTSALLAGTITSGWTFGAGAALQIPFAMQMAYRFNGIGVTQNVLYENQKLIANQFNSAIGKIQYSLSSTASALGKLQDVVNQNAQALNTLVKQLSSNFGAISSVLNDILSRLDPPEAEVQIDRLITGRLQSLQTYVTQQLIRAAEIRASANLAATKMSECVLGQSKRVDFCGKGYHLMSFPQSAPHGVVFLHVTYVPAQEKNFTTAPAICHDGKAHFPREGVFVSNGTHWFVTQRNFYEPQIITTDNTFVSGNCDVVIGIVNNTVYDPLQPELDSGGGSGGGQIYEGKLTAEGLRFGIVASRFNHALVDRLVEGAIDAIVRHGGREEDITLVRVPGSWEIPVAAGELARKEDIDAVIAIGVLIRGATPHFDYIASEVSKGLADLSLELRKPITFGVITADTLEQAIERAGTKHGNKGWEAALSAIEMANLFKSLR

SEQ ID NO: 7756 - protein, 1307 aa, Artificial Sequence; identical to SEQ ID NO: 7719
  SARS-CoV-2/Portugal/PT0034/2020__EPI_ISL_418019 spike protein (1-1147)(K986P_V987P) LumSynth construct

SEQ ID NO: 7757 - protein, 1307 aa, Artificial Sequence; identical to SEQ ID NO: 7711
  SARS-CoV-2/Iceland/202/2020__EPI_ISL_417750 spike protein (1-1147)(K986P_V987P) LumSynth construct

SEQ ID NO: 7758 - protein, 1307 aa, Artificial Sequence
  SARS-CoV-2/USA/WA-UW261/2020__EPI_ISL_418046 spike protein (1-1147)(K986P_V987P) LumSynth construct
MFVFLVLLPLVSSQCVNLTTRTQLPPAYTNSFTRGVYYPDKVFRSSVLHSTQDLFLPFFSNVTWFHAIHVSGTNGTKRFDNPVLPFNDGVYFASTEKSNIIRGWIFGTTLDSKTQSLLIVNNATNVVIKVCEFQFCNDPFLGVYYHKNNKSWMESEFRVYSSANNCTFEYVSQPFLMDLEGKQGNFKNLREFVFKNIDGYFKIYSKHTPINLVRDLPQGFSALEPLVDLPIGINITRFQTLLALHRSYLTPGDSSSGWTAGAAAYYVGYLQPRTFLLKYNENGTITDAVDCALDPLSETKCTLKSFTVEKGIYQTSNFRVQPTESIVRFPNITNLCPFGEVFNATRFTSVYAWNRKRISNCVADYSVLYNSASFSTFKCYGVSPTKLNDLCFTNVYADSFVIRGDEVRQIAPGQTGKIADYNYKLPDDFTGCVIAWNSNNLDSKVGGNYNYLYRLFRKSNLKPFERDISTEIYQAGSTPCNGVEGFNCYFPLQSYGFQPTNGVGYQPYRVVVLSFELLHAPATVCGPKKSTNLVKNKCVNFNFNGLTGTGVLTESNKKFLPFQQFGRDIADTTDAVRDPQTLEILDITPCSFGGVSVITPGTNTSNQVAVLYQDVNCTEVPVAIHADQLTPTWRVYSTGSNVFQTRAGCLIGAEHVNNSYECDIPIGAGICASYQTQTNSPRRARSVASQSIIAYTMSLGAENSVAYSNNSIAIPTNFTISVTTEILPVSMTKTSVDCTMYICGDSTECSNLLLQYGSFCTQLNRALTGIAVEQDKNTQEVFAQVKQIYKTPPIKDFGGFNFSQILPDPSKPSKRSFIEDLLFNKVTLADAGFIKQYGDCLGDIAARDLICAQKFNGLTVLPPLLTDEMIAQYTSALLAGTITSGWTFGAGAALQIPFAMQMAYRFNGIGVTQNVLYENQKLIANQFNSAIGKIQDSLSSTASALGKLQDVVNQNAQALNTLVKQLSSNFGAISSVLNDILSRLDPPEAEVQIDRLITGRLQSLQTYVTQQLIRAAEIRASANLAATKMSECVLGQSKRVDFCGKGYHLMSFPQSAPHGVVFLHVTYVPAQEKNFTTAPAICHDGKAHFPREGVFVSNGTHWFVTQRNFYEPQIITTDNTFVSGNCDVVIGIVNNTVYDPLQPELDSGGGSGGGQIYEGKLTAEGLRFGIVASRFNHALVDRLVEGAIDAIVRHGGREEDITLVRVPGSWEIPVAAGELARKEDIDAVIAIGVLIRGATPHFDYIASEVSKGLADLSLELRKPITFGVITADTLEQAIERAGTKHGNKGWEAALSAIEMANLFKSLR

SEQ ID NO: 7759 - protein, 1307 aa, Artificial Sequence
  SARS-CoV-2/Portugal/PT0035/2020__EPI_ISL_418020 spike protein (1-1147)(K986P_V987P) LumSynth construct
MFVFLVLLPLVSSQCVNLTTRTQLPPAYTNSFTRGVYYPDKVFRSSVLHSTQDLFLPFFSNVTWFHAIHVSGTNGTKRFDNPVLPFNDGVYFASTEKSNIIRGWIFGTTLDSKTQSLLIVNNATNVVIKVCEFQFCNDPFLGVYYHKNNKSWMESEFRVYSSANNCTFEYVSQPFLMDLEGKQGNFKNLREFVFKNIDGYFKIYSKHTPINLVRDLPQGFSALEPLVDLPIGINITRFQTLLALHRSYLTPGDSSSGWTAGAAAYYVGYLQPRTFLLKYNENGTITDAVDCALDPLSETKCTLKSFTVEKGIYQTSNFRVQPTESIVRFPNITNLCPFGEVFNATRFASVYAWNRKRISNCVADYSVLYNSASFSTFKCYGVSPTKLNDLCFTNVYADSFVIRGDEVRQIAPGQTGKIADYNYKLPDDFTGCVIAWNSNNLDSKVGGNYNYLYRLFRKSNLKPFERDISTEIYQAGSTPCNGVEGFNCYFPLQSYGFQPTNGVGYQPYRVVVLSFELLHAPATVCGPKKSTNLVKNKCVNFNFNGLTGTGVLTESNKKFLPFQQFGRDIADTTDAVRDPQTLEILDITPCSFGGVSVITPGTNTSNQVAVLYQDVNCTEVPVAIHADQLTPTWRVYSTGSNVFQTRAGCLIGAEHVNNSYECDIPIGAGICASYQTQTNSPRRARSVASQSIIAYTMSLGAENSVAYSNNSIAIPTNFTISVTTEILPVSMTKTSVDCTMYICGDSTECSNLLLQYGSFCTQLNRALTGIAVEQDKNTQEVFAQVKQIYKTPPIKDFGGFNFSQILPDPSKPSKRSFIEDLLFNKVTLADAGFIKQYGDCLGDISARDLICAQKFNGLTVLPPLLTDEMIAQYTSALLAGTITSGWTFGAGAALQIPFAMQMAYRFNGIGVTQNVLYENQKLIANQFNSAIGKIQDSLSSTASALGKLQDVVNQNAQALNTLVKQLSSNFGAISSVLNDILSRLDPPEAEVQIDRLITGRLQSLQTYVTQQLIRAAEIRASANLAATKMSECVLGQSKRVDFCGKGYHLMSFPQSAPHGVVFLHVTYVPAQEKNFTTAPAICHDGKAHFPREGVFVSNGTHWFVTQRNFYEPQIITTDNTFVSGNCDVVIGIVNNTVYDPLQPELDSGGGSGGGQIYEGKLTAEGLRFGIVASRFNHALVDRLVEGAIDAIVRHGGREEDITLVRVPGSWEIPVAAGELARKEDIDAVIAIGVLIRGATPHFDYIASEVSKGLADLSLELRKPITFGVITADTLEQAIERAGTKHGNKGWEAALSAIEMANLFKSLR

SEQ ID NO: 7760 - protein, 1307 aa, Artificial Sequence
  SARS-CoV-2/USA/NY-NYUMC7/2020__EPI_ISL_418192 spike protein (1-1147)(K986P_V987P) LumSynth construct
MFVFLVLLPLVSSQCVNLTTRTQLPPAYTNSFTRGVYYPDKVFRSSVLHSTQDLFLPFFSNVTWFHAIHVSGTNGTKRFDNPVLPFNDGVYFASTEKSNIIRGWIFGTTLDSKTQSLLIVNNATNVVIKVCEFQFCNDPFLGVYHHKNNKSWMESEFRVYSSANNCTFEYVSQPFLMDLEGKQGNFKNLREFVFKNIDGYFKIYSKHTPINLVRDLPQGFSALEPLVDLPIGINITRFQTLLALHRSYLTPGDSSSGWTAGAAAYYVGYLQPRTFLLKYNENGTITDAVDCALDPLSETKCTLKSFTVEKGIYQTSNFRVQPTESIVRFPNITNLCPFGEVFNATRFASVYAWNRKRISNCVADYSVLYNSASFSTFKCYGVSPTKLNDLCFTNVYADSFVIRGDEVRQIAPGQTGKIADYNYKLPDDFTGCVIAWNSNNLDSKVGGNYNYLYRLFRKSNLKPFERDISTEIYQAGSTPCNGVEGFNCYFPLQSYGFQPTNGVGYQPYRVVVLSFELLHAPATVCGPKKSTNLVKNKCVNFNFNGLTGTGVLTESNKKFLPFQQFGRDIADTTDAVRDPQTLEILDITPCSFGGVSVITPGTNTSNQVAVLYQGVNCTEVPVAIHADQLTPTWRVYSTGSNVFQTRAGCLIGAEHVNNSYECDIPIGAGICASYQTQTNSPRRARSVASQSIIAYTMSLGAENSVAYSNNSIAIPTNFTISVTTEILPVSMTKTSVDCTMYICGDSTECSNLLLQYGSFCTQLNRALTGIAVEQDKNTQEVFAQVKQIYKTPPIKDFGGFNFSQILPDPSKPSKRSFIEDLLFNKVTLADAGFIKQYGDCLGDIAARDLICAQKFNGLTVLPPLLTDEMIAQYTSALLAGTITSGWTFGAGAALQIPFAMQMAYRFNGIGVTQNVLYENQKLIANQFNSAIGKIQDSLSSTASALGKLQDVVNQNAQALNTLVKQLSSNFGAISSVLNDILSRLDPPEAEVQIDRLITGRLQSLQTYVTQQLIRAAEIRASANLAATKMSECVLGQSKRVDFCGKGYHLMSFPQSAPHGVVFLHVTYVPAQEKNFTTAPAICHDGKAHFPREGVFVSNGTHWFVTQRNFYEPQIITTDNTFVSGNCDVVIGIVNNTVYDPLQPELDSGGGSGGGQIYEGKLTAEGLRFGIVASRFNHALVDRLVEGAIDAIVRHGGREEDITLVRVPGSWEIPVAAGELARKEDIDAVIAIGVLIRGATPHFDYIASEVSKGLADLSLELRKPITFGVITADTLEQAIERAGTKHGNKGWEAALSAIEMANLFKSLR

SEQ ID NO: 7761 - protein, 1307 aa, Artificial Sequence
  SARS-CoV-2/Iceland/189/2020__EPI_ISL_417709 spike protein (1-1147)(K986P_V987P) LumSynth construct
MFVFLVLLPLVSSQCVNLTTRTQLPPAYTNSFTRGVYYPDKVFRSSVLHSTQDLFLPFFSNVTWFHAIHVSGTNGTKRFDNPVLPFNDGVYFASTEKSNIIRGWIFGTTLDSKTQSLLIVNNATNVVIKVCEFQFCNDPFLGVYYHKNNKSWMESEFRVYSSANNCTFEYVSQPFLMDLEGKQGNFKNLREFVFKNIDGYFKIYSKHTPINLVRDLPQGFSALEPLVDLPIGINITRFQTLLALHRSYLTPGDSSSGWTAGAAAYYVGYLQPRTFLLKYNENGTITDAVDCALDPLSETKCTLKSFTVEKGIYQTSNFRVQPTESIVRFPNITNLCPFGEVFNATRFASVYAWNRKRISNCVADYSVLYNSASFSTFKCYGVSPTKLNDLCFTNVYADSFVIRGDEVRQIAPGQTGKIADYNYKLPDDFTGCVIAWNSNNLDSKVGGNYNYLYRLFRKSNLKPFERDISTEIYQAGSTPCNGVEGFNCYFPLQSYGFQPTNGVGYQPYRVVVLSFELLHAPATVCGPKKSTNLVKNKCVNFNFNGLTGTGVLTESNKKFLPFQQFGRDIADTTDAVRDPQTLEILDITPCSFGGVSVITPGTNTSNQVAVLYQGVNCTEVPVAIHADQLTPTWRVYSTGSNVFQTRAGCLIGAEHVNNSYECDIPIGAGICASYQTQTNSPRRARSVASQSIIAYTMSLGAENSVAYSNNSIAIPTNFTISVTTEILPVSMTKTSVDCTMYICGDSTECSNLLLQYGSFCTQLNRALTGIAVEQDKNTQEVFAQVKQIYKTPPIKDFGGFNFSQILPDPSKPSKRSFIEDLLFNKVTLADAGFTKQYGDCLGDIAARDLICAQKFNGLTVLPPLLTDEMIAQYTSALLAGTITSGWTFGAGAALQIPFAMQMAYRFNGIGVTQNVLYENQKLIANQFNSAIGKIQDSLSSTASALGKLQDVVNQNAQALNTLVKQLSSNFGAISSVLNDILSRLDPPEAEVQIDRLITGRLQSLQTYVTQQLIRAAEIRASANLAATKMSECVLGQSKRVDFCGKGYHLMSFPQSAPHGVVFLHVTYVPAQEKNFTTAPAICHDGKAHFPREGVFVSNGTHWFVTQRNFYEPQIITTDNTFVSGNCDVVIGIVNNTVYDPLQPELDSGGGSGGGQIYEGKLTAEGLRFGIVASRFNHALVDRLVEGAIDAIVRHGGREEDITLVRVPGSWEIPVAAGELARKEDIDAVIAIGVLIRGATPHFDYIASEVSKGLADLSLELRKPITFGVITADTLEQAIERAGTKHGNKGWEAALSAIEMANLFKSLR

SEQ ID NO: 7762 - protein, 1307 aa, Artificial Sequence
  SARS-CoV-2/Australia/NSW56/2020__EPI_ISL_417408 spike protein (1-1147)(K986P_V987P) LumSynth construct
MFVFLVLLPLVSSQCVNLTTRTQLPPAYTNSFTRGVYYPDKVFRSSVLHSTQDLFLPFFSNVTWFHAIHVSGTNGTKRFDNPVLPFNDGVYFASTEKSNIIRGWIFGTTLDSKTQSLLIVNNATNVVIKVCEFQFCNDPFLGVYYHKNNKSWMESEFRVYSSANNCTFEYVSQPFLMDLEGKQGNFKNLREFVFKNIDGYFKIYSKHTPINLVRDLPQGFSALEPLVDLPIGINITRFQTLLALHRSYLTPGDSSSGWTAGAAAYYVGYLQPRTFLLKYNENGTITDAVDCALDPLSETKCTLKSFTVEKGIYQTSNFRVQPTESIVRFPNITNLCPFGEVFNATRFASVYAWNRKRISNCVADYSVLYNSASFSTFKCYGVSPTKLNDLCFTNVYADSFVIRGDEVRQIAPGQTGKIADYNYKLPDDFTGCVIAWNSNNLDSKVGGNYNYLYRLFRKSNLKPFERDISTEIYQAGSTPCNGVEGFNCYFPLQSYGFQPTNGVGYQPYRVVVLSFELLHAPATVCGPKKSTNLVKNKCVNFNFNGLTGTGVLTESNKKFLPFQQFGRDIADTTDAVRDPQTLEILDITPCSFGGVSVITPGTNTSNQVAVLYQDVNCTEVPVAIHADQLTPTWRVYSTGSNVFQTRAGCLIGAEHVNNSYECDIPIGAGICASYQTQTNSPRRARSVASQSIIAYTMSLGAENSVAYSNNSIAIPTNFTISVTTEILPVSMTKTSVDCTMYICGDSTECSNLLLQYGSFCTQLNRALTGIAVEQDKNTQEVFAQVKQIYKTPPIKDFGGFNFSQILPDSSKPSKRSFIEDLLFNKVTLADAGFIKQYGDCLGDIAARDLICAQKFNGLTVLPPLLTDEMIAQYTSALLAGTITSGWTFGAGAALQIPFAMQMAYRFNGIGVTQNVLYENQKLIANQFNSAIGKIQDSLSSTASALGKLQDVVNQNAQALNTLVKQLSSNFGAISSVLNDILSRLDPPEAEVQIDRLITGRLQSLQTYVTQQLIRAAEIRASANLAATKMSECVLGQSKRVDFCGKGYHLMSFPQSAPHGVVFLHVTYVPAQEKNFTTAPAICHDGKAHFPREGVFVSNGTHWFVTQRNFYEPQIITTDNTFVSGNCDVVIGIVNNTVYDPLQPELDSGGGSGGGQIYEGKLTAEGLRFGIVASRFNHALVDRLVEGAIDAIVRHGGREEDITLVRVPGSWEIPVAAGELARKEDIDAVIAIGVLIRGATPHFDYIASEVSKGLADLSLELRKPITFGVITADTLEQAIERAGTKHGNKGWEAALSAIEMANLFKSLR

SEQ ID NO: 7763 - protein, 1307 aa, Artificial Sequence
  SARS-CoV-2/Iceland/280/2020__EPI_ISL_417608 spike protein (1-1147)(K986P_V987P) LumSynth construct
MFVFLVLLPLVSSQCVNLTTRTQLPPAYTNSFTRGVYYPDKVFRSSVLHSTQDLFLPFFSNVTWFHAIHVSGTNGTKRFDNPVLPFNDGVYFASTEKSNIIRGWIFGTTLDSKTQSLLIVNNATNVVIKVCEFQFCNDPFLGVYYHKNNKSWMESEFRVYSSANNCTFEYVSQPFLMDLEGKQGNFKNLREFVFKNIDGYFKIYSKHTPINLVRDLPQGFSALEPLVDLPIGINITRFQTLLALHRSYLTPGDSSSGWTAGAAAYYVGYLQPRTFLLKYNENGTITDAVDCALDPLSETKCTLKSFTVEKGIYQTSNFRVQPTESIVRFPNITNLCPFGEVFNATRFASVYAWNRKRISNCVADYSVLYNSASFSTFKCYGVSPTKLNDLCFTNVYADSFVIRGDEVRQIAPGQTGKIADYNYKLPDDFTGCVIAWNSNNLDSKVGGNYNYLYRLFRKSNLKPFERDISTEIYQAGSTPCNGVEGFNCYFPLQSYGFQPTNGVGYQPYRVVVLSFELLHAPATVCGPKKSTNLVKNKCVNFNFNGLTGTGVLTESNKKFLPFQQFGRDIADTTDAVRDPQTLEILDITPCSFGGVSVITPGTNTSNQVAVLYQGVNCTEVPVAIHADQLTPTWRVYSTGSNVFQTRAGCLIGAEHVNNSYECDIPIGAGICASYHTQTNSPRRARSVASQSIIAYTMSLGAENSVAYSNNSIAIPTNFTISVTTEILPVSMTKTSVDCTMYICGDSTECSNLLLQYGSFCTQLNRALTGIAVEQDKNTQEVFAQVKQIYKTPPIKDFGGFNFSQILPDPSKPSKRSFIEDLLFNKVTLADAGFIKQYGDCLGDIAARDLICAQKFNGLTVLPPLLTDEMIAQYTSALLAGTITSGWTFGAGAALQIPFAMQMAYRFNGIGVTQNVLYENQKLIANQFNSAIGKIQDSLSSTASALGKLQDVVNQNAQALNTLVKQLSSNFGAISSVLNDILSRLDPPEAEVQIDRLITGRLQSLQTYVTQQLIRAAEIRASANLAATKMSECVLGQSKRVDFCGKGYHLMSFPQSAPHGVVFLHVTYVPAQEKNFTTAPAICHDGKAHFPREGVFVSNGTHWFVTQRNFYEPQIITTDNTFVSGNCDVVIGIVNNTVYDPLQPELDSGGGSGGGQIYEGKLTAEGLRFGIVASRFNHALVDRLVEGAIDAIVRHGGREEDITLVRVPGSWEIPVAAGELARKEDIDAVIAIGVLIRGATPHFDYIASEVSKGLADLSLELRKPITFGVITADTLEQAIERAGTKHGNKGWEAALSAIEMANLFKSLR

SEQ ID NO: 7764 - protein, 1307 aa, Artificial Sequence; identical to SEQ ID NO: 7719
  SARS-CoV-2/Iceland/247/2020__EPI_ISL_417575 spike protein (1-1147)(K986P_V987P) LumSynth construct

SEQ ID NO: 7765 - protein, 1307 aa, Artificial Sequence
  SARS-CoV-2/Iceland/238/2020__EPI_ISL_417566 spike protein (1-1147)(K986P_V987P) LumSynth construct
MFVFLVLLPLVSSQCVNLTTRTQLPPAYTNSFTRGVYYPDKVFRSSVLHSTQDLFLPFFSNVTWFHAIHVSGTNGTKRFDNPVLPFNDGVYFASTEKSNIIRGWIFGTTLDSKTQSLLIVNNATNVVIKVCEFQFCNDPFLGVYYHKNNKSWMESEFRVYSSANNCTFEYVSQPFLMDLEGKQGNFKNLREFVFKNIDGYFKIYSKHTPINLVRDLPQGFSALEPLVDLPIGINITRFQTLLALHRSYLTPGDSSSGWTAGAAAYYVGYLQPRTFLLKYNENGTITDAVDCALDPLSETKCTLKSFTVEKGIYQTSNFRVQPTESIVRFPNITNLCPFGEVFNATRFASVYAWNRKRISNCVADYSVLYNSASFSTFKCYGVSPTKLNDLCFTNVYADSFVIRGDEVRQIAPGQTGKIADYNYKLPDDFTGCVIAWNSNNLDSKVGGNYNYLYRLFRKSNLKPFERDISTEIYQAGSTPCNGVEGFNCYFPLQSYGFQPTNGVGYQPYRVVVLSFELLHAPATVCGPKKSTNLVKNKCVNFNFNGLTGTGVLTESNKKFLPFQQFGRDIADTTDAVRDPQTLEILDITPCSFGGVSVITPGTNTSNQVAVLYQGVNCTEVPVAIHADQLTPTWRVYSTGSNVFQTRAGCLIGAEHVNNSYECDIPIGAGICASYQTQTNSPRRARSVASQSIIAYTMSLGAENSVAYSNNSIAIPTNFTISVTTEILPVSMTKTSVDCTMYICGDSTECSNLLLQYGSFCTQLNRALTGIAVEQDKNTQEVFAQVKQIYKTPPIKDFGGFNFSQILPDPSKPSKRSFIEDLLFNKVTLADVGFIKQYGDCLGDIAARDLICAQKFNGLTVLPPLLTDEMIAQYTSALLAGTITSGWTFGAGAALQIPFAMQMAYRFNGIGVTQNVLYENQKLIANQFNSAIGKIQDSLSSTASALGKLQDVVNQNAQALNTLVKQLSSNFGAISSVLNDILSRLDPPEAEVQIDRLITGRLQSLQTYVTQQLIRAAEIRASANLAATKMSECVLGQSKRVDFCGKGYHLMSFPQSAPHGVVFLHVTYVPAQEKNFTTAPAICHDGKAHFPREGVFVSNGTHWFVTQRNFYEPQIITTDNTFVSGNCDVVIGIVNNTVYDPLQPELDSGGGSGGGQIYEGKLTAEGLRFGIVASRFNHALVDRLVEGAIDAIVRHGGREEDITLVRVPGSWEIPVAAGELARKEDIDAVIAIGVLIRGATPHFDYIASEVSKGLADLSLELRKPITFGVITADTLEQAIERAGTKHGNKGWEAALSAIEMANLFKSLR

SEQ ID NO: 7766 - protein, 1307 aa, Artificial Sequence
  SARS-CoV-2/Greece/16/2020__EPI_ISL_418265 spike protein (1-1147)(K986P_V987P) LumSynth construct
MFVFLVLLPLVSSQCVNLTTRTQLPPAYTNSFTRGVYYPDKVFRSSVLHSTQDLFLPFFSNVTWFHAIHVSGTNGTKRFDNPVLPFNDGVYFASTEKSNIIRGWIFGTTLDSKTQSLLIVNNATNVVIKVCEFQFCNDPFLGVYYHKNNKSWMESEFRVYSSANNCTFEYVSQPFLMDLEGKQGNFKNLREFVFKNVDGYFKIYSKHTPINLVRDLPQGFSALEPLVDLPIGINITRFQTLLALHRSYLTPGDSSSGWTAGAAAYYVGYLQPRTFLLKYNENGTITDAVDCALDPLSETKCTLKSFTVEKGIYQTSNFRVQPTESIVRFPNITNLCPFGEVFNATRFASVYAWNRKRISNCVADYSVLYNSASFSTFKCYGVSPTKLNDLCFTNVYADSFVIRGDEVRQIAPGQTGKIADYNYKLPDDFTGCVIAWNSNNLDSKVGGNYNYLYRLFRKSNLKPFERDISTEIYQAGSTPCNGVEGFNCYFPLQSYGFQPTNGVGYQPYRVVVLSFELLHAPATVCGPKKSTNLVKNKCVNFNFNGLTGTGVLTESNKKFLPFQQFGRDIADTTDAVRDPQTLEILDITPCSFGGVSVITPGTNTSNQVAVLYQDVNCTEVPVAIHADQLTPTWRVYSTGSNVFQTRAGCLIGAEHVNNSYECDIPIGAGICASYQTQTNSPRRARSVASQSIIAYTMSLGAENSVAYSNNSIAIPTNFTISVTTEILPVSMTKTSVDCTMYICGDSTECSNLLLQYGSFCTQLNRALTGIAVEQDKNTQEVFAQVKQIYKTPPIKDFGGFNFSQILPDPSKPSKRSFIEDLLFNKVTLADAGFIKQYGDCLGDIAARDLICAQKFNGLTVLPPLLTDEMIAQYTSALLAGTITSGWTFGAGAALQIPFAMQMAYRFNGIGVTQNVLYENQKLIANQFNSAIGKIQDSLSSTASALGKLQDVVNQNAQALNTLVKQLSSNFGAISSVLNDILSRLDPPEAEVQIDRLITGRLQSLQTYVTQQLIRAAEIRASANLAATKMSECVLGQSKRVDFCGKGYHLMSFPQSAPHGVVFLHVTYVPAQEKNFTTAPAICHDGKAHFPREGVFVSNGTHWFVTQRNFYEPQIITTDNTFVSGNCDVVIGIVNNTVYDPLQPELDSGGGSGGGQIYEGKLTAEGLRFGIVASRFNHALVDRLVEGAIDAIVRHGGREEDITLVRVPGSWEIPVAAGELARKEDIDAVIAIGVLIRGATPHFDYIASEVSKGLADLSLELRKPITFGVITADTLEQAIERAGTKHGNKGWEAALSAIEMANLFKSLR

SEQ ID NO: 7767 - protein, 1307 aa, Artificial Sequence
  SARS-CoV-2/Iceland/319/2020__EPI_ISL_417648 spike protein (1-1147)(K986P_V987P) LumSynth construct
MFVFLVLLPLVSSQCVNLTTRTQLPPAYTNSFTRGVYYPDKVFRSSVLHSTQDLFLPFFSNVTWFHAIHVSGTNGTKRFDNPVLPFNDGVYFASTEKSNIIRGWIFGTTLDSKTQSLLIVNNATNVVIKVCEFQFCNDPFLGVYYHKNNKSWMESEFRVYSSANNCTFEYVSQPFLIDLEGKQGNFKNLREFVFKNIDGYFKIYSKHTPINLVRDLPQGFSALEPLVDLPIGINITRFQTLLALHRSYLTPGDSSSGWTAGAAAYYVGYLQPRTFLLKYNENGTITDAVDCALDPLSETKCTLKSFTVEKGIYQTSNFRVQPTESIVRFPNITNLCPFGEVFNATRFASVYAWNRKRISNCVADYSVLYNSASFSTFKCYGVSPTKLNDLCFTNVYADSFVIRGDEVRQIAPGQTGKIADYNYKLPDDFTGCVIAWNSNNLDSKVGGNYNYLYRLFRKSNLKPFERDISTEIYQAGSTPCNGVEGFNCYFPLQSYGFQPTNGVGYQPYRVVVLSFELLHAPATVCGPKKSTNLVKNKCVNFNFNGLTGTGVLTESNKKFLPFQQFGRDIADTTDAVRDPQTLEILDITPCSFGGVSVITPGTNTSNQVAVLYQGVNCTEVPVAIHADQLTPTWRVYSTGSNVFQTRAGCLIGAEHVNNSYECDIPIGAGICASYQTQTNSPRRARSVASQSIIAYTMSLGAENSVAYSNNSIAIPTNFTISVTTEILPVSMTKTSVDCTMYICGDSTECSNLLLQYGSFCTQLNRALTGIAVEQDKNTQEVFAQVKQIYKTPPIKDFGGFNFSQILPDPSKPSKRSFIEDLLFNKVTLADAGFIKQYGDCLGDIAARDLICAQKFNGLTVLPPLLTDEMIAQYTSALLAGTITSGWTFGAGAALQIPFAMQMAYRFNGIGVTQNVLYENQKLIANQFNSAIGKIQDSLSSTASALGKLQDVVNQNAQALNTLVKQLSSNFGAISSVLNDILSRLDPPEAEVQIDRLITGRLQSLQTYVTQQLIRAAEIRASANLAATKMSECVLGQSKRVDFCGKGYHLMSFPQSAPHGVVFLHVTYVPAQEKNFTTAPAICHDGKAHFPREGVFVSNGTHWFVTQRNFYEPQIITTDNTFVSGNCDVVIGIVNNTVYDPLQPELDSGGGSGGGQIYEGKLTAEGLRFGIVASRFNHALVDRLVEGAIDAIVRHGGREEDITLVRVPGSWEIPVAAGELARKEDIDAVIAIGVLIRGATPHFDYIASEVSKGLADLSLELRKPITFGVITADTLEQAIERAGTKHGNKGWEAALSAIEMANLFKSLR

SEQ ID NO: 7768 - protein, 1307 aa, Artificial Sequence
  SARS-CoV-2/Congo/94/2020__EPI_ISL_417947 spike protein (1-1147)(K986P_V987P) LumSynth construct
MFVFLVLLPLVSSQCVNLTTRTQLPPAYTNSFTRGVYYPDKVFRSSVLHSTQDLFLPFFSNVTWFHAIHVSGTNGTKRFDNPVLPFNDGVYFASTEKSNIIRGWIFGTTLDSKTQSLLIVNNATNVVIKVCEFQFCNDPFLGVYYHKNNKSWMESEFRVYSSANNCTFEYVSQPFLMDLEGKQGNFKNLREFVFKNIDGYFKIYSKHTPINLVRDLPQGFSALEPLVDLPIGINITRFQTLLALHRSYLTPGDSSSGWTAGAAAYYVGYLQPRTFLLKYNENGTITDAVDCALDPLSETKCTLKSFTVEKGIYQTSNFRVQPTESIVRFPNITNLCPFGEVFNATRFASVYAWNRKRISNCVADYSVLYNSASFSTFKCYGVSPTKLNDLCFTNVYADSFVIRGDEVRQIAPGQTGKIADYNYKLPDDFTGCVIAWNSNNLDSKVGGNYNYLYRLFRKSNLKPFERDISTEIYQAGSTPCNGVEGFNCYFPLQSYGFQPTNGVGYQPYRVVVLSFELLHAPATVCGPKKSTNLVKNKCVNFNFNGLTGTGVLTESNKKFLPFQQFGRDIADTTDAVRDPQTLEILDITPCSFGGVSVITPGTNTSNQVAVLYQGVNCTEVPVAIHADQLTPTWRVYSTGSNVFQTRAGCLIGAEHVNNSYECDIPIGAGICASYQTQTNSPRRARSVASQSIIAYTMSLGAENSVAYSNNSIAIPTNFTISVTTEILPVSMTKTSVDCTMYICGDSTECSNLLLQYGSFCTQLNRALTGIAVEQDKNTQEVFAQVKQIYKTPPIKDFGGFNFSQILPDPSKPSKRSFIEDILFNKVTLADAGFIKQYGDCLGDIAARDLICAQKFNGLTVLPPLLTDEMIAQYTSALLAGTITSGWTFGAGAALQIPFAMQMAYRFNGIGVTQNVLYENQKLIANQFNSAIGKIQDSLSSTASALGKLQDVVNQNAQALNTLVKQLSSNFGAISSVLNDILSRLDPPEAEVQIDRLITGRLQSLQTYVTQQLIRAAEIRASANLAATKMSECVLGQSKRVDFCGKGYHLMSFPQSAPHGVVFLHVTYVPAQEKNFTTAPAICHDGKAHFPREGVFVSNGTHWFVTQRNFYEPQIITTDNTFVSGNCDVVIGIVNNTVYDPLQPELDSGGGSGGGQIYEGKLTAEGLRFGIVASRFNHALVDRLVEGAIDAIVRHGGREEDITLVRVPGSWEIPVAAGELARKEDIDAVIAIGVLIRGATPHFDYIASEVSKGLADLSLELRKPITFGVITADTLEQAIERAGTKHGNKGWEAALSAIEMANLFKSLR

SEQ ID NO: 7769 - protein, 1307 aa, Artificial Sequence
  SARS-CoV-2/Congo/158/2020__EPI_ISL_417950 spike protein (1-1147)(K986P_V987P) LumSynth construct
MFVFLVLLPLVSSQCVNLTTRTQLPPAYTNSFTRGVYYPDKVFRSSVLHSTQDLFLPFFSNVTWFHAIHVSGTNGTKRFDNPVLPFNDGVYFASTEKSNIIRGWIFGTTLDSKTQSLLIVNNATNVVIKVCEFQFCNDPFLGVYYHKNNKSWMESEFRVYSSANNCTFEYVSQPFLMDLEGKQGNFKNLREFVFKNIDGYFKIYSKHTPINLVRDLPQGFSALEPLVDLPIGINITRFQTLLALHRSYLTPGDSSSGWTAGAAAYYVGYLQPRTFLLKYNENGTITDAVDCALDPLSETKCTLKSFTVEKGIYQTSNFRVQPTESIVRFPNITNLCPFGEVFNATRFASVYAWNRKRISNCVADYSVLYNSASFSTFKCYGVSPTKLNDLCFTNVYADSFVIRGDEVRQIAPGQTGKIADYNYKLPDDFTGCVIAWNSNNLDSKVGGNYNYLYRLFRKSNLKPFERDISTEIYQAGSTPCNGVEGFNCYFPLQSYGFQPTNGVGYQPYRVVVLSFELLHAPATVCGPKKSTNLVKNKCVNFNFNGLTGTGVLTESNKKFLPFQQFGRDIADTTDAVRDPQTLEILDITPCSFGGVSVITPGTNTSNQVAVLYQDVNCTEVPVAIHADQLTPTWRVYSTGSNVFQTRAGCLIGAEHVNNSYECDIPIGAGICASYQTQTNSPRRARSVASQSIIAYTMSLGAENSVAYSNNSIAIPTNFTISVTTEILPVSMTKTSVDCTMYICGDSTECSNLLLQYGSFCTQLNRALTGIAVEQDKNTQEVFAQVKQIYKTPPIKDFGGFNFSQILPDPSKPSKRSFIEDLLFNKVTLADAGFIKQYGDCLGDIAARDLICAQKFNGLTVLPPLLTDEMIAQYTSALLAGTITSGWTFGAGAALQIPFAMQMAYRFNGIGVTQNVLYENQKLIANQFNSAIGKIQDSLSSTASALGKLQDVVNQNAQALNTLVKQLSSNFGAISSVLNDILSRLDPPEAEVQIDRLITGRLQSLQTYVTQQLIRAAEIRASANLAATKMSECVLGQSKRVDFCGKGYHLMSFPQSAPHGVVFLHVTYVPAQEKNFTTAPAICHDGKAHFPREGVFVSNGTHWFVTQRNFYEPQIITTDNTFLSGNCDVVIGIVNNTVYDPLQPELDSGGGSGGGQIYEGKLTAEGLRFGIVASRFNHALVDRLVEGAIDAIVRHGGREEDITLVRVPGSWEIPVAAGELARKEDIDAVIAIGVLIRGATPHFDYIASEVSKGLADLSLELRKPITFGVITADTLEQAIERAGTKHGNKGWEAALSAIEMANLFKSLR

SEQ ID NO: 7770 - protein, 1307 aa, Artificial Sequence
  SARS-CoV-2/USA/UT-00034/2020__EPI_ISL_417977 spike protein (1-1147)(K986P_V987P) LumSynth construct
MFVFLVLLPLVSSQCVNLTTRTQLPPAYTNSFTRGVYYPDKVFRSSVLHSTQDLFLPFFSNVTWFHAIHVSGTNGTKRFDNPVLPFNDGVYFASTEKSNIIRGWIFGTTLDSKTQSLLIVNNATNVVIKVCEFQFCNDPFLGVYYYKNNKSWMESEFRVYSSANNCTFEYVSQPFLMDLEGKQGNFKNLREFVFKNIDGYFKIYSKHTPINLVRDLPQGFSALEPLVDLPIGINITRFQTLLALHRSYLTPGDSSSGWTAGAAAYYVGYLQPRTFLLKYNENGTITDAVDCALDPLSETKCTLKSFTVEKGIYQTSNFRVQPTESIVRFPNITNLCPFGEVFNATRFASVYAWNRKRISNCVADYSVLYNSASFSTFKCYGVSPTKLNDLCFTNVYADSFVIRGDEVRQIAPGQTGKIADYNYKLPDDFTGCVIAWNSNNLDSKVGGNYNYLYRLFRKSNLKPFERDISTEIYQAGSTPCNGVEGFNCYFPLQSYGFQPTNGVGYQPYRVVVLSFELLHAPATVCGPKKSTNLVKNKCVNFNFNGLTGTGVLTESNKKFLPFQQFGRDIADTTDAVRDPQTLEILDITPCSFGGVSVITPGTNTSNQVAVLYQGVNCTEVPVAIHADQLTPTWRVYSTGSNVFQTRAGCLIGAEHVNNSYECDIPIGAGICASYQTQTNSPRRARSVASQSIIAYTMSLGAENSVAYSNNSIAIPTNFTISVTTEILPVSMTKTSVDCTMYICGDSTECSNLLLQYGSFCTQLNRALTGIAVEQDKNTQEVFAQVKQIYKTPPIKDFGGFNFSQILPDPSKPSKRSFIEDLLFNKVTLADAGFIKQYGDCLGDIAARDLICAQKFNGLTVLPPLLTDEMIAQYTSALLAGTITSGWTFGAGAALQIPFAMQMAYRFNGIGVTQNVLYENQKLIANQFNSAIGKIQDSLSSTASALGKLQDVVNQNAQALNTLVKQLSSNFGAISSVLNDILSRLDPPEAEVQIDRLITGRLQSLQTYVTQQLIRAAEIRASANLAATKMSECVLGQSKRVDFCGKGYHLMSFPQSAPHGVVFLHVTYVPAQEKNFTTAPAICHDGKAHFPREGVFVSNGTHWFVTQRNFYEPQIITTDNTFVSGNCDVVIGIVNNTVYDPLQPELDSGGGSGGGQIYEGKLTAEGLRFGIVASRFNHALVDRLVEGAIDAIVRHGGREEDITLVRVPGSWEIPVAAGELARKEDIDAVIAIGVLIRGATPHFDYIASEVSKGLADLSLELRKPITFGVITADTLEQAIERAGTKHGNKGWEAALSAIEMANLFKSLR

SEQ ID NO: 7771 - protein, 1307 aa, Artificial Sequence
  SARS-CoV-2/USA/UT-00033/2020__EPI_ISL_417976 spike protein (1-1147)(K986P_V987P) LumSynth construct
MFVFLVLLPLVSSQCVNLTTRTQLPPAYTNSFTRGVYYPDKVFRSSVLHSTQDLFLPFFSNVTWFHAIHVSGTNGTKRFDNPVLPFNDGVYFASTEKSNIIRGWIFGTTLDSKTQSLLIVNNATNVVIKVCEFQFCNDPFLGVYYHKNNKSWMESEFRVYSSANNCTFEYVSQPFLMDLEGKQGNFKNLREFVFKNIDGYFKIYSKHTPINLVRDLPQGFSALEPLVDLPIGINITRFQTLLALHRSYLTPGDSSSGLTAGAAAYYVGYLQPRTFLLKYNENGTITDAVDCALDPLSETKCTLKSFTVEKGIYQTSNFRVQPTESIVRFPNITNLCPFGEVFNATRFASVYAWNRKRISNCVADYSVLYNSASFSTFKCYGVSPTKLNDLCFTNVYADSFVIRGDEVRQIAPGQTGKIADYNYKLPDDFTGCVIAWNSNNLDSKVGGNYNYLYRLFRKSNLKPFERDISTEIYQAGSTPCNGVEGFNCYFPLQSYGFQPTNGVGYQPYRVVVLSFELLHAPATVCGPKKSTNLVKNKCVNFNFNGLTGTGVLTESNKKFLPFQQFGRDIADTTDAVRDPQTLEILDITPCSFGGVSVITPGTNTSNQVAVLYQGVNCTEVPVAIHADQLTPTWRVYSTGSNVFQTRAGCLIGAEHVNNSYECDIPIGAGICASYQTQTNSPRRARSVASQSIIAYTMSLGAENSVAYSNNSIAIPTNFTISVTTEILPVSMTKTSVDCTMYICGDSTECSNLLLQYGSFCTQLNRALTGIAVEQDKNTQEVFAQVKQIYKTPPIKDFGGFNFSQILPDPSKPSKRSFIEDLLFNKVTLADAGFIKQYGDCLGDIAARDLICAQKFNGLTVLPPLLTDEMIAQYTSALLAGTITSGWTFGAGAALQIPFAMQMAYRFNGIGVTQNVLYENQKLIANQFNSAIGKIQDSLSSTASALGKLQDVVNQNAQALNTLVKQLSSNFGAISSVLNDILSRLDPPEAEVQIDRLITGRLQSLQTYVTQQLIRAAEIRASANLAATKMSECVLGQSKRVDFCGKGYHLMSFPQSAPHGVVFLHVTYVPAQEKNFTTAPAICHDGKAHFPREGVFVSNGTHWFVTQRNFYEPQIITTDNTFVSGNCDVVIGIVNNTVYDPLQPELDSGGGSGGGQIYEGKLTAEGLRFGIVASRFNHALVDRLVEGAIDAIVRHGGREEDITLVRVPGSWEIPVAAGELARKEDIDAVIAIGVLIRGATPHFDYIASEVSKGLADLSLELRKPITFGVITADTLEQAIERAGTKHGNKGWEAALSAIEMANLFKSLR

SEQ ID NO: 7772 - protein, 1307 aa, Artificial Sequence
  SARS-CoV-2/USA/WI-13/2020__EPI_ISL_417516 spike protein (1-1147)(K986P_V987P) LumSynth construct
MFVFLVLLPLVSSQCVNLTTRTQLPPAYTNSFTRGVYYPDKVFRSSVLHSTQDLFLPFFSNVTWFHAIHVSGTNGTKRFDNPVLPFNDGVYFASTEKSNIIRGWIFGTTLDSKTQSLLIVNNATNVVIKVCEFQFCNDPFLGVYYHKNNKSWMESEFRVYSSANNCTFEYVSQPFLMDLEGKQGNFKNLREFVFKNIDGYFKIYSKHTPINLVRDLPQGFSALEPLVDLPIGINITRFQTLLALHRSYLTPGDSSSGWTAGAAAYYVGYLQPRTFLLKYNENGTITDAVDCALDPLSETKCTLKSFTVEKGIYQTSNFRVLPTESIVRFPNITNLCPFGEVFNATRFASVYAWNRKRISNCVADYSVLYNSASFSTFKCYGVSPTKLNDLCFTNVYADSFVIRGDEVRQIAPGQTGKIADYNYKLPDDFTGCVIAWNSNNLDSKVGGNYNYLYRLFRKSNLKPFERDISTEIYQAGSTPCNGVEGFNCYFPLQSYGFQPTNGVGYQPYRVVVLSFELLHAPATVCGPKKSTNLVKNKCVNFNFNGLTGTGVLTESNKKFLPFQQFGRDIADTTDAVRDPQTLEILDITPCSFGGVSVITPGTNTSNQVAVLYQGVNCTEVPVAIHADQLTPTWRVYSTGSNVFQTRAGCLIGAEHVNNSYECDIPIGAGICASYQTQTNSPRRARSVASQSIIAYTMSLGAENSVAYSNNSIAIPTNFTISVTTEILPVSMTKTSVDCTMYICGDSTECSNLLLQYGSFCTQLNRALTGIAVEQDKNTQEVFAQVKQIYKTPPIKDFGGFNFSQILPDPSKPSKRSFIEDLLFNKVTLADAGFIKQYGDCLGDIAARDLICAQKFNGLTVLPPLLTDEMIAQYTSALLAGTITSGWTFGAGAALQIPFAMQMAYRFNGIGVTQNVLYENQKLIANQFNSAIGKIQDSLSSTASALGKLQDVVNQNAQALNTLVKQLSSNFGAISSVLNDILSRLDPPEAEVQIDRLITGRLQSLQTYVTQQLIRAAEIRASANLAATKMSECVLGQSKRVDFCGKGYHLMSFPQSAPHGVVFLHVTYVPAQEKNFTTAPAICHDGKAHFPREGVFVSNGTHWFVTQRNFYEPQIITTDNTFVSGNCDVVIGIVNNTVYDPLQPELDSGGGSGGGQIYEGKLTAEGLRFGIVASRFNHALVDRLVEGAIDAIVRHGGREEDITLVRVPGSWEIPVAAGELARKEDIDAVIAIGVLIRGATPHFDYIASEVSKGLADLSLELRKPITFGVITADTLEQAIERAGTKHGNKGWEAALSAIEMANLFKSLR

SEQ ID NO: 7773 - protein, 1306 aa, Artificial Sequence
  SARS-CoV-2/India/1-27/2020__EPI_ISL_413522 spike protein (1-1146)(K985P_V986P) LumSynth construct
MFVFLVLLPLVSSQCVNLTTRTQLPPAYTNSFTRGVYYPDKVFRSSVLHSTQDLFLPFFSNVTWFHAIHVSGTNGTKRFDNPVLPFNDGVYFASTEKSNIIRGWIFGTTLDSKTQSLLIVNNATNVVIKVCEFQFCNDPFLGVYHKNNKSWMESEFRVYSSANNCTFEYVSQPFLMDLEGKQGNFKNLREFVFKNIDGYFKIYSKHTPINLVRDLPQGFSALEPLVDLPIGINITRFQTLLALHRSYLTPGDSSSGWTAGAAAYYVGYLQPRTFLLKYNENGTITDAVDCALDPLSETKCTLKSFTVEKGIYQTSNFRVQPTESIVRFPNITNLCPFGEVFNATRFASVYAWNRKRISNCVADYSVLYNSASFSTFKCYGVSPTKLNDLCFTNVYADSFVIRGDEVIQIAPGQTGKIADYNYKLPDDFTGCVIAWNSNNLDSKVGGNYNYLYRLFRKSNLKPFERDISTEIYQAGSTPCNGVEGFNCYFPLQSYGFQPTNGVGYQPYRVVVLSFELLHAPATVCGPKKSTNLVKNKCVNFNFNGLTGTGVLTESNKKFLPFQQFGRDIADTTDAVRDPQTLEILDITPCSFGGVSVITPGTNTSNQVAVLYQDVNCTEVPVAIHADQLTPTWRVYSTGSNVFQTRAGCLIGAEHVNNSYECDIPIGAGICASYQTQTNSPRRARSVASQSIIAYTMSLGAENSVAYSNNSIAIPTNFTISVTTEILPVSMTKTSVDCTMYICGDSTECSNLLLQYGSFCTQLNRALTGIAVEQDKNTQEVFAQVKQIYKTPPIKDFGGFNFSQILPDPSKPSKRSFIEDLLFNKVTLADAGFIKQYGDCLGDIAARDLICAQKFNGLTVLPPLLTDEMIAQYTSALLAGTITSGWTFGAGAALQIPFAMQMAYRFNGIGVTQNVLYENQKLIANQFNSAIGKIQDSLSSTASALGKLQDVVNQNAQALNTLVKQLSSNFGAISSVLNDILSRLDPPEAEVQIDRLITGRLQSLQTYVTQQLIRAAEIRASANLAATKMSECVLGQSKRVDFCGKGYHLMSFPQSAPHGVVFLHVTYVPAQEKNFTTAPAICHDGKAHFPREGVFVSNGTHWFVTQRNFYEPQIITTDNTFVSGNCDVVIGIVNNTVYDPLQPELDSGGGSGGGQIYEGKLTAEGLRFGIVASRFNHALVDRLVEGAIDAIVRHGGREEDITLVRVPGSWEIPVAAGELARKEDIDAVIAIGVLIRGATPHFDYIASEVSKGLADLSLELRKPITFGVITADTLEQAIERAGTKHGNKGWEAALSAIEMANLFKSLR

SEQ ID NO: 7774 - protein, 1301 aa, Artificial Sequence
  SARS-CoV-2/pangolin/Guangxi/P4L/2017__EPI_ISL_410538 spike protein (1-1141)(K980P_V981P) LumSynth construct
MFVFLFVLPLVSSQCVNLTTRTGIPPGYTNSSTRGVYYPDKVFRSSILHLTQDLFLPFFSNVTWFNTINYQGGFKKFDNPVLPFNDGVYFASTEKSNIIRGWIFGTTLDARTQSLLIVNNATNVVIKVCEFQFCTDPFLGVYYHNNNKTWVENEFRVYSSANNCTFEYISQPFLMDLEGKQGNFKNLREFVFKNVDGYFKIYSKHTPIDLVRDLPRGFAALEPLVDLPIGINITRFQTLLALHRSYLTPGNLESGWTTGAAAYYVGYLQQRTFLLSYNQNGTITDAVDCSLDPLSETKCTLKSLTVEKGIYQTSNFRVQPTISIVRFPNITNLCPFGEVFNASKFASVYAWNRKRISNCVADYSVLYNSTSFSTFKCYGVSPTKLNDLCFTNVYADSFVVKGDEVRQIAPGQTGVIADYNYKLPDDFTGCVIAWNSVKQDALTGGNYGYLYRLFRKSKLKPFERDISTEIYQAGSTPCNGQVGLNCYYPLERYGFHPTTGVNYQPFRVVVLSFELLNGPATVCGPKLSTTLVKDKCVNFNFNGLTGTGVLTTSKKQFLPFQQFGRDISDTTDAVRDPQTLEILDITPCSFGGVSVITPGTNTSNQVAVLYQDVNCTEVPMAIHAEQLTPAWRVYSAGANVFQTRAGCLVGAEHVNNSYECDIPVGAGICASYHSMSSLRSVNQRSIIAYTMSLGAENSVAYSNNSIAIPTNFTISVTTEILPVSMTKTSVDCTMYICGDSIECSNLLLQYGSFCTQLNRALTGIAVEQDKNTQEVFAQVKQIYKTPPIKDFGGFNFSQILPDPSKPSKRSFIEDLLFNKVTLADAGFIKQYGDCLGDIAARDLICAQKFNGLTVLPPLLTDEMIAQYTSALLAGTITSGWTFGAGAALQIPFAMQMAYRFNGIGVTQNVLYENQKLIANQFNSAIGKIQDSLSSTASALGKLQDVVNQNAQALNTLVKQLSSNFGAISSVLNDILSRLDPPEAEVQIDRLITGRLQSLQTYVTQQLIRAAEIRASANLAATKMSECVLGQSKRVDFCGKGYHLMSFPQSAPHGVVFLHVTYVPAQEKNFTTAPAICHEGKAHFPREGVFVSNGTHWFITQRNFYEPQIITTDNTFVSGSCDVVIGIVNNTVYDPLQPELDSGGGSGGGQIYEGKLTAEGLRFGIVASRFNHALVDRLVEGAIDAIVRHGGREEDITLVRVPGSWEIPVAAGELARKEDIDAVIAIGVLIRGATPHFDYIASEVSKGLADLSLELRKPITFGVITADTLEQAIERAGTKHGNKGWEAALSAIEMANLFKSLR

SEQ ID NO: 7775 - protein, 1301 aa, Artificial Sequence
  SARS-CoV-2/pangolin/Guangxi/P5L/2017__EPI_ISL_410540 spike protein (1-1141)(K980P_V981P) LumSynth construct
MFVFLFVLPLVSSQCVNLTTRTGIPPGYTNSSTRGVYYPDKVFRSSILHLTQDLFLPFFSNVTWFNTINYQGGFKKFDNPVLPFNDGVYFASTEKSNIIRGWIFGTTLDARTQSLLIVNNATNVVIKVCEFQFCTDPFLGVYYHNNNKTWVENEFRVYSSANNCTFEYISQPFLMDLEGKQGNFKNLREFVFKNVDGYFKIYSKHTPIDLVRDLPRGFAALEPLVDLPIGINITRFQTLLALHRSYLTPGKLESGWTTGAAAYYVGYLQQRTFLLSYNQNGTITDAVDCSLDPLSETKCTLKSLTVEKGIYQTSNFRVQPTISIVRFPNITNLCPFGEVFNASKFASVYAWNRKRISNCVADYSVLYNSTSFSTFKCYGVSPTKLNDLCFTNVYADSFVVKGDEVRQIAPGQTGVIADYNYKLPDDFTGCVIAWNSVKQDALTGGNYGYLYRLFRKSKLKPFERDISTEIYQAGSTPCNGQVGLNCYYPLERYGFHPTTGVNYQPFRVVVLSFELLNGPATVCGPKLSTTLVKDKCVNFNFNGLTGTGVLTTSKKQFLPFQQFGRDISDTTDAVRDPQTLEILDITPCSFGGVSVITPGTNTSNQVAVLYQDVNCTEVPMAIHAEQLTPAWRVYSAGANVFQTRAGCLVGAEHVNNSYECDIPVGAGICASYHSMSSFRSVNQRSIIAYTMSLGAENSVAYSNNSIAIPTNFTISVTTEILPVSMTKTSVDCTMYICGDSIECSNLLLQYGSFCTQLNRALTGIAVEQDKNTQEVFAQVKQIYKTPPIKDFGGFNFSQILPDPSKPSKRSFIEDLLFNKVTLADAGFIKQYGDCLGDIAARDLICAQKFNGLTVLPPLLTDEMIAQYTSALLAGTITSGWTFGAGAALQIPFAMQMAYRFNGIGVTQNVLYENQKLIANQFNSAIGKIQDSLSSTASALGKLQDVVNQNAQALNTLVKQLSSNFGAISSVLNDILSRLDPPEAEVQIDRLITGRLQSLQTYVTQQLIRAAEIRASANLAATKMSECVLGQSKRVDFCGKGYHLMSFPQSAPHGVVFLHVTYVPAQEKNFTTAPAICHEGKAHFPREGVFVSNGTHWFITQRNFYEPQIITTDNTFVSGSCDVVIGIVNNTVYDPLQPELDSGGGSGGGQIYEGKLTAEGLRFGIVASRFNHALVDRLVEGAIDAIVRHGGREEDITLVRVPGSWEIPVAAGELARKEDIDAVIAIGVLIRGATPHFDYIASEVSKGLADLSLELRKPITFGVITADTLEQAIERAGTKHGNKGWEAALSAIEMANLFKSLR

SEQ ID NO: 7776 - protein, 1301 aa, Artificial Sequence
  SARS-CoV-2/pangolin/Guangxi/P5E/2017__EPI_ISL_410541 spike protein (1-1141)(K980P_V981P) LumSynth construct
MFVFLFVLPLVSSQCVNLTTRTGIPPGYTNSSTRGVYYPDKVFRSSILHLTQDLFLPFFSNVTWFNTITYQGGSKKFDNPVLPFNDGVYFASTEKSNIIRGWIFGTTLDARTQSLLIVNNATNVVIKVCEFQFCTDPFLGVYYHNNNKTWVENEFRVYSSANNCTFEYISQPFLMDLEGKQGNFKNLREFVFKNVDGYFKIYSKHTPIDLVRDLPRGFAALEPLVDLPIGINITRFQTLLALHRSYLTPGKLESGWTTGAAAYYVGYLQQRTFLLSYNQNGTITDAVDCSLDPLSETKCTLKSLTVEKGIYQTSNFRVQPTISIVRFPNITNLCPFGEVFNASKFASVYAWNRKRISNCVADYSVLYNSTSFSTFKCYGVSPTKLNDLCFTNVYADSFVVKGDEVRQIAPGQTGVIADYNYKLPDDFTGCVIAWNSVKQDALTGDNYGYLYRLFRKSKLKPFERDISTEIYQAGSTPCNGQVGLNCYYPLERYGFHPTTGVNYQPFRVVVLSFELLNGPATVCGPKLSTTLVKDKCVNFNFNGLTGTGVLTTSKKQFLPFQQFGRDISDTTDAVRDPQTLEILDITPCSFGGVSVITPGTNTSNQVAVLYQDVNCTEVPMAIHAEQLTPAWRVYSAGANVFQTRAGCLVGAEHVNNSYECDIPVGAGICASYHSMSSFRSVNQRSIIAYTMSLGAENSVAYSNNSIAIPTNFTISVTTEILPVSMTKTSVDCTMYICGDSIECSNLLLQYGSFCTQLNRALTGIAVEQDKNTQEVFAQVKQIYKTPPIKDFGGFNFSQILPDPSKPSKRSFIEDLLFNKVTLADAGFIKQYGDCLGDIAARDLICAQKFNGLTVLPPLLTDEMIAQYTSALLAGTITSGWTFGAGAALQIPFAMQMAYRFNGIGVTQNVLYENQKLIANQFNSAIGKIQDSLSSTASALGKLQDVVNQNAQALNTLVKQLSSNFGAISSVLNDILSRLDPPEAEVQIDRLITGRLQSLQTYVTQQLIRAAEIRASANLAATKMSECVLGQSKRVDFCGKGYHLMSFPQSAPHGVVFLHVTYVPAQEKNFTTAPAICHEGKAHFPREGVFVSNGTHWFITQRNFYEPQIITTDNTFVSGSCDVVIGIVNNTVYDPLQPELDSGGGSGGGQIYEGKLTAEGLRFGIVASRFNHALVDRLVEGAIDAIVRHGGREEDITLVRVPGSWEIPVAAGELARKEDIDAVIAIGVLIRGATPHFDYIASEVSKGLADLSLELRKPITFGVITADTLEQAIERAGTKHGNKGWEAALSAIEMANLFKSLR

SEQ ID NO: 7777 - protein, 1299 aa, Artificial Sequence
  SARS-CoV-2/pangolin/Guangxi/P1E/2017__EPI_ISL_410539 spike protein (1-1139)(K978P_V979P) LumSynth construct
MFVFLFVLPLVSSQCVNLTTRTGIQPGYTNSSTRGVYYPDKVFRSSILHLTQDLFLPFFSNVTWFNTINYQGGFKKFDNPVLPFNDGVYFASTEKSNIIRGWIFGTTLDARTQSLLIVNNATNVVIKVCEFQFCTDPFLGVYYHNNNKTWVENEFRVYSSANNCTFEYISQPFLMDLEGKQGNFKNLREFVFKNVDGYFKIYSKHTPIDLVRDLPRGFAALEPLVDLPIGINITRFQTLLALHRSYLTPGKLESGWTTGAAAYYVGYLQQRTFLLSYNQNGTITDAVDCSLDPLSETKCTLKSLTVEKGIYQTSNFRVQPTISIVRFPNITNLCPFGEVFNASKFASVYAWNRKRISNCVADYSVLYNSTSFSTFKCYGVSPTKLNDLCFTNVYADSFVVKGDEVRQIAPGQTGVIADYNYKLPDDFTGCVIAWNSVKQDALTGGNYLYRLFRKSKLKPFERDISTEIYQAGSTPCNGQVGLNCYYPLERYGFHPTTGVNYQPFRVVVLSFELLNGPATVCGPKLSTTLVKDKCVNFNFNGLTGTGVLTTSKKQFLPFQQFGRDISDTTDAVRDPQTLEILDITPCSFGGVSVITPGTNTSNQVAVLYQDVNCTEVPMAIHAEQLTPAWRVYSAGANVFQTRAGCLVGAEHVNNSYECDIPVGAGICASYHSMSSLRSVNQRSIIAYTMSLGAENSVAYSNNSIAIPTNFTISVTTEILPVSMTKTSVDCTMYICGDSIECSNLLLQYGSFCTQLNRALTGIAVEQDKNTQEVFAQVKQIYKTPPIKDFGGFNFSQILPDPSKPSKRSFIEDLLFNKVTLADAGFIKQYGDCLGDIAARDLICAQKFNGLTVLPPLLTDEMIAQYTSALLAGTITSGWTFGAGAALQIPFAMQMAYRFNGIGVTQNVLYENQKLIANQFNSAIGKIQDSLSSTASALGKLQDVVNQNAQALNTLVKQLSSNFGAISSVLNDILSRLDPPEAEVQIDRLITGRLQSLQTYVTQQLIRAAEIRASANLAATKMSECVLGQSKRVDFCGKGYHLMSFPQSAPHGVVFLHVTYVPAQEKNFTTAPAICHEGKAHFPREGVFVSNGTHWFITQRNFYEPQIITTDNTFVSGSCDVVIGIVNNTVYDPLQPELDSGGGSGGGQIYEGKLTAEGLRFGIVASRFNHALVDRLVEGAIDAIVRHGGREEDITLVRVPGSWEIPVAAGELARKEDIDAVIAIGVLIRGATPHFDYIASEVSKGLADLSLELRKPITFGVITADTLEQAIERAGTKHGNKGWEAALSAIEMANLFKSLR

SEQ ID NO: 7778 - protein, 1307 aa, Artificial Sequence
  SARS-CoV-2/Wuhan/WIV05/2019__EPI_ISL_402128 spike protein (1-1147)(K986P_V987P_T887W_A1020W) LumSynth construct
MFVFLVLLPLVSSQCVNLTTRTQLPPAYTNSFTRGVYYPDKVFRSSVLHSTQDLFLPFFSNVTWFHAIHVSGTNGTKRFDNPVLPFNDGVYFASTEKSNIIRGWIFGTTLDSKTQSLLIVNNATNVVIKVCEFQFCNDPFLGVYYHKNNKSWMESEFRVYSSANNCTFEYVSQPFLMDLEGKQGNFKNLREFVFKNIDGYFKIYSKHTPINLVRDLPQGFSALEPLVDLPIGINITRFQTLLALHRSYLTPGDSSSGWTAGAAAYYVGYLQPRTFLLKYNENGTITDAVDCALDPLSETKCTLKSFTVEKGIYQTSNFRVQPTESIVRFPNITNLCPFGEVFNATRFASVYAWNRKRISNCVADYSVLYNSASFSTFKCYGVSPTKLNDLCFTNVYADSFVIRGDEVRQIAPGQTGKIADYNYKLPDDFTGCVIAWNSNNLDSKVGGNYNYLYRLFRKSNLKPFERDISTEIYQAGSTPCNGVEGFNCYFPLQSYGFQPTNGVGYQPYRVVVLSFELLHAPATVCGPKKSTNLVKNKCVNFNFNGLTGTGVLTESNKKFLPFQQFGRDIADTTDAVRDPQTLEILDITPCSFGGVSVITPGTNTSNQVAVLYQDVNCTEVPVAIHADQLTPTWRVYSTGSNVFQTRAGCLIGAEHVNNSYECDIPIGAGICASYQTQTNSPRRARSVASQSIIAYTMSLGAENSVAYSNNSIAIPTNFTISVTTEILPVSMTKTSVDCTMYICGDSTECSNLLLQYGSFCTQLNRALTGIAVEQDKNTQEVFAQVKQIYKTPPIKDFGGFNFSQILPDPSKPSKRSFIEDLLFNKVTLADAGFIKQYGDCLGDIAARDLICAQKFNGLTVLPPLLTDEMIAQYTSALLAGTITSGWWFGAGAALQIPFAMQMAYRFNGIGVTQNVLYENQKLIANQFNSAIGKIQDSLSSTASALGKLQDVVNQNAQALNTLVKQLSSNFGAISSVLNDILSRLDPPEAEVQIDRLITGRLQSLQTYVTQQLIRAAEIRWSANLAATKMSECVLGQSKRVDFCGKGYHLMSFPQSAPHGVVFLHVTYVPAQEKNFTTAPAICHDGKAHFPREGVFVSNGTHWFVTQRNFYEPQIITTDNTFVSGNCDVVIGIVNNTVYDPLQPELDSGGGSGGGQIYEGKLTAEGLRFGIVASRFNHALVDRLVEGAIDAIVRHGGREEDITLVRVPGSWEIPVAAGELARKEDIDAVIAIGVLIRGATPHFDYIASEVSKGLADLSLELRKPITFGVITADTLEQAIERAGTKHGNKGWEAALSAIEMANLFKSLR

SEQ ID NO: 7779 - protein, 1303 aa, Artificial Sequence
  SARS-CoV-2/bat/Yunnan/RaTG13/2013__EPI_ISL_402131 spike protein (1-1143)(K982P_V983P_T883W_A1016W) LumSynth construct
MFVFLVLLPLVSSQCVNLTTRTQLPPAYTNSSTRGVYYPDKVFRSSVLHLTQDLFLPFFSNVTWFHAIHVSGTNGIKRFDNPVLPFNDGVYFASTEKSNIIRGWIFGTTLDSKTQSLLIVNNATNVVIKVCEFQFCNDPFLGVYYHKNNKSWMESEFRVYSSANNCTFEYVSQPFLMDLEGKQGNFKNLREFVFKNIDGYFKIYSKHTPINLVRDLPPGFSALEPLVDLPIGINITRFQTLLALHRSYLTPGDSSSGWTAGAAAYYVGYLQPRTFLLKYNENGTITDAVDCALDPLSETKCTLKSFTVEKGIYQTSNFRVQPTDSIVRFPNITNLCPFGEVFNATTFASVYAWNRKRISNCVADYSVLYNSTSFSTFKCYGVSPTKLNDLCFTNVYADSFVITGDEVRQIAPGQTGKIADYNYKLPDDFTGCVIAWNSKHIDAKEGGNFNYLYRLFRKANLKPFERDISTEIYQAGSKPCNGQTGLNCYYPLYRYGFYPTDGVGHQPYRVVVLSFELLNAPATVCGPKKSTNLVKNKCVNFNFNGLTGTGVLTESNKKFLPFQQFGRDIADTTDAVRDPQTLEILDITPCSFGGVSVITPGTNASNQVAVLYQDVNCTEVPVAIHADQLTPTWRVYSTGSNVFQTRAGCLIGAEHVNNSYECDIPIGAGICASYQTQTNSRSVASQSIIAYTMSLGAENSVAYSNNSIAIPTNFTISVTTEILPVSMTKTSVDCTMYICGDSTECSNLLLQYGSFCTQLNRALTGIAVEQDKNTQEVFAQVKQIYKTPPIKDFGGFNFSQILPDPSKPSKRSFIEDLLFNKVTLADAGFIKQYGDCLGDIAARDLICAQKFNGLTVLPPLLTDEMIAQYTSALLAGTITSGWWFGAGAALQIPFAMQMAYRFNGIGVTQNVLYENQKLIANQFNSAIGKIQDSLSSTASALGKLQDVVNQNAQALNTLVKQLSSNFGAISSVLNDILSRLDPPEAEVQIDRLITGRLQSLQTYVTQQLIRAAEIRWSANLAATKMSECVLGQSKRVDFCGKGYHLMSFPQSAPHGVVFLHVTYVPAQEKNFTTAPAICHDGKAHFPREGVFVSNGTHWFVTQRNFYEPQIITTDNTFVSGSCDVVIGIVNNTVYDPLQPELDSGGGSGGGQIYEGKLTAEGLRFGIVASRFNHALVDRLVEGAIDAIVRHGGREEDITLVRVPGSWEIPVAAGELARKEDIDAVIAIGVLIRGATPHFDYIASEVSKGLADLSLELRKPITFGVITADTLEQAIERAGTKHGNKGWEAALSAIEMANLFKSLR

SEQ ID NO: 7780 - protein, 1307 aa, Artificial Sequence
  SARS-CoV-2/Wuhan/HBCDC-HB-01/2019__EPI_ISL_402132 spike protein (1-1147)(K986P_V987P_T887W_A1020W) LumSynth construct
MFVFLVLLPLVSSQCVNLTTRTQLPPAYTNSITRGVYYPDKVFRSSVLHSTQDLFLPFFSNVTWFHAIHVSGTNGTKRFDNPVLPFNDGVYFASTEKSNIIRGWIFGTTLDSKTQSLLIVNNATNVVIKVCEFQFCNDPFLGVYYHKNNKSWMESEFRVYSSANNCTFEYVSQPFLMDLEGKQGNFKNLREFVFKNIDGYFKIYSKHTPINLVRDLPQGFSALEPLVDLPIGINITRFQTLLALHRSYLTPGDSSSGWTAGAAAYYVGYLQPRTFLLKYNENGTITDAVDCALDPLSETKCTLKSFTVEKGIYQTSNFRVQPTESIVRFPNITNLCPFGEVFNATRFASVYAWNRKRISNCVADYSVLYNSASFSTFKCYGVSPTKLNDLCFTNVYADSFVIRGDEVRQIAPGQTGKIADYNYKLPDDFTGCVIAWNSNNLDSKVGGNYNYLYRLFRKSNLKPFERDISTEIYQAGSTPCNGVEGFNCYFPLQSYGFQPTNGVGYQPYRVVVLSFELLHAPATVCGPKKSTNLVKNKCVNFNFNGLTGTGVLTESNKKFLPFQQFGRDIADTTDAVRDPQTLEILDITPCSFGGVSVITPGTNTSNQVAVLYQDVNCTEVPVAIHADQLTPTWRVYSTGSNVFQTRAGCLIGAEHVNNSYECDIPIGAGICASYQTQTNSPRRARSVASQSIIAYTMSLGAENSVAYSNNSIAIPTNFTISVTTEILPVSMTKTSVDCTMYICGDSTECSNLLLQYGSFCTQLNRALTGIAVEQDKNTQEVFAQVKQIYKTPPIKDFGGFNFSQILPDPSKPSKRSFIEDLLFNKVTLADAGFIKQYGDCLGDIAARDLICAQKFNGLTVLPPLLTDEMIAQYTSALLAGTITSGWWFGAGAALQIPFAMQMAYRFNGIGVTQNVLYENQKLIANQFNSAIGKIQDSLSSTASALGKLQDVVNQNAQALNTLVKQLSSNFGAISSVLNDILSRLDPPEAEVQIDRLITGRLQSLQTYVTQQLIRAAEIRWSANLAATKMSECVLGQSKRVDFCGKGYHLMSFPQSAPHGVVFLHVTYVPAQEKNFTTAPAICHDGKAHFPREGVFVSNGTHWFVTQRNFYEPQIITTDNTFVSGNCDVVIGIVNNTVYDPLQPELDSGGGSGGGQIYEGKLTAEGLRFGIVASRFNHALVDRLVEGAIDAIVRHGGREEDITLVRVPGSWEIPVAAGELARKEDIDAVIAIGVLIRGATPHFDYIASEVSKGLADLSLELRKPITFGVITADTLEQAIERAGTKHGNKGWEAALSAIEMANLFKSLR

SEQ ID NO: 7781 - protein, 1307 aa, Artificial Sequence
  SARS-CoV-2/Guangdong/20SF028/2020__EPI_ISL_403936 spike protein (1-1147)(K986P_V987P_T887W_A1020W) LumSynth construct
MFVFLVLLPLVSSQCVNLTTRTQLPPAYTNSFTRGVYYPDKVFRSSVLYSTQDLFLPFFSNVTWFHAIHVSGTNGTKRFDNPVLPFNDGVYFASTEKSNIIRGWIFGTTLDSKTQSLLIVNNATNVVIKVCEFQFCNDPFLGVYYHKNNKSWMESEFRVYSSANNCTFEYVSQPFLMDLEGKQGNFKNLREFVFKNIDGYFKIYSKHTPINLVRDLPQGFSALEPLVDLPIGINITRFQTLLALHRSYLTPGDSSSGWTAGAAAYYVGYLQPRTFLLKYNENGTITDAVDCALDPLSETKCTLKSFTVEKGIYQTSNFRVQPTESIVRFPNITNLCPFGEVFNATRFASVYAWNRKRISNCVADYSVLYNSASFSTFKCYGVSPTKLNDLCFTNVYADSFVIRGDEVRQIAPGQTGKIADYNYKLPDDFTGCVIAWNSNNLDSKVGGNYNYLYRLFRKSNLKPFERDISTEIYQAGSTPCNGVEGFNCYFPLQSYGFQPTNGVGYQPYRVVVLSFELLHAPATVCGPKKSTNLVKNKCVNFNFNGLTGTGVLTESNKKFLPFQQFGRDIADTTDAVRDPQTLEILDITPCSFGGVSVITPGTNTSNQVAVLYQDVNCTEVPVAIHADQLTPTWRVYSTGSNVFQTRAGCLIGAEHVNNSYECDIPIGAGICASYQTQTNSPRRARSVASQSIIAYTMSLGAENSVAYSNNSIAIPTNFTISVTTEILPVSMTKTSVDCTMYICGDSTECSNLLLQYGSFCTQLNRALTGIAVEQDKNTQEVFAQVKQIYKTPPIKDFGGFNFSQILPDPSKPSKRSFIEDLLFNKVTLADAGFIKQYGDCLGDIAARDLICAQKFNGLTVLPPLLTDEMIAQYTSALLAGTITSGWWFGAGAALQIPFAMQMAYRFNGIGVTQNVLYENQKLIANQFNSAIGKIQDSLSSTASALGKLQDVVNQNAQALNTLVKQLSSNFGAISSVLNDILSRLDPPEAEVQIDRLITGRLQSLQTYVTQQLIRAAEIRWSANLAATKMSECVLGQSKRVDFCGKGYHLMSFPQSAPHGVVFLHVTYVPAQEKNFTTAPAICHDGKAHFPREGVFVSNGTHWFVTQRNFYEPQIITTDNTFVSGNCDVVIGIVNNTVYDPLQPELDSGGGSGGGQIYEGKLTAEGLRFGIVASRFNHALVDRLVEGAIDAIVRHGGREEDITLVRVPGSWEIPVAAGELARKEDIDAVIAIGVLIRGATPHFDYIASEVSKGLADLSLELRKPITFGVITADTLEQAIERAGTKHGNKGWEAALSAIEMANLFKSLR

SEQ ID NO: 7782 - protein, 1307 aa, Artificial Sequence
  SARS-CoV-2/Shenzhen/SZTH-001/2020__EPI_ISL_406592 spike protein (1-1147)(K986P_V987P_T887W_A1020W) LumSynth construct
MFVFLVLLPLVSSQCVNLTTRTQLPPAYTNSFTRGVYYPDKVFRSSVLHSTQDLFLPFFSNVTWFHAIHVSGTNGTKRFDNPVLPFNDGVYFASTEKSNIIRGWIFGTTLDSKTQSLLIVNNATNVVIKVCEFQFCNDPFLGVYYHKNNKSWMESEFRVYSSANNCTFEYVSQPFLMDLEGKQGNFKNLREFVFKNIDGYFKIYSKHTPINLVRDLPQGFSALEPLVDLPIGINITRFQTLLALHRSYLTPGDSSSGWTAGAAAYYVGYLQPRTFLLKYNENGTITDAVDCALDPLSETKCTLKSFTVEKGIYQTSNFRVQPTESIVRFPNITNLCPFGEVFNATRFASVYAWNRKRISNCVADYSVLYNSASFSTFKCYGVSPTKLNDLCFTNVYADSFVIRGDEVRQIAPGQTGKIADYNYKLPDDFTGCVIAWNSNNLDSKVGGNYNYLYRLFRKSNLKPFERDISTEIYQAGSTPCNGVEGFNCYFPLQSYGFQPTNGVGYQPYRVVVLSFELLHAPATVCGPKKSTNLVKNKCVNFNFNGLTGTGVLTESNKKFLPFQQFGRDIADTTDAVRDPQTLEILDITPCSFGGVSVITPGTNTSNQVAVLYQDVNCTEVPVAIHADQLTPTWRVYSTGSNVFQTRAGCLIGAEHVNNSYECDIPIGAGICASYQTQTNSPRRARSVASQSIIAYTMSLGAENSVAYSNNSIAIPTNFTISVTTEILPVSMTKTSVDCTMYICGDSTECSNLLLQYGSFCTQLNRALTGIAVEQDKNTQEVFAQVKQIYKTPPIKDFGGFNFSQILPDPSKPSKRSFIEDLLFNKVTLADAGFIKQYGDCLGDIAARDLICAQKFNGLTVLPPLLTDEMIAQYTSALLAGTITSGWWFGAGAALQIPFAMQMAYRFNGIGVTQNVLYENQKLIANQFNSAIGKIQDSLSSTASALGKLQDVVNQNAQALNTLVKQLSSNFGAISSVLNDILSRLDPPEAEVQIDRLITGRLQSLQTYVTQQLIRAAEIRWSANLAATKMSECVLGQSKRVDFCGKGYHLMSFPQSAPHGVVFLHVTYVPAQEKNFTTAPAICHDGKAHFPREGVFVSNGTHWFVTQRNFYEPQIITTDNTFVSGNCDVLIGIVNNTVYDPLQPELDSGGGSGGGQIYEGKLTAEGLRFGIVASRFNHALVDRLVEGAIDAIVRHGGREEDITLVRVPGSWEIPVAAGELARKEDIDAVIAIGVLIRGATPHFDYIASEVSKGLADLSLELRKPITFGVITADTLEQAIERAGTKHGNKGWEAALSAIEMANLFKSLR

SEQ ID NO: 7783 - protein, 1307 aa, Artificial Sequence
  SARS-CoV-2/Shenzhen/SZTH-004/2020__EPI_ISL_406595 spike protein (1-1147)(K986P_V987P_T887W_A1020W) LumSynth construct
MFVFLVLLPLVSSQCVNLTTRTQLPPAYTNSFTRGVYYPDKVFRSSVLHSTQDLFLPFFSNVTWFHAIHVSGTNGTKRFDNPVLPFNDGVYFASTEKSNIIRGWIFGTTLDSKTQSLLIVNNATNVVIKVCEFQFCNDPFLGVYYHKNNKSWMESEFRVYSSANNCTFEYVSQPFLMDLEGKQGNFKNLREFVFKNIDGYFKIYSKHTPINLVRDLPQGFSALEPLVDLPIGINITRFQTLLALHRSYLTPGDSSSGWTAGAAAYYVGYLQPRTFLLKYNENGTITDAVDCALDPLSETKCTLKSFTVEKGIYQTSNFRVQPTESIVRFPNITNLCPFGEVFNATRFASVYAWDRKRISNCVAYYSVLYNSASFSTFKCYGVSPTKLNDLCFTNVYADSFVIRGDEVRQIAPGQTGKIADYNYKLPDDFTGCVIAWNSNNLDSKVGGNYNYLYRLFRKSNLKPFERDISTEIYQAGSTPCNGVEGFNCYFPLQSYGFQPTNGVGYQPYRVVVLSFELLHAPATVCGPKKSTNLVKNKCVNFNFNGLTGTGVLTESNKKFLPFQQFGRDIADTTDAVRDPQTLEILDITPCSFGGVSVITPGTNTSNQVAVLYQDVNCTEVPVAIHADQLTPTWRVYSTGSNVFQTRAGCLIGAEHVNNSYECDIPIGAGICASYQTQTNSPRRARSVASQSIIAYTMSLGAENSVAYSNNSIAIPTNFTISVTTEILPVSMTKTSVDCTMYICGDSTECSNLLLQYGSFCTQLNRALTGIAVEQDKNTQEVFAQVKQIYKTPPIKDFGGFNFSQILPDPSKPSKRSFIEDLLFNKVTLADAGFIKQYGDCLGDIAARDLICAQKFNGLTVLPPLLTDEMIAQYTSALLAGTITSGWWFGAGAALQIPFAMQMAYRFNGIGVTQNVLYENQKLIANQFNSAIGKIQDSLSSTASALGKLQDVVNQNAQALNTLVKQLSSNFGAISSVLNDILSRLDPPEAEVQIDRLITGRLQSLQTYVTQQLIRAAEIRWSANLAATKMSECVLGQSKRVDFCGKGYHLMSFPQSAPHGVVFLHVTYVPAQEKNFTTAPAICHDGKAHFPREGVFVSNGTHWFVTQRNFYEPQIITTDNTFVSGNCDVVIGIVNNTVYDPLQPELDSGGGSGGGQIYEGKLTAEGLRFGIVASRFNHALVDRLVEGAIDAIVRHGGREEDITLVRVPGSWEIPVAAGELARKEDIDAVIAIGVLIRGATPHFDYIASEVSKGLADLSLELRKPITFGVITADTLEQAIERAGTKHGNKGWEAALSAIEMANLFKSLR

SEQ ID NO: 7784 - protein, 1307 aa, Artificial Sequence
  SARS-CoV-2/France/IDF0372/2020__EPI_ISL_406596 spike protein (1-1147)(K986P_V987P_T887W_A1020W) LumSynth construct
MFVFLVLLPLVSSQCVNLTTRTQLPPAYTNSFTRGVYYPDKVFRSSVLHSTQDLFLPFFSNVTWFHAIHVSGTNGTKRFDNPVLPFNDGVYFASTEKSNIIRGWIFGTTLDSKTQSLLIVNNATNVVIKVCEFQFCNDPFLGVYYHKNNKSWMESEFRVYSSANNCTFEYVSQPFLMDLEGKQGNFKNLREFVFKNIDGYFKIYSKHTPINLVRDLPQGFSALEPLVDLPIGINITRFQTLLALHRSYLTPGDSSSGWTAGAAAYYVGYLQPRTFLLKYNENGTITDAVDCALDPLSETKCTLKSFTVEKGIYQTSNFRVQPTESIVRFPNITNLCPFGEVFNATRFASVYAWNRKRISNCVADYSFLYNSASFSTFKCYGVSPTKLNDLCFTNVYADSFVIRGDEVRQIAPGQTGKIADYNYKLPDDFTGCVIAWNSNNLDSKVGGNYNYLYRLFRKSNLKPFERDISTEIYQAGSTPCNGVEGFNCYFPLQSYGFQPTNGVGYQPYRVVVLSFELLHAPATVCGPKKSTNLVKNKCVNFNFNGLTGTGVLTESNKKFLPFQQFGRDIADTTDAVRDPQTLEILDITPCSFGGVSVITPGTNTSNQVAVLYQDVNCTEVPVAIHADQLTPTWRVYSTGSNVFQTRAGCLIGAEHVNNSYECDIPIGAGICASYQTQTNSPRRARSVASQSIIAYTMSLGAENSVAYSNNSIAIPTNFTISVTTEILPVSMTKTSVDCTMYICGDSTECSNLLLQYGSFCTQLNRALTGIAVEQDKNTQEVFAQVKQIYKTPPIKDFGGFNFSQILPDPSKPSKRSFIEDLLFNKVTLADAGFIKQYGDCLGDIAARDLICAQKFNGLTVLPPLLTDEMIAQYTSALLAGTITSGWWFGAGAALQIPFAMQMAYRFNGIGVTQNVLYENQKLIANQFNSAIGKIQDSLSSTASALGKLQDVVNQNAQALNTLVKQLSSNFGAISSVLNDILSRLDPPEAEVQIDRLITGRLQSLQTYVTQQLIRAAEIRWSANLAATKMSECVLGQSKRVDFCGKGYHLMSFPQSAPHGVVFLHVTYVPAQEKNFTTAPAICHDGKAHFPREGVFVSNGTHWFVTQRNFYEPQIITTDNTFVSGNCDVVIGIVNNTVYDPLQPELDSGGGSGGGQIYEGKLTAEGLRFGIVASRFNHALVDRLVEGAIDAIVRHGGREEDITLVRVPGSWEIPVAAGELARKEDIDAVIAIGVLIRGATPHFDYIASEVSKGLADLSLELRKPITFGVITADTLEQAIERAGTKHGNKGWEAALSAIEMANLFKSLR

SEQ ID NO: 7785 - protein, 1307 aa, Artificial Sequence
  SARS-CoV-2/Australia/VIC01/2020__EPI_ISL_406844 spike protein (1-1147)(K986P_V987P_T887W_A1020W) LumSynth construct
MFVFLVLLPLVSSQCVNLTTRTQLPPAYTNSFTRGVYYPDKVFRSSVLHSTQDLFLPFFSNVTWFHAIHVSGTNGTKRFDNPVLPFNDGVYFASTEKSNIIRGWIFGTTLDSKTQSLLIVNNATNVVIKVCEFQFCNDPFLGVYYHKNNKSWMESEFRVYSSANNCTFEYVSQPFLMDLEGKQGNFKNLREFVFKNIDGYFKIYSKHTPINLVRDLPQGFSALEPLVDLPIGINITRFQTLLALHRRYLTPGDSSSGWTAGAAAYYVGYLQPRTFLLKYNENGTITDAVDCALDPLSETKCTLKSFTVEKGIYQTSNFRVQPTESIVRFPNITNLCPFGEVFNATRFASVYAWNRKRISNCVADYSVLYNSASFSTFKCYGVSPTKLNDLCFTNVYADSFVIRGDEVRQIAPGQTGKIADYNYKLPDDFTGCVIAWNSNNLDSKVGGNYNYLYRLFRKSNLKPFERDISTEIYQAGSTPCNGVEGFNCYFPLQSYGFQPTNGVGYQPYRVVVLSFELLHAPATVCGPKKSTNLVKNKCVNFNFNGLTGTGVLTESNKKFLPFQQFGRDIADTTDAVRDPQTLEILDITPCSFGGVSVITPGTNTSNQVAVLYQDVNCTEVPVAIHADQLTPTWRVYSTGSNVFQTRAGCLIGAEHVNNSYECDIPIGAGICASYQTQTNSPRRARSVASQSIIAYTMSLGAENSVAYSNNSIAIPTNFTISVTTEILPVSMTKTSVDCTMYICGDSTECSNLLLQYGSFCTQLNRALTGIAVEQDKNTQEVFAQVKQIYKTPPIKDFGGFNFSQILPDPSKPSKRSFIEDLLFNKVTLADAGFIKQYGDCLGDIAARDLICAQKFNGLTVLPPLLTDEMIAQYTSALLAGTITSGWWFGAGAALQIPFAMQMAYRFNGIGVTQNVLYENQKLIANQFNSAIGKIQDSLSSTASALGKLQDVVNQNAQALNTLVKQLSSNFGAISSVLNDILSRLDPPEAEVQIDRLITGRLQSLQTYVTQQLIRAAEIRWSANLAATKMSECVLGQSKRVDFCGKGYHLMSFPQSAPHGVVFLHVTYVPAQEKNFTTAPAICHDGKAHFPREGVFVSNGTHWFVTQRNFYEPQIITTDNTFVSGNCDVVIGIVNNTVYDPLQPELDSGGGSGGGQIYEGKLTAEGLRFGIVASRFNHALVDRLVEGAIDAIVRHGGREEDITLVRVPGSWEIPVAAGELARKEDIDAVIAIGVLIRGATPHFDYIASEVSKGLADLSLELRKPITFGVITADTLEQAIERAGTKHGNKGWEAALSAIEMANLFKSLR

SEQ ID NO: 7786 - protein, 1307 aa, Artificial Sequence
  SARS-CoV-2/Germany/BavPat1/2020__EPI_ISL_406862 spike protein (1-1147)(K986P_V987P_T887W_A1020W) LumSynth construct
MFVFLVLLPLVSSQCVNLTTRTQLPPAYTNSFTRGVYYPDKVFRSSVLHSTQDLFLPFFSNVTWFHAIHVSGTNGTKRFDNPVLPFNDGVYFASTEKSNIIRGWIFGTTLDSKTQSLLIVNNATNVVIKVCEFQFCNDPFLGVYYHKNNKSWMESEFRVYSSANNCTFEYVSQPFLMDLEGKQGNFKNLREFVFKNIDGYFKIYSKHTPINLVRDLPQGFSALEPLVDLPIGINITRFQTLLALHRSYLTPGDSSSGWTAGAAAYYVGYLQPRTFLLKYNENGTITDAVDCALDPLSETKCTLKSFTVEKGIYQTSNFRVQPTESIVRFPNITNLCPFGEVFNATRFASVYAWNRKRISNCVADYSVLYNSASFSTFKCYGVSPTKLNDLCFTNVYADSFVIRGDEVRQIAPGQTGKIADYNYKLPDDFTGCVIAWNSNNLDSKVGGNYNYLYRLFRKSNLKPFERDISTEIYQAGSTPCNGVEGFNCYFPLQSYGFQPTNGVGYQPYRVVVLSFELLHAPATVCGPKKSTNLVKNKCVNFNFNGLTGTGVLTESNKKFLPFQQFGRDIADTTDAVRDPQTLEILDITPCSFGGVSVITPGTNTSNQVAVLYQGVNCTEVPVAIHADQLTPTWRVYSTGSNVFQTRAGCLIGAEHVNNSYECDIPIGAGICASYQTQTNSPRRARSVASQSIIAYTMSLGAENSVAYSNNSIAIPTNFTISVTTEILPVSMTKTSVDCTMYICGDSTECSNLLLQYGSFCTQLNRALTGIAVEQDKNTQEVFAQVKQIYKTPPIKDFGGFNFSQILPDPSKPSKRSFIEDLLFNKVTLADAGFIKQYGDCLGDIAARDLICAQKFNGLTVLPPLLTDEMIAQYTSALLAGTITSGWWFGAGAALQIPFAMQMAYRFNGIGVTQNVLYENQKLIANQFNSAIGKIQDSLSSTASALGKLQDVVNQNAQALNTLVKQLSSNFGAISSVLNDILSRLDPPEAEVQIDRLITGRLQSLQTYVTQQLIRAAEIRWSANLAATKMSECVLGQSKRVDFCGKGYHLMSFPQSAPHGVVFLHVTYVPAQEKNFTTAPAICHDGKAHFPREGVFVSNGTHWFVTQRNFYEPQIITTDNTFVSGNCDVVIGIVNNTVYDPLQPELDSGGGSGGGQIYEGKLTAEGLRFGIVASRFNHALVDRLVEGAIDAIVRHGGREEDITLVRVPGSWEIPVAAGELARKEDIDAVIAIGVLIRGATPHFDYIASEVSKGLADLSLELRKPITFGVITADTLEQAIERAGTKHGNKGWEAALSAIEMANLFKSLR

SEQ ID NO: 7787 - protein, 1307 aa, Artificial Sequence
  SARS-CoV-2/Wuhan/HBCDC-HB-02/2020__EPI_ISL_412978 spike protein (1-1147)(K986P_V987P_T887W_A1020W) LumSynth construct
MFVFLVLLPLVSSQCVNLTTRTQLPPAYTNSFTRGVYYPDKVFRSSVLHSTQDLFLPFFSNVTWFHAIHVSGTNGTKRFDNPVLPFNDGVYFASTEKSNIIRGWIFGTTLDSKTQSLLIVNNATNVVIKVCEFQFCNDPFLGVYYHKNNKSWMESEFRVYSSANNCTFEYVSQPFLMDLEGKQGNFKNLREFVFKNIDGYFKIYSKHTPINLVRDLPQGFSALEPLVDLPIGINITRFQTLLALHRSYLTPGDSSSGWTAGAAAYYVGYLQPRTFLLKYNENGTITDAVDCALDPLSETKCTLKSFTVEKGIYQTSNFRVQPTESIVRFPNITNLCPFGEVFNATRFASVYAWNRKRISNCVADYSVLYNSASFSTFKCYGVSPTKLNDLCFTNVYADSFVIRGDEVRQIAPGQTGKIADYNYKLPDDFTGCVIAWNSNNLDSKVGGNYNYLYRLFRKSNLKPFERDISTEIYQAGSTPCNGVEGFNCYFPLQSYGFQPTNGVGYQPYRVVVLSFELLHAPATVCGPKKSTNLVKNKCVNFNFNGLTGTGVLTESNKKFLPFQQFGRDIADTTDAVRDPQTLEILDITPCSFGGVSVITPGTNTSNQVAVLYQDVNCTEVPVAIHADQLTPTWRVYSTGSNVFQTRAGCLIGAEHVNNSYECDIPIGAGICASYQTQTNSPRRARSVASQSIIAYTMSLGAENSVAYSNNSIAIPTNFTISVTTEILPVSMTKTSVDCTMYICGDSTECSNFLLQYGSFCTQLNRALTGIAVEQDKNTQEVFAQVKQIYKTPPIKDFGGFNFSQILPDPSKPSKRSFIEDLLFNKVTLADAGFIKQYGDCLGDIAARDLICAQKFNGLTVLPPLLTDEMIAQYTSALLAGTITSGWWFGAGAALQIPFAMQMAYRFNGIGVTQNVLYENQKLIANQFNSAIGKIQDSLSSTASALGKLQDVVNQNAQALNTLVKQLSSNFGAISSVLNDILSRLDPPEAEVQIDRLITGRLQSLQTYVTQQLIRAAEIRWSANLAATKMSECVLGQSKRVDFCGKGYHLMSFPQSAPHGVVFLHVTYVPAQEKNFTTAPAICHDGKAHFPREGVFVSNGTHWFVTQRNFYEPQIITTDNTFVSGNCDVVIGIVNNTVYDPLQPELDSGGGSGGGQIYEGKLTAEGLRFGIVASRFNHALVDRLVEGAIDAIVRHGGREEDITLVRVPGSWEIPVAAGELARKEDIDAVIAIGVLIRGATPHFDYIASEVSKGLADLSLELRKPITFGVITADTLEQAIERAGTKHGNKGWEAALSAIEMANLFKSLR

SEQ ID NO: 7788 - protein, 1307 aa, Artificial Sequence
  SARS-CoV-2/Australia/QLD02/2020__EPI_ISL_407896 spike protein (1-1147)(K986P_V987P_T887W_A1020W) LumSynth construct
MFVFLVLLPLVSSQCVNLTTRTQLPPAYTNSFTRGVYYPDKVFRSSVLHSTQDLFLPFFSNVTWFHAIHVSGTNGTKRFDNPVLPFNDGVYFASTEKSNIIRGWIFGTTLDSKTQSLLIVNNATNVVIKVCEFQFCNDPFLGVYYHKNNKSWMESEFRVYSSANNCTFEYVSQPFLMDLEGKQGNFKNLREFVFKNIDGYFKIYSKHTPINLVRDLPQGFSALEPLVDLPIGINITRFQTLLALHRSYLTPGDSSSGWTAGAAAYYVGYLQPRTFLLKYNENGTITDAVDCALDPLSETKCTLKSFTVEKGIYQTSNFRVQPTESIVRFPNITNLCPFGEVFNATRFASVYAWNRKRISNCVADYSVLYNSASFSTFKCYGVSPTKLNDLCFTNVYADSFVIRGDEVRQIAPGQTGKIADYNYKLPDDFTGCVIAWNSNNLDSKVGGNYNYLYRLFRKSNLKPFERDISTEIYQAGSTPCNGVEGFNCYFPLQSYGFQPTNGVGYQPYRVVVLSFELLHAPATVCGPKKSTNLVKNKCVNFNFNGLTGTGVLTESNKKFLPFQQFGRDIADTTDAVRDPQTLEILDITPCSFGGVSVITPGTNTSNQVAVLYQDVNCTEVPVAIHADQLTPTWRVYSTGSNVFQTRAGCLIGAEHVNNSYECDIPIGAGICASYQTQTNSPRRARSVASQSIIAYTMSLGAENSVAYSNNSIAIPTNFTISVTTEILPVSMTKTSVDCTMYICGDSTECSNLLLQYGSFCTQLNRALTGIAVEQDKNTQEVFAQVKQIYKTPPIKDFGGFNFSQILPDPSKPSKRSFIEDLLFNKVTLADAGFIKQYGDCLGDIAARDLICAQKFNGLTVLPPLLTDEMIAQYTSALLAGTITSGWWFGAGAALQIPFAMQMAYRFNGIGVTQNVLYENQKLIANQFNSAIGKIQDSLSSTASALGKLQDVVNQNAQALNTLVKQLSSNFGAISSVLNDILSRLDPPEAEVQIDRLITGRLQSLQTYVTQQLIRAAEIRWSANLAATKMSECVLGQSKRVDFCGKGYHLMSFPQSAPHGVVFLHVTYVPAQEKNFTTAPAICHDGKAHFPREGVFVSNGTHWFVTQRNFYEPQIITTDNTFVSGNCDVVIGIVNNTVYDPLQLELDSGGGSGGGQIYEGKLTAEGLRFGIVASRFNHALVDRLVEGAIDAIVRHGGREEDITLVRVPGSWEIPVAAGELARKEDIDAVIAIGVLIRGATPHFDYIASEVSKGLADLSLELRKPITFGVITADTLEQAIERAGTKHGNKGWEAALSAIEMANLFKSLR

SEQ ID NO: 7789 - protein, 1307 aa, Artificial Sequence
  SARS-CoV-2/India/1-31/2020__EPI_ISL_413523 spike protein (1-1147)(K986P_V987P_T887W_A1020W) LumSynth construct
MFVFLVLLPLVSSQCVNLTTRTQLPPAYTNSFTRGVYYPDKVFRSSVLHSTQDLFLPFFSNVTWFHAIHVSGTNGTKRFDNPVLPFNDGVYFASTEKSNIIRGWIFGTTLDSKTQSLLIVNNATNVVIKVCEFQFCNDPFLGVYYHKNNKSWMESEFRVYSSANNCTFEYVSQPFLMDLEGKQGNFKNLREFVFKNIDGYFKIYSKHTPINLVRDLPQGFSALEPLVDLPIGINITRFQTLLALHRSYLTPGDSSSGWTAGAAAYYVGYLQPRTFLLKYNENGTITDAVDCALDPLSETKCTLKSFTVEKGIYQTSNFRVQPTESIVRFPNITNLCPFGEVFNATRFASVYAWNRKRISNCVADYSVLYNSASFSTFKCYGVSPTKLNDLCFTNVYADSFVIRGDEVRQIAPGQTGKIADYNYKLPDDFTGCVIAWNSNNLDSKVGGNYNYLYRLFRKSNLKPFERDISTEIYQAGSTPCNGVEGFNCYFPLQSYGFQPTNGVGYQPYRVVVLSFELLHAPATVCGPKKSTNLVKNKCVNFNFNGLTGTGVLTESNKKFLPFQQFGRDIADTTDAVRDPQTLEILDITPCSFGGVSVITPGTNTSNQVAVLYQDVNCTEVPVAIHADQLTPTWRVYSTGSNVFQTRAGCLIGAEHVNNSYECDIPIGAGICASYQTQTNSPRRARSVASQSIIAYTMSLGAENSVAYSNNSIAIPTNFTISVTTEILPVSMTKTSVDCTMYICGDSTECSNLLLQYGSFCTQLNRALTGIAVEQDKNTQEVFAQVKQIYKTPPIKDFGGFNFSQILPDPSKPSKRSFIEDLLFNKVTLADAGFIKQYGDCLGDIAARDLICAQKFNGLTVLPPLLTDEMIAQYTSALLAGTITSGWWFGAGAALQIPFAMQMAYRFNGIGVTQNVLYENQKLIANQFNSVIGKIQDSLSSTASALGKLQDVVNQNAQALNTLVKQLSSNFGAISSVLNDILSRLDPPEAEVQIDRLITGRLQSLQTYVTQQLIRAAEIRWSANLAATKMSECVLGQSKRVDFCGKGYHLMSFPQSAPHGVVFLHVTYVPAQEKNFTTAPAICHDGKAHFPREGVFVSNGTHWFVTQRNFYEPQIITTDNTFVSGNCDVVIGIVNNTVYDPLQPELDSGGGSGGGQIYEGKLTAEGLRFGIVASRFNHALVDRLVEGAIDAIVRHGGREEDITLVRVPGSWEIPVAAGELARKEDIDAVIAIGVLIRGATPHFDYIASEVSKGLADLSLELRKPITFGVITADTLEQAIERAGTKHGNKGWEAALSAIEMANLFKSLR

SEQ ID NO: 7790 - protein, 1307 aa, Artificial Sequence
  SARS-CoV-2/Guangdong/GD2020087-P0008/2020__EPI_ISL_413863 spike protein (1-1147)(K986P_V987P_T887W_A1020W) LumSynth construct
MFVFLVLLPLVSSQCVNLTTRTQLPPAYTNSFTRGVYYPDKVFRSSVLHSTQDLFLPFFSNVTWFHAIHVSGTNGTKRFDNPVLPFNDGVYFASTEKSNIIRGWIFGTTLDSKTQSLLIVNNATNVVIKVCEFQFCNDPFLGVYYHKNNKSWMESEFRVYSSANNCTFEYVSQPFLMDLEGKQGNFKNLREFVFKNIDGYFKIYSKHTPINLVRDLPQGFSALEPLVDLPIGINITRFQTLLALHRSYLTPGDSSSGWTAGAAAYYVGYLQPRTFLLKYNENGTITDAVDCALDPLSETKCTLKSFTVEKGIYQTSNFRVQPTESIVRFPNITNLCPFGEVFNATRFASVYAWNRKRISNCVADYSVLYNSASFSTFKCYGVSPTKLNDLCFTNVYADSFVIRGDEVREIAPGQTGKIADYNYKLPDDFTGCVIAWNSNNLDSKVGGNYNYLYRLFRKSNLKPFERDISTEIYQAGSTPCNGVEGFNCYFPLQSYGFQPTNGVGYQPYRVVVLSFELLHAPATVCGPKKSTNLVKNKCVNFNFNGLTGTGVLTESNKKFLPFQQFGRDIADTTDAVRDPQTLEILDITPCSFGGVSVITPGTNTSNQVAVLYQDVNCTEVPVAIHADQLTPTWRVYSTGSNVFQTRAGCLIGAEHVNNSYECDIPIGAGICASYQTQTNSPRRARSVASQSIIAYTMSLGAENSVAYSNNSIAIPTNFTISVTTEILPVSMTKTSVDCTMYICGDSTECSNLLLQYGSFCTQLNRALTGIAVEQDKNTQEVFAQVKQIYKTPPIKDFGGFNFSQILPDPSKPSKRSFIEDLLFNKVTLADAGFIKQYGDCLGDIAARDLICAQKFNGLTVLPPLLTDEMIAQYTSALLAGTITSGWWFGAGAALQIPFAMQMAYRFNGIGVTQNVLYENQKLIANQFNSAIGKIQDSLSSTASALGKLQDVVNQNAQALNTLVKQLSSNFGAISSVLNDILSRLDPPEAEVQIDRLITGRLQSLQTYVTQQLIRAAEIRWSANLAATKMSECVLGQSKRVDFCGKGYHLMSFPQSAPHGVVFLHVTYVPAQEKNFTTAPAICHDGKAHFPREGVFVSNGTHWFVTQRNFYEPQIITTDNTFVSGNCDVVIGIVNNTVYDPLQPELDSGGGSGGGQIYEGKLTAEGLRFGIVASRFNHALVDRLVEGAIDAIVRHGGREEDITLVRVPGSWEIPVAAGELARKEDIDAVIAIGVLIRGATPHFDYIASEVSKGLADLSLELRKPITFGVITADTLEQAIERAGTKHGNKGWEAALSAIEMANLFKSLR

SEQ ID NO: 7791 - protein, 1307 aa, Artificial Sequence
  SARS-CoV-2/Sweden/01/2020__EPI_ISL_411951 spike protein (1-1147)(K986P_V987P_T887W_A1020W) LumSynth construct
MFVFLVLLPLVSSQCVNLTTRTQLPPAYTNSFTRGVYYPDKVFRSSVLHSTQDLFLPFFSNVTWFHAIHVSGTNGTKRFDNPVLPFNDGVYFASTEKSNIIRGWIFGTTLDSKTQSLLIVNNATNVVIKVCEFQFCNDPFLGVYYHKNNKSWMESEFRVYSSANNCTFEYVSQPFLMDLEGKQGNFKNLREFVFKNIDGYFKIYSKHTPINLVRDLPQGFSALEPLVDLPIGINITRFQTLLALHRSYLTPGDSSSGWTAGAAAYYVGYLQPRTFLLKYNENGTITDAVDCALDPLSETKCTLKSFTVEKGIYQTSNFRVQPTESIVRFPNITNLCPFGEVFNATRFASVYAWNRKRISNCVADYSVLYNSASFSTFKCYGVSPTKLNDLCFTNVYADSFVIRGDEVRQIAPGQTGKIADYNYKLPDDFTGCVIAWNSNNLDSKVGGNYNYLYRLFRKSNLKPFERDISTEIYQAGSTPCNGVEGFNCYFPLQSYGFQPTNGVGYQPYRVVVLSFELLHAPATVCGPKKSTNLVKNKCVNFNFNGLTGTGVLTESNKKFLPFQQFGRDIADTTDAVRDPQTLEILDITPCSFGGVSVITPGTNTSNQVAVLYQDVNCTEVPVAIHADQLTPTWRVYSTGSNVFQTRAGCLIGAEHVNNSYECDIPIGAGICASYQTQTNSPRRARSVASQSIIAYTMSLGAENSVAYSNNSIAIPTNFTISVTTEILPVSMTKTSVDCTMYICGDSTECSNLLLQYGSFCTQLNRALTGIAVEQDKNTQEVFAQVKQIYKTPPIKDCGGFNFSQILPDPSKPSKRSFIEDLLFNKVTLADAGFIKQYGDCLGDIAARDLICAQKFNGLTVLPPLLTDEMIAQYTSALLAGTITSGWWFGAGAALQIPFAMQMAYRFNGIGVTQNVLYENQKLIANQFNSAIGKIQDSLSSTASALGKLQDVVNQNAQALNTLVKQLSSNFGAISSVLNDILSRLDPPEAEVQIDRLITGRLQSLQTYVTQQLIRAAEIRWSANLAATKMSECVLGQSKRVDFCGKGYHLMSFPQSAPHGVVFLHVTYVPAQEKNFTTAPAICHDGKAHFPREGVFVSNGTHWFVTQRNFYEPQIITTDNTFVSGNCDVVIGIVNNTVYDPLQPELDSGGGSGGGQIYEGKLTAEGLRFGIVASRFNHALVDRLVEGAIDAIVRHGGREEDITLVRVPGSWEIPVAAGELARKEDIDAVIAIGVLIRGATPHFDYIASEVSKGLADLSLELRKPITFGVITADTLEQAIERAGTKHGNKGWEAALSAIEMANLFKSLR

SEQ ID NO: 7792 - protein, 1307 aa, Artificial Sequence
  SARS-CoV-2/Tianmen/HBCDC-HB-07/2020__EPI_ISL_412983 spike protein (1-1147)(K986P_V987P_T887W_A1020W) LumSynth construct
MFVFLVLLPLVSSQCVNLTTRTQLPPAYTNSFTRGVYYPDKVFRSSVLHSTQDLFLPFFSNVTWFHAIHVSGTNGTKRFDNPVLPFNDGVYFASTEKSNIIRGWIFGTTLDSKTQSLLIVNNATNVVIKVCEFQFCNDPFLGVYYHKNNKSWMESEFRVYSSANNCTFEYVSQPFLMDLEGKQGNFKNLREFVFKNIDGYFKIYSKHTPINLVRDLPQGFSALEPLVDLPIGINITRFQTLLALHRSYLTPGDSSSGWTAGAAAYYVGYLQPRTFLLKYNENGTITDAVDCALDPLSETKCTLKSFTVEKGIYQTSNFRVQPTESIVRFPNITNLCPFGEVFNATRFASVYAWNRKRISNCVADYSVLYNSASFSTFKCYGVSPTKLNDLCFTNVYADSFVIRGDEVRQIAPGQTGKIADYNYKLPDDFTGCVIAWNSNNLDSKVGGNYNYLYRLFRKSNLKPFERDISTEIYQAGSTPCNGVEGFNCYFPLQSYGFQPTNGVGYQPYRVVVLSFELLHAPATVCGPKKSTNLVKNKCVNFNFNGLTGTGVLTESNKKFLPFQQFGRDIADTTDAVRDPQTLEILDITPCSFGGVSVITPGTNTSNQVAVLYQDLNCTEVPVAIHADQLTPTWRVYSTGSNVFQTRAGCLIGAEHVNNSYECDIPIGAGICASYQTQTNSPRRARSVASQSIIAYTMSLGAENSVAYSNNSIAIPTNFTISVTTEILPVSMTKTSVDCTMYICGDSTECSNLLLQYGSFCTQLNRALTGIAVEQDKNTQEVFAQVKQIYKTPPIKDFGGFNFSQILPDPSKPSKRSFIEDLLFNKVTLADAGFIKQYGDCLGDIAARDLICAQKFNGLTVLPPLLTDEMIAQYTSALLAGTITSGWWFGAGAALQIPFAMQMAYRFNGIGVTQNVLYENQKLIANQFNSAIGKIQDSLSSTASALGKLQDVVNQNAQALNTLVKQLSSNFGAISSVLNDILSRLDPPEAEVQIDRLITGRLQSLQTYVTQQLIRAAEIRWSANLAATKMSECVLGQSKRVDFCGKGYHLMSFPQSAPHGVVFLHVTYVPAQEKNFTTAPAICHDGKAHFPREGVFVSNGTHWFVTQRNFYEPQIITTDNTFVSGNCDVVIGIVNNTVYDPLQPELDSGGGSGGGQIYEGKLTAEGLRFGIVASRFNHALVDRLVEGAIDAIVRHGGREEDITLVRVPGSWEIPVAAGELARKEDIDAVIAIGVLIRGATPHFDYIASEVSKGLADLSLELRKPITFGVITADTLEQAIERAGTKHGNKGWEAALSAIEMANLFKSLR

SEQ ID NO: 7793 - protein, 1307 aa, Artificial Sequence
  SARS-CoV-2/Hong Kong/case42_VM20002493/2020__EPI_ISL_414527 spike protein (1-1147)(K986P_V987P_T887W_A1020W) LumSynth construct
MFVFLVLLPLVSSQCVNLTTRTQLPPAYTNSFTRGVYYPDKVFRSSVLHSTQDLFLPFFSNVTWFHAIHVSGTNGTKRFDNPVLPFNDGVYFASTEKSNIIRGWIFGTTLDSKTQSLLIVNNATNVVIKVCEFQFCNDPFLGVYYHKNNKSWMESEFRVYSSANNCTFEYVSQPFLMDLEGKQGNFKNLREFVFKNIDGYFKIYSKHTPINLVRDLPQGFSALEPLVDLPIGINITRFQTLLALHRSYLTPGDSSSGWTAGAAAYYVGYLQPRTFLLKYNENGTITDAVDCALDPLSETKCTLKSFTVEKGIYQTSNFRVQPTESIVRFPNITNLCPFGEVFNATRFASVYAWNRKRISNCVADYSVLYNSASFSTFKCYGVSPTKLNDLCFTNVYADSFVIRGDEVRQIAPGQTGKIADYNYKLPDDFTGCVIAWNSNNLDSKVGGNYNYLYRLFRKSNLKPFERDISTEIYQAGSTPCNGVEGFNCYFPLQSYGFQPTNGVGYQPYRVVVLSFELLHAPATVCGPKKSTNLVKNKCVNFNFNGLTGTGVLTESNKKFLPFQQFGRDIADTTDAVRDPQTLEILDITPCSFGGVSVITPGTNTSNQVAVLYQDVNCTEVPVAIHADQLTPTWRVYSTGSNVFQTRAGCLIGAEHVNNSYECDIPIGAGICASYQTQTNSPRRARSVASQSIIAYTMSLGAENSVAYSNNSIAIPTNFAISVTTEILPVSMTKTSVDCTMYICGDSTECSNLLLQYGSFCTQLNRALTGIAVEQDKNTQEVFAQVKQIYKTPPIKDFGGFNFSQILPDPSKPSKRSFIEDLLFNKVTLADAGFIKQYGDCLGDIAARDLICAQKFNGLTVLPPLLTDEMIAQYTSALLAGTITSGWWFGAGAALQIPFAMQMAYRFNGIGVTQNVLYENQKLIANQFNSAIGKIQDSLSSTASALGKLQDVVNQNAQALNTLVKQLSSNFGAISSVLNDILSRLDPPEAEVQIDRLITGRLQSLQTYVTQQLIRAAEIRWSANLAATKMSECVLGQSKRVDFCGKGYHLMSFPQSAPHGVVFLHVTYVPAQEKNFTTAPAICHDGKAHFPREGVFVSNGTHWFVTQRNFYEPQIITTDNTFVSGNCDVVIGIVNNTVYDPLQPELDSGGGSGGGQIYEGKLTAEGLRFGIVASRFNHALVDRLVEGAIDAIVRHGGREEDITLVRVPGSWEIPVAAGELARKEDIDAVIAIGVLIRGATPHFDYIASEVSKGLADLSLELRKPITFGVITADTLEQAIERAGTKHGNKGWEAALSAIEMANLFKSLR

SEQ ID NO: 7794 - protein, 1307 aa, Artificial Sequence
  SARS-CoV-2/USA/CruiseA-23/2020__EPI_ISL_414482 spike protein (1-1147)(K986P_V987P_T887W_A1020W) LumSynth construct
MFVFLVLLPLVSSQCVNLTTRTQLPPAYTNSFTRGVYYPDKVFRSSVLHSTQDLFLPFFSNVTWFHAIHVSGTNGTKRFDNPVLPFNDGVYFASTEKSNIIRGWIFGTTLDSKTQSLLIVNNATNVVIKVCEFQFCNDPFLGVYYHKNNKSWMESEFRVYSSANNCTFEYVSQPFLMDLEVKQGNFKNLREFVFKNIDGYFKIYSKHTPINLVRDLPQGFSALEPLVDLPIGINITRFQTLLALHRSYLTPGDSSSGWTAGAAAYYVGYLQPRTFLLKYNENGTITDAVDCALDPLSETKCTLKSFTVEKGIYQTSNFRVQPTESIVRFPNITNLCPFGEVFNATRFASVYAWNRKRISNCVADYSVLYNSASFSTFKCYGVSPTKLNDLCFTNVYADSFVIRGDEVRQIAPGQTGKIADYNYKLPDDFTGCVIAWNSNNLDSKVGGNYNYLYRLFRKSNLKPFERDISTEIYQAGSTPCNGVEGFNCYFPLQSYGFQPTNGVGYQPYRVVVLSFELLHAPATVCGPKKSTNLVKNKCVNFNFNGLTGTGVLTESNKKFLPFQQFGRDIADTTDAVRDPQTLEILDITPCSFGGVSVITPGTNTSNQVAVLYQDVNCTEVPVAIHADQLTPTWRVYSTGSNVFQTRAGCLIGAEHVNNSYECDIPIGAGICASYQTQTNSPRRARSVASQSIIAYTMSLGAENSVAYSNNSIAIPTNFTISVTTEILPVSMTKTSVDCTMYICGDSTECSNLLLQYGSFCTQLNRALTGIAVEQDKNTQEVFAQVKQIYKTPPIKDFGGFNFSQILPDPSKPSKRSFIEDLLFNKVTLADAGFIKQYGDCLGDIAARDLICAQKFNGLTVLPPLLTDEMIAQYTSALLAGTITSGWWFGAGAALQIPFAMQMAYRFNGIGVTQNVLYENQKLIANQFNSAIGKIQDSLSSTASALGKLQDVVNQNAQALNTLVKQLSSNFGAISSVLNDILSRLDPPEAEVQIDRLITGRLQSLQTYVTQQLIRAAEIRWSANLAATKMSECVLGQSKRVDFCGKGYHLMSFPQSAPHGVVFLHVTYVPAQEKNFTTAPAICHDGKAHFPREGVFVSNGTHWFVTQRNFYEPQIITTDNTFVSGNCDVVIGIVNNTVYDPLQPELDSGGGSGGGQIYEGKLTAEGLRFGIVASRFNHALVDRLVEGAIDAIVRHGGREEDITLVRVPGSWEIPVAAGELARKEDIDAVIAIGVLIRGATPHFDYIASEVSKGLADLSLELRKPITFGVITADTLEQAIERAGTKHGNKGWEAALSAIEMANLFKSLR

SEQ ID NO: 7795 - protein, 1307 aa, Artificial Sequence
  SARS-CoV-2/Hong Kong/case85_VM20002868/2020__EPI_ISL_414519 spike protein (1-1147)(K986P_V987P_T887W_A1020W) LumSynth construct
MFVFLVLVPLVSSQCVNLTTRTQLPPAYTNSFTRGVYYPDKVFRSSVLHSTQDLFLPFFSNVTWFHAIHVSGTNGTKRFDNPVLPFNDGVYFASTEKSNIIRGWIFGTTLDSKTQSLLIVNNATNVVIKVCEFQFCNDPFLGVYYHKNNKSWMESEFRVYSSANNCTFEYVSQPFLMDLEGKQGNFKNLREFVFKNIDGYFKIYSKHTPINLVRDLPQGFSALEPLVDLPIGINITRFQTLLALHRSYLTPGDSSSGWTAGAAAYYVGYLQPRTFLLKYNENGTITDAVDCALDPLSETKCTLKSFTVEKGIYQTSNFRVQPTESIVRFPNITNLCPFGEVFNATRFASVYAWNRKRISNCVADYSVLYNSASFSTFKCYGVSPTKLNDLCFTNVYADSFVIRGDEVRQIAPGQTGKIADYNYKLPDDFTGCVIAWNSNNLDSKVGGNYNYLYRLFRKSNLKPFERDISTEIYQAGSTPCNGVEGFNCYFPLQSYGFQPTNGVGYQPYRVVVLSFELLHAPATVCGPKKSTNLVKNKCVNFNFNGLTGTGVLTESNKKFLPFQQFGRDIADTTDAVRDPQTLEILDITPCSFGGVSVITPGTNTSNQVAVLYQDVNCTEVPVAIHADQLTPTWRVYSTGSNVFQTRAGCLIGAEHVNNSYECDIPIGAGICASYQTQTNSPRRARSVASQSIIAYTMSLGAENSVAYSNNSIAIPTNFTISVTTEILPVSMTKTSVDCTMYICGDSTECSNLLLQYGSFCTQLNRALTGIAVEQDKNTQEVFAQVKQIYKTPPIKDFGGFNFSQILPDPSKPSKRSFIEDLLFNKVTLADAGFIKQYGDCLGDIAARDLICAQKFNGLTVLPPLLTDEMIAQYTSALLAGTITSGWWFGAGAALQIPFAMQMAYRFNGIGVTQNVLYENQKLIANQFNSAIGKIQDSLSSTASALGKLQDVVNQNAQALNTLVKQLSSNFGAISSVLNDILSRLDPPEAEVQIDRLITGRLQSLQTYVTQQLIRAAEIRWSANLAATKMSECVLGQSKRVDFCGKGYHLMSFPQSAPHGVVFLHVTYVPAQEKNFTTAPAICHDGKAHFPREGVFVSNGTHWFVTQRNFYEPQIITTDNTFVSGNCDVVIGIVNNTVYDPLQPELDSGGGSGGGQIYEGKLTAEGLRFGIVASRFNHALVDRLVEGAIDAIVRHGGREEDITLVRVPGSWEIPVAAGELARKEDIDAVIAIGVLIRGATPHFDYIASEVSKGLADLSLELRKPITFGVITADTLEQAIERAGTKHGNKGWEAALSAIEMANLFKSLR

SEQ ID NO: 7796 - protein, 1307 aa, Artificial Sequence; identical to SEQ ID NO: 7786
  SARS-CoV-2/England/200990660/2020__EPI_ISL_414523 spike protein (1-1147)(K986P_V987P_T887W_A1020W) LumSynth construct

SEQ ID NO: 7797 - protein, 1307 aa, Artificial Sequence
  SARS-CoV-2/Australia/NSW09/2020__EPI_ISL_413595 spike protein (1-1147)(K986P_V987P_T887W_A1020W) LumSynth construct
MFVFLVLLPLVSSQCVNLTTRTQLPPAYTNSFTRGVYYPDKVFRSSVLHSTQDLFLPFFSNVTWFHAIHVSGTNGTKRFDNPVLPFNDGVYFASTEKSNIIRGWIFGTTLDSKTQSLLIVNNATNVVIKVCEFQFCNDPFLGVYYHKNNKSWMESEFRVYSSANNCTFEYVSQPFLMDLEGKQGNFKNLREFVFKNIDGYFKIYSKHTPINLVRDLPQGFSALEPLVDLPIGINITRFQTLLALHRSYLTPGDSSSGWTAGAAAYYVGYLQPRTFLLKYNENGTITDAVDCALDPLSETKCTLKSFTVEKGIYQTSNFRVQPTESIVRFPNITNLCPFGEVFNATRFASVYAWNRKRISNCVADYSVLYNSASFSTFKCYGVSPTKLNDLCFTNVYADSFVIRGDEVRQIAPGQTGKIADYNYKLPDDFTGCVIAWNSNNLDSKVGGNYNYLYRLFRKSNLKPFERDISTEIYQAGSTPCNGVEGFNCYFPLQSYGFQPTNGVGYQPYRVVVLSFELLHAPATVCGPKKSTNLVKNKCVNFNFNGLTGTGVLTESNKKFLPFQQFGRDIADTTDAVRDPQTLEILDITPCSFGGVSVITPGTNTSNQVAVLYQDVNCTEVPVAIHADQLTPTWRVYSTGSNVFQTRAGCLIGAEHVNNSYECDIPIGAGICASYQTQTNSPRRARSVASQSIIAYTMSLGAENSVAYSNNSIAIPTNFTISVTTEILPVSMTKTSVDCTMYICGDSTECSNLLLQYGSFCTQLNRALTGIAVEQDKNTQEVFAQVKQIYKTPPIKDFGGFNFSQILPDPSKPSKRSFIEDLLFNKVTLADAGFIKQYGDCLGDIAARDLICAQKFNGLTVLPPLLTDEMIAQYTSALLAGTITSGWWFGAGAALQIPFAMQMAYRFNGIGVTQNVLYENQKLIANQFNSAIGKIQDSLSFTASALGKLQDVVNQNAQALNTLVKQLSSNFGAISSVLNDILSRLDPPEAEVQIDRLITGRLQSLQTYVTQQLIRAAEIRWSANLAATKMSECVLGQSKRVDFCGKGYHLMSFPQSAPHGVVFLHVTYVPAQEKNFTTAPAICHDGKAHFPREGVFVSNGTHWFVTQRNFYEPQIITTDNTFVSGNCDVVIGIVNNTVYDPLQPELDSGGGSGGGQIYEGKLTAEGLRFGIVASRFNHALVDRLVEGAIDAIVRHGGREEDITLVRVPGSWEIPVAAGELARKEDIDAVIAIGVLIRGATPHFDYIASEVSKGLADLSLELRKPITFGVITADTLEQAIERAGTKHGNKGWEAALSAIEMANLFKSLR

SEQ ID NO: 7798 - protein, 1307 aa, Artificial Sequence; identical to SEQ ID NO: 7778
  SARS-CoV-2/Australia/NSW10/2020__EPI_ISL_413596 spike protein (1-1147)(K986P_V987P_T887W_A1020W) LumSynth construct

SEQ ID NO: 7799 - protein, 1307 aa, Artificial Sequence
  SARS-CoV-2/Switzerland/1000477797/2020__EPI_ISL_413023 spike protein (1-1147)(K986P_V987P_T887W_A1020W) LumSynth construct
MFVFLVLLPLVSSQCVNLTTRTQLPPAYTNSFTRGVYYPDKVFRSSVLHSTQDLFLPFFSNVTWFHAIHVSGTNGTKRFDNPVLPFNDGVYFASTEKSNIIRGWIFGTTLDSKTQSLLIVNNATNVVIKVCEFQFCNDPFLGVYYHKNNKSWMESEFRVYSSANNCTFEYVSQPFLMDLEGKQGNFKNLREFVFKNIDGYFNIYSKHTPINLVRDLPQGFSALEPLVDLPIGINITRFQTLLALHRSYLTPGDSSSGWTAGAAAYYVGYLQPRTFLLKYNENGTITDAVDCALDPLSETKCTLKSFTVEKGIYQTSNFRVQPTESIVRFPNITNLCPFGEVFNATRFASVYAWNRKRISNCVADYSVLYNSASFSTFKCYGVSPTKLNDLCFTNVYADSFVIRGDEVRQIAPGQTGKIADYNYKLPDDFTGCVIAWNSNNLDSKVGGNYNYLYRLFRKSNLKPFERDISTEIYQAGSTPCNGVEGFNCYFPLQSYGFQPTNGVGYQPYRVVVLSFELLHAPATVCGPKKSTNLVKNKCVNFNFNGLTGTGVLTESNKKFLPFQQFGRDIADTTDAVRDPQTLEILDITPCSFGGVSVITPGTNTSNQVAVLYQGVNCTEVPVAIHADQLTPTWRVYSTGSNVFQTRAGCLIGAEHVNNSYECDIPIGAGICASYQTQTNSPRRARSVASQSIIAYTMSLGAENSVAYSNNSIAIPTNFTISVTTEILPVSMTKTSVDCTMYICGDSTECSNLLLQYGSFCTQLNRALTGIAVEQDKNTQEVFAQVKQIYKTPPIKDFGGFNFSQILPDPSKPSKRSFIEDLLFNKVTLADAGFIKQYGDCLGDIAARDLICAQKFNGLTVLPPLLTDEMIAQYTSALLAGTITSGWWFGAGAALQIPFAMQMAYRFNGIGVTQNVLYENQKLIANQFNSAIGKIQDSLSSTASALGKLQDVVNQNAQALNTLVKQLSSNFGAISSVLNDILSRLDPPEAEVQIDRLITGRLQSLQTYVTQQLIRAAEIRWSANLAATKMSECVLGQSKRVDFCGKGYHLMSFPQSAPHGVVFLHVTYVPAQEKNFTTAPAICHDGKAHFPREGVFVSNGTHWFVTQRNFYEPQIITTDNTFVSGNCDVVIGIVNNTVYDPLQPELDSGGGSGGGQIYEGKLTAEGLRFGIVASRFNHALVDRLVEGAIDAIVRHGGREEDITLVRVPGSWEIPVAAGELARKEDIDAVIAIGVLIRGATPHFDYIASEVSKGLADLSLELRKPITFGVITADTLEQAIERAGTKHGNKGWEAALSAIEMANLFKSLR

SEQ ID NO: 7800 - protein, 1307 aa, Artificial Sequence
  SARS-CoV-2/Belgium/BA-02291/2020__EPI_ISL_415159 spike protein (1-1147)(K986P_V987P_T887W_A1020W) LumSynth construct
MFVFLVLLPLVSSQCVNLTTRTQLPPAYTNSFTRGVYYPDKVFRSSVLHSTQDLFLPFFSNVTWFHAIHVSGTNGTKRFDNPVLPFNDGVYFASTEKSNIIRGWIFGTTLDSKTQSLLIVNNATNVVIKVCEFQFCNDPFLGVYYHKNNKSWMESEFRVYSSANNCTFEYVSQPFLMDLEGKQGNFKNLREFVFKNIDGYFKIYSKHTPINLVRDLPQGFSALEPLVDLPIGINITRFQTLLALHRSYLTPGDSSSGWTAGAAAYYVGYLQPRTFLLKYNENGTITDAVDCALDPLSETKCTLKSFTVEKGIYQTSNFRVQPTESIVRFPNITNLCPFGEVFNATRFASVYAWNRKRISNCVADYSVLYNSASFSTFKCYGVSPTKLNDLCFTNVYADSFVIRGDEVRQIAPGQTGKIADYNYKLPDDFTGCVIAWNSNNLDSKVGGNYNYLYRLFRRSNLKPFERDISTEIYQAGSTPCNGVEGFNCYFPLQSYGFQPTNGVGYQPYRVVVLSFELLPAPATVCGPKKSTNLVKNKCVNFNFNGLTGTGVLTESNKKFLPFQQFGRDIADTTDAVRDPQTLEILDITPCSFGGVSVITPGTNTSNQVAVLYQGVNCTEVPVAIHADQLTPTWRVYSTGSNVFQTRAGCLIGAEHVNNSYECDIPIGAGICASYQTQTNSPRRARSVASQSIIAYTMSLGAENSVAYSNNSIAIPTNFTISVTTEILPVSMTKTSVDCTMYICGDSTECSNLLLQYGSFCTQLNRALTGIAVEQDKNTQEVFAQVKQIYKTPPIKDFGGFNFSQILPDPSKPSKRSFIEDLLFNKVTLADAGFIKQYGDCLGDIAARDLICAQKFNGLTVLPPLLTDEMIAQYTSALLAGTITSGWWFGAGAALQIPFAMQMAYRFNGIGVTQNVLYENQKLIANQFNSAIGKIQDSLSSAAPALGKLQDVVNQNAQALNTLVKQLSSNFGAISSVLNDILSRLDPPEAEVQIDRLITGRLQSLQTYVTQQLIRAAEIRWSANLAATKMSECVLGQSKRVDFCGKGYHLMSFPQSAPHGVVFLHVTYVPAQEKNFTTAPAICHDGKAHFPREGVFVSNGTHWFVTQRNFYEPQIITTDNTFVSGNCDVVIGIVNNTVYDPLQPELDSGGGSGGGQIYEGKLTAEGLRFGIVASRFNHALVDRLVEGAIDAIVRHGGREEDITLVRVPGSWEIPVAAGELARKEDIDAVIAIGVLIRGATPHFDYIASEVSKGLADLSLELRKPITFGVITADTLEQAIERAGTKHGNKGWEAALSAIEMANLFKSLR

SEQ ID NO: 7801 - protein, 1307 aa, Artificial Sequence
  SARS-CoV-2/USA/WA8-UW5/2020__EPI_ISL_413486 spike protein (1-1147)(K986P_V987P_T887W_A1020W) LumSynth construct
MFVFLVLLPLVSSQCVNLTTRTQLPPAYTNSFTRGVYYPDKVFRSSVLHSTQDLFLPFFSNVTWFHAIHVSGTNGTKRFDNPVLPFNDGVYFASTEKSNIIRGWIFGTTLDSKTQSLLIVNNATNVVIKVCEFQFCNDPFLGVYYHKNNKSWMESEFRVYSSANNCTFEYVSQPFLMDLEGKQGNFKNLREFVFKNIDGYFKIYSKHTPINLVRDLPQGFSALEPLVDLPIGINITRFQTLLALHRSYLTPGDSSSGWTAGAAAYYVGYLQPRTFLLKYNENGTITDAVDCALDPLSETKCTLKSFTVEKGIYQTSNFRVQPTESIVRFPNITNLCPFGEVFNATRFASVYAWNRKRISNCVADYSVLYNSASFSTFKCYGVSPTKLNDLCFTNVYADSFVIRGDEVRQIAPGQTGKIADYNYKLPDDFTGCVIAWNSNNLDSKVGGNYNYLYRLFRKSNLKPFERDISTEIYQAGSTPCNGVEGFNCYFPLQSYGFQPTNGVGYQPYRVVVLSFELLHAPATVCGPKKSTNLVKNKCVNFNFNGLTGTGVLTESNKKFLPFQQFGRDIADTTDAVRDPQTLEILDITPCSFGGVSVITPGTNTSNQVAVLYQDVNCTEVPVAIHADQLTPTWRVYSTGSNVFQTRAGCLIGAEYVNNSYECDIPIGAGICASYQTQTNSPRRARSVASQSIIAYTMSLGAENSVAYSNNSIAIPTNFTISVTTEILPVSMTKTSVDCTMYICGDSTECSNLLLQYGSFCTQLNRALTGIAVEQDKNTQEVFAQVKQIYKTPPIKDFGGFNFSQILPDPSKPSKRSFIEDLLFNKVTLADAGFIKQYGDCLGDIAARDLICAQKFNGLTVLPPLLTDEMIAQYTSALLAGTITSGWWFGAGAALQIPFAMQMAYRFNGIGVTQNVLYENQKLIANQFNSAIGKIQDSLSSTASALGKLQDVVNQNAQALNTLVKQLSSNFGAISSVLNDILSRLDPPEAEVQIDRLITGRLQSLQTYVTQQLIRAAEIRWSANLAATKMSECVLGQSKRVDFCGKGYHLMSFPQSAPHGVVFLHVTYVPAQEKNFTTAPAICHDGKAHFPREGVFVSNGTHWFVTQRNFYEPQIITTDNTFVSGNCDVVIGIVNNTVYDPLQPELDSGGGSGGGQIYEGKLTAEGLRFGIVASRFNHALVDRLVEGAIDAIVRHGGREEDITLVRVPGSWEIPVAAGELARKEDIDAVIAIGVLIRGATPHFDYIASEVSKGLADLSLELRKPITFGVITADTLEQAIERAGTKHGNKGWEAALSAIEMANLFKSLR

SEQ ID NO: 7802 - protein, 1307 aa, Artificial Sequence
  SARS-CoV-2/England/20102000506/2020__EPI_ISL_415147 spike protein (1-1147)(K986P_V987P_T887W_A1020W) LumSynth construct
MFVFLVLLPLVSSQCVNLTTRTQLPPAYTNSFTRGVYYPDKVFRSSVLHSTQDLFLPFFSNVTWFHAIHVSGTNGTKRFDNPVLPFNDGVYFASTEKSNIIRGWIFGTTLDSKTQSLLIVNNATNVVIKVCEFQFCNDPFLGVYYHKNNKSWMESEFRVYSSANNCTFEYVSQPFLMDLEGKQGNFKNLREFVFKNIDGYFKIYSKHTPINLVRDLPQGFSALEPLVDLPIGINITRFQTLLALHRSYLTPGDSSSGWTAGAAAYYVGYLQPRTFLLKYNENGTITDAVDCALDPLSETKCTLKSFTVEKGIYQTSNFRVQPTESIVRFPNITNLCPFGEVFNATRFASVYAWNRKRISNCVADYSVLYNSASFSTFKCYGVSPTKLNDLCFTNVYADSFVIRGDEVRQIAPGQTGKIADYNYKLPDDFTGCVIAWNSNNLDSKVGGNYNYLYRLFRKSNLKPFERDISTEIYQAGSTPCNGVEGFNCYFPLQSYGFQPTNGVGYQPYRVVVLSFELLHAPATVCGPKKSTNLVKNKCVNFNFNGLTGTGVLTESNKKFLPFQQFGRDIADTTDAVRDPQTLEILDITPCSFGGVSVITPGTNTSNQVAVLYQGVNCTEVPVAIHADQLTPTWRVYSTGSNVFQTRAGCLIGAEHVNNSYECDIPIGAGICASYQTQTNSPRRARSVASQSIIAYTMSLGAENSVAYSNNSIAIPTNFTISVTTEILPVSMTKTSVDCTMYICGDSTECSNLLLQYGSFCTQLNRALTGIAVEQDKNTQEVFAQVKQIYKTPPIKDFGGFNFSQILPDPSKPSKRSFIEDLLFNKVTLADAGFIKQYGYCLGDIAARDLICAQKFNGLTVLPPLLTDEMIAQYTSALLAGTITSGWWFGAGAALQIPFAMQMAYRFNGIGVTQNVLYENQKLIANQFNSAIGKIQDSLSSTASALGKLQDVVNQNAQALNTLVKQLSSNFGAISSVLNDILSRLDPPEAEVQIDRLITGRLQSLQTYVTQQLIRAAEIRWSANLAATKMSECVLGQSKRVDFCGKGYHLMSFPQSAPHGVVFLHVTYVPAQEKNFTTAPAICHDGKAHFPREGVFVSNGTHWFVTQRNFYEPQIITTDNTFVSGNCDVVIGIVNNTVYDPLQPELDSGGGSGGGQIYEGKLTAEGLRFGIVASRFNHALVDRLVEGAIDAIVRHGGREEDITLVRVPGSWEIPVAAGELARKEDIDAVIAIGVLIRGATPHFDYIASEVSKGLADLSLELRKPITFGVITADTLEQAIERAGTKHGNKGWEAALSAIEMANLFKSLR

SEQ ID NO: 7803 - protein, 1307 aa, Artificial Sequence
  SARS-CoV-2/Belgium/VAG-03013/2020__EPI_ISL_415155 spike protein (1-1147)(K986P_V987P_T887W_A1020W) LumSynth construct
MFVFLVLLPLVSSQCVNLTTRTQLPPAYTNSFTRGVYYPDKVFRSSVLHSTQDLFLPFFSNVTWFHAIHVSGTNGTKRFDNPVLPFNDGVYFASTEKSNIIRGWIFGTTLDSKTQSLLIVNNATNVVIKVCEFQFCNDPFLGVYYHKNNKSWMESEFRVYSSANNCTFEYVSQPFLMDLEGKQGNFKNLREFVFKNIDGYFKIYSKHTPINLVRDLPQGFSALEPLVDLPIGINITRFQTLLALHRSYLTPGDSSSGWTAGAAAYYVGYLQPRTFLLKYNENGTITDAVDCALDPLSETKCTLKSFTVEKGIYQTSNFRVQPTESIVRFPNITNLCPFGEVFNATRFASVYAWNRKRISNCVADYSVLYNSASFSTFKCYGVSPTKLNDLCFTNVYADSFVIRGDEVRQIAPGQTGKIADYNYKLPDDFTGCVIAWNSNNLDSKVGGNYNYLYRLFRKSNLKPFERDISTEIYQAGSTPCNGVEGFNCYFPLQSYGFQPTNGVGYQPYRVVVLSFELLHAPATVCGPKKSTNLVKNKCVNFNFNGLTGTGVLTESNKKFLPFQQFGRDIADTTDAVRDPQTLEILDITPCSFGGVSVITPGTNTSNQVAVLYQGVNCTEVPVAIHADQLTPTWRVYSTGSNVFQTRAGCLIGAEHVNNSYECDIPIGAGICASYQTQTNSPRRARSVASQSIIAYTMSLGAENSVAYSNNSIAIPTNFTISVTTEILPVSMTKTSVDCTMYICGDSTECSNLLLQYGSFCTQLNRALTGIAVEQDKNTQEVFAQVKQIYKTPPIKDFGGFNFSQILPDPSKPSKRSFIEDLLFNKVTLADAGFIKQYGDCLGDIAARDLICAQKFNGLTVLPPLLTDEMIAQYTSALLAGTITSGWWFGAGAALQIPFAMQMAYRFNGIGVTQNVLYENQKLIANQFNSAIGKIQDSLSSTATALGKLQDVVNQNAQALNTLVKQLSSNFGAISSVLNDILSRLDPPEAEVQIDRLITGRLQSLQTYVTQQLIRAAEIRWSANLAATKMSECVLGQSKRVDFCGKGYHLMSFPQSAPHGVVFLHVTYVPAQEKNFTTAPAICHDGKAHFPREGVFVSNGTHWFVTQRNFYEPQIITTDNTFVSGNCDVVIGIVNNTVYDPLQPELDSGGGSGGGQIYEGKLTAEGLRFGIVASRFNHALVDRLVEGAIDAIVRHGGREEDITLVRVPGSWEIPVAAGELARKEDIDAVIAIGVLIRGATPHFDYIASEVSKGLADLSLELRKPITFGVITADTLEQAIERAGTKHGNKGWEAALSAIEMANLFKSLR

SEQ ID NO: 7804 - protein, 1307 aa, Artificial Sequence
  SARS-CoV-2/Belgium/BC-03016/2020__EPI_ISL_415157 spike protein (1-1147)(K986P_V987P_T887W_A1020W) LumSynth construct
MFVFLVLLPLVSSQCVNLTTRTQLPPAYTNSFTRGVYYPDKVFRSSVLHSTQDLFLPFFSNVTWFHAIHVSGTNGTKRFDNPVLPFNDGVYFASTEKSNIIRGWIFGTTLDSKTQSLLIVNNATNVVIKVCEFQFCNDPFLGVYYHKNNKSWMESEFRVYSSANNCTFEYVSQPFLMDLEGKQGNFKNLREFVFKNIDGYFKIYSKHTPINLVRDLPQGFSALEPLVDLPIGINITRFQTLLALHRSYLTPGDSSSGWTAGAAAYYVGYLQPRTFLLKYNENGTITDAVDCALDPLSETKCTLKSFTVEKGIYQTSNFRVQPTESIVRFPNITNLCPFGEVFNATRFASVYAWNRKRISNCVADYSVLYNSASFSTFKCYGVSPTKLNDLCFTNVYADSFVIRGDEVRQIAPGQTGKIADYNYKLPDDFTGCVIAWNSNNLDSKVGGNYNYLYRLFRKSNLKPFERDISTEIYQAGSTPCNGVEGFNCYFPLQSYGFQPTNGVGYQPYRVVVLSFELLHAPATVCGPKKSTNLVKNKCVNFNFNGLTGTGVLTESNKKFLPFQQFGRDIADTTDAVRDPQTLEILDITPCSFGGVSVITPGTNTSNQVAVLYQGVNCTEVPVAIHADQLTPTWRVYSTGSNVFQTRAGCLIGAEHVNNSYECDIPIGAGICASYQTQTNSPRRARSVASQSIIAYTMSLGAENSVAYSNNSIAIPTNFTISVTTEILPVSMTKTSVDCTMYICGDSTECSNLLLQYGSFCTQLNRALTGIAVEQDKNTQEVFAQVKQIYKTPPIKDFGGFNFSQILPDPSKPSKRSFIEDLLFNKVTLADAGFIKQYGDCLGDIAARDLICAQKFNGLTVLPPLLTDEMIAQYTSALLAGTITSGWWFGAGAALQIPFAMQMAYRFNGIGVTQNVLYENQKLIANQFNSAIGKIQDSLSSTAPALGKLQDVVNQNAQALNTLVKQLSSNFGAISSVLNDILSRLDPPEAEVQIDRLITGRLQSLQTYVTQQLIRAAEIRWSANLAATKMSECVLGQSKRVDFCGKGYHLMSFPQSAPHGVVFLHVTYVPAQEKNFTTAPAICHDGKAHFPREGVFVSNGTHWFVTQRNFYEPQIITTDNTFVSGNCDVVIGIVNNTVYDPLQPELDSGGGSGGGQIYEGKLTAEGLRFGIVASRFNHALVDRLVEGAIDAIVRHGGREEDITLVRVPGSWEIPVAAGELARKEDIDAVIAIGVLIRGATPHFDYIASEVSKGLADLSLELRKPITFGVITADTLEQAIERAGTKHGNKGWEAALSAIEMANLFKSLR

SEQ ID NO: 7805 - protein, 1307 aa, Artificial Sequence
  SARS-CoV-2/Germany/BavPat3/2020__EPI_ISL_414521 spike protein (1-1147)(K986P_V987P_T887W_A1020W) LumSynth construct
MFVFLVLLPLVSSQCVNLTTRTQLPPAYTNSFTRGVYYPDKVFRSSVLHSTQDLFLPFFSNVTWFHAIHVSGTNGTKRFDNPVLPFNDGVYFASTEKSNIIRGWIFGTTLDSKTQSLLIVNNATNVVIKVCEFQFCNDPFLGVYYHKNNKSWMESEFRVYSSANNCTFEYVSQPFLMDLEGKQGNFKNLREFVFKNIDGYFKIYSKHTPINLVRDLPQGFSALEPLVDLPIGINITRFQTLLALHRSYLTPGDSSSGWTAGAAAYYVGYLQPRTFLLKYNENGTITDAVDCALDPLSETKCTLKSFTVEKGIYQTSNFRVQPTESIVRFPNITNLCPFGEVFNATRFASVYAWNRKRISNCVADYSVLYNSASFSTFKCYGVSPTKLNDLCFTNVYADSFVIRGDEVRQIAPGQTGKIADYNYKLPDDFTGCVIAWNSNNLDSKVGGNYNYLYRLFRKSNLKPFERDISTEIYQAGSTPCNGVEGFNCYFPLQSYGFQPTNGVGYQPYRVVVLSFELLHAPATVCGPKKSTNLVKNKCVNFNFNGLTGTGVLTESNKKFLPFQQFGRDIADTTDAVRDPQTLEILDITPCSFGGVSVITPGTNTSNQVAVLYQDVNCTEVPVAIHADQLTPTWRVYSTGSNVFQTRAGCLIGAEHVNNSYECDIPIGAGICASYQTQTNSPRRARSVASQSIIAYTMSLGAENSVAYSNNSIAIPTNFTISVTTEILPVSMTKTSVDCTMYICGDSTECSNLLLQYGSFCTQLNRALTGIAVEQDKNTQQVFAQVKQIYKTPPIKDFGGFNFSQILPDPSKPSKRSFIEDLLFNKVTLADAGFIKQYGDCLGDIAARDLICAQKFNGLTVLPPLLTDEMIAQYTSALLAGTITSGWWFGAGAALQIPFAMQMAYRFNGIGVTQNVLYENQKLIANQFNSAIGKIQDSLSSTASALGKLQDVVNQNAQALNTLVKQLSSNFGAISSVLNDILSRLDPPEAEVQIDRLITGRLQSLQTYVTQQLIRAAEIRWSANLAATKMSECVLGQSKRVDFCGKGYHLMSFPQSAPHGVVFLHVTYVPAQEKNFTTAPAICHDGKAHFPREGVFVSNGTHWFVTQRNFYEPQIITTDNTFVSGNCDVVIGIVNNTVYDPLQPELDSGGGSGGGQIYEGKLTAEGLRFGIVASRFNHALVDRLVEGAIDAIVRHGGREEDITLVRVPGSWEIPVAAGELARKEDIDAVIAIGVLIRGATPHFDYIASEVSKGLADLSLELRKPITFGVITADTLEQAIERAGTKHGNKGWEAALSAIEMANLFKSLR

SEQ ID NO: 7806 - protein, 1307 aa, Artificial Sequence
  SARS-CoV-2/France/HF1805/2020__EPI_ISL_414628 spike protein (1-1147)(K986P_V987P_T887W_A1020W) LumSynth construct
MFVFLVLLPLVSSQCVNLTTRTQLPPAYTNSFTRGVYYPDKVFRSSVLHSTQDLFLPFFSNVTWFHAIHVSGTNGTKRFDNPVLPFNDGVYFASTEKSNIIRGWIFGTTLDSKTQSLLIVNNATNVVIKVCEFQFCNDPFLGVYYHKNNKSWMESEFRVYSSANNCTFEYVSQPFLMDLEGKQGNFKNLREFVFKNIDGYFKIYSKHTPINLVRDLPQGFSALEPLVDLPIGINITRFQTLLALHRSYLTPGDSSSGWTAGAAAYYVGYLQPRTFLLKYNENGTITDAVDCALDPLSETKCTLKSFTVEKGIYQTSNFRVQPTESIVRFPNITNLCPFGEVFNATRFASVYAWNRKRISNCVADYSVLYNSASFSTFKCYGVSPTKLNDLCFTNVYADSFVIRGDEVRQIAPGQTGKIADYNYKLPDDFTGCVIAWNSNNLDSKVGGNYNYLYRLFRKSNLKPFERDISTEIYQAGSTPCNGVEGFNCYFPLQSYGFQPTNGVGYQPYRVVVLSFELLHAPATVCGPKKSTNLVKNKCVNFNFNGLTGTGVLTESNKKFLPFQQFGRDIADTTDAVRDPQTLEILDITPCSFGGVSVITPGTNTSNQVAVLYQGVNCTEVPVAIHADQLTPTWRVYSTGSNVFQTRAGCLIGAEHVNNSYECDIPIGAGICASYQTQTNSPRRARSVASQSIIAYTMSLGAENSVAYSNNSIAIPTNFTISVTTEILPVSMTKTSVDCTMYICGDSTECSNLLLQYGSFCTQLNRALTGIAVEQDKNTQEVFAQVKQIYKTPPIKDFGGFNFSQILPDPSKPSKRSFIEDLLFNKVTLADAGFIKQYGDCLGDIAARDLICAQKFNGLTVLPPLLTDEMIAQYTSALLAGTITSGWWFGAGAALQIPFAMQMAYRFNGIGVTQNVLYENQKLIANQFNSAIGKIQDSLSSTASALGKLQDVVNQNAQALNTLVKQLSSNFGAISSVLNDILSRLDPPEAEVQIDRLITGRLQSLQTYVTQQLIRAAEIRWSANLAATKMSECVLGQSKRVDFCGKGYHLMSFPQSAPHGVVFLHVTYVPAQEKNFTTAPAICHDGKAHFPREGVFVSNGTHWFVTQRNFYEPQIITTDNTFVSGNCDVVIGVVNNTVYDPLQPELDSGGGSGGGQIYEGKLTAEGLRFGIVASRFNHALVDRLVEGAIDAIVRHGGREEDITLVRVPGSWEIPVAAGELARKEDIDAVIAIGVLIRGATPHFDYIASEVSKGLADLSLELRKPITFGVITADTLEQAIERAGTKHGNKGWEAALSAIEMANLFKSLR

SEQ ID NO: 7807 - protein, 1307 aa, Artificial Sequence
  SARS-CoV-2/Netherlands/ZuidHolland_9/2020__EPI_ISL_414445 spike protein (1-1147)(K986P_V987P_T887W_A1020W) LumSynth construct
MFVFLVLLPLVSSQCVNLTTRTQLPPAYTNSFTRGVYYPDKVFRSSVLHSTQDLFLPFFSNVTWFHAIHVSGTNGTKRFDNPVLPFNDGVYFASTEKSNIIRGWIFGTTLDSKTQSLLIVNNATNVVIKVCEFQFCNDPFLGVYYHKNNKSWMESEFRVYSSANNCTFEYVSQPFLMDLEGKQGNFKNLREFVFKNIDGYFKIYSKHTPINLVRDLPQGFSALEPLVDLPIGINITRFQTLLALHRSYLTPGDSSSGWTAGAAAYYVGYLQPRTFLLKYNENGTITDAVDCALDPLSETKCTLKSFTVEKGIYQTSNFRVQPTESIVRFPNITNLCPFGEVFNATRFASVYAWNRKRISNCVADYSVLYNSASFSTFKCYGVSPTKLNDLCFTNVYADSFVIRGDEVRQIAPGQTGKIADYNYKLPDDFTGCVIAWNSNNLDSKVGGNYNYLYRLFRKSNLKPFERDISTEIYQAGSTPCNGVEGFNCYFPLQSYGFQPTNGVGYQPYRVVVLSFELLHAPATVCGPKKSTNLVKNKCVNFNFNGLTGTGVLTESNKKFLPFQQFGRDIADTTDAVRDPQTLEILDITPCSFGGVSVITPGTNTSNQVAVLYQGVNCTEVPVAIHADQLTPTWRVYSTGSNVFQTRAGCLIGAEHVNNSYECDIPIGAGICASYQTQTNSPRRARSVASQSIIAYTMSLGAENSVAYSNNSIAIPTNFTISVTTEILPVSMTKTSVDCTMYICGDSTECSNLLLQYGSFCTQLNRALTGIAVEQDKNTQEVFAQVKQIYKTPPIKDFGGFNFSQILPDPSKPSKRSFIEDLLFNKVTLADAGFIKQYGDCLGDIAARDLICVQKFNGLTVLPPLLTDEMIAQYTSALLAGTITSGWWFGAGAALQIPFAMQMAYRFNGIGVTQNVLYENQKLIANQFNSAIGKIQDSLSSTASALGKLQDVVNQNAQALNTLVKQLSSNFGAISSVLNDILSRLDPPEAEVQIDRLITGRLQSLQTYVTQQLIRAAEIRWSANLAATKMSECVLGQSKRVDFCGKGYHLMSFPQSAPHGVVFLHVTYVPAQEKNFTTAPAICHDGKAHFPREGVFVSNGTHWFVTQRNFYEPQIITTDNTFVSGNCDVVIGIVNNTVYDPLQPELDSGGGSGGGQIYEGKLTAEGLRFGIVASRFNHALVDRLVEGAIDAIVRHGGREEDITLVRVPGSWEIPVAAGELARKEDIDAVIAIGVLIRGATPHFDYIASEVSKGLADLSLELRKPITFGVITADTLEQAIERAGTKHGNKGWEAALSAIEMANLFKSLR

SEQ ID NO: 7808 - protein, 1307 aa, Artificial Sequence
  SARS-CoV-2/Finland/FIN03032020A/2020__EPI_ISL_413602 spike protein (1-1147)(K986P_V987P_T887W_A1020W) LumSynth construct
MFVFLVLLPLVSSQCVNLTTRTQLPPAYTNSFTRGVYYPDKVFRSSVLHSTQDLFLPFFSNVTWFHAIHVSGTNGTKRFDNPVLPFNDGVYFASTEKSNIIRGWIFGTTLDSKTQSLLIVNNATNVVIKVCEFQFCNDPFLGVYYHKNNKSWMESEFRVYSSANNCTFEYVSQPFLMDLEGKQGNFKNLREFVFKNIDGYFKIYSKHTPINLVRDLPQGFSALEPLVDLPIGINITRFQTLLALHRSYLTPGDSSSGWTAGAAAYYVGYLQPRTFLLKYNENGTITDAVDCALDPLSETKCTLKSFTVEKGIYQTSNFRVQPTESIVRFPNITNLCPFGEVFNATRFASVYAWNRKRISNCVADYSVLYNSASFSTFKCYGVSPTKLNDLCFTNVYADSFVIRGDEVRQIAPGQTGKIADYNYKLPDDFTGCVISWNSNNLDSKVGGNYNYLYRLFRKSNLKPFERDISTEIYQAGSTPCNGVEGFNCYFPLQSYGFQPTNGVGYQPYRVVVLSFELLHAPATVCGPKKSTNLVKNKCVNFNFNGLTGTGVLTESNKKFLPFQQFGRDIADTTDAVRDPQTLEILDITPCSFGGVSVITPGTNTSNQVAVLYQGVNCTEVPVAIHADQLTPTWRVYSTGSNVFQTRAGCLIGAEHVNNSYECDIPIGAGICASYQTQTNSPRRARSVASQSIIAYTMSLGAENSVAYSNNSIAIPTNFTISVTTEILPVSMTKTSVDCTMYICGDSTECSNLLLQYGSFCTQLNRALTGIAVEQDKNTQEVFAQVKQIYKTPPIKDFGGFNFSQILPDPSKPSKRSFIEDLLFNKVTLADAGFIKQYGDCLGDIAARDLICAQKFNGLTVLPPLLTDEMIAQYTSALLAGTITSGWWFGAGAALQIPFAMQMAYRFNGIGVTQNVLYENQKLIANQFNSAIGKIQDSLSSTASALGKLQDVVNQNAQALNTLVKQLSSNFGAISSVLNDILSRLDPPEAEVQIDRLITGRLQSLQTYVTQQLIRAAEIRWSANLAATKMSECVLGQSKRVDFCGKGYHLMSFPQSAPHGVVFLHVTYVPAQEKNFTTAPAICHDGKAHFPREGVFVSNGTHWFVTQRNFYEPQIITTDNTFVSGNCDVVIGIVNNTVYDPLQPELDSGGGSGGGQIYEGKLTAEGLRFGIVASRFNHALVDRLVEGAIDAIVRHGGREEDITLVRVPGSWEIPVAAGELARKEDIDAVIAIGVLIRGATPHFDYIASEVSKGLADLSLELRKPITFGVITADTLEQAIERAGTKHGNKGWEAALSAIEMANLFKSLR

SEQ ID NO: 7809 - protein, 1307 aa, Artificial Sequence
  SARS-CoV-2/France/GE1977/2020__EPI_ISL_414632 spike protein (1-1147)(K986P_V987P_T887W_A1020W) LumSynth construct
MFVFLVLLPLVSSQCVNLTTRTQLPPAYTNSFTRGVYYPDKVFRSSVLHSTQDLFLPFFSNVTWFHAIHVSGTNGTKRFDNPVLPFNDGVYFASTEKSNIIRGWIFGTTLDSKTQSLLIVNNATNVVIKVCEFQFCNDPFLGVYYHKNNKSWMESEFRVYSSANNCTFEYVSQPFLMDLEGKQGNFKNLREFVFKNIDGYFKIYSKHTPINLVRDLPQGFSALEPLVDLPIGINITRFQTLLALHRSYLTPGDSSSGWTAGAAAYYVGYLQPRTFLLKYNENGTITDAVDCALDPLSETKCTLKSFTVEKGIYQTSNFRVQPTESIVRFPNITNLCPFGEVFNATRFASVYAWNRKRISNCVADYSVLYNSASFSTFKCYGVSPTKLNDLCFTNVYADSFVIRGDEVRQIAPGQTGKIADYNYKLPDDFTGCVIAWNSNNLDSKVGGNYNYLYRLFRKSNLKPFERDISTEIYQAGSTPCNGVEGFNCYFPLQSYGFQPTNGVGYQPYRVVVLSFELLHAPATVCGPKKSTNLVKNKCVNFNFNGLTGTGVLTESNKKFLPFQQFGRDIADTTDAVRDPQTLEILDITPCSFGGVSVITPGTNTSNQVAVLYQGVNCTEVPVAIHADQLTPTWRVYSTGSNVFQTRAGCLIGAEHVNNSYECDIPIGAGICASYQTQTNSPRRARSVASQSIIAYTMSLGAENSVAYSNNSIAIPTNFTISVTTEILPVSMTKTSVDCTMYICGDSTECSNLLLQYGSFCTQLNRALTGIAVEQDKNTQEVFAQVKQIYKTPPIKDFGGFNFSQILPDPSKPSKRSFIEDLLFNKVTLADAGFIKQYGDCLGDIAARDLICAQKFNGLTVLPPLLTDEMIAQYTSALLAGTITSGWWFGAGAALQIPFAMQMAYRFNGIGVTQNVLYENQKLIANQFNSAIGKIQDSLFSTASALGKLQDVVNQNAQALNTLVKQLSSNFGAISSVLNDILSRLDPPEAEVQIDRLITGRLQSLQTYVTQQLIRAAEIRWSANLAATKMSECVLGQSKRVDFCGKGYHLMSFPQSAPHGVVFLHVTYVPAQEKNFTTAPAICHDGKAHFPREGVFVSNGTHWFVTQRNFYEPQIITTDNTFVSGNCDVVIGIVNNTVYDPLQPELDSGGGSGGGQIYEGKLTAEGLRFGIVASRFNHALVDRLVEGAIDAIVRHGGREEDITLVRVPGSWEIPVAAGELARKEDIDAVIAIGVLIRGATPHFDYIASEVSKGLADLSLELRKPITFGVITADTLEQAIERAGTKHGNKGWEAALSAIEMANLFKSLR

SEQ ID NO: 7810 - protein, 1307 aa, Artificial Sequence
  SARS-CoV-2/Finland/FIN-313/2020__EPI_ISL_414641 spike protein (1-1147)(K986P_V987P_T887W_A1020W) LumSynth construct
MFVFLVLLPLVSSQCVNLTTRTQLPPAYTNSFTRGVYYPDKVFRSSVLHSTQDLFLPFFSNVTWFHAIHVSGTNGTKRFDNPVLPFNDGVYFASTEKSNIIRGWIFGTTLDSKTQSLLIVNNATNVVIKVCEFQFCNDPFLGVYYHKNNKSWMESEFRVYSSANNCTFEYVSQPFLMDLEGKQGNFKNLREFVFKNIDGYFKIYSKHTPINLVRDLPQGFSALEPLVDLPIGINITRFKTLLALHRSYLTPGDSSSGWTAGAAAYYVGYLQPRTFLLKYNENGTITDAVDCALDPLSETKCTLKSFTVEKGIYQTSNFRVQPTESIVRFPNITNLCPFGEVFNATRFASVYAWNRKRISNCVADYSVLYNSASFSTFKCYGVSPTKLNDLCFTNVYADSFVIRGDEVRQIAPGQTGKIADYNYKLPDDFTGCVIAWNSNNLDSKVGGNYNYLYRLFRKSNLKPFERDISTEIYQAGSTPCNGVEGFNCYFPLQSYGFQPTNGVGYQPYRVVVLSFELLHAPATVCGPKKSTNLVKNKCVNFNFNGLTGTGVLTESNKKFLPFQQFGRDIADTTDAVRDPQTLEILDITPCSFGGVSVITPGTNTSNQVAVLYQGVNCTEVPVAIHADQLTPTWRVYSTGSNVFQTRAGCLIGAEHVNNSYECDIPIGAGICASYQTQTNSPRRARSVASQSIIAYTMSLGAENSVAYSNNSIAIPTNFTISVTTEILPVSMTKTSVDCTMYICGDSTECSNLLLQYGSFCTQLNRALTGIAVEQDKNTQEVFAQVKQIYKTPPIKDFGGFNFSQILPDPSKPSKRSFIEDLLFNKVTLADAGFIKQYGDCLGDIAARDLICAQKFNGLTVLPPLLTDEMIAQYTSALLAGTITSGWWFGAGAALQIPFAMQMAYRFNGIGVTQNVLYENQKLIANQFNSAIGKIQDSLSSTASALGKLQDVVNQNAQALNTLVKQLSSNFGAISSVLNDILSRLDPPEAEVQIDRLITGRLQSLQTYVTQQLIRAAEIRWSANLAATKMSECVLGQSKRVDFCGKGYHLMSFPQSAPHGVVFLHVTYVPAQEKNFTTAPAICHDGKAHFPREGVFVSNGTHWFVTQRNFYEPQIITTDNTFVSGNCDVVIGIVNNTVYDPLQPELDSGGGSGGGQIYEGKLTAEGLRFGIVASRFNHALVDRLVEGAIDAIVRHGGREEDITLVRVPGSWEIPVAAGELARKEDIDAVIAIGVLIRGATPHFDYIASEVSKGLADLSLELRKPITFGVITADTLEQAIERAGTKHGNKGWEAALSAIEMANLFKSLR

SEQ ID NO: 7811 - protein, 1307 aa, Artificial Sequence
  SARS-CoV-2/Netherlands/ZuidHolland_2/2020__EPI_ISL_414556 spike protein (1-1147)(K986P_V987P_T887W_A1020W) LumSynth construct
MFVFLVLLPLVSSQCVNLTTRTQLPPAYTNSFTRGVYYPDKVFRSSVLHSTQDLFLPFFSNVTWFHAIHVSGTNGTKRFDNPVLPFNDGVYFASTEKSNIIRGWIFGTTLDSKTQSLLIVNNATNVVIKVCEFQFCNDPFLGVYYHKNNKSWMESEFRVYSSANNCTFEYVSQPFLMDLEGKQGNFKNLREFVFKNIDGYFKIYSKHTPINLVRDLPQGFSALEPLVDLPIGINITRFQTLLALHRSYLTPGDSSSGWTAGAAAYYVGYLQPRTFLLKYNENGTITDAVDCALDPLSETKCTLKSFTVEKGIYQTSNFRVQPTESIVRFPNITNLCPFGEVFNATRFASVYAWNRKRISNCVADYSVLYNSASFSTFKCYGVSPTKLNDLCFTNVYADSFVIRGDEVRQIAPGQTGKIADYNYKLPDDFTGCVIAWNSNNLDSKVGGNYNYLYRLFRKSNLKPFERDISTEIYQAGSTPCNGVEGFNCYFPLQSYGFQPTNGVGYQPYRVVVLSFELLHAPATVCGPKKSTNLVKNKCVNFNFNGLTGTGVLTESNKKFLPFQQFGRDIADTTDAVRDPQTLEILDITPCSFGGVSVITPGTNTSNQVAVLYQGVNCTEVPVAIHADQLTPTWRVYSTGSNVFQTRAGCLIGAEHVNNSYECDIPIGAGICASYQTQTNSPRRARSVASQSIIAYTMSLGAENSVAYSNNSIAIPTNFTISVTTEILPVSMTKTSVDCTMYICGDSTECSNLLLQYGSFCTQLNRALTGIALEQDKNTQEVFAQVKQIYKTPPIKDFGGFNFSQILPDPSKPSKRSFIEDLLFNKVTLADAGFIKQYGDCLGDIAARDLICAQKFNGLTVLPPLLTDEMIAQYTSALLAGTITSGWWFGAGAALQIPFAMQMAYRFNGIGVTQNVLYENQKLIANQFNSAIGKIQDSLSSTASALGKLQDVVNQNAQALNTLVKQLSSNFGAISSVLNDILSRLDPPEAEVQIDRLITGRLQSLQTYVTQQLIRAAEIRWSANLAATKMSECVLGQSKRVDFCGKGYHLMSFPQSAPHGVVFLHVTYVPAQEKNFTTAPAICHDGKAHFPREGVFVSNGTHWFVTQRNFYEPQIITTDNTFVSGNCDVVIGIVNNTVYDPLQPELDSGGGSGGGQIYEGKLTAEGLRFGIVASRFNHALVDRLVEGAIDAIVRHGGREEDITLVRVPGSWEIPVAAGELARKEDIDAVIAIGVLIRGATPHFDYIASEVSKGLADLSLELRKPITFGVITADTLEQAIERAGTKHGNKGWEAALSAIEMANLFKSLR

SEQ ID NO: 7812 - protein, 1307 aa, Artificial Sequence
  SARS-CoV-2/USA/WA-UW31/2020__EPI_ISL_414618 spike protein (1-1147)(K986P_V987P_T887W_A1020W) LumSynth construct
MFVFLVLLPLVSSQCVNLTTRTQLPPAYTNSFTRGVYYPDKVFRSSVLHSTQDLFLPFFSNVTWFHAIHVSGTNGTKRFDNPVLPFNDGVYFASTEKSNIIRGWIFGTTLDSKTQSLLIVNNATNVVIKVCEFQFCNDPFLGVYYHKNNKSWMESEFRVYSSANNCTFEYVSQPFLMDLEGKQGNFKNLREFVFKNIDGYFKIYSKHTPINLVRDLPQGFSALEPLVDLPIGINITRFQTLLALHRSYLTPGDSSSGWTAGAAAYYVGYLQPRTFLLKYNENGTITDAVDCALDPLSETKCTLKSFTVEKGIYQTSNFRVQPTESIVRFPNITNLCPFGEVFNATRFASVYAWNRKRISNCVADYSVLYNSASFSTFKCYGVSPTKLNDLCFTNVYADSFVIRGDEVRQIAPGQTGKIADYNYKLPDDFTGCVIAWNSNNLDSKVGGNYNYLYRLFRKSNLKPFERDISTEIYQAGSTPCNGAEGFNCYFPLQSYGFQPTNGVGYQPYRVVVLSFELLHAPATVCGPKKSTNLVKNKCVNFNFNGLTGTGVLTESNKKFLPFQQFGRDIADTTDAVRDPQTLEILDITPCSFGGVSVITPGTNTSNQVAVLYQDVNCTEVPVAIHADQLTPTWRVYSTGSNVFQTRAGCLIGAEHVNNSYECDIPIGAGICASYQTQTNSPRRARSVASQSIIAYTMSLGAENSVAYSNNSIAIPTNFTISVTTEILPVSMTKTSVDCTMYICGDSTECSNLLLQYGSFCTQLNRALTGIAVEQDKNTQEVFAQVKQIYKTPPIKDFGGFNFSQILPDPSKPSKRSFIEDLLFNKVTLADAGFIKQYGDCLGDIAARDLICAQKFNGLTVLPPLLTDEMIAQYTSALLAGTITSGWWFGAGAALQIPFAMQMAYRFNGIGVTQNVLYENQKLIANQFNSAIGKIQDSLSSTASALGKLQDVVNQNAQALNTLVKQLSSNFGAISSVLNDILSRLDPPEAEVQIDRLITGRLQSLQTYVTQQLIRAAEIRWSANLAATKMSECVLGQSKRVDFCGKGYHLMSFPQSAPHGVVFLHVTYVPAQEKNFTTAPAICHDGKAHFPREGVFVSNGTHWFVTQRNFYEPQIITTDNTFVSGNCDVVIGIVNNTVYDPLQPELDSGGGSGGGQIYEGKLTAEGLRFGIVASRFNHALVDRLVEGAIDAIVRHGGREEDITLVRVPGSWEIPVAAGELARKEDIDAVIAIGVLIRGATPHFDYIASEVSKGLADLSLELRKPITFGVITADTLEQAIERAGTKHGNKGWEAALSAIEMANLFKSLR

SEQ ID NO: 7813 - protein, 1307 aa, Artificial Sequence
  SARS-CoV-2/South Korea/SNU01/2020__EPI_ISL_411929 spike protein (1-1147)(K986P_V987P_T887W_A1020W) LumSynth construct
MFVFLVLLPLVSSQCVNLTTRTQLPPAYTNSFTRGVYYPDKVFRSSVLHSTQDLFLPFFSNVTWFHAIHVSGTNGTKRFDNPVLPFNDGVYFASTEKSNIIRGWIFGTTLDSKTQSLLIVNNATNVVIKVCEFQFCNDPFLGVYYHKNNKSWMESEFRVYSSANNCTFEYVSQPFLMDLEGKQGNFKNLREFVFKNIDGYFKIYSKHTPINLVRDLPQGFWALEPLVDLPIGINITRFQTLLALHRSYLTPGDSSSGWTAGAAAYYVGYLQPRTFLLKYNENGTITDAVDCALDPLSETKCTLKSFTVEKGIYQTSNFRVQPTESIVRFPNITNLCPFGEVFNATRFASVYAWNRKRISNCVADYSVLYNSASFSTFKCYGVSPTKLNDLCFTNVYADSFVIRGDEVRQIAPGQTGKIADYNYKLPDDFTGCVIAWNSNNLDSKVGGNYNYLYRLFRKSNLKPFERDISTEIYQAGSTPCNGVEGFNCYFPLQSYGFQPTNGVGYQPYRVVVLSFELLHAPATVCGPKKSTNLVKNKCVNFNFNGLTGTGVLTESNKKFLPFQQFGRDIADTTDAVRDPQTLEILDITPCSFGGVSVITPGTNTSNQVAVLYQDVNCTEVPVAIHADQLTPTWRVYSTGSNVFQTRAGCLIGAEHVNNSYECDIPIGAGICASYQTQTNSPRRARSVASQSIIAYTMSLGAENSVAYSNNSIAIPTNFTISVTTEILPVSMTKTSVDCTMYICGDSTECSNLLLQYGSFCTQLNRALTGIAVEQDKNTQEVFAQVKQIYKTPPIKDFGGFNFSQILPDPSKPSKRSFIEDLLFNKVTLADAGFIKQYGDCLGDIAARDLICAQKFNGLTVLPPLLTDEMIAQYTSALLAGTITSGWWFGAGAALQIPFAMQMAYRFNGIGVTQNVLYENQKLIANQFNSAIGKIQDSLSSTASALGKLQDVVNQNAQALNTLVKQLSSNFGAISSVLNDILSRLDPPEAEVQIDRLITGRLQSLQTYVTQQLIRAAEIRWSANLAATKMSECVLGQSKRVDFCGKGYHLMSFPQSAPHGVVFLHVTYVPAQEKNFTTAPAICHDGKAHFPREGVFVSNGTHWFVTQRNFYEPQIITTDNTFVSGNCDVVIGIVNNTVYDPLQPELDSGGGSGGGQIYEGKLTAEGLRFGIVASRFNHALVDRLVEGAIDAIVRHGGREEDITLVRVPGSWEIPVAAGELARKEDIDAVIAIGVLIRGATPHFDYIASEVSKGLADLSLELRKPITFGVITADTLEQAIERAGTKHGNKGWEAALSAIEMANLFKSLR

SEQ ID NO: 7814 - protein, 1307 aa, Artificial Sequence
  SARS-CoV-2/China/WF0004/2020__EPI_ISL_413694 spike protein (1-1147)(K986P_V987P_T887W_A1020W) LumSynth construct
MFVFLVLLPLVSSQCVNLTTRTQLPPAYTNSFTRGVYYPDKVFRSSVLHSTQDLFLPFFSNVTWFHAIHVSGTNGTKRFDNPVLPFNDGVYFASTEKSNIIRGWIFGTTLDSKTQSLLIVNNATNVVIKVCEFQFCNDPFLGVYYHKNNKSWTESEFRVYSSANNCTFEYVSQPFLMDLEGKQGNFKNLREFVFKNIDGYFKIYSKHTPINLVRDLPQGFSALEPLVDLPIGINITRFQTLLALHRSYLTPGDSSSGWTAGAAAYYVGYLQPRTFLLKYNENGTITDAVDCALDPLSETKCTLKSFTVEKGIYQTSNFRVQPTESIVRFPNITNLCPFGEVFNATRFASVYAWNRKRISNCVADYSVLYNSASFSTFKCYGVSPTKLNDLCFTNVYADSFVIRGDEVRQIAPGQTGKIADYNYKLPDDFTGCVIAWNSNNLDSKVGGNYNYLYRLFRKSNLKPFERDISTEIYQAGSTPCNGVEGFNCYFPLQSYGFQPTNGVGYQPYRVVVLSFELLHAPATVCGPKKSTNLVKNKCVNFNFNGLTGTGVLTESNKKFLPFQQFGRDIADTTDAVRDPQTLEILDITPCSFGGVSVITPGTNTSNQVAVLYQDVNCTEVPVAIHADQLTPTWRVYSTGSNVFQTRAGCLIGAEHVNNSYECDIPIGAGICASYQTQTNSPRRARSVASQSIIAYTMSLGAENSVAYSNNSIAIPTNFTISVTTEILPVSMTKTSVDCTMYICGDSTECSNLLLQYGSFCTQLNRALTGIAVEQDKNTQEVFAQVKQIYKTPPIKDFGGFNFSQILPDPSKPSKRSFIEDLLFNKVTLADAGFIKQYGDCLGDIAARDLICAQKFNGLTVLPPLLTDEMIAQYTSALLAGTITSGWWFGAGAALQIPFAMQMAYRFNGIGVTQNVLYENQKLIANQFNSAIGKIQDSLSSTASALGKLQDVVNQNAQALNTLVKQLSSNFGAISSVLNDILSRLDPPEAEVQIDRLITGRLQSLQTYVTQQLIRAAEIRWSANLAATKMSECVLGQSKRFDFCGKGYHLMSFPQSAPHGVVFLHVTYVPAQEKNFTTAPAICHDGKAHFPREGVFVSNGTHWFVTQRNFYEPQIITTDNTFVSGNCDVVIGIVNNTVYDPLQPELDSGGGSGGGQIYEGKLTAEGLRFGIVASRFNHALVDRLVEGAIDAIVRHGGREEDITLVRVPGSWEIPVAAGELARKEDIDAVIAIGVLIRGATPHFDYIASEVSKGLADLSLELRKPITFGVITADTLEQAIERAGTKHGNKGWEAALSAIEMANLFKSLR

SEQ ID NO: 7815 - protein, 1307 aa, Artificial Sequence
  SARS-CoV-2/China/WF0028/2020__EPI_ISL_413791 spike protein (1-1147)(K986P_V987P_T887W_A1020W) LumSynth construct
MFVFLVLLPLVSSQCVNLTTRTQLPPAYTNSFTRGVYYPDKVFRSSVLHSTQDLFLPFFSNVTWFHAIHVSGTNGTKRFDNPVLPFNDGVYFASTEKSNIIRGWIFGTTLDSKTQSLLIVNNATNVVIKVCEFQFCNDPFLGVYYHKNNKSWMESEFRVYSSANNCTFEYVSQPFLMDLEGKQGNFKNLREFVFKNIDGYFKIYSKHTPINLVRDLPQGFSALEPLVDLPIGINITRFQTLLALHRSYLTPGDSSSGWTAGAAAYYVGYLQPRTFLLKYNENGTITDAVDCALDPLSETKCTLKSFTVEKGIYQTSNFRVQPTESIVRFPNITNLCPFGEVFNATRFASVYAWNRKRISNCVADYSVLYNSASFSTFKCYGVSPTKLNDLCFTNVYADSFVIRGDEVRQIAPGQTGKIADYNYKLPDDFTGCVIAWNSNNLDSKVGGNYNYLYRLFRKSNLKPFERDISTEIYQAGSTPCNGVEGFNCYFPLQSYGFQPTNGVGYQPYRVVVLSFELLHAPATVCGPKKSTNLVKNKCVNFNFNGLTGTGVLTESNKKFLPFQQFGRDIADTTDAVRDPQTLEILDITPCSFGGVSVITPGTNTSNQVAVLYQDVNCTEVPVAIHADQLTPTWRVYSTGSNVFQTRAGCLIGAEHVNNSYECDIPIGAGICASYQTQTNSPRRARSVASQSIIAYTMSLGAENSVAYSNNSIAIPTNFTISVTTEILPVSMTKTSVDCTMYICGDSTECSNLLLQYGSFCTQLNRALTGIAVEQDKNTQEVFAQVKQIYKTPPIKDFGGFNFSQILPDPSKPSKRSFIEDLLFNKVTLADAGFIKQYGDCLGDIAARDLICAQKFNGLTVLPPLLTDEMIAQYTSALLAGTITSGWWFGAGAALQIPFAMQMAYRFNGIGVTQNVLYENQKLIANQFNSAIGKIQDSLSSTASALGKLQDVVNQNAQALNTLVKQLSSNFGAISSVLNDILSRLDPPEAEVQIDRLITGRLQSLQTYVTQQLIRAAEIRWSANLAATKMSECVLGQSKRVDFCGKGYHLMSFPQSAPHGVVFLHVTYVPAQEKNFTTAPAICHDGKAHFPREGVFVSNGTHWFVTQRNFYEPQIITTDNTFVSGNCDVVIGIVNNTVYDPLQPELESGGGSGGGQIYEGKLTAEGLRFGIVASRFNHALVDRLVEGAIDAIVRHGGREEDITLVRVPGSWEIPVAAGELARKEDIDAVIAIGVLIRGATPHFDYIASEVSKGLADLSLELRKPITFGVITADTLEQAIERAGTKHGNKGWEAALSAIEMANLFKSLR

SEQ ID NO: 7816 - protein, 1307 aa, Artificial Sequence
  SARS-CoV-2/2019-nCoV/USA-CruiseA-18/2020__MT159716.1 spike protein (1-1147)(K986P_V987P_T887W_A1020W) LumSynth construct
MFVFLVLLPLVSSQCVNLTTRTQLPPAYTNSFTRGVYYPDKVFRSSVLHSTQDLFLPFFSNVTWFHAIHVSGTNGTKRFDNPVLPFNDGVYFASTEKSNIIRGWIFGTTLDSKTQSLLIVNNATNVVIKVCEFQFCNDPFLGVYYHKNNKSWMESELRVYSSANNCTFEYVSQPFLMDLEGKQGNFKNLREFVFKNIDGYFKIYSKHTPINLVRDLPQGFSALEPLVDLPIGINITRFQTLLALHRSYLTPGDSSSGWTAGAAAYYVGYLQPRTFLLKYNENGTITDAVDCALDPLSETKCTLKSFTVEKGIYQTSNFRVQPTESIVRFPNITNLCPFGEVFNATRFASVYAWNRKRISNCVADYSVLYNSASFSTFKCYGVSPTKLNDLCFTNVYADSFVIRGDEVRQIAPGQTGKIADYNYKLPDDFTGCVIAWNSNNLDSKVGGNYNYLYRLFRKSNLKPFERDISTEIYQAGSTPCNGVEGFNCYFPLQSYGFQPTNGVGYQPYRVVVLSFELLHAPATVCGPKKSTNLVKNKCVNFNFNGLTGTGVLTESNKKFLPFQQFGRDIADTTDAVRDPQTLEILDITPCSFGGVSVITPGTNTSNQVAVLYQDVNCTEVPVAIHADQLTPTWRVYSTGSNVFQTRAGCLIGAEHVNNSYECDIPIGAGICASYQTQTNSPRRARSVASQSIIAYTMSLGAENSVAYSNNSIAIPTNFTISVTTEILPVSMTKTSVDCTMYICGDSTECSNLLLQYGSFCTQLNRALTGIAVEQDKNTQEVFAQVKQIYKTPPIKDFGGFNFSQILPDPSKPSKRSFIEDLLFNKVTLADAGFIKQYGDCLGDIAARDLICAQKFNGLTVLPPLLTDEMIAQYTSALLAGTITSGWWFGAGAALQIPFAMQMAYRFNGIGVTQNVLYENQKLIANQFNSAIGKIQDSLSSTASALGKLQDVVNQNAQALNTLVKQLSSNFGAISSVLNDILSRLDPPEAEVQIDRLITGRLQSLQTYVTQQLIRAAEIRWSANLAATKMSECVLGQSKRVDFCGKGYHLMSFPQSAPHGVVFLHVTYVPAQEKNFTTAPAICHDGKAHFPREGVFVSNGTHWFVTQRNFYEPQIITTDNTFVSGNCDVVIGIVNNTVYDPLQPELDSGGGSGGGQIYEGKLTAEGLRFGIVASRFNHALVDRLVEGAIDAIVRHGGREEDITLVRVPGSWEIPVAAGELARKEDIDAVIAIGVLIRGATPHFDYIASEVSKGLADLSLELRKPITFGVITADTLEQAIERAGTKHGNKGWEAALSAIEMANLFKSLR

SEQ ID NO: 7817 - protein, 1307 aa, Artificial Sequence
  SARS-CoV-2/SARS-CoV-2/Yunnan-01/human/2020/CHN__MT049951.1 spike protein (1-1147)(K986P_V987P_T887W_A1020W) LumSynth construct
MFVFLVLLPLVSSQCVNLTTRTQLPPANTNSFTRGVYYPDKVFRSSVLHSTQDLFLPFFSNVTWFHAIHVSGTNGTKRFDNPVLPFNDGVYFASTEKSNIIRGWIFGTTLDSKTQSLLIVNNATNVVIKVCEFQFCNDPFLGVYYHKNNKSWMESEFRVYSSANNCTFEYVSQPFLMDLEGKQGNFKNLREFVFKNIDGYFKIYSKHTPINLVRDLPQGFSALEPLVDLPIGINITRFQTLLALHRSYLTPGDSSSGWTAGAAAYYVGYLQPRTFLLKYNENGTITDAVDCALDPLSETKCTLKSFTVEKGIYQTSNFRVQPTESIVRFPNITNLCPFGEVFNATRFASVYAWNRKRISNCVADYSVLYNSASFSTFKCYGVSPTKLNDLCFTNVYADSFVIRGDEVRQIAPGQTGKIADYNYKLPDDFTGCVIAWNSNNLDSKVGGNYNYLYRLFRKSNLKPFERDISTEIYQAGSTPCNGVEGFNCYFPLQSYGFQPTNGVGYQPYRVVVLSFELLHAPATVCGPKKSTNLVKNKCVNFNFNGLTGTGVLTESNKKFLPFQQFGRDIADTTDAVRDPQTLEILDITPCSFGGVSVITPGTNTSNQVAVLYQDVNCTEVPVAIHADQLTPTWRVYSTGSNVFQTRAGCLIGAEHVNNSYECDIPIGAGICASYQTQTNSPRRARSVASQSIIAYTMSLGAENSVAYSNNSIAIPTNFTISVTTEILPVSMTKTSVDCTMYICGDSTECSNLLLQYGSFCTQLNRALTGIAVEQDKNTQEVFAQVKQIYKTPPIKDFGGFNFSQILPDPSKPSKRSFIEDLLFNKVTLADAGFIKQYGDCLGDIAARDLICAQKFNGLTVLPPLLTDEMIAQYTSALLAGTITSGWWFGAGAALQIPFAMQMAYRFNGIGVTQNVLYENQKLIANQFNSAIGKIQDSLSSTASALGKLQDVVNQNAQALNTLVKQLSSNFGAISSVLNDILSRLDPPEAEVQIDRLITGRLQSLQTYVTQQLIRAAEIRWSANLAATKMSECVLGQSKRVDFCGKGYHLMSFPQSAPHGVVFLHVTYVPAQEKNFTTAPAICHDGKAHFPREGVFVSNGTHWFVTQRNFYEPQIITTDNTFVSGNCDVVIGIVNNTVYDPLQPELDSGGGSGGGQIYEGKLTAEGLRFGIVASRFNHALVDRLVEGAIDAIVRHGGREEDITLVRVPGSWEIPVAAGELARKEDIDAVIAIGVLIRGATPHFDYIASEVSKGLADLSLELRKPITFGVITADTLEQAIERAGTKHGNKGWEAALSAIEMANLFKSLR

SEQ ID NO: 7818 - protein, 1307 aa, Artificial Sequence
  SARS-CoV-2/USA/WA-UW292/2020__EPI_ISL_418077 spike protein (1-1147)(K986P_V987P_T887W_A1020W) LumSynth construct
MFVFLVLLPLVSSQCVNLTTRTQLPPAYTNSFTRGVYYPDKVFRSSVLHSTQDLFLPFFSNVTWFHAIHVSGTNGTKRFDNPVLPFNDGVYFASTEKSNIIRGWIFGTTLDSKTQSLLIVNNATNVVIKVCEFQFCNDPFLGVYYHKNNKSWMESEFRVYSSANNCTFEYVSQPFLMDLEGKQGNFKNLREFVFKNIDGYFKIYSKHTPINLVRDLPQGFSALEPLVDLPIGINITRFQTLLALHRSYLTPGDSSSGWTAGAAAYYVGYLQPRTFLLKYNENGTITDAVDCALDPLSETKCTLKSFTVEKGIYQTSNFRVQPTESIVRFPNITNLCPFGEVFNATRFASVYAWNRKRISNCVADYSVLYNSASFSTFKCYGVSPTKLNDLCFTNVYADSFVIRGDEVRQIAPGQTGKIADYNYKLPDDFTGCVIAWNSNNLDSKVGGNYNYLYRLFRKSNLKPFERDISTEIYQASSTPCNGVEGFNCYFPLQSYGFQPTNGVGYQPYRVVVLSFELLHAPATVCGPKKSTNLVKNKCVNFNFNGLTGTGVLTESNKKFLPFQQFGRDIADTTDAVRDPQTLEILDITPCSFGGVSVITPGTNTSNQVAVLYQDVNCTEVPVAIHADQLTPTWRVYSTGSNVFQTRAGCLIGAEHVNNSYECDIPIGAGICASYQTQTNSPRRARSVASQSIIAYTMSLGAENSVAYSNNSIAIPTNFTISVTTEILPVSMTKTSVDCTMYICGDSTECSNLLLQYGSFCTQLNRALTGIAVEQDKNTQEVFAQVKQIYKTPPIKDFGGFNFSQILPDPSKPSKRSFIEDLLFNKVTLADAGFIKQYGDCLGDIAARDLICAQKFNGLTVLPPLLTDEMIAQYTSALLAGTITSGWWFGAGAALQIPFAMQMAYRFNGIGVTQNVLYENQKLIANQFNSAIGKIQDSLSSTASALGKLQDVVNQNAQALNTLVKQLSSNFGAISSVLNDILSRLDPPEAEVQIDRLITGRLQSLQTYVTQQLIRAAEIRWSANLAATKMSECVLGQSKRVDFCGKGYHLMSFPQSAPHGVVFLHVTYVPAQEKNFTTAPAICHDGKAHFPREGVFVSNGTHWFVTQRNFYEPQIITTDNTFVSGNCDVVIGIVNNTVYDPLQPELDSGGGSGGGQIYEGKLTAEGLRFGIVASRFNHALVDRLVEGAIDAIVRHGGREEDITLVRVPGSWEIPVAAGELARKEDIDAVIAIGVLIRGATPHFDYIASEVSKGLADLSLELRKPITFGVITADTLEQAIERAGTKHGNKGWEAALSAIEMANLFKSLR

SEQ ID NO: 7819 - protein, 1307 aa, Artificial Sequence
  SARS-CoV-2/Iceland/192/2020__EPI_ISL_417819 spike protein (1-1147)(K986P_V987P_T887W_A1020W) LumSynth construct
MFVFFVLLPLVSSQCVNLTTRTQLPPAYTNSFTRGVYYPDKVFRSSVLHSTQDLFLPFFSNVTWFHAIHVSGTNGTKRFDNPVLPFNDGVYFASTEKSNIIRGWIFGTTLDSKTQSLLIVNNATNVVIKVCEFQFCNDPFLGVYYHKNNKSWMESEFRVYSSANNCTFEYVSQPFLMDLEGKQGNFKNLREFVFKNIDGYFKIYSKHTPINLVRDLPQGFSALEPLVDLPIGINITRFQTLLALHRSYLTPGDSSSGWTAGAAAYYVGYLQPRTFLLKYNENGTITDAVDCALDPLSETKCTLKSFTVEKGIYQTSNFRVQPTESIVRFPNITNLCPFGEVFNATRFASVYAWNRKRISNCVADYSVLYNSASFSTFKCYGVSPTKLNDLCFTNVYADSFVIRGDEVRQIAPGQTGKIADYNYKLPDDFTGCVIAWNSNNLDSKVGGNYNYLYRLFRKSNLKPFERDISTEIYQAGSTPCNGVEGFNCYFPLQSYGFQPTNGVGYQPYRVVVLSFELLHAPATVCGPKKSTNLVKNKCVNFNFNGLTGTGVLTESNKKFLPFQQFGRDIADTTDAVRDPQTLEILDITPCSFGGVSVITPGTNTSNQVAVLYQGVNCTEVPVAIHADQLTPTWRVYSTGSNVFQTRAGCLIGAEHVNNSYECDIPIGAGICASYQTQTNSPRRARSVASQSIIAYTMSLGAENSVAYSNNSIAIPTNFTISVTTEILPVSMTKTSVDCTMYICGDSTECSNLLLQYGSFCTQLNRALTGIAVEQDKNTQEVFAQVKQIYKTPPIKDFGGFNFSQILPDPSKPSKRSFIEDLLFNKVTLADAGFIKQYGDCLGDIAARDLICAQKFNGLTVLPPLLTDEMIAQYTSALLAGTITSGWWFGAGAALQIPFAMQMAYRFNGIGVTQNVLYENQKLIANQFNSAIGKIQDSLSSTASALGKLQDVVNQNAQALNTLVKQLSSNFGAISSVLNDILSRLDPPEAEVQIDRLITGRLQSLQTYVTQQLIRAAEIRWSANLAATKMSECVLGQSKRVDFCGKGYHLMSFPQSAPHGVVFLHVTYVPAQEKNFTTAPAICHDGKAHFPREGVFVSNGTHWFVTQRNFYEPQIITTDNTFVSGNCDVVIGIVNNTVYDPLQPELDSGGGSGGGQIYEGKLTAEGLRFGIVASRFNHALVDRLVEGAIDAIVRHGGREEDITLVRVPGSWEIPVAAGELARKEDIDAVIAIGVLIRGATPHFDYIASEVSKGLADLSLELRKPITFGVITADTLEQAIERAGTKHGNKGWEAALSAIEMANLFKSLR

SEQ ID NO: 7820 - protein, 1307 aa, Artificial Sequence
  SARS-CoV-2/Belgium/ULG-6939/2020__EPI_ISL_417020 spike protein (1-1147)(K986P_V987P_T887W_A1020W) LumSynth construct
MFVFLVLLPLVSSQCVNLTTRTQLPPAYTNSFTRGVYYPDKVFRSSVLHSTQDLFLPFFSNVTWFHAIHVSGTNGTKRFDNPVLPFNDGVYFASTEKSNIIRGWIFGTTLDSKTQSLLIVNNATNVVIKVCEFQFCNDPFLGVYYHKNNKSWMESEFRVYSSANNCTFEYVSQPFLMDLEGKQGNFKNLREFVFKNIDGYFKIYSKHTPINLVRDLPQGFSALEPLVDLPIGINITRFQTLLALHRSYLTPGDSSSGWTAGAAAYYVGYLQPRTFLLKYNENGTITDAVDCALDPLSETKCTLKSFTVEKGIYQTSNFRVQPTESIVRFPNITNLCPFGEVFNATRFASVYAWNRKRISNCVADYSVLYNSASFSTFKCYGVSPTKLNDLCFTNVYADSFVIRGDEVRQIAPGQTGKIADYNYKLPDDFTGCVIAWNSNNLDSKVGGNYNYLYRLFRKSNLKPFERDISTEIYQAGSTPCNGVEGFNCYFPLQSYGFQPTNGVGYQPYRVVVLSFELLHAPATVCGPKKSTNLVKNKCVNFNFNGLTGTGVLTESNKKFLPFQQFGRDIADTTDAVRDPQTLEILDITPCSFGGVSVITPGTNTSNQVAVLYQGVNCTEVPVAIHADQLTPTWRVYSTGSNVFQTRAGCLIGAEHVNNSYECDIPIGAGICASYQTQTNSPRRARSVASQSIIAYTMSLGAENSVVYSNNSIAIPTNFTISVTTEILPVSMTKTSVDCTMYICGDSTECSNLLLQYGSFCTQLNRALTGIAVEQDKNTQEVFAQVKQIYKTPPIKDFGGFNFSQILPDPSKPSKRSFIEDLLFNKVTLADAGFIKQYGDCLGDIAARDLICAQKFNGLTVLPPLLTDEMIAQYTSALLAGTITSGWWFGAGAALQIPFAMQMAYRFNGIGVTQNVLYENQKLIANQFNSAIGKIQDSLSSTASALGKLQDVVNQNAQALNTLVKQLSSNFGAISSVLNDILSRLDPPEAEVQIDRLITGRLQSLQTYVTQQLIRAAEIRWSANLAATKMSECVLGQSKRVDFCGKGYHLMSFPQSAPHGVVFLHVTYVPAQEKNFTTAPAICHDGKAHFPREGVFVSNGTHWFVTQRNFYEPQIITTDNTFVSGNCDVVIGIVNNTVYDPLQPELDSGGGSGGGQIYEGKLTAEGLRFGIVASRFNHALVDRLVEGAIDAIVRHGGREEDITLVRVPGSWEIPVAAGELARKEDIDAVIAIGVLIRGATPHFDYIASEVSKGLADLSLELRKPITFGVITADTLEQAIERAGTKHGNKGWEAALSAIEMANLFKSLR

SEQ ID NO: 7821 - protein, 1307 aa, Artificial Sequence
  SARS-CoV-2/France/HF2496/2020__EPI_ISL_418231 spike protein (1-1147)(K986P_V987P_T887W_A1020W) LumSynth construct
MFVFLVLLPLVSSQCVNLTTRTQLPPAYTNSFTRGVYYPDKVFRSSVLHSTQDLFLPFFSNVTWFHAIHVSGTNGTKRFDNPVLPFNDGVYFASTEKSNIIRGWIFGTTLDSKTQSLLIVNNATNVVIKVCEFQFCNDPFLGVYYHKNNKSWMESEFRVYSSANNCTFEYVSQPFLMDLEGKQGNFKNLREFVFKNIDGYFKIYSKHTPINLVRDLPQGFSALEPLVDLPIGINITRFQTLLALHRSYLTPGDSSSGWTAGAAAYYVGYLQPRTFLLKYNENGTITDAVDCALDPLSETKCTLKSFTVEKGIYQTSNFRVQPTESIVRFPNITNLCPFGEVFNATRFASVYAWNRKRISNCVADYSVLYNSASFSTFKCYGVSPTKLNDLCFTNVYADSFVIRGDEVRQIAPGQTGKIADYNYKLPDDFTGCVIAWNSNNLDSKVGGNYNYLYRLFRKSNLKPFERDISTEIYQAGSTPCNGVEGFNCYFPLQSYGFQPTNGVGYQPYRVVVLSFELLHAPATVCGPKKSTNLVKNKCVNFNFNGLTGTGVLTESNKKFLPFQQFGRDIADTTDAVRDPQTLEILDITPCSFGGVSVITPGTNTSNQVAVLYQGVNCTEVPVAIHADQLTPTWRVYSTGSNVFQTRAGCLIGAEHVNNSYECDIPIGAGICASYQTQTNSPRRARSVASQSIIAYTMSLGAENSVAYSNNSIAIPTNFTISVTTEILPVSMTKTSVDCTMYICGDSTECSNLLLQYGSFCTQLNRALTGIAVEQDKNTQEVFAQVKQIYKTPPIKDFGGFNFSQILPDPSKPSKRSFIEDLLFNKVTLADAGFIKQYGDCLGDIVARDLICAQKFNGLTVLPPLLTDEMIAQYTSALLAGTITSGWWFGAGAALQIPFAMQMAYRFNGIGVTQNVLYENQKLIANQFNSAIGKIQDSLSSTASALGKLQDVVNQNAQALNTLVKQLSSNFGAISSVLNDILSRLDPPEAEVQIDRLITGRLQSLQTYVTQQLIRAAEIRWSANLAATKMSECVLGQSKRVDFCGKGYHLMSFPQSAPHGVVFLHVTYVPAQEKNFTTAPAICHDGKAHFPREGVFVSNGTHWFVTQRNFYEPQIITTDNTFVSGNCDVVIGIVNNTVYDPLQPELDSGGGSGGGQIYEGKLTAEGLRFGIVASRFNHALVDRLVEGAIDAIVRHGGREEDITLVRVPGSWEIPVAAGELARKEDIDAVIAIGVLIRGATPHFDYIASEVSKGLADLSLELRKPITFGVITADTLEQAIERAGTKHGNKGWEAALSAIEMANLFKSLR

SEQ ID NO: 7822 - protein, 1307 aa, Artificial Sequence
  SARS-CoV-2/USA/WA-UW291/2020__EPI_ISL_418076 spike protein (1-1147)(K986P_V987P_T887W_A1020W) LumSynth construct
MFVFLVLLPLVSSQCVNLTTRTQLPPAYTNSFTRGVYYPDKVFRSSVLHSTQDLFLPFFSNVTWFHAIHVSGTNGTKRFDNPVLPFNDGVYFASTEKSNIIRGWIFGTTLDSKTQSLLIVNNATNVVIKVCEFQFCNDPFLGVYYHKNNKSWMESEFRVYSSANNCTFEYVSQPFLMDLEGKQGNFKNLREFVFKNIDGYFKIYSKHTPINLVRDLPQGFSALEPLVDLPIGINITRFQTLLALHRSYLTPGDSSSGWTAGAAAYYVGYLQPRTFLLKYNENGTITDAVDCALDPLSETKCTLKSFTVEKGIYQTSNFRVQPTESIVRFPNITNLCPFGEVFNATRFASVYAWNRKRISNCVADYSVLYNSASFSTFKCYGVSPTKLNDLCFTNVYADSFVIRGDEVRQIAPGQTGKIADYNYKLPDDFTGCVIAWNSNNLDSKVGGNYNYLYRLFRKSNLKPFERDISTEIYQAGSTPCNGVEGFNCYFPLQSYGFQPTNGVGYQPYRVVVLSFELLHAPATVCGPKKSTNLVKNKCVNFNFNGLTGTGVLTESNKKFLPFQQFGRDIADTTDAVRDPQTLEILDITPCSFGGVSVITPGTNTSNQVAVLYQGVNCTEVPVAIHADQLTPTWRVYSTGSNVFQTRAGCLIGAEHVNNSYECDIPIGAGICASYQTQTNSPRRARSVASQSIIAYTMSLGAENSVAYSNNSIAIPTNFTISVTTEILPVSMTKTSVDCTMYICGDSTECSNLLLQYGSFCTQLNRALTGIAVEQDKNTQEVFAQVKQIYKTPPIKDFGGFNFSQILPDPSKPSKRSFIEDLLFNKVTLADAGFIKQYGDCLGDIAARDLICAQKFNGLTVLPPLLTDEMIAQYTSALLAGTITSGWWFGAGAALQIPFAMQMAYRFNGIGVTQNVLYENQKLIANQFNSAIGKIQYSLSSTASALGKLQDVVNQNAQALNTLVKQLSSNFGAISSVLNDILSRLDPPEAEVQIDRLITGRLQSLQTYVTQQLIRAAEIRWSANLAATKMSECVLGQSKRVDFCGKGYHLMSFPQSAPHGVVFLHVTYVPAQEKNFTTAPAICHDGKAHFPREGVFVSNGTHWFVTQRNFYEPQIITTDNTFVSGNCDVVIGIVNNTVYDPLQPELDSGGGSGGGQIYEGKLTAEGLRFGIVASRFNHALVDRLVEGAIDAIVRHGGREEDITLVRVPGSWEIPVAAGELARKEDIDAVIAIGVLIRGATPHFDYIASEVSKGLADLSLELRKPITFGVITADTLEQAIERAGTKHGNKGWEAALSAIEMANLFKSLR

SEQ ID NO: 7823 - protein, 1307 aa, Artificial Sequence; identical to SEQ ID NO: 7786
  SARS-CoV-2/Portugal/PT0034/2020__EPI_ISL_418019 spike protein (1-1147)(K986P_V987P_T887W_A1020W) LumSynth construct

SEQ ID NO: 7824 - protein, 1307 aa, Artificial Sequence; identical to SEQ ID NO: 7778
  SARS-CoV-2/Iceland/202/2020__EPI_ISL_417750 spike protein (1-1147)(K986P_V987P_T887W_A1020W) LumSynth construct

SEQ ID NO: 7825 - protein, 1307 aa, Artificial Sequence
  SARS-CoV-2/USA/WA-UW261/2020__EPI_ISL_418046 spike protein (1-1147)(K986P_V987P_T887W_A1020W) LumSynth construct
MFVFLVLLPLVSSQCVNLTTRTQLPPAYTNSFTRGVYYPDKVFRSSVLHSTQDLFLPFFSNVTWFHAIHVSGTNGTKRFDNPVLPFNDGVYFASTEKSNIIRGWIFGTTLDSKTQSLLIVNNATNVVIKVCEFQFCNDPFLGVYYHKNNKSWMESEFRVYSSANNCTFEYVSQPFLMDLEGKQGNFKNLREFVFKNIDGYFKIYSKHTPINLVRDLPQGFSALEPLVDLPIGINITRFQTLLALHRSYLTPGDSSSGWTAGAAAYYVGYLQPRTFLLKYNENGTITDAVDCALDPLSETKCTLKSFTVEKGIYQTSNFRVQPTESIVRFPNITNLCPFGEVFNATRFTSVYAWNRKRISNCVADYSVLYNSASFSTFKCYGVSPTKLNDLCFTNVYADSFVIRGDEVRQIAPGQTGKIADYNYKLPDDFTGCVIAWNSNNLDSKVGGNYNYLYRLFRKSNLKPFERDISTEIYQAGSTPCNGVEGFNCYFPLQSYGFQPTNGVGYQPYRVVVLSFELLHAPATVCGPKKSTNLVKNKCVNFNFNGLTGTGVLTESNKKFLPFQQFGRDIADTTDAVRDPQTLEILDITPCSFGGVSVITPGTNTSNQVAVLYQDVNCTEVPVAIHADQLTPTWRVYSTGSNVFQTRAGCLIGAEHVNNSYECDIPIGAGICASYQTQTNSPRRARSVASQSIIAYTMSLGAENSVAYSNNSIAIPTNFTISVTTEILPVSMTKTSVDCTMYICGDSTECSNLLLQYGSFCTQLNRALTGIAVEQDKNTQEVFAQVKQIYKTPPIKDFGGFNFSQILPDPSKPSKRSFIEDLLFNKVTLADAGFIKQYGDCLGDIAARDLICAQKFNGLTVLPPLLTDEMIAQYTSALLAGTITSGWWFGAGAALQIPFAMQMAYRFNGIGVTQNVLYENQKLIANQFNSAIGKIQDSLSSTASALGKLQDVVNQNAQALNTLVKQLSSNFGAISSVLNDILSRLDPPEAEVQIDRLITGRLQSLQTYVTQQLIRAAEIRWSANLAATKMSECVLGQSKRVDFCGKGYHLMSFPQSAPHGVVFLHVTYVPAQEKNFTTAPAICHDGKAHFPREGVFVSNGTHWFVTQRNFYEPQIITTDNTFVSGNCDVVIGIVNNTVYDPLQPELDSGGGSGGGQIYEGKLTAEGLRFGIVASRFNHALVDRLVEGAIDAIVRHGGREEDITLVRVPGSWEIPVAAGELARKEDIDAVIAIGVLIRGATPHFDYIASEVSKGLADLSLELRKPITFGVITADTLEQAIERAGTKHGNKGWEAALSAIEMANLFKSLR

SEQ ID NO: 7826 - protein, 1307 aa, Artificial Sequence
  SARS-CoV-2/Portugal/PT0035/2020__EPI_ISL_418020 spike protein (1-1147)(K986P_V987P_T887W_A1020W) LumSynth construct
MFVFLVLLPLVSSQCVNLTTRTQLPPAYTNSFTRGVYYPDKVFRSSVLHSTQDLFLPFFSNVTWFHAIHVSGTNGTKRFDNPVLPFNDGVYFASTEKSNIIRGWIFGTTLDSKTQSLLIVNNATNVVIKVCEFQFCNDPFLGVYYHKNNKSWMESEFRVYSSANNCTFEYVSQPFLMDLEGKQGNFKNLREFVFKNIDGYFKIYSKHTPINLVRDLPQGFSALEPLVDLPIGINITRFQTLLALHRSYLTPGDSSSGWTAGAAAYYVGYLQPRTFLLKYNENGTITDAVDCALDPLSETKCTLKSFTVEKGIYQTSNFRVQPTESIVRFPNITNLCPFGEVFNATRFASVYAWNRKRISNCVADYSVLYNSASFSTFKCYGVSPTKLNDLCFTNVYADSFVIRGDEVRQIAPGQTGKIADYNYKLPDDFTGCVIAWNSNNLDSKVGGNYNYLYRLFRKSNLKPFERDISTEIYQAGSTPCNGVEGFNCYFPLQSYGFQPTNGVGYQPYRVVVLSFELLHAPATVCGPKKSTNLVKNKCVNFNFNGLTGTGVLTESNKKFLPFQQFGRDIADTTDAVRDPQTLEILDITPCSFGGVSVITPGTNTSNQVAVLYQDVNCTEVPVAIHADQLTPTWRVYSTGSNVFQTRAGCLIGAEHVNNSYECDIPIGAGICASYQTQTNSPRRARSVASQSIIAYTMSLGAENSVAYSNNSIAIPTNFTISVTTEILPVSMTKTSVDCTMYICGDSTECSNLLLQYGSFCTQLNRALTGIAVEQDKNTQEVFAQVKQIYKTPPIKDFGGFNFSQILPDPSKPSKRSFIEDLLFNKVTLADAGFIKQYGDCLGDISARDLICAQKFNGLTVLPPLLTDEMIAQYTSALLAGTITSGWWFGAGAALQIPFAMQMAYRFNGIGVTQNVLYENQKLIANQFNSAIGKIQDSLSSTASALGKLQDVVNQNAQALNTLVKQLSSNFGAISSVLNDILSRLDPPEAEVQIDRLITGRLQSLQTYVTQQLIRAAEIRWSANLAATKMSECVLGQSKRVDFCGKGYHLMSFPQSAPHGVVFLHVTYVPAQEKNFTTAPAICHDGKAHFPREGVFVSNGTHWFVTQRNFYEPQIITTDNTFVSGNCDVVIGIVNNTVYDPLQPELDSGGGSGGGQIYEGKLTAEGLRFGIVASRFNHALVDRLVEGAIDAIVRHGGREEDITLVRVPGSWEIPVAAGELARKEDIDAVIAIGVLIRGATPHFDYIASEVSKGLADLSLELRKPITFGVITADTLEQAIERAGTKHGNKGWEAALSAIEMANLFKSLR

SEQ ID NO: 7827 - protein, 1307 aa, Artificial Sequence
  SARS-CoV-2/USA/NY-NYUMC7/2020__EPI_ISL_418192 spike protein (1-1147)(K986P_V987P_T887W_A1020W) LumSynth construct
MFVFLVLLPLVSSQCVNLTTRTQLPPAYTNSFTRGVYYPDKVFRSSVLHSTQDLFLPFFSNVTWFHAIHVSGTNGTKRFDNPVLPFNDGVYFASTEKSNIIRGWIFGTTLDSKTQSLLIVNNATNVVIKVCEFQFCNDPFLGVYHHKNNKSWMESEFRVYSSANNCTFEYVSQPFLMDLEGKQGNFKNLREFVFKNIDGYFKIYSKHTPINLVRDLPQGFSALEPLVDLPIGINITRFQTLLALHRSYLTPGDSSSGWTAGAAAYYVGYLQPRTFLLKYNENGTITDAVDCALDPLSETKCTLKSFTVEKGIYQTSNFRVQPTESIVRFPNITNLCPFGEVFNATRFASVYAWNRKRISNCVADYSVLYNSASFSTFKCYGVSPTKLNDLCFTNVYADSFVIRGDEVRQIAPGQTGKIADYNYKLPDDFTGCVIAWNSNNLDSKVGGNYNYLYRLFRKSNLKPFERDISTEIYQAGSTPCNGVEGFNCYFPLQSYGFQPTNGVGYQPYRVVVLSFELLHAPATVCGPKKSTNLVKNKCVNFNFNGLTGTGVLTESNKKFLPFQQFGRDIADTTDAVRDPQTLEILDITPCSFGGVSVITPGTNTSNQVAVLYQGVNCTEVPVAIHADQLTPTWRVYSTGSNVFQTRAGCLIGAEHVNNSYECDIPIGAGICASYQTQTNSPRRARSVASQSIIAYTMSLGAENSVAYSNNSIAIPTNFTISVTTEILPVSMTKTSVDCTMYICGDSTECSNLLLQYGSFCTQLNRALTGIAVEQDKNTQEVFAQVKQIYKTPPIKDFGGFNFSQILPDPSKPSKRSFIEDLLFNKVTLADAGFIKQYGDCLGDIAARDLICAQKFNGLTVLPPLLTDEMIAQYTSALLAGTITSGWWFGAGAALQIPFAMQMAYRFNGIGVTQNVLYENQKLIANQFNSAIGKIQDSLSSTASALGKLQDVVNQNAQALNTLVKQLSSNFGAISSVLNDILSRLDPPEAEVQIDRLITGRLQSLQTYVTQQLIRAAEIRWSANLAATKMSECVLGQSKRVDFCGKGYHLMSFPQSAPHGVVFLHVTYVPAQEKNFTTAPAICHDGKAHFPREGVFVSNGTHWFVTQRNFYEPQIITTDNTFVSGNCDVVIGIVNNTVYDPLQPELDSGGGSGGGQIYEGKLTAEGLRFGIVASRFNHALVDRLVEGAIDAIVRHGGREEDITLVRVPGSWEIPVAAGELARKEDIDAVIAIGVLIRGATPHFDYIASEVSKGLADLSLELRKPITFGVITADTLEQAIERAGTKHGNKGWEAALSAIEMANLFKSLR

SEQ ID NO: 7828 - protein, 1307 aa, Artificial Sequence
  SARS-CoV-2/Iceland/189/2020__EPI_ISL_417709 spike protein (1-1147)(K986P_V987P_T887W_A1020W) LumSynth construct
MFVFLVLLPLVSSQCVNLTTRTQLPPAYTNSFTRGVYYPDKVFRSSVLHSTQDLFLPFFSNVTWFHAIHVSGTNGTKRFDNPVLPFNDGVYFASTEKSNIIRGWIFGTTLDSKTQSLLIVNNATNVVIKVCEFQFCNDPFLGVYYHKNNKSWMESEFRVYSSANNCTFEYVSQPFLMDLEGKQGNFKNLREFVFKNIDGYFKIYSKHTPINLVRDLPQGFSALEPLVDLPIGINITRFQTLLALHRSYLTPGDSSSGWTAGAAAYYVGYLQPRTFLLKYNENGTITDAVDCALDPLSETKCTLKSFTVEKGIYQTSNFRVQPTESIVRFPNITNLCPFGEVFNATRFASVYAWNRKRISNCVADYSVLYNSASFSTFKCYGVSPTKLNDLCFTNVYADSFVIRGDEVRQIAPGQTGKIADYNYKLPDDFTGCVIAWNSNNLDSKVGGNYNYLYRLFRKSNLKPFERDISTEIYQAGSTPCNGVEGFNCYFPLQSYGFQPTNGVGYQPYRVVVLSFELLHAPATVCGPKKSTNLVKNKCVNFNFNGLTGTGVLTESNKKFLPFQQFGRDIADTTDAVRDPQTLEILDITPCSFGGVSVITPGTNTSNQVAVLYQGVNCTEVPVAIHADQLTPTWRVYSTGSNVFQTRAGCLIGAEHVNNSYECDIPIGAGICASYQTQTNSPRRARSVASQSIIAYTMSLGAENSVAYSNNSIAIPTNFTISVTTEILPVSMTKTSVDCTMYICGDSTECSNLLLQYGSFCTQLNRALTGIAVEQDKNTQEVFAQVKQIYKTPPIKDFGGFNFSQILPDPSKPSKRSFIEDLLFNKVTLADAGFTKQYGDCLGDIAARDLICAQKFNGLTVLPPLLTDEMIAQYTSALLAGTITSGWWFGAGAALQIPFAMQMAYRFNGIGVTQNVLYENQKLIANQFNSAIGKIQDSLSSTASALGKLQDVVNQNAQALNTLVKQLSSNFGAISSVLNDILSRLDPPEAEVQIDRLITGRLQSLQTYVTQQLIRAAEIRWSANLAATKMSECVLGQSKRVDFCGKGYHLMSFPQSAPHGVVFLHVTYVPAQEKNFTTAPAICHDGKAHFPREGVFVSNGTHWFVTQRNFYEPQIITTDNTFVSGNCDVVIGIVNNTVYDPLQPELDSGGGSGGGQIYEGKLTAEGLRFGIVASRFNHALVDRLVEGAIDAIVRHGGREEDITLVRVPGSWEIPVAAGELARKEDIDAVIAIGVLIRGATPHFDYIASEVSKGLADLSLELRKPITFGVITADTLEQAIERAGTKHGNKGWEAALSAIEMANLFKSLR

SEQ ID NO: 7829 - protein, 1307 aa, Artificial Sequence
  SARS-CoV-2/Australia/NSW56/2020__EPI_ISL_417408 spike protein (1-1147)(K986P_V987P_T887W_A1020W) LumSynth construct
MFVFLVLLPLVSSQCVNLTTRTQLPPAYTNSFTRGVYYPDKVFRSSVLHSTQDLFLPFFSNVTWFHAIHVSGTNGTKRFDNPVLPFNDGVYFASTEKSNIIRGWIFGTTLDSKTQSLLIVNNATNVVIKVCEFQFCNDPFLGVYYHKNNKSWMESEFRVYSSANNCTFEYVSQPFLMDLEGKQGNFKNLREFVFKNIDGYFKIYSKHTPINLVRDLPQGFSALEPLVDLPIGINITRFQTLLALHRSYLTPGDSSSGWTAGAAAYYVGYLQPRTFLLKYNENGTITDAVDCALDPLSETKCTLKSFTVEKGIYQTSNFRVQPTESIVRFPNITNLCPFGEVFNATRFASVYAWNRKRISNCVADYSVLYNSASFSTFKCYGVSPTKLNDLCFTNVYADSFVIRGDEVRQIAPGQTGKIADYNYKLPDDFTGCVIAWNSNNLDSKVGGNYNYLYRLFRKSNLKPFERDISTEIYQAGSTPCNGVEGFNCYFPLQSYGFQPTNGVGYQPYRVVVLSFELLHAPATVCGPKKSTNLVKNKCVNFNFNGLTGTGVLTESNKKFLPFQQFGRDIADTTDAVRDPQTLEILDITPCSFGGVSVITPGTNTSNQVAVLYQDVNCTEVPVAIHADQLTPTWRVYSTGSNVFQTRAGCLIGAEHVNNSYECDIPIGAGICASYQTQTNSPRRARSVASQSIIAYTMSLGAENSVAYSNNSIAIPTNFTISVTTEILPVSMTKTSVDCTMYICGDSTECSNLLLQYGSFCTQLNRALTGIAVEQDKNTQEVFAQVKQIYKTPPIKDFGGFNFSQILPDSSKPSKRSFIEDLLFNKVTLADAGFIKQYGDCLGDIAARDLICAQKFNGLTVLPPLLTDEMIAQYTSALLAGTITSGWWFGAGAALQIPFAMQMAYRFNGIGVTQNVLYENQKLIANQFNSAIGKIQDSLSSTASALGKLQDVVNQNAQALNTLVKQLSSNFGAISSVLNDILSRLDPPEAEVQIDRLITGRLQSLQTYVTQQLIRAAEIRWSANLAATKMSECVLGQSKRVDFCGKGYHLMSFPQSAPHGVVFLHVTYVPAQEKNFTTAPAICHDGKAHFPREGVFVSNGTHWFVTQRNFYEPQIITTDNTFVSGNCDVVIGIVNNTVYDPLQPELDSGGGSGGGQIYEGKLTAEGLRFGIVASRFNHALVDRLVEGAIDAIVRHGGREEDITLVRVPGSWEIPVAAGELARKEDIDAVIAIGVLIRGATPHFDYIASEVSKGLADLSLELRKPITFGVITADTLEQAIERAGTKHGNKGWEAALSAIEMANLFKSLR

SEQ ID NO: 7830 - protein, 1307 aa, Artificial Sequence
  SARS-CoV-2/Iceland/280/2020__EPI_ISL_417608 spike protein (1-1147)(K986P_V987P_T887W_A1020W) LumSynth construct
MFVFLVLLPLVSSQCVNLTTRTQLPPAYTNSFTRGVYYPDKVFRSSVLHSTQDLFLPFFSNVTWFHAIHVSGTNGTKRFDNPVLPFNDGVYFASTEKSNIIRGWIFGTTLDSKTQSLLIVNNATNVVIKVCEFQFCNDPFLGVYYHKNNKSWMESEFRVYSSANNCTFEYVSQPFLMDLEGKQGNFKNLREFVFKNIDGYFKIYSKHTPINLVRDLPQGFSALEPLVDLPIGINITRFQTLLALHRSYLTPGDSSSGWTAGAAAYYVGYLQPRTFLLKYNENGTITDAVDCALDPLSETKCTLKSFTVEKGIYQTSNFRVQPTESIVRFPNITNLCPFGEVFNATRFASVYAWNRKRISNCVADYSVLYNSASFSTFKCYGVSPTKLNDLCFTNVYADSFVIRGDEVRQIAPGQTGKIADYNYKLPDDFTGCVIAWNSNNLDSKVGGNYNYLYRLFRKSNLKPFERDISTEIYQAGSTPCNGVEGFNCYFPLQSYGFQPTNGVGYQPYRVVVLSFELLHAPATVCGPKKSTNLVKNKCVNFNFNGLTGTGVLTESNKKFLPFQQFGRDIADTTDAVRDPQTLEILDITPCSFGGVSVITPGTNTSNQVAVLYQGVNCTEVPVAIHADQLTPTWRVYSTGSNVFQTRAGCLIGAEHVNNSYECDIPIGAGICASYHTQTNSPRRARSVASQSIIAYTMSLGAENSVAYSNNSIAIPTNFTISVTTEILPVSMTKTSVDCTMYICGDSTECSNLLLQYGSFCTQLNRALTGIAVEQDKNTQEVFAQVKQIYKTPPIKDFGGFNFSQILPDPSKPSKRSFIEDLLFNKVTLADAGFIKQYGDCLGDIAARDLICAQKFNGLTVLPPLLTDEMIAQYTSALLAGTITSGWWFGAGAALQIPFAMQMAYRFNGIGVTQNVLYENQKLIANQFNSAIGKIQDSLSSTASALGKLQDVVNQNAQALNTLVKQLSSNFGAISSVLNDILSRLDPPEAEVQIDRLITGRLQSLQTYVTQQLIRAAEIRWSANLAATKMSECVLGQSKRVDFCGKGYHLMSFPQSAPHGVVFLHVTYVPAQEKNFTTAPAICHDGKAHFPREGVFVSNGTHWFVTQRNFYEPQIITTDNTFVSGNCDVVIGIVNNTVYDPLQPELDSGGGSGGGQIYEGKLTAEGLRFGIVASRFNHALVDRLVEGAIDAIVRHGGREEDITLVRVPGSWEIPVAAGELARKEDIDAVIAIGVLIRGATPHFDYIASEVSKGLADLSLELRKPITFGVITADTLEQAIERAGTKHGNKGWEAALSAIEMANLFKSLR

SEQ ID NO: 7831 - protein, 1307 aa, Artificial Sequence; identical to SEQ ID NO: 7786
  SARS-CoV-2/Iceland/247/2020__EPI_ISL_417575 spike protein (1-1147)(K986P_V987P_T887W_A1020W) LumSynth construct

SEQ ID NO: 7832 - protein, 1307 aa, Artificial Sequence
  SARS-CoV-2/Iceland/238/2020__EPI_ISL_417566 spike protein (1-1147)(K986P_V987P_T887W_A1020W) LumSynth construct
MFVFLVLLPLVSSQCVNLTTRTQLPPAYTNSFTRGVYYPDKVFRSSVLHSTQDLFLPFFSNVTWFHAIHVSGTNGTKRFDNPVLPFNDGVYFASTEKSNIIRGWIFGTTLDSKTQSLLIVNNATNVVIKVCEFQFCNDPFLGVYYHKNNKSWMESEFRVYSSANNCTFEYVSQPFLMDLEGKQGNFKNLREFVFKNIDGYFKIYSKHTPINLVRDLPQGFSALEPLVDLPIGINITRFQTLLALHRSYLTPGDSSSGWTAGAAAYYVGYLQPRTFLLKYNENGTITDAVDCALDPLSETKCTLKSFTVEKGIYQTSNFRVQPTESIVRFPNITNLCPFGEVFNATRFASVYAWNRKRISNCVADYSVLYNSASFSTFKCYGVSPTKLNDLCFTNVYADSFVIRGDEVRQIAPGQTGKIADYNYKLPDDFTGCVIAWNSNNLDSKVGGNYNYLYRLFRKSNLKPFERDISTEIYQAGSTPCNGVEGFNCYFPLQSYGFQPTNGVGYQPYRVVVLSFELLHAPATVCGPKKSTNLVKNKCVNFNFNGLTGTGVLTESNKKFLPFQQFGRDIADTTDAVRDPQTLEILDITPCSFGGVSVITPGTNTSNQVAVLYQGVNCTEVPVAIHADQLTPTWRVYSTGSNVFQTRAGCLIGAEHVNNSYECDIPIGAGICASYQTQTNSPRRARSVASQSIIAYTMSLGAENSVAYSNNSIAIPTNFTISVTTEILPVSMTKTSVDCTMYICGDSTECSNLLLQYGSFCTQLNRALTGIAVEQDKNTQEVFAQVKQIYKTPPIKDFGGFNFSQILPDPSKPSKRSFIEDLLFNKVTLADVGFIKQYGDCLGDIAARDLICAQKFNGLTVLPPLLTDEMIAQYTSALLAGTITSGWWFGAGAALQIPFAMQMAYRFNGIGVTQNVLYENQKLIANQFNSAIGKIQDSLSSTASALGKLQDVVNQNAQALNTLVKQLSSNFGAISSVLNDILSRLDPPEAEVQIDRLITGRLQSLQTYVTQQLIRAAEIRWSANLAATKMSECVLGQSKRVDFCGKGYHLMSFPQSAPHGVVFLHVTYVPAQEKNFTTAPAICHDGKAHFPREGVFVSNGTHWFVTQRNFYEPQIITTDNTFVSGNCDVVIGIVNNTVYDPLQPELDSGGGSGGGQIYEGKLTAEGLRFGIVASRFNHALVDRLVEGAIDAIVRHGGREEDITLVRVPGSWEIPVAAGELARKEDIDAVIAIGVLIRGATPHFDYIASEVSKGLADLSLELRKPITFGVITADTLEQAIERAGTKHGNKGWEAALSAIEMANLFKSLR

SEQ ID NO: 7833 - protein, 1307 aa, Artificial Sequence
  SARS-CoV-2/Greece/16/2020__EPI_ISL_418265 spike protein (1-1147)(K986P_V987P_T887W_A1020W) LumSynth construct
MFVFLVLLPLVSSQCVNLTTRTQLPPAYTNSFTRGVYYPDKVFRSSVLHSTQDLFLPFFSNVTWFHAIHVSGTNGTKRFDNPVLPFNDGVYFASTEKSNIIRGWIFGTTLDSKTQSLLIVNNATNVVIKVCEFQFCNDPFLGVYYHKNNKSWMESEFRVYSSANNCTFEYVSQPFLMDLEGKQGNFKNLREFVFKNVDGYFKIYSKHTPINLVRDLPQGFSALEPLVDLPIGINITRFQTLLALHRSYLTPGDSSSGWTAGAAAYYVGYLQPRTFLLKYNENGTITDAVDCALDPLSETKCTLKSFTVEKGIYQTSNFRVQPTESIVRFPNITNLCPFGEVFNATRFASVYAWNRKRISNCVADYSVLYNSASFSTFKCYGVSPTKLNDLCFTNVYADSFVIRGDEVRQIAPGQTGKIADYNYKLPDDFTGCVIAWNSNNLDSKVGGNYNYLYRLFRKSNLKPFERDISTEIYQAGSTPCNGVEGFNCYFPLQSYGFQPTNGVGYQPYRVVVLSFELLHAPATVCGPKKSTNLVKNKCVNFNFNGLTGTGVLTESNKKFLPFQQFGRDIADTTDAVRDPQTLEILDITPCSFGGVSVITPGTNTSNQVAVLYQDVNCTEVPVAIHADQLTPTWRVYSTGSNVFQTRAGCLIGAEHVNNSYECDIPIGAGICASYQTQTNSPRRARSVASQSIIAYTMSLGAENSVAYSNNSIAIPTNFTISVTTEILPVSMTKTSVDCTMYICGDSTECSNLLLQYGSFCTQLNRALTGIAVEQDKNTQEVFAQVKQIYKTPPIKDFGGFNFSQILPDPSKPSKRSFIEDLLFNKVTLADAGFIKQYGDCLGDIAARDLICAQKFNGLTVLPPLLTDEMIAQYTSALLAGTITSGWWFGAGAALQIPFAMQMAYRFNGIGVTQNVLYENQKLIANQFNSAIGKIQDSLSSTASALGKLQDVVNQNAQALNTLVKQLSSNFGAISSVLNDILSRLDPPEAEVQIDRLITGRLQSLQTYVTQQLIRAAEIRWSANLAATKMSECVLGQSKRVDFCGKGYHLMSFPQSAPHGVVFLHVTYVPAQEKNFTTAPAICHDGKAHFPREGVFVSNGTHWFVTQRNFYEPQIITTDNTFVSGNCDVVIGIVNNTVYDPLQPELDSGGGSGGGQIYEGKLTAEGLRFGIVASRFNHALVDRLVEGAIDAIVRHGGREEDITLVRVPGSWEIPVAAGELARKEDIDAVIAIGVLIRGATPHFDYIASEVSKGLADLSLELRKPITFGVITADTLEQAIERAGTKHGNKGWEAALSAIEMANLFKSLR

SEQ ID NO: 7834 - protein, 1307 aa, Artificial Sequence
  SARS-CoV-2/Iceland/319/2020__EPI_ISL_417648 spike protein (1-1147)(K986P_V987P_T887W_A1020W) LumSynth construct
MFVFLVLLPLVSSQCVNLTTRTQLPPAYTNSFTRGVYYPDKVFRSSVLHSTQDLFLPFFSNVTWFHAIHVSGTNGTKRFDNPVLPFNDGVYFASTEKSNIIRGWIFGTTLDSKTQSLLIVNNATNVVIKVCEFQFCNDPFLGVYYHKNNKSWMESEFRVYSSANNCTFEYVSQPFLIDLEGKQGNFKNLREFVFKNIDGYFKIYSKHTPINLVRDLPQGFSALEPLVDLPIGINITRFQTLLALHRSYLTPGDSSSGWTAGAAAYYVGYLQPRTFLLKYNENGTITDAVDCALDPLSETKCTLKSFTVEKGIYQTSNFRVQPTESIVRFPNITNLCPFGEVFNATRFASVYAWNRKRISNCVADYSVLYNSASFSTFKCYGVSPTKLNDLCFTNVYADSFVIRGDEVRQIAPGQTGKIADYNYKLPDDFTGCVIAWNSNNLDSKVGGNYNYLYRLFRKSNLKPFERDISTEIYQAGSTPCNGVEGFNCYFPLQSYGFQPTNGVGYQPYRVVVLSFELLHAPATVCGPKKSTNLVKNKCVNFNFNGLTGTGVLTESNKKFLPFQQFGRDIADTTDAVRDPQTLEILDITPCSFGGVSVITPGTNTSNQVAVLYQGVNCTEVPVAIHADQLTPTWRVYSTGSNVFQTRAGCLIGAEHVNNSYECDIPIGAGICASYQTQTNSPRRARSVASQSIIAYTMSLGAENSVAYSNNSIAIPTNFTISVTTEILPVSMTKTSVDCTMYICGDSTECSNLLLQYGSFCTQLNRALTGIAVEQDKNTQEVFAQVKQIYKTPPIKDFGGFNFSQILPDPSKPSKRSFIEDLLFNKVTLADAGFIKQYGDCLGDIAARDLICAQKFNGLTVLPPLLTDEMIAQYTSALLAGTITSGWWFGAGAALQIPFAMQMAYRFNGIGVTQNVLYENQKLIANQFNSAIGKIQDSLSSTASALGKLQDVVNQNAQALNTLVKQLSSNFGAISSVLNDILSRLDPPEAEVQIDRLITGRLQSLQTYVTQQLIRAAEIRWSANLAATKMSECVLGQSKRVDFCGKGYHLMSFPQSAPHGVVFLHVTYVPAQEKNFTTAPAICHDGKAHFPREGVFVSNGTHWFVTQRNFYEPQIITTDNTFVSGNCDVVIGIVNNTVYDPLQPELDSGGGSGGGQIYEGKLTAEGLRFGIVASRFNHALVDRLVEGAIDAIVRHGGREEDITLVRVPGSWEIPVAAGELARKEDIDAVIAIGVLIRGATPHFDYIASEVSKGLADLSLELRKPITFGVITADTLEQAIERAGTKHGNKGWEAALSAIEMANLFKSLR

SEQ ID NO: 7835 - protein, 1307 aa, Artificial Sequence
  SARS-CoV-2/Congo/94/2020__EPI_ISL_417947 spike protein (1-1147)(K986P_V987P_T887W_A1020W) LumSynth construct
MFVFLVLLPLVSSQCVNLTTRTQLPPAYTNSFTRGVYYPDKVFRSSVLHSTQDLFLPFFSNVTWFHAIHVSGTNGTKRFDNPVLPFNDGVYFASTEKSNIIRGWIFGTTLDSKTQSLLIVNNATNVVIKVCEFQFCNDPFLGVYYHKNNKSWMESEFRVYSSANNCTFEYVSQPFLMDLEGKQGNFKNLREFVFKNIDGYFKIYSKHTPINLVRDLPQGFSALEPLVDLPIGINITRFQTLLALHRSYLTPGDSSSGWTAGAAAYYVGYLQPRTFLLKYNENGTITDAVDCALDPLSETKCTLKSFTVEKGIYQTSNFRVQPTESIVRFPNITNLCPFGEVFNATRFASVYAWNRKRISNCVADYSVLYNSASFSTFKCYGVSPTKLNDLCFTNVYADSFVIRGDEVRQIAPGQTGKIADYNYKLPDDFTGCVIAWNSNNLDSKVGGNYNYLYRLFRKSNLKPFERDISTEIYQAGSTPCNGVEGFNCYFPLQSYGFQPTNGVGYQPYRVVVLSFELLHAPATVCGPKKSTNLVKNKCVNFNFNGLTGTGVLTESNKKFLPFQQFGRDIADTTDAVRDPQTLEILDITPCSFGGVSVITPGTNTSNQVAVLYQGVNCTEVPVAIHADQLTPTWRVYSTGSNVFQTRAGCLIGAEHVNNSYECDIPIGAGICASYQTQTNSPRRARSVASQSIIAYTMSLGAENSVAYSNNSIAIPTNFTISVTTEILPVSMTKTSVDCTMYICGDSTECSNLLLQYGSFCTQLNRALTGIAVEQDKNTQEVFAQVKQIYKTPPIKDFGGFNFSQILPDPSKPSKRSFIEDILFNKVTLADAGFIKQYGDCLGDIAARDLICAQKFNGLTVLPPLLTDEMIAQYTSALLAGTITSGWWFGAGAALQIPFAMQMAYRFNGIGVTQNVLYENQKLIANQFNSAIGKIQDSLSSTASALGKLQDVVNQNAQALNTLVKQLSSNFGAISSVLNDILSRLDPPEAEVQIDRLITGRLQSLQTYVTQQLIRAAEIRWSANLAATKMSECVLGQSKRVDFCGKGYHLMSFPQSAPHGVVFLHVTYVPAQEKNFTTAPAICHDGKAHFPREGVFVSNGTHWFVTQRNFYEPQIITTDNTFVSGNCDVVIGIVNNTVYDPLQPELDSGGGSGGGQIYEGKLTAEGLRFGIVASRFNHALVDRLVEGAIDAIVRHGGREEDITLVRVPGSWEIPVAAGELARKEDIDAVIAIGVLIRGATPHFDYIASEVSKGLADLSLELRKPITFGVITADTLEQAIERAGTKHGNKGWEAALSAIEMANLFKSLR

SEQ ID NO: 7836 - protein, 1307 aa, Artificial Sequence
  SARS-CoV-2/Congo/158/2020__EPI_ISL_417950 spike protein (1-1147)(K986P_V987P_T887W_A1020W) LumSynth construct
MFVFLVLLPLVSSQCVNLTTRTQLPPAYTNSFTRGVYYPDKVFRSSVLHSTQDLFLPFFSNVTWFHAIHVSGTNGTKRFDNPVLPFNDGVYFASTEKSNIIRGWIFGTTLDSKTQSLLIVNNATNVVIKVCEFQFCNDPFLGVYYHKNNKSWMESEFRVYSSANNCTFEYVSQPFLMDLEGKQGNFKNLREFVFKNIDGYFKIYSKHTPINLVRDLPQGFSALEPLVDLPIGINITRFQTLLALHRSYLTPGDSSSGWTAGAAAYYVGYLQPRTFLLKYNENGTITDAVDCALDPLSETKCTLKSFTVEKGIYQTSNFRVQPTESIVRFPNITNLCPFGEVFNATRFASVYAWNRKRISNCVADYSVLYNSASFSTFKCYGVSPTKLNDLCFTNVYADSFVIRGDEVRQIAPGQTGKIADYNYKLPDDFTGCVIAWNSNNLDSKVGGNYNYLYRLFRKSNLKPFERDISTEIYQAGSTPCNGVEGFNCYFPLQSYGFQPTNGVGYQPYRVVVLSFELLHAPATVCGPKKSTNLVKNKCVNFNFNGLTGTGVLTESNKKFLPFQQFGRDIADTTDAVRDPQTLEILDITPCSFGGVSVITPGTNTSNQVAVLYQDVNCTEVPVAIHADQLTPTWRVYSTGSNVFQTRAGCLIGAEHVNNSYECDIPIGAGICASYQTQTNSPRRARSVASQSIIAYTMSLGAENSVAYSNNSIAIPTNFTISVTTEILPVSMTKTSVDCTMYICGDSTECSNLLLQYGSFCTQLNRALTGIAVEQDKNTQEVFAQVKQIYKTPPIKDFGGFNFSQILPDPSKPSKRSFIEDLLFNKVTLADAGFIKQYGDCLGDIAARDLICAQKFNGLTVLPPLLTDEMIAQYTSALLAGTITSGWWFGAGAALQIPFAMQMAYRFNGIGVTQNVLYENQKLIANQFNSAIGKIQDSLSSTASALGKLQDVVNQNAQALNTLVKQLSSNFGAISSVLNDILSRLDPPEAEVQIDRLITGRLQSLQTYVTQQLIRAAEIRWSANLAATKMSECVLGQSKRVDFCGKGYHLMSFPQSAPHGVVFLHVTYVPAQEKNFTTAPAICHDGKAHFPREGVFVSNGTHWFVTQRNFYEPQIITTDNTFLSGNCDVVIGIVNNTVYDPLQPELDSGGGSGGGQIYEGKLTAEGLRFGIVASRFNHALVDRLVEGAIDAIVRHGGREEDITLVRVPGSWEIPVAAGELARKEDIDAVIAIGVLIRGATPHFDYIASEVSKGLADLSLELRKPITFGVITADTLEQAIERAGTKHGNKGWEAALSAIEMANLFKSLR

SEQ ID NO: 7837 - protein, 1307 aa, Artificial Sequence
  SARS-CoV-2/USA/UT-00034/2020__EPI_ISL_417977 spike protein (1-1147)(K986P_V987P_T887W_A1020W) LumSynth construct
MFVFLVLLPLVSSQCVNLTTRTQLPPAYTNSFTRGVYYPDKVFRSSVLHSTQDLFLPFFSNVTWFHAIHVSGTNGTKRFDNPVLPFNDGVYFASTEKSNIIRGWIFGTTLDSKTQSLLIVNNATNVVIKVCEFQFCNDPFLGVYYYKNNKSWMESEFRVYSSANNCTFEYVSQPFLMDLEGKQGNFKNLREFVFKNIDGYFKIYSKHTPINLVRDLPQGFSALEPLVDLPIGINITRFQTLLALHRSYLTPGDSSSGWTAGAAAYYVGYLQPRTFLLKYNENGTITDAVDCALDPLSETKCTLKSFTVEKGIYQTSNFRVQPTESIVRFPNITNLCPFGEVFNATRFASVYAWNRKRISNCVADYSVLYNSASFSTFKCYGVSPTKLNDLCFTNVYADSFVIRGDEVRQIAPGQTGKIADYNYKLPDDFTGCVIAWNSNNLDSKVGGNYNYLYRLFRKSNLKPFERDISTEIYQAGSTPCNGVEGFNCYFPLQSYGFQPTNGVGYQPYRVVVLSFELLHAPATVCGPKKSTNLVKNKCVNFNFNGLTGTGVLTESNKKFLPFQQFGRDIADTTDAVRDPQTLEILDITPCSFGGVSVITPGTNTSNQVAVLYQGVNCTEVPVAIHADQLTPTWRVYSTGSNVFQTRAGCLIGAEHVNNSYECDIPIGAGICASYQTQTNSPRRARSVASQSIIAYTMSLGAENSVAYSNNSIAIPTNFTISVTTEILPVSMTKTSVDCTMYICGDSTECSNLLLQYGSFCTQLNRALTGIAVEQDKNTQEVFAQVKQIYKTPPIKDFGGFNFSQILPDPSKPSKRSFIEDLLFNKVTLADAGFIKQYGDCLGDIAARDLICAQKFNGLTVLPPLLTDEMIAQYTSALLAGTITSGWWFGAGAALQIPFAMQMAYRFNGIGVTQNVLYENQKLIANQFNSAIGKIQDSLSSTASALGKLQDVVNQNAQALNTLVKQLSSNFGAISSVLNDILSRLDPPEAEVQIDRLITGRLQSLQTYVTQQLIRAAEIRWSANLAATKMSECVLGQSKRVDFCGKGYHLMSFPQSAPHGVVFLHVTYVPAQEKNFTTAPAICHDGKAHFPREGVFVSNGTHWFVTQRNFYEPQIITTDNTFVSGNCDVVIGIVNNTVYDPLQPELDSGGGSGGGQIYEGKLTAEGLRFGIVASRFNHALVDRLVEGAIDAIVRHGGREEDITLVRVPGSWEIPVAAGELARKEDIDAVIAIGVLIRGATPHFDYIASEVSKGLADLSLELRKPITFGVITADTLEQAIERAGTKHGNKGWEAALSAIEMANLFKSLR

SEQ ID NO: 7838 - protein, 1307 aa, Artificial Sequence
  SARS-CoV-2/USA/UT-00033/2020__EPI_ISL_417976 spike protein (1-1147)(K986P_V987P_T887W_A1020W) LumSynth construct
MFVFLVLLPLVSSQCVNLTTRTQLPPAYTNSFTRGVYYPDKVFRSSVLHSTQDLFLPFFSNVTWFHAIHVSGTNGTKRFDNPVLPFNDGVYFASTEKSNIIRGWIFGTTLDSKTQSLLIVNNATNVVIKVCEFQFCNDPFLGVYYHKNNKSWMESEFRVYSSANNCTFEYVSQPFLMDLEGKQGNFKNLREFVFKNIDGYFKIYSKHTPINLVRDLPQGFSALEPLVDLPIGINITRFQTLLALHRSYLTPGDSSSGLTAGAAAYYVGYLQPRTFLLKYNENGTITDAVDCALDPLSETKCTLKSFTVEKGIYQTSNFRVQPTESIVRFPNITNLCPFGEVFNATRFASVYAWNRKRISNCVADYSVLYNSASFSTFKCYGVSPTKLNDLCFTNVYADSFVIRGDEVRQIAPGQTGKIADYNYKLPDDFTGCVIAWNSNNLDSKVGGNYNYLYRLFRKSNLKPFERDISTEIYQAGSTPCNGVEGFNCYFPLQSYGFQPTNGVGYQPYRVVVLSFELLHAPATVCGPKKSTNLVKNKCVNFNFNGLTGTGVLTESNKKFLPFQQFGRDIADTTDAVRDPQTLEILDITPCSFGGVSVITPGTNTSNQVAVLYQGVNCTEVPVAIHADQLTPTWRVYSTGSNVFQTRAGCLIGAEHVNNSYECDIPIGAGICASYQTQTNSPRRARSVASQSIIAYTMSLGAENSVAYSNNSIAIPTNFTISVTTEILPVSMTKTSVDCTMYICGDSTECSNLLLQYGSFCTQLNRALTGIAVEQDKNTQEVFAQVKQIYKTPPIKDFGGFNFSQILPDPSKPSKRSFIEDLLFNKVTLADAGFIKQYGDCLGDIAARDLICAQKFNGLTVLPPLLTDEMIAQYTSALLAGTITSGWWFGAGAALQIPFAMQMAYRFNGIGVTQNVLYENQKLIANQFNSAIGKIQDSLSSTASALGKLQDVVNQNAQALNTLVKQLSSNFGAISSVLNDILSRLDPPEAEVQIDRLITGRLQSLQTYVTQQLIRAAEIRWSANLAATKMSECVLGQSKRVDFCGKGYHLMSFPQSAPHGVVFLHVTYVPAQEKNFTTAPAICHDGKAHFPREGVFVSNGTHWFVTQRNFYEPQIITTDNTFVSGNCDVVIGIVNNTVYDPLQPELDSGGGSGGGQIYEGKLTAEGLRFGIVASRFNHALVDRLVEGAIDAIVRHGGREEDITLVRVPGSWEIPVAAGELARKEDIDAVIAIGVLIRGATPHFDYIASEVSKGLADLSLELRKPITFGVITADTLEQAIERAGTKHGNKGWEAALSAIEMANLFKSLR

SEQ ID NO: 7839 - protein, 1307 aa, Artificial Sequence
  SARS-CoV-2/USA/WI-13/2020__EPI_ISL_417516 spike protein (1-1147)(K986P_V987P_T887W_A1020W) LumSynth construct
MFVFLVLLPLVSSQCVNLTTRTQLPPAYTNSFTRGVYYPDKVFRSSVLHSTQDLFLPFFSNVTWFHAIHVSGTNGTKRFDNPVLPFNDGVYFASTEKSNIIRGWIFGTTLDSKTQSLLIVNNATNVVIKVCEFQFCNDPFLGVYYHKNNKSWMESEFRVYSSANNCTFEYVSQPFLMDLEGKQGNFKNLREFVFKNIDGYFKIYSKHTPINLVRDLPQGFSALEPLVDLPIGINITRFQTLLALHRSYLTPGDSSSGWTAGAAAYYVGYLQPRTFLLKYNENGTITDAVDCALDPLSETKCTLKSFTVEKGIYQTSNFRVLPTESIVRFPNITNLCPFGEVFNATRFASVYAWNRKRISNCVADYSVLYNSASFSTFKCYGVSPTKLNDLCFTNVYADSFVIRGDEVRQIAPGQTGKIADYNYKLPDDFTGCVIAWNSNNLDSKVGGNYNYLYRLFRKSNLKPFERDISTEIYQAGSTPCNGVEGFNCYFPLQSYGFQPTNGVGYQPYRVVVLSFELLHAPATVCGPKKSTNLVKNKCVNFNFNGLTGTGVLTESNKKFLPFQQFGRDIADTTDAVRDPQTLEILDITPCSFGGVSVITPGTNTSNQVAVLYQGVNCTEVPVAIHADQLTPTWRVYSTGSNVFQTRAGCLIGAEHVNNSYECDIPIGAGICASYQTQTNSPRRARSVASQSIIAYTMSLGAENSVAYSNNSIAIPTNFTISVTTEILPVSMTKTSVDCTMYICGDSTECSNLLLQYGSFCTQLNRALTGIAVEQDKNTQEVFAQVKQIYKTPPIKDFGGFNFSQILPDPSKPSKRSFIEDLLFNKVTLADAGFIKQYGDCLGDIAARDLICAQKFNGLTVLPPLLTDEMIAQYTSALLAGTITSGWWFGAGAALQIPFAMQMAYRFNGIGVTQNVLYENQKLIANQFNSAIGKIQDSLSSTASALGKLQDVVNQNAQALNTLVKQLSSNFGAISSVLNDILSRLDPPEAEVQIDRLITGRLQSLQTYVTQQLIRAAEIRWSANLAATKMSECVLGQSKRVDFCGKGYHLMSFPQSAPHGVVFLHVTYVPAQEKNFTTAPAICHDGKAHFPREGVFVSNGTHWFVTQRNFYEPQIITTDNTFVSGNCDVVIGIVNNTVYDPLQPELDSGGGSGGGQIYEGKLTAEGLRFGIVASRFNHALVDRLVEGAIDAIVRHGGREEDITLVRVPGSWEIPVAAGELARKEDIDAVIAIGVLIRGATPHFDYIASEVSKGLADLSLELRKPITFGVITADTLEQAIERAGTKHGNKGWEAALSAIEMANLFKSLR

SEQ ID NO: 7840 - protein, 1306 aa, Artificial Sequence
  SARS-CoV-2/India/1-27/2020__EPI_ISL_413522 spike protein (1-1146)(K985P_V986P_T886W_A1019W) LumSynth construct
MFVFLVLLPLVSSQCVNLTTRTQLPPAYTNSFTRGVYYPDKVFRSSVLHSTQDLFLPFFSNVTWFHAIHVSGTNGTKRFDNPVLPFNDGVYFASTEKSNIIRGWIFGTTLDSKTQSLLIVNNATNVVIKVCEFQFCNDPFLGVYHKNNKSWMESEFRVYSSANNCTFEYVSQPFLMDLEGKQGNFKNLREFVFKNIDGYFKIYSKHTPINLVRDLPQGFSALEPLVDLPIGINITRFQTLLALHRSYLTPGDSSSGWTAGAAAYYVGYLQPRTFLLKYNENGTITDAVDCALDPLSETKCTLKSFTVEKGIYQTSNFRVQPTESIVRFPNITNLCPFGEVFNATRFASVYAWNRKRISNCVADYSVLYNSASFSTFKCYGVSPTKLNDLCFTNVYADSFVIRGDEVIQIAPGQTGKIADYNYKLPDDFTGCVIAWNSNNLDSKVGGNYNYLYRLFRKSNLKPFERDISTEIYQAGSTPCNGVEGFNCYFPLQSYGFQPTNGVGYQPYRVVVLSFELLHAPATVCGPKKSTNLVKNKCVNFNFNGLTGTGVLTESNKKFLPFQQFGRDIADTTDAVRDPQTLEILDITPCSFGGVSVITPGTNTSNQVAVLYQDVNCTEVPVAIHADQLTPTWRVYSTGSNVFQTRAGCLIGAEHVNNSYECDIPIGAGICASYQTQTNSPRRARSVASQSIIAYTMSLGAENSVAYSNNSIAIPTNFTISVTTEILPVSMTKTSVDCTMYICGDSTECSNLLLQYGSFCTQLNRALTGIAVEQDKNTQEVFAQVKQIYKTPPIKDFGGFNFSQILPDPSKPSKRSFIEDLLFNKVTLADAGFIKQYGDCLGDIAARDLICAQKFNGLTVLPPLLTDEMIAQYTSALLAGTITSGWWFGAGAALQIPFAMQMAYRFNGIGVTQNVLYENQKLIANQFNSAIGKIQDSLSSTASALGKLQDVVNQNAQALNTLVKQLSSNFGAISSVLNDILSRLDPPEAEVQIDRLITGRLQSLQTYVTQQLIRAAEIRWSANLAATKMSECVLGQSKRVDFCGKGYHLMSFPQSAPHGVVFLHVTYVPAQEKNFTTAPAICHDGKAHFPREGVFVSNGTHWFVTQRNFYEPQIITTDNTFVSGNCDVVIGIVNNTVYDPLQPELDSGGGSGGGQIYEGKLTAEGLRFGIVASRFNHALVDRLVEGAIDAIVRHGGREEDITLVRVPGSWEIPVAAGELARKEDIDAVIAIGVLIRGATPHFDYIASEVSKGLADLSLELRKPITFGVITADTLEQAIERAGTKHGNKGWEAALSAIEMANLFKSLR

SEQ ID NO: 7841 - protein, 1301 aa, Artificial Sequence
  SARS-CoV-2/pangolin/Guangxi/P4L/2017__EPI_ISL_410538 spike protein (1-1141)(K980P_V981P_T881W_A1014W) LumSynth construct
MFVFLFVLPLVSSQCVNLTTRTGIPPGYTNSSTRGVYYPDKVFRSSILHLTQDLFLPFFSNVTWFNTINYQGGFKKFDNPVLPFNDGVYFASTEKSNIIRGWIFGTTLDARTQSLLIVNNATNVVIKVCEFQFCTDPFLGVYYHNNNKTWVENEFRVYSSANNCTFEYISQPFLMDLEGKQGNFKNLREFVFKNVDGYFKIYSKHTPIDLVRDLPRGFAALEPLVDLPIGINITRFQTLLALHRSYLTPGNLESGWTTGAAAYYVGYLQQRTFLLSYNQNGTITDAVDCSLDPLSETKCTLKSLTVEKGIYQTSNFRVQPTISIVRFPNITNLCPFGEVFNASKFASVYAWNRKRISNCVADYSVLYNSTSFSTFKCYGVSPTKLNDLCFTNVYADSFVVKGDEVRQIAPGQTGVIADYNYKLPDDFTGCVIAWNSVKQDALTGGNYGYLYRLFRKSKLKPFERDISTEIYQAGSTPCNGQVGLNCYYPLERYGFHPTTGVNYQPFRVVVLSFELLNGPATVCGPKLSTTLVKDKCVNFNFNGLTGTGVLTTSKKQFLPFQQFGRDISDTTDAVRDPQTLEILDITPCSFGGVSVITPGTNTSNQVAVLYQDVNCTEVPMAIHAEQLTPAWRVYSAGANVFQTRAGCLVGAEHVNNSYECDIPVGAGICASYHSMSSLRSVNQRSIIAYTMSLGAENSVAYSNNSIAIPTNFTISVTTEILPVSMTKTSVDCTMYICGDSIECSNLLLQYGSFCTQLNRALTGIAVEQDKNTQEVFAQVKQIYKTPPIKDFGGFNFSQILPDPSKPSKRSFIEDLLFNKVTLADAGFIKQYGDCLGDIAARDLICAQKFNGLTVLPPLLTDEMIAQYTSALLAGTITSGWWFGAGAALQIPFAMQMAYRFNGIGVTQNVLYENQKLIANQFNSAIGKIQDSLSSTASALGKLQDVVNQNAQALNTLVKQLSSNFGAISSVLNDILSRLDPPEAEVQIDRLITGRLQSLQTYVTQQLIRAAEIRWSANLAATKMSECVLGQSKRVDFCGKGYHLMSFPQSAPHGVVFLHVTYVPAQEKNFTTAPAICHEGKAHFPREGVFVSNGTHWFITQRNFYEPQIITTDNTFVSGSCDVVIGIVNNTVYDPLQPELDSGGGSGGGQIYEGKLTAEGLRFGIVASRFNHALVDRLVEGAIDAIVRHGGREEDITLVRVPGSWEIPVAAGELARKEDIDAVIAIGVLIRGATPHFDYIASEVSKGLADLSLELRKPITFGVITADTLEQAIERAGTKHGNKGWEAALSAIEMANLFKSLR

SEQ ID NO: 7842 - protein, 1301 aa, Artificial Sequence
  SARS-CoV-2/pangolin/Guangxi/P5L/2017__EPI_ISL_410540 spike protein (1-1141)(K980P_V981P_T881W_A1014W) LumSynth construct
MFVFLFVLPLVSSQCVNLTTRTGIPPGYTNSSTRGVYYPDKVFRSSILHLTQDLFLPFFSNVTWFNTINYQGGFKKFDNPVLPFNDGVYFASTEKSNIIRGWIFGTTLDARTQSLLIVNNATNVVIKVCEFQFCTDPFLGVYYHNNNKTWVENEFRVYSSANNCTFEYISQPFLMDLEGKQGNFKNLREFVFKNVDGYFKIYSKHTPIDLVRDLPRGFAALEPLVDLPIGINITRFQTLLALHRSYLTPGKLESGWTTGAAAYYVGYLQQRTFLLSYNQNGTITDAVDCSLDPLSETKCTLKSLTVEKGIYQTSNFRVQPTISIVRFPNITNLCPFGEVFNASKFASVYAWNRKRISNCVADYSVLYNSTSFSTFKCYGVSPTKLNDLCFTNVYADSFVVKGDEVRQIAPGQTGVIADYNYKLPDDFTGCVIAWNSVKQDALTGGNYGYLYRLFRKSKLKPFERDISTEIYQAGSTPCNGQVGLNCYYPLERYGFHPTTGVNYQPFRVVVLSFELLNGPATVCGPKLSTTLVKDKCVNFNFNGLTGTGVLTTSKKQFLPFQQFGRDISDTTDAVRDPQTLEILDITPCSFGGVSVITPGTNTSNQVAVLYQDVNCTEVPMAIHAEQLTPAWRVYSAGANVFQTRAGCLVGAEHVNNSYECDIPVGAGICASYHSMSSFRSVNQRSIIAYTMSLGAENSVAYSNNSIAIPTNFTISVTTEILPVSMTKTSVDCTMYICGDSIECSNLLLQYGSFCTQLNRALTGIAVEQDKNTQEVFAQVKQIYKTPPIKDFGGFNFSQILPDPSKPSKRSFIEDLLFNKVTLADAGFIKQYGDCLGDIAARDLICAQKFNGLTVLPPLLTDEMIAQYTSALLAGTITSGWWFGAGAALQIPFAMQMAYRFNGIGVTQNVLYENQKLIANQFNSAIGKIQDSLSSTASALGKLQDVVNQNAQALNTLVKQLSSNFGAISSVLNDILSRLDPPEAEVQIDRLITGRLQSLQTYVTQQLIRAAEIRWSANLAATKMSECVLGQSKRVDFCGKGYHLMSFPQSAPHGVVFLHVTYVPAQEKNFTTAPAICHEGKAHFPREGVFVSNGTHWFITQRNFYEPQIITTDNTFVSGSCDVVIGIVNNTVYDPLQPELDSGGGSGGGQIYEGKLTAEGLRFGIVASRFNHALVDRLVEGAIDAIVRHGGREEDITLVRVPGSWEIPVAAGELARKEDIDAVIAIGVLIRGATPHFDYIASEVSKGLADLSLELRKPITFGVITADTLEQAIERAGTKHGNKGWEAALSAIEMANLFKSLR

SEQ ID NO: 7843 - protein, 1301 aa, Artificial Sequence
  SARS-CoV-2/pangolin/Guangxi/P5E/2017__EPI_ISL_410541 spike protein (1-1141)(K980P_V981P_T881W_A1014W) LumSynth construct
MFVFLFVLPLVSSQCVNLTTRTGIPPGYTNSSTRGVYYPDKVFRSSILHLTQDLFLPFFSNVTWFNTITYQGGSKKFDNPVLPFNDGVYFASTEKSNIIRGWIFGTTLDARTQSLLIVNNATNVVIKVCEFQFCTDPFLGVYYHNNNKTWVENEFRVYSSANNCTFEYISQPFLMDLEGKQGNFKNLREFVFKNVDGYFKIYSKHTPIDLVRDLPRGFAALEPLVDLPIGINITRFQTLLALHRSYLTPGKLESGWTTGAAAYYVGYLQQRTFLLSYNQNGTITDAVDCSLDPLSETKCTLKSLTVEKGIYQTSNFRVQPTISIVRFPNITNLCPFGEVFNASKFASVYAWNRKRISNCVADYSVLYNSTSFSTFKCYGVSPTKLNDLCFTNVYADSFVVKGDEVRQIAPGQTGVIADYNYKLPDDFTGCVIAWNSVKQDALTGDNYGYLYRLFRKSKLKPFERDISTEIYQAGSTPCNGQVGLNCYYPLERYGFHPTTGVNYQPFRVVVLSFELLNGPATVCGPKLSTTLVKDKCVNFNFNGLTGTGVLTTSKKQFLPFQQFGRDISDTTDAVRDPQTLEILDITPCSFGGVSVITPGTNTSNQVAVLYQDVNCTEVPMAIHAEQLTPAWRVYSAGANVFQTRAGCLVGAEHVNNSYECDIPVGAGICASYHSMSSFRSVNQRSIIAYTMSLGAENSVAYSNNSIAIPTNFTISVTTEILPVSMTKTSVDCTMYICGDSIECSNLLLQYGSFCTQLNRALTGIAVEQDKNTQEVFAQVKQIYKTPPIKDFGGFNFSQILPDPSKPSKRSFIEDLLFNKVTLADAGFIKQYGDCLGDIAARDLICAQKFNGLTVLPPLLTDEMIAQYTSALLAGTITSGWWFGAGAALQIPFAMQMAYRFNGIGVTQNVLYENQKLIANQFNSAIGKIQDSLSSTASALGKLQDVVNQNAQALNTLVKQLSSNFGAISSVLNDILSRLDPPEAEVQIDRLITGRLQSLQTYVTQQLIRAAEIRWSANLAATKMSECVLGQSKRVDFCGKGYHLMSFPQSAPHGVVFLHVTYVPAQEKNFTTAPAICHEGKAHFPREGVFVSNGTHWFITQRNFYEPQIITTDNTFVSGSCDVVIGIVNNTVYDPLQPELDSGGGSGGGQIYEGKLTAEGLRFGIVASRFNHALVDRLVEGAIDAIVRHGGREEDITLVRVPGSWEIPVAAGELARKEDIDAVIAIGVLIRGATPHFDYIASEVSKGLADLSLELRKPITFGVITADTLEQAIERAGTKHGNKGWEAALSAIEMANLFKSLR

SEQ ID NO: 7844 - protein, 1299 aa, Artificial Sequence
  SARS-CoV-2/pangolin/Guangxi/P1E/2017__EPI_ISL_410539 spike protein (1-1139)(K978P_V979P_T879W_A1012W) LumSynth construct
MFVFLFVLPLVSSQCVNLTTRTGIQPGYTNSSTRGVYYPDKVFRSSILHLTQDLFLPFFSNVTWFNTINYQGGFKKFDNPVLPFNDGVYFASTEKSNIIRGWIFGTTLDARTQSLLIVNNATNVVIKVCEFQFCTDPFLGVYYHNNNKTWVENEFRVYSSANNCTFEYISQPFLMDLEGKQGNFKNLREFVFKNVDGYFKIYSKHTPIDLVRDLPRGFAALEPLVDLPIGINITRFQTLLALHRSYLTPGKLESGWTTGAAAYYVGYLQQRTFLLSYNQNGTITDAVDCSLDPLSETKCTLKSLTVEKGIYQTSNFRVQPTISIVRFPNITNLCPFGEVFNASKFASVYAWNRKRISNCVADYSVLYNSTSFSTFKCYGVSPTKLNDLCFTNVYADSFVVKGDEVRQIAPGQTGVIADYNYKLPDDFTGCVIAWNSVKQDALTGGNYLYRLFRKSKLKPFERDISTEIYQAGSTPCNGQVGLNCYYPLERYGFHPTTGVNYQPFRVVVLSFELLNGPATVCGPKLSTTLVKDKCVNFNFNGLTGTGVLTTSKKQFLPFQQFGRDISDTTDAVRDPQTLEILDITPCSFGGVSVITPGTNTSNQVAVLYQDVNCTEVPMAIHAEQLTPAWRVYSAGANVFQTRAGCLVGAEHVNNSYECDIPVGAGICASYHSMSSLRSVNQRSIIAYTMSLGAENSVAYSNNSIAIPTNFTISVTTEILPVSMTKTSVDCTMYICGDSIECSNLLLQYGSFCTQLNRALTGIAVEQDKNTQEVFAQVKQIYKTPPIKDFGGFNFSQILPDPSKPSKRSFIEDLLFNKVTLADAGFIKQYGDCLGDIAARDLICAQKFNGLTVLPPLLTDEMIAQYTSALLAGTITSGWWFGAGAALQIPFAMQMAYRFNGIGVTQNVLYENQKLIANQFNSAIGKIQDSLSSTASALGKLQDVVNQNAQALNTLVKQLSSNFGAISSVLNDILSRLDPPEAEVQIDRLITGRLQSLQTYVTQQLIRAAEIRWSANLAATKMSECVLGQSKRVDFCGKGYHLMSFPQSAPHGVVFLHVTYVPAQEKNFTTAPAICHEGKAHFPREGVFVSNGTHWFITQRNFYEPQIITTDNTFVSGSCDVVIGIVNNTVYDPLQPELDSGGGSGGGQIYEGKLTAEGLRFGIVASRFNHALVDRLVEGAIDAIVRHGGREEDITLVRVPGSWEIPVAAGELARKEDIDAVIAIGVLIRGATPHFDYIASEVSKGLADLSLELRKPITFGVITADTLEQAIERAGTKHGNKGWEAALSAIEMANLFKSLR

SEQ ID NO: 7845 - protein, 1307 aa, Artificial Sequence
  SARS-CoV-2/Wuhan/WIV05/2019__EPI_ISL_402128 spike protein (1-1147)(K986P_V987P_P1069F) LumSynth construct
MFVFLVLLPLVSSQCVNLTTRTQLPPAYTNSFTRGVYYPDKVFRSSVLHSTQDLFLPFFSNVTWFHAIHVSGTNGTKRFDNPVLPFNDGVYFASTEKSNIIRGWIFGTTLDSKTQSLLIVNNATNVVIKVCEFQFCNDPFLGVYYHKNNKSWMESEFRVYSSANNCTFEYVSQPFLMDLEGKQGNFKNLREFVFKNIDGYFKIYSKHTPINLVRDLPQGFSALEPLVDLPIGINITRFQTLLALHRSYLTPGDSSSGWTAGAAAYYVGYLQPRTFLLKYNENGTITDAVDCALDPLSETKCTLKSFTVEKGIYQTSNFRVQPTESIVRFPNITNLCPFGEVFNATRFASVYAWNRKRISNCVADYSVLYNSASFSTFKCYGVSPTKLNDLCFTNVYADSFVIRGDEVRQIAPGQTGKIADYNYKLPDDFTGCVIAWNSNNLDSKVGGNYNYLYRLFRKSNLKPFERDISTEIYQAGSTPCNGVEGFNCYFPLQSYGFQPTNGVGYQPYRVVVLSFELLHAPATVCGPKKSTNLVKNKCVNFNFNGLTGTGVLTESNKKFLPFQQFGRDIADTTDAVRDPQTLEILDITPCSFGGVSVITPGTNTSNQVAVLYQDVNCTEVPVAIHADQLTPTWRVYSTGSNVFQTRAGCLIGAEHVNNSYECDIPIGAGICASYQTQTNSPRRARSVASQSIIAYTMSLGAENSVAYSNNSIAIPTNFTISVTTEILPVSMTKTSVDCTMYICGDSTECSNLLLQYGSFCTQLNRALTGIAVEQDKNTQEVFAQVKQIYKTPPIKDFGGFNFSQILPDPSKPSKRSFIEDLLFNKVTLADAGFIKQYGDCLGDIAARDLICAQKFNGLTVLPPLLTDEMIAQYTSALLAGTITSGWTFGAGAALQIPFAMQMAYRFNGIGVTQNVLYENQKLIANQFNSAIGKIQDSLSSTASALGKLQDVVNQNAQALNTLVKQLSSNFGAISSVLNDILSRLDPPEAEVQIDRLITGRLQSLQTYVTQQLIRAAEIRASANLAATKMSECVLGQSKRVDFCGKGYHLMSFPQSAPHGVVFLHVTYVFAQEKNFTTAPAICHDGKAHFPREGVFVSNGTHWFVTQRNFYEPQIITTDNTFVSGNCDVVIGIVNNTVYDPLQPELDSGGGSGGGQIYEGKLTAEGLRFGIVASRFNHALVDRLVEGAIDAIVRHGGREEDITLVRVPGSWEIPVAAGELARKEDIDAVIAIGVLIRGATPHFDYIASEVSKGLADLSLELRKPITFGVITADTLEQAIERAGTKHGNKGWEAALSAIEMANLFKSLR

SEQ ID NO: 7846 - protein, 1303 aa, Artificial Sequence
  SARS-CoV-2/bat/Yunnan/RaTG13/2013__EPI_ISL_402131 spike protein (1-1143)(K982P_V983P_P1065F) LumSynth construct
MFVFLVLLPLVSSQCVNLTTRTQLPPAYTNSSTRGVYYPDKVFRSSVLHLTQDLFLPFFSNVTWFHAIHVSGTNGIKRFDNPVLPFNDGVYFASTEKSNIIRGWIFGTTLDSKTQSLLIVNNATNVVIKVCEFQFCNDPFLGVYYHKNNKSWMESEFRVYSSANNCTFEYVSQPFLMDLEGKQGNFKNLREFVFKNIDGYFKIYSKHTPINLVRDLPPGFSALEPLVDLPIGINITRFQTLLALHRSYLTPGDSSSGWTAGAAAYYVGYLQPRTFLLKYNENGTITDAVDCALDPLSETKCTLKSFTVEKGIYQTSNFRVQPTDSIVRFPNITNLCPFGEVFNATTFASVYAWNRKRISNCVADYSVLYNSTSFSTFKCYGVSPTKLNDLCFTNVYADSFVITGDEVRQIAPGQTGKIADYNYKLPDDFTGCVIAWNSKHIDAKEGGNFNYLYRLFRKANLKPFERDISTEIYQAGSKPCNGQTGLNCYYPLYRYGFYPTDGVGHQPYRVVVLSFELLNAPATVCGPKKSTNLVKNKCVNFNFNGLTGTGVLTESNKKFLPFQQFGRDIADTTDAVRDPQTLEILDITPCSFGGVSVITPGTNASNQVAVLYQDVNCTEVPVAIHADQLTPTWRVYSTGSNVFQTRAGCLIGAEHVNNSYECDIPIGAGICASYQTQTNSRSVASQSIIAYTMSLGAENSVAYSNNSIAIPTNFTISVTTEILPVSMTKTSVDCTMYICGDSTECSNLLLQYGSFCTQLNRALTGIAVEQDKNTQEVFAQVKQIYKTPPIKDFGGFNFSQILPDPSKPSKRSFIEDLLFNKVTLADAGFIKQYGDCLGDIAARDLICAQKFNGLTVLPPLLTDEMIAQYTSALLAGTITSGWTFGAGAALQIPFAMQMAYRFNGIGVTQNVLYENQKLIANQFNSAIGKIQDSLSSTASALGKLQDVVNQNAQALNTLVKQLSSNFGAISSVLNDILSRLDPPEAEVQIDRLITGRLQSLQTYVTQQLIRAAEIRASANLAATKMSECVLGQSKRVDFCGKGYHLMSFPQSAPHGVVFLHVTYVFAQEKNFTTAPAICHDGKAHFPREGVFVSNGTHWFVTQRNFYEPQIITTDNTFVSGSCDVVIGIVNNTVYDPLQPELDSGGGSGGGQIYEGKLTAEGLRFGIVASRFNHALVDRLVEGAIDAIVRHGGREEDITLVRVPGSWEIPVAAGELARKEDIDAVIAIGVLIRGATPHFDYIASEVSKGLADLSLELRKPITFGVITADTLEQAIERAGTKHGNKGWEAALSAIEMANLFKSLR

SEQ ID NO: 7847 - protein, 1307 aa, Artificial Sequence
  SARS-CoV-2/Wuhan/HBCDC-HB-01/2019__EPI_ISL_402132 spike protein (1-1147)(K986P_V987P_P1069F) LumSynth construct
MFVFLVLLPLVSSQCVNLTTRTQLPPAYTNSITRGVYYPDKVFRSSVLHSTQDLFLPFFSNVTWFHAIHVSGTNGTKRFDNPVLPFNDGVYFASTEKSNIIRGWIFGTTLDSKTQSLLIVNNATNVVIKVCEFQFCNDPFLGVYYHKNNKSWMESEFRVYSSANNCTFEYVSQPFLMDLEGKQGNFKNLREFVFKNIDGYFKIYSKHTPINLVRDLPQGFSALEPLVDLPIGINITRFQTLLALHRSYLTPGDSSSGWTAGAAAYYVGYLQPRTFLLKYNENGTITDAVDCALDPLSETKCTLKSFTVEKGIYQTSNFRVQPTESIVRFPNITNLCPFGEVFNATRFASVYAWNRKRISNCVADYSVLYNSASFSTFKCYGVSPTKLNDLCFTNVYADSFVIRGDEVRQIAPGQTGKIADYNYKLPDDFTGCVIAWNSNNLDSKVGGNYNYLYRLFRKSNLKPFERDISTEIYQAGSTPCNGVEGFNCYFPLQSYGFQPTNGVGYQPYRVVVLSFELLHAPATVCGPKKSTNLVKNKCVNFNFNGLTGTGVLTESNKKFLPFQQFGRDIADTTDAVRDPQTLEILDITPCSFGGVSVITPGTNTSNQVAVLYQDVNCTEVPVAIHADQLTPTWRVYSTGSNVFQTRAGCLIGAEHVNNSYECDIPIGAGICASYQTQTNSPRRARSVASQSIIAYTMSLGAENSVAYSNNSIAIPTNFTISVTTEILPVSMTKTSVDCTMYICGDSTECSNLLLQYGSFCTQLNRALTGIAVEQDKNTQEVFAQVKQIYKTPPIKDFGGFNFSQILPDPSKPSKRSFIEDLLFNKVTLADAGFIKQYGDCLGDIAARDLICAQKFNGLTVLPPLLTDEMIAQYTSALLAGTITSGWTFGAGAALQIPFAMQMAYRFNGIGVTQNVLYENQKLIANQFNSAIGKIQDSLSSTASALGKLQDVVNQNAQALNTLVKQLSSNFGAISSVLNDILSRLDPPEAEVQIDRLITGRLQSLQTYVTQQLIRAAEIRASANLAATKMSECVLGQSKRVDFCGKGYHLMSFPQSAPHGVVFLHVTYVFAQEKNFTTAPAICHDGKAHFPREGVFVSNGTHWFVTQRNFYEPQIITTDNTFVSGNCDVVIGIVNNTVYDPLQPELDSGGGSGGGQIYEGKLTAEGLRFGIVASRFNHALVDRLVEGAIDAIVRHGGREEDITLVRVPGSWEIPVAAGELARKEDIDAVIAIGVLIRGATPHFDYIASEVSKGLADLSLELRKPITFGVITADTLEQAIERAGTKHGNKGWEAALSAIEMANLFKSLR

SEQ ID NO: 7848 - protein, 1307 aa, Artificial Sequence
  SARS-CoV-2/Guangdong/20SF028/2020__EPI_ISL_403936 spike protein (1-1147)(K986P_V987P_P1069F) LumSynth construct
MFVFLVLLPLVSSQCVNLTTRTQLPPAYTNSFTRGVYYPDKVFRSSVLYSTQDLFLPFFSNVTWFHAIHVSGTNGTKRFDNPVLPFNDGVYFASTEKSNIIRGWIFGTTLDSKTQSLLIVNNATNVVIKVCEFQFCNDPFLGVYYHKNNKSWMESEFRVYSSANNCTFEYVSQPFLMDLEGKQGNFKNLREFVFKNIDGYFKIYSKHTPINLVRDLPQGFSALEPLVDLPIGINITRFQTLLALHRSYLTPGDSSSGWTAGAAAYYVGYLQPRTFLLKYNENGTITDAVDCALDPLSETKCTLKSFTVEKGIYQTSNFRVQPTESIVRFPNITNLCPFGEVFNATRFASVYAWNRKRISNCVADYSVLYNSASFSTFKCYGVSPTKLNDLCFTNVYADSFVIRGDEVRQIAPGQTGKIADYNYKLPDDFTGCVIAWNSNNLDSKVGGNYNYLYRLFRKSNLKPFERDISTEIYQAGSTPCNGVEGFNCYFPLQSYGFQPTNGVGYQPYRVVVLSFELLHAPATVCGPKKSTNLVKNKCVNFNFNGLTGTGVLTESNKKFLPFQQFGRDIADTTDAVRDPQTLEILDITPCSFGGVSVITPGTNTSNQVAVLYQDVNCTEVPVAIHADQLTPTWRVYSTGSNVFQTRAGCLIGAEHVNNSYECDIPIGAGICASYQTQTNSPRRARSVASQSIIAYTMSLGAENSVAYSNNSIAIPTNFTISVTTEILPVSMTKTSVDCTMYICGDSTECSNLLLQYGSFCTQLNRALTGIAVEQDKNTQEVFAQVKQIYKTPPIKDFGGFNFSQILPDPSKPSKRSFIEDLLFNKVTLADAGFIKQYGDCLGDIAARDLICAQKFNGLTVLPPLLTDEMIAQYTSALLAGTITSGWTFGAGAALQIPFAMQMAYRFNGIGVTQNVLYENQKLIANQFNSAIGKIQDSLSSTASALGKLQDVVNQNAQALNTLVKQLSSNFGAISSVLNDILSRLDPPEAEVQIDRLITGRLQSLQTYVTQQLIRAAEIRASANLAATKMSECVLGQSKRVDFCGKGYHLMSFPQSAPHGVVFLHVTYVFAQEKNFTTAPAICHDGKAHFPREGVFVSNGTHWFVTQRNFYEPQIITTDNTFVSGNCDVVIGIVNNTVYDPLQPELDSGGGSGGGQIYEGKLTAEGLRFGIVASRFNHALVDRLVEGAIDAIVRHGGREEDITLVRVPGSWEIPVAAGELARKEDIDAVIAIGVLIRGATPHFDYIASEVSKGLADLSLELRKPITFGVITADTLEQAIERAGTKHGNKGWEAALSAIEMANLFKSLR

SEQ ID NO: 7849 - protein, 1307 aa, Artificial Sequence
  SARS-CoV-2/Shenzhen/SZTH-001/2020__EPI_ISL_406592 spike protein (1-1147)(K986P_V987P_P1069F) LumSynth construct
MFVFLVLLPLVSSQCVNLTTRTQLPPAYTNSFTRGVYYPDKVFRSSVLHSTQDLFLPFFSNVTWFHAIHVSGTNGTKRFDNPVLPFNDGVYFASTEKSNIIRGWIFGTTLDSKTQSLLIVNNATNVVIKVCEFQFCNDPFLGVYYHKNNKSWMESEFRVYSSANNCTFEYVSQPFLMDLEGKQGNFKNLREFVFKNIDGYFKIYSKHTPINLVRDLPQGFSALEPLVDLPIGINITRFQTLLALHRSYLTPGDSSSGWTAGAAAYYVGYLQPRTFLLKYNENGTITDAVDCALDPLSETKCTLKSFTVEKGIYQTSNFRVQPTESIVRFPNITNLCPFGEVFNATRFASVYAWNRKRISNCVADYSVLYNSASFSTFKCYGVSPTKLNDLCFTNVYADSFVIRGDEVRQIAPGQTGKIADYNYKLPDDFTGCVIAWNSNNLDSKVGGNYNYLYRLFRKSNLKPFERDISTEIYQAGSTPCNGVEGFNCYFPLQSYGFQPTNGVGYQPYRVVVLSFELLHAPATVCGPKKSTNLVKNKCVNFNFNGLTGTGVLTESNKKFLPFQQFGRDIADTTDAVRDPQTLEILDITPCSFGGVSVITPGTNTSNQVAVLYQDVNCTEVPVAIHADQLTPTWRVYSTGSNVFQTRAGCLIGAEHVNNSYECDIPIGAGICASYQTQTNSPRRARSVASQSIIAYTMSLGAENSVAYSNNSIAIPTNFTISVTTEILPVSMTKTSVDCTMYICGDSTECSNLLLQYGSFCTQLNRALTGIAVEQDKNTQEVFAQVKQIYKTPPIKDFGGFNFSQILPDPSKPSKRSFIEDLLFNKVTLADAGFIKQYGDCLGDIAARDLICAQKFNGLTVLPPLLTDEMIAQYTSALLAGTITSGWTFGAGAALQIPFAMQMAYRFNGIGVTQNVLYENQKLIANQFNSAIGKIQDSLSSTASALGKLQDVVNQNAQALNTLVKQLSSNFGAISSVLNDILSRLDPPEAEVQIDRLITGRLQSLQTYVTQQLIRAAEIRASANLAATKMSECVLGQSKRVDFCGKGYHLMSFPQSAPHGVVFLHVTYVFAQEKNFTTAPAICHDGKAHFPREGVFVSNGTHWFVTQRNFYEPQIITTDNTFVSGNCDVLIGIVNNTVYDPLQPELDSGGGSGGGQIYEGKLTAEGLRFGIVASRFNHALVDRLVEGAIDAIVRHGGREEDITLVRVPGSWEIPVAAGELARKEDIDAVIAIGVLIRGATPHFDYIASEVSKGLADLSLELRKPITFGVITADTLEQAIERAGTKHGNKGWEAALSAIEMANLFKSLR

SEQ ID NO: 7850 - protein, 1307 aa, Artificial Sequence
  SARS-CoV-2/Shenzhen/SZTH-004/2020__EPI_ISL_406595 spike protein (1-1147)(K986P_V987P_P1069F) LumSynth construct
MFVFLVLLPLVSSQCVNLTTRTQLPPAYTNSFTRGVYYPDKVFRSSVLHSTQDLFLPFFSNVTWFHAIHVSGTNGTKRFDNPVLPFNDGVYFASTEKSNIIRGWIFGTTLDSKTQSLLIVNNATNVVIKVCEFQFCNDPFLGVYYHKNNKSWMESEFRVYSSANNCTFEYVSQPFLMDLEGKQGNFKNLREFVFKNIDGYFKIYSKHTPINLVRDLPQGFSALEPLVDLPIGINITRFQTLLALHRSYLTPGDSSSGWTAGAAAYYVGYLQPRTFLLKYNENGTITDAVDCALDPLSETKCTLKSFTVEKGIYQTSNFRVQPTESIVRFPNITNLCPFGEVFNATRFASVYAWDRKRISNCVAYYSVLYNSASFSTFKCYGVSPTKLNDLCFTNVYADSFVIRGDEVRQIAPGQTGKIADYNYKLPDDFTGCVIAWNSNNLDSKVGGNYNYLYRLFRKSNLKPFERDISTEIYQAGSTPCNGVEGFNCYFPLQSYGFQPTNGVGYQPYRVVVLSFELLHAPATVCGPKKSTNLVKNKCVNFNFNGLTGTGVLTESNKKFLPFQQFGRDIADTTDAVRDPQTLEILDITPCSFGGVSVITPGTNTSNQVAVLYQDVNCTEVPVAIHADQLTPTWRVYSTGSNVFQTRAGCLIGAEHVNNSYECDIPIGAGICASYQTQTNSPRRARSVASQSIIAYTMSLGAENSVAYSNNSIAIPTNFTISVTTEILPVSMTKTSVDCTMYICGDSTECSNLLLQYGSFCTQLNRALTGIAVEQDKNTQEVFAQVKQIYKTPPIKDFGGFNFSQILPDPSKPSKRSFIEDLLFNKVTLADAGFIKQYGDCLGDIAARDLICAQKFNGLTVLPPLLTDEMIAQYTSALLAGTITSGWTFGAGAALQIPFAMQMAYRFNGIGVTQNVLYENQKLIANQFNSAIGKIQDSLSSTASALGKLQDVVNQNAQALNTLVKQLSSNFGAISSVLNDILSRLDPPEAEVQIDRLITGRLQSLQTYVTQQLIRAAEIRASANLAATKMSECVLGQSKRVDFCGKGYHLMSFPQSAPHGVVFLHVTYVFAQEKNFTTAPAICHDGKAHFPREGVFVSNGTHWFVTQRNFYEPQIITTDNTFVSGNCDVVIGIVNNTVYDPLQPELDSGGGSGGGQIYEGKLTAEGLRFGIVASRFNHALVDRLVEGAIDAIVRHGGREEDITLVRVPGSWEIPVAAGELARKEDIDAVIAIGVLIRGATPHFDYIASEVSKGLADLSLELRKPITFGVITADTLEQAIERAGTKHGNKGWEAALSAIEMANLFKSLR

SEQ ID NO: 7851 - protein, 1307 aa, Artificial Sequence
  SARS-CoV-2/France/IDF0372/2020__EPI_ISL_406596 spike protein (1-1147)(K986P_V987P_P1069F) LumSynth construct
MFVFLVLLPLVSSQCVNLTTRTQLPPAYTNSFTRGVYYPDKVFRSSVLHSTQDLFLPFFSNVTWFHAIHVSGTNGTKRFDNPVLPFNDGVYFASTEKSNIIRGWIFGTTLDSKTQSLLIVNNATNVVIKVCEFQFCNDPFLGVYYHKNNKSWMESEFRVYSSANNCTFEYVSQPFLMDLEGKQGNFKNLREFVFKNIDGYFKIYSKHTPINLVRDLPQGFSALEPLVDLPIGINITRFQTLLALHRSYLTPGDSSSGWTAGAAAYYVGYLQPRTFLLKYNENGTITDAVDCALDPLSETKCTLKSFTVEKGIYQTSNFRVQPTESIVRFPNITNLCPFGEVFNATRFASVYAWNRKRISNCVADYSFLYNSASFSTFKCYGVSPTKLNDLCFTNVYADSFVIRGDEVRQIAPGQTGKIADYNYKLPDDFTGCVIAWNSNNLDSKVGGNYNYLYRLFRKSNLKPFERDISTEIYQAGSTPCNGVEGFNCYFPLQSYGFQPTNGVGYQPYRVVVLSFELLHAPATVCGPKKSTNLVKNKCVNFNFNGLTGTGVLTESNKKFLPFQQFGRDIADTTDAVRDPQTLEILDITPCSFGGVSVITPGTNTSNQVAVLYQDVNCTEVPVAIHADQLTPTWRVYSTGSNVFQTRAGCLIGAEHVNNSYECDIPIGAGICASYQTQTNSPRRARSVASQSIIAYTMSLGAENSVAYSNNSIAIPTNFTISVTTEILPVSMTKTSVDCTMYICGDSTECSNLLLQYGSFCTQLNRALTGIAVEQDKNTQEVFAQVKQIYKTPPIKDFGGFNFSQILPDPSKPSKRSFIEDLLFNKVTLADAGFIKQYGDCLGDIAARDLICAQKFNGLTVLPPLLTDEMIAQYTSALLAGTITSGWTFGAGAALQIPFAMQMAYRFNGIGVTQNVLYENQKLIANQFNSAIGKIQDSLSSTASALGKLQDVVNQNAQALNTLVKQLSSNFGAISSVLNDILSRLDPPEAEVQIDRLITGRLQSLQTYVTQQLIRAAEIRASANLAATKMSECVLGQSKRVDFCGKGYHLMSFPQSAPHGVVFLHVTYVFAQEKNFTTAPAICHDGKAHFPREGVFVSNGTHWFVTQRNFYEPQIITTDNTFVSGNCDVVIGIVNNTVYDPLQPELDSGGGSGGGQIYEGKLTAEGLRFGIVASRFNHALVDRLVEGAIDAIVRHGGREEDITLVRVPGSWEIPVAAGELARKEDIDAVIAIGVLIRGATPHFDYIASEVSKGLADLSLELRKPITFGVITADTLEQAIERAGTKHGNKGWEAALSAIEMANLFKSLR

SEQ ID NO: 7852 - protein, 1307 aa, Artificial Sequence
  SARS-CoV-2/Australia/VIC01/2020__EPI_ISL_406844 spike protein (1-1147)(K986P_V987P_P1069F) LumSynth construct
MFVFLVLLPLVSSQCVNLTTRTQLPPAYTNSFTRGVYYPDKVFRSSVLHSTQDLFLPFFSNVTWFHAIHVSGTNGTKRFDNPVLPFNDGVYFASTEKSNIIRGWIFGTTLDSKTQSLLIVNNATNVVIKVCEFQFCNDPFLGVYYHKNNKSWMESEFRVYSSANNCTFEYVSQPFLMDLEGKQGNFKNLREFVFKNIDGYFKIYSKHTPINLVRDLPQGFSALEPLVDLPIGINITRFQTLLALHRRYLTPGDSSSGWTAGAAAYYVGYLQPRTFLLKYNENGTITDAVDCALDPLSETKCTLKSFTVEKGIYQTSNFRVQPTESIVRFPNITNLCPFGEVFNATRFASVYAWNRKRISNCVADYSVLYNSASFSTFKCYGVSPTKLNDLCFTNVYADSFVIRGDEVRQIAPGQTGKIADYNYKLPDDFTGCVIAWNSNNLDSKVGGNYNYLYRLFRKSNLKPFERDISTEIYQAGSTPCNGVEGFNCYFPLQSYGFQPTNGVGYQPYRVVVLSFELLHAPATVCGPKKSTNLVKNKCVNFNFNGLTGTGVLTESNKKFLPFQQFGRDIADTTDAVRDPQTLEILDITPCSFGGVSVITPGTNTSNQVAVLYQDVNCTEVPVAIHADQLTPTWRVYSTGSNVFQTRAGCLIGAEHVNNSYECDIPIGAGICASYQTQTNSPRRARSVASQSIIAYTMSLGAENSVAYSNNSIAIPTNFTISVTTEILPVSMTKTSVDCTMYICGDSTECSNLLLQYGSFCTQLNRALTGIAVEQDKNTQEVFAQVKQIYKTPPIKDFGGFNFSQILPDPSKPSKRSFIEDLLFNKVTLADAGFIKQYGDCLGDIAARDLICAQKFNGLTVLPPLLTDEMIAQYTSALLAGTITSGWTFGAGAALQIPFAMQMAYRFNGIGVTQNVLYENQKLIANQFNSAIGKIQDSLSSTASALGKLQDVVNQNAQALNTLVKQLSSNFGAISSVLNDILSRLDPPEAEVQIDRLITGRLQSLQTYVTQQLIRAAEIRASANLAATKMSECVLGQSKRVDFCGKGYHLMSFPQSAPHGVVFLHVTYVFAQEKNFTTAPAICHDGKAHFPREGVFVSNGTHWFVTQRNFYEPQIITTDNTFVSGNCDVVIGIVNNTVYDPLQPELDSGGGSGGGQIYEGKLTAEGLRFGIVASRFNHALVDRLVEGAIDAIVRHGGREEDITLVRVPGSWEIPVAAGELARKEDIDAVIAIGVLIRGATPHFDYIASEVSKGLADLSLELRKPITFGVITADTLEQAIERAGTKHGNKGWEAALSAIEMANLFKSLR

SEQ ID NO: 7853 - protein, 1307 aa, Artificial Sequence
  SARS-CoV-2/Germany/BavPat1/2020__EPI_ISL_406862 spike protein (1-1147)(K986P_V987P_P1069F) LumSynth construct
MFVFLVLLPLVSSQCVNLTTRTQLPPAYTNSFTRGVYYPDKVFRSSVLHSTQDLFLPFFSNVTWFHAIHVSGTNGTKRFDNPVLPFNDGVYFASTEKSNIIRGWIFGTTLDSKTQSLLIVNNATNVVIKVCEFQFCNDPFLGVYYHKNNKSWMESEFRVYSSANNCTFEYVSQPFLMDLEGKQGNFKNLREFVFKNIDGYFKIYSKHTPINLVRDLPQGFSALEPLVDLPIGINITRFQTLLALHRSYLTPGDSSSGWTAGAAAYYVGYLQPRTFLLKYNENGTITDAVDCALDPLSETKCTLKSFTVEKGIYQTSNFRVQPTESIVRFPNITNLCPFGEVFNATRFASVYAWNRKRISNCVADYSVLYNSASFSTFKCYGVSPTKLNDLCFTNVYADSFVIRGDEVRQIAPGQTGKIADYNYKLPDDFTGCVIAWNSNNLDSKVGGNYNYLYRLFRKSNLKPFERDISTEIYQAGSTPCNGVEGFNCYFPLQSYGFQPTNGVGYQPYRVVVLSFELLHAPATVCGPKKSTNLVKNKCVNFNFNGLTGTGVLTESNKKFLPFQQFGRDIADTTDAVRDPQTLEILDITPCSFGGVSVITPGTNTSNQVAVLYQGVNCTEVPVAIHADQLTPTWRVYSTGSNVFQTRAGCLIGAEHVNNSYECDIPIGAGICASYQTQTNSPRRARSVASQSIIAYTMSLGAENSVAYSNNSIAIPTNFTISVTTEILPVSMTKTSVDCTMYICGDSTECSNLLLQYGSFCTQLNRALTGIAVEQDKNTQEVFAQVKQIYKTPPIKDFGGFNFSQILPDPSKPSKRSFIEDLLFNKVTLADAGFIKQYGDCLGDIAARDLICAQKFNGLTVLPPLLTDEMIAQYTSALLAGTITSGWTFGAGAALQIPFAMQMAYRFNGIGVTQNVLYENQKLIANQFNSAIGKIQDSLSSTASALGKLQDVVNQNAQALNTLVKQLSSNFGAISSVLNDILSRLDPPEAEVQIDRLITGRLQSLQTYVTQQLIRAAEIRASANLAATKMSECVLGQSKRVDFCGKGYHLMSFPQSAPHGVVFLHVTYVFAQEKNFTTAPAICHDGKAHFPREGVFVSNGTHWFVTQRNFYEPQIITTDNTFVSGNCDVVIGIVNNTVYDPLQPELDSGGGSGGGQIYEGKLTAEGLRFGIVASRFNHALVDRLVEGAIDAIVRHGGREEDITLVRVPGSWEIPVAAGELARKEDIDAVIAIGVLIRGATPHFDYIASEVSKGLADLSLELRKPITFGVITADTLEQAIERAGTKHGNKGWEAALSAIEMANLFKSLR

SEQ ID NO: 7854 - protein, 1307 aa, Artificial Sequence
  SARS-CoV-2/Wuhan/HBCDC-HB-02/2020__EPI_ISL_412978 spike protein (1-1147)(K986P_V987P_P1069F) LumSynth construct
MFVFLVLLPLVSSQCVNLTTRTQLPPAYTNSFTRGVYYPDKVFRSSVLHSTQDLFLPFFSNVTWFHAIHVSGTNGTKRFDNPVLPFNDGVYFASTEKSNIIRGWIFGTTLDSKTQSLLIVNNATNVVIKVCEFQFCNDPFLGVYYHKNNKSWMESEFRVYSSANNCTFEYVSQPFLMDLEGKQGNFKNLREFVFKNIDGYFKIYSKHTPINLVRDLPQGFSALEPLVDLPIGINITRFQTLLALHRSYLTPGDSSSGWTAGAAAYYVGYLQPRTFLLKYNENGTITDAVDCALDPLSETKCTLKSFTVEKGIYQTSNFRVQPTESIVRFPNITNLCPFGEVFNATRFASVYAWNRKRISNCVADYSVLYNSASFSTFKCYGVSPTKLNDLCFTNVYADSFVIRGDEVRQIAPGQTGKIADYNYKLPDDFTGCVIAWNSNNLDSKVGGNYNYLYRLFRKSNLKPFERDISTEIYQAGSTPCNGVEGFNCYFPLQSYGFQPTNGVGYQPYRVVVLSFELLHAPATVCGPKKSTNLVKNKCVNFNFNGLTGTGVLTESNKKFLPFQQFGRDIADTTDAVRDPQTLEILDITPCSFGGVSVITPGTNTSNQVAVLYQDVNCTEVPVAIHADQLTPTWRVYSTGSNVFQTRAGCLIGAEHVNNSYECDIPIGAGICASYQTQTNSPRRARSVASQSIIAYTMSLGAENSVAYSNNSIAIPTNFTISVTTEILPVSMTKTSVDCTMYICGDSTECSNFLLQYGSFCTQLNRALTGIAVEQDKNTQEVFAQVKQIYKTPPIKDFGGFNFSQILPDPSKPSKRSFIEDLLFNKVTLADAGFIKQYGDCLGDIAARDLICAQKFNGLTVLPPLLTDEMIAQYTSALLAGTITSGWTFGAGAALQIPFAMQMAYRFNGIGVTQNVLYENQKLIANQFNSAIGKIQDSLSSTASALGKLQDVVNQNAQALNTLVKQLSSNFGAISSVLNDILSRLDPPEAEVQIDRLITGRLQSLQTYVTQQLIRAAEIRASANLAATKMSECVLGQSKRVDFCGKGYHLMSFPQSAPHGVVFLHVTYVFAQEKNFTTAPAICHDGKAHFPREGVFVSNGTHWFVTQRNFYEPQIITTDNTFVSGNCDVVIGIVNNTVYDPLQPELDSGGGSGGGQIYEGKLTAEGLRFGIVASRFNHALVDRLVEGAIDAIVRHGGREEDITLVRVPGSWEIPVAAGELARKEDIDAVIAIGVLIRGATPHFDYIASEVSKGLADLSLELRKPITFGVITADTLEQAIERAGTKHGNKGWEAALSAIEMANLFKSLR

SEQ ID NO: 7855 - protein, 1307 aa, Artificial Sequence
  SARS-CoV-2/Australia/QLD02/2020__EPI_ISL_407896 spike protein (1-1147)(K986P_V987P_P1069F) LumSynth construct
MFVFLVLLPLVSSQCVNLTTRTQLPPAYTNSFTRGVYYPDKVFRSSVLHSTQDLFLPFFSNVTWFHAIHVSGTNGTKRFDNPVLPFNDGVYFASTEKSNIIRGWIFGTTLDSKTQSLLIVNNATNVVIKVCEFQFCNDPFLGVYYHKNNKSWMESEFRVYSSANNCTFEYVSQPFLMDLEGKQGNFKNLREFVFKNIDGYFKIYSKHTPINLVRDLPQGFSALEPLVDLPIGINITRFQTLLALHRSYLTPGDSSSGWTAGAAAYYVGYLQPRTFLLKYNENGTITDAVDCALDPLSETKCTLKSFTVEKGIYQTSNFRVQPTESIVRFPNITNLCPFGEVFNATRFASVYAWNRKRISNCVADYSVLYNSASFSTFKCYGVSPTKLNDLCFTNVYADSFVIRGDEVRQIAPGQTGKIADYNYKLPDDFTGCVIAWNSNNLDSKVGGNYNYLYRLFRKSNLKPFERDISTEIYQAGSTPCNGVEGFNCYFPLQSYGFQPTNGVGYQPYRVVVLSFELLHAPATVCGPKKSTNLVKNKCVNFNFNGLTGTGVLTESNKKFLPFQQFGRDIADTTDAVRDPQTLEILDITPCSFGGVSVITPGTNTSNQVAVLYQDVNCTEVPVAIHADQLTPTWRVYSTGSNVFQTRAGCLIGAEHVNNSYECDIPIGAGICASYQTQTNSPRRARSVASQSIIAYTMSLGAENSVAYSNNSIAIPTNFTISVTTEILPVSMTKTSVDCTMYICGDSTECSNLLLQYGSFCTQLNRALTGIAVEQDKNTQEVFAQVKQIYKTPPIKDFGGFNFSQILPDPSKPSKRSFIEDLLFNKVTLADAGFIKQYGDCLGDIAARDLICAQKFNGLTVLPPLLTDEMIAQYTSALLAGTITSGWTFGAGAALQIPFAMQMAYRFNGIGVTQNVLYENQKLIANQFNSAIGKIQDSLSSTASALGKLQDVVNQNAQALNTLVKQLSSNFGAISSVLNDILSRLDPPEAEVQIDRLITGRLQSLQTYVTQQLIRAAEIRASANLAATKMSECVLGQSKRVDFCGKGYHLMSFPQSAPHGVVFLHVTYVFAQEKNFTTAPAICHDGKAHFPREGVFVSNGTHWFVTQRNFYEPQIITTDNTFVSGNCDVVIGIVNNTVYDPLQLELDSGGGSGGGQIYEGKLTAEGLRFGIVASRFNHALVDRLVEGAIDAIVRHGGREEDITLVRVPGSWEIPVAAGELARKEDIDAVIAIGVLIRGATPHFDYIASEVSKGLADLSLELRKPITFGVITADTLEQAIERAGTKHGNKGWEAALSAIEMANLFKSLR

SEQ ID NO: 7856 - protein, 1307 aa, Artificial Sequence
  SARS-CoV-2/India/1-31/2020__EPI_ISL_413523 spike protein (1-1147)(K986P_V987P_P1069F) LumSynth construct
MFVFLVLLPLVSSQCVNLTTRTQLPPAYTNSFTRGVYYPDKVFRSSVLHSTQDLFLPFFSNVTWFHAIHVSGTNGTKRFDNPVLPFNDGVYFASTEKSNIIRGWIFGTTLDSKTQSLLIVNNATNVVIKVCEFQFCNDPFLGVYYHKNNKSWMESEFRVYSSANNCTFEYVSQPFLMDLEGKQGNFKNLREFVFKNIDGYFKIYSKHTPINLVRDLPQGFSALEPLVDLPIGINITRFQTLLALHRSYLTPGDSSSGWTAGAAAYYVGYLQPRTFLLKYNENGTITDAVDCALDPLSETKCTLKSFTVEKGIYQTSNFRVQPTESIVRFPNITNLCPFGEVFNATRFASVYAWNRKRISNCVADYSVLYNSASFSTFKCYGVSPTKLNDLCFTNVYADSFVIRGDEVRQIAPGQTGKIADYNYKLPDDFTGCVIAWNSNNLDSKVGGNYNYLYRLFRKSNLKPFERDISTEIYQAGSTPCNGVEGFNCYFPLQSYGFQPTNGVGYQPYRVVVLSFELLHAPATVCGPKKSTNLVKNKCVNFNFNGLTGTGVLTESNKKFLPFQQFGRDIADTTDAVRDPQTLEILDITPCSFGGVSVITPGTNTSNQVAVLYQDVNCTEVPVAIHADQLTPTWRVYSTGSNVFQTRAGCLIGAEHVNNSYECDIPIGAGICASYQTQTNSPRRARSVASQSIIAYTMSLGAENSVAYSNNSIAIPTNFTISVTTEILPVSMTKTSVDCTMYICGDSTECSNLLLQYGSFCTQLNRALTGIAVEQDKNTQEVFAQVKQIYKTPPIKDFGGFNFSQILPDPSKPSKRSFIEDLLFNKVTLADAGFIKQYGDCLGDIAARDLICAQKFNGLTVLPPLLTDEMIAQYTSALLAGTITSGWTFGAGAALQIPFAMQMAYRFNGIGVTQNVLYENQKLIANQFNSVIGKIQDSLSSTASALGKLQDVVNQNAQALNTLVKQLSSNFGAISSVLNDILSRLDPPEAEVQIDRLITGRLQSLQTYVTQQLIRAAEIRASANLAATKMSECVLGQSKRVDFCGKGYHLMSFPQSAPHGVVFLHVTYVFAQEKNFTTAPAICHDGKAHFPREGVFVSNGTHWFVTQRNFYEPQIITTDNTFVSGNCDVVIGIVNNTVYDPLQPELDSGGGSGGGQIYEGKLTAEGLRFGIVASRFNHALVDRLVEGAIDAIVRHGGREEDITLVRVPGSWEIPVAAGELARKEDIDAVIAIGVLIRGATPHFDYIASEVSKGLADLSLELRKPITFGVITADTLEQAIERAGTKHGNKGWEAALSAIEMANLFKSLR

SEQ ID NO: 7857 - protein, 1307 aa, Artificial Sequence
  SARS-CoV-2/Guangdong/GD2020087-P0008/2020__EPI_ISL_413863 spike protein (1-1147)(K986P_V987P_P1069F) LumSynth construct
MFVFLVLLPLVSSQCVNLTTRTQLPPAYTNSFTRGVYYPDKVFRSSVLHSTQDLFLPFFSNVTWFHAIHVSGTNGTKRFDNPVLPFNDGVYFASTEKSNIIRGWIFGTTLDSKTQSLLIVNNATNVVIKVCEFQFCNDPFLGVYYHKNNKSWMESEFRVYSSANNCTFEYVSQPFLMDLEGKQGNFKNLREFVFKNIDGYFKIYSKHTPINLVRDLPQGFSALEPLVDLPIGINITRFQTLLALHRSYLTPGDSSSGWTAGAAAYYVGYLQPRTFLLKYNENGTITDAVDCALDPLSETKCTLKSFTVEKGIYQTSNFRVQPTESIVRFPNITNLCPFGEVFNATRFASVYAWNRKRISNCVADYSVLYNSASFSTFKCYGVSPTKLNDLCFTNVYADSFVIRGDEVREIAPGQTGKIADYNYKLPDDFTGCVIAWNSNNLDSKVGGNYNYLYRLFRKSNLKPFERDISTEIYQAGSTPCNGVEGFNCYFPLQSYGFQPTNGVGYQPYRVVVLSFELLHAPATVCGPKKSTNLVKNKCVNFNFNGLTGTGVLTESNKKFLPFQQFGRDIADTTDAVRDPQTLEILDITPCSFGGVSVITPGTNTSNQVAVLYQDVNCTEVPVAIHADQLTPTWRVYSTGSNVFQTRAGCLIGAEHVNNSYECDIPIGAGICASYQTQTNSPRRARSVASQSIIAYTMSLGAENSVAYSNNSIAIPTNFTISVTTEILPVSMTKTSVDCTMYICGDSTECSNLLLQYGSFCTQLNRALTGIAVEQDKNTQEVFAQVKQIYKTPPIKDFGGFNFSQILPDPSKPSKRSFIEDLLFNKVTLADAGFIKQYGDCLGDIAARDLICAQKFNGLTVLPPLLTDEMIAQYTSALLAGTITSGWTFGAGAALQIPFAMQMAYRFNGIGVTQNVLYENQKLIANQFNSAIGKIQDSLSSTASALGKLQDVVNQNAQALNTLVKQLSSNFGAISSVLNDILSRLDPPEAEVQIDRLITGRLQSLQTYVTQQLIRAAEIRASANLAATKMSECVLGQSKRVDFCGKGYHLMSFPQSAPHGVVFLHVTYVFAQEKNFTTAPAICHDGKAHFPREGVFVSNGTHWFVTQRNFYEPQIITTDNTFVSGNCDVVIGIVNNTVYDPLQPELDSGGGSGGGQIYEGKLTAEGLRFGIVASRFNHALVDRLVEGAIDAIVRHGGREEDITLVRVPGSWEIPVAAGELARKEDIDAVIAIGVLIRGATPHFDYIASEVSKGLADLSLELRKPITFGVITADTLEQAIERAGTKHGNKGWEAALSAIEMANLFKSLR

SEQ ID NO: 7858 - protein, 1307 aa, Artificial Sequence
  SARS-CoV-2/Sweden/01/2020__EPI_ISL_411951 spike protein (1-1147)(K986P_V987P_P1069F) LumSynth construct
MFVFLVLLPLVSSQCVNLTTRTQLPPAYTNSFTRGVYYPDKVFRSSVLHSTQDLFLPFFSNVTWFHAIHVSGTNGTKRFDNPVLPFNDGVYFASTEKSNIIRGWIFGTTLDSKTQSLLIVNNATNVVIKVCEFQFCNDPFLGVYYHKNNKSWMESEFRVYSSANNCTFEYVSQPFLMDLEGKQGNFKNLREFVFKNIDGYFKIYSKHTPINLVRDLPQGFSALEPLVDLPIGINITRFQTLLALHRSYLTPGDSSSGWTAGAAAYYVGYLQPRTFLLKYNENGTITDAVDCALDPLSETKCTLKSFTVEKGIYQTSNFRVQPTESIVRFPNITNLCPFGEVFNATRFASVYAWNRKRISNCVADYSVLYNSASFSTFKCYGVSPTKLNDLCFTNVYADSFVIRGDEVRQIAPGQTGKIADYNYKLPDDFTGCVIAWNSNNLDSKVGGNYNYLYRLFRKSNLKPFERDISTEIYQAGSTPCNGVEGFNCYFPLQSYGFQPTNGVGYQPYRVVVLSFELLHAPATVCGPKKSTNLVKNKCVNFNFNGLTGTGVLTESNKKFLPFQQFGRDIADTTDAVRDPQTLEILDITPCSFGGVSVITPGTNTSNQVAVLYQDVNCTEVPVAIHADQLTPTWRVYSTGSNVFQTRAGCLIGAEHVNNSYECDIPIGAGICASYQTQTNSPRRARSVASQSIIAYTMSLGAENSVAYSNNSIAIPTNFTISVTTEILPVSMTKTSVDCTMYICGDSTECSNLLLQYGSFCTQLNRALTGIAVEQDKNTQEVFAQVKQIYKTPPIKDCGGFNFSQILPDPSKPSKRSFIEDLLFNKVTLADAGFIKQYGDCLGDIAARDLICAQKFNGLTVLPPLLTDEMIAQYTSALLAGTITSGWTFGAGAALQIPFAMQMAYRFNGIGVTQNVLYENQKLIANQFNSAIGKIQDSLSSTASALGKLQDVVNQNAQALNTLVKQLSSNFGAISSVLNDILSRLDPPEAEVQIDRLITGRLQSLQTYVTQQLIRAAEIRASANLAATKMSECVLGQSKRVDFCGKGYHLMSFPQSAPHGVVFLHVTYVFAQEKNFTTAPAICHDGKAHFPREGVFVSNGTHWFVTQRNFYEPQIITTDNTFVSGNCDVVIGIVNNTVYDPLQPELDSGGGSGGGQIYEGKLTAEGLRFGIVASRFNHALVDRLVEGAIDAIVRHGGREEDITLVRVPGSWEIPVAAGELARKEDIDAVIAIGVLIRGATPHFDYIASEVSKGLADLSLELRKPITFGVITADTLEQAIERAGTKHGNKGWEAALSAIEMANLFKSLR

SEQ ID NO: 7859 - protein, 1307 aa, Artificial Sequence
  SARS-CoV-2/Tianmen/HBCDC-HB-07/2020__EPI_ISL_412983 spike protein (1-1147)(K986P_V987P_P1069F) LumSynth construct
MFVFLVLLPLVSSQCVNLTTRTQLPPAYTNSFTRGVYYPDKVFRSSVLHSTQDLFLPFFSNVTWFHAIHVSGTNGTKRFDNPVLPFNDGVYFASTEKSNIIRGWIFGTTLDSKTQSLLIVNNATNVVIKVCEFQFCNDPFLGVYYHKNNKSWMESEFRVYSSANNCTFEYVSQPFLMDLEGKQGNFKNLREFVFKNIDGYFKIYSKHTPINLVRDLPQGFSALEPLVDLPIGINITRFQTLLALHRSYLTPGDSSSGWTAGAAAYYVGYLQPRTFLLKYNENGTITDAVDCALDPLSETKCTLKSFTVEKGIYQTSNFRVQPTESIVRFPNITNLCPFGEVFNATRFASVYAWNRKRISNCVADYSVLYNSASFSTFKCYGVSPTKLNDLCFTNVYADSFVIRGDEVRQIAPGQTGKIADYNYKLPDDFTGCVIAWNSNNLDSKVGGNYNYLYRLFRKSNLKPFERDISTEIYQAGSTPCNGVEGFNCYFPLQSYGFQPTNGVGYQPYRVVVLSFELLHAPATVCGPKKSTNLVKNKCVNFNFNGLTGTGVLTESNKKFLPFQQFGRDIADTTDAVRDPQTLEILDITPCSFGGVSVITPGTNTSNQVAVLYQDLNCTEVPVAIHADQLTPTWRVYSTGSNVFQTRAGCLIGAEHVNNSYECDIPIGAGICASYQTQTNSPRRARSVASQSIIAYTMSLGAENSVAYSNNSIAIPTNFTISVTTEILPVSMTKTSVDCTMYICGDSTECSNLLLQYGSFCTQLNRALTGIAVEQDKNTQEVFAQVKQIYKTPPIKDFGGFNFSQILPDPSKPSKRSFIEDLLFNKVTLADAGFIKQYGDCLGDIAARDLICAQKFNGLTVLPPLLTDEMIAQYTSALLAGTITSGWTFGAGAALQIPFAMQMAYRFNGIGVTQNVLYENQKLIANQFNSAIGKIQDSLSSTASALGKLQDVVNQNAQALNTLVKQLSSNFGAISSVLNDILSRLDPPEAEVQIDRLITGRLQSLQTYVTQQLIRAAEIRASANLAATKMSECVLGQSKRVDFCGKGYHLMSFPQSAPHGVVFLHVTYVFAQEKNFTTAPAICHDGKAHFPREGVFVSNGTHWFVTQRNFYEPQIITTDNTFVSGNCDVVIGIVNNTVYDPLQPELDSGGGSGGGQIYEGKLTAEGLRFGIVASRFNHALVDRLVEGAIDAIVRHGGREEDITLVRVPGSWEIPVAAGELARKEDIDAVIAIGVLIRGATPHFDYIASEVSKGLADLSLELRKPITFGVITADTLEQAIERAGTKHGNKGWEAALSAIEMANLFKSLR

SEQ ID NO: 7860 - protein, 1307 aa, Artificial Sequence
  SARS-CoV-2/Hong Kong/case42_VM20002493/2020__EPI_ISL_414527 spike protein (1-1147)(K986P_V987P_P1069F) LumSynth construct
MFVFLVLLPLVSSQCVNLTTRTQLPPAYTNSFTRGVYYPDKVFRSSVLHSTQDLFLPFFSNVTWFHAIHVSGTNGTKRFDNPVLPFNDGVYFASTEKSNIIRGWIFGTTLDSKTQSLLIVNNATNVVIKVCEFQFCNDPFLGVYYHKNNKSWMESEFRVYSSANNCTFEYVSQPFLMDLEGKQGNFKNLREFVFKNIDGYFKIYSKHTPINLVRDLPQGFSALEPLVDLPIGINITRFQTLLALHRSYLTPGDSSSGWTAGAAAYYVGYLQPRTFLLKYNENGTITDAVDCALDPLSETKCTLKSFTVEKGIYQTSNFRVQPTESIVRFPNITNLCPFGEVFNATRFASVYAWNRKRISNCVADYSVLYNSASFSTFKCYGVSPTKLNDLCFTNVYADSFVIRGDEVRQIAPGQTGKIADYNYKLPDDFTGCVIAWNSNNLDSKVGGNYNYLYRLFRKSNLKPFERDISTEIYQAGSTPCNGVEGFNCYFPLQSYGFQPTNGVGYQPYRVVVLSFELLHAPATVCGPKKSTNLVKNKCVNFNFNGLTGTGVLTESNKKFLPFQQFGRDIADTTDAVRDPQTLEILDITPCSFGGVSVITPGTNTSNQVAVLYQDVNCTEVPVAIHADQLTPTWRVYSTGSNVFQTRAGCLIGAEHVNNSYECDIPIGAGICASYQTQTNSPRRARSVASQSIIAYTMSLGAENSVAYSNNSIAIPTNFAISVTTEILPVSMTKTSVDCTMYICGDSTECSNLLLQYGSFCTQLNRALTGIAVEQDKNTQEVFAQVKQIYKTPPIKDFGGFNFSQILPDPSKPSKRSFIEDLLFNKVTLADAGFIKQYGDCLGDIAARDLICAQKFNGLTVLPPLLTDEMIAQYTSALLAGTITSGWTFGAGAALQIPFAMQMAYRFNGIGVTQNVLYENQKLIANQFNSAIGKIQDSLSSTASALGKLQDVVNQNAQALNTLVKQLSSNFGAISSVLNDILSRLDPPEAEVQIDRLITGRLQSLQTYVTQQLIRAAEIRASANLAATKMSECVLGQSKRVDFCGKGYHLMSFPQSAPHGVVFLHVTYVFAQEKNFTTAPAICHDGKAHFPREGVFVSNGTHWFVTQRNFYEPQIITTDNTFVSGNCDVVIGIVNNTVYDPLQPELDSGGGSGGGQIYEGKLTAEGLRFGIVASRFNHALVDRLVEGAIDAIVRHGGREEDITLVRVPGSWEIPVAAGELARKEDIDAVIAIGVLIRGATPHFDYIASEVSKGLADLSLELRKPITFGVITADTLEQAIERAGTKHGNKGWEAALSAIEMANLFKSLR

SEQ ID NO: 7861 - protein, 1307 aa, Artificial Sequence
  SARS-CoV-2/USA/CruiseA-23/2020__EPI_ISL_414482 spike protein (1-1147)(K986P_V987P_P1069F) LumSynth construct
MFVFLVLLPLVSSQCVNLTTRTQLPPAYTNSFTRGVYYPDKVFRSSVLHSTQDLFLPFFSNVTWFHAIHVSGTNGTKRFDNPVLPFNDGVYFASTEKSNIIRGWIFGTTLDSKTQSLLIVNNATNVVIKVCEFQFCNDPFLGVYYHKNNKSWMESEFRVYSSANNCTFEYVSQPFLMDLEVKQGNFKNLREFVFKNIDGYFKIYSKHTPINLVRDLPQGFSALEPLVDLPIGINITRFQTLLALHRSYLTPGDSSSGWTAGAAAYYVGYLQPRTFLLKYNENGTITDAVDCALDPLSETKCTLKSFTVEKGIYQTSNFRVQPTESIVRFPNITNLCPFGEVFNATRFASVYAWNRKRISNCVADYSVLYNSASFSTFKCYGVSPTKLNDLCFTNVYADSFVIRGDEVRQIAPGQTGKIADYNYKLPDDFTGCVIAWNSNNLDSKVGGNYNYLYRLFRKSNLKPFERDISTEIYQAGSTPCNGVEGFNCYFPLQSYGFQPTNGVGYQPYRVVVLSFELLHAPATVCGPKKSTNLVKNKCVNFNFNGLTGTGVLTESNKKFLPFQQFGRDIADTTDAVRDPQTLEILDITPCSFGGVSVITPGTNTSNQVAVLYQDVNCTEVPVAIHADQLTPTWRVYSTGSNVFQTRAGCLIGAEHVNNSYECDIPIGAGICASYQTQTNSPRRARSVASQSIIAYTMSLGAENSVAYSNNSIAIPTNFTISVTTEILPVSMTKTSVDCTMYICGDSTECSNLLLQYGSFCTQLNRALTGIAVEQDKNTQEVFAQVKQIYKTPPIKDFGGFNFSQILPDPSKPSKRSFIEDLLFNKVTLADAGFIKQYGDCLGDIAARDLICAQKFNGLTVLPPLLTDEMIAQYTSALLAGTITSGWTFGAGAALQIPFAMQMAYRFNGIGVTQNVLYENQKLIANQFNSAIGKIQDSLSSTASALGKLQDVVNQNAQALNTLVKQLSSNFGAISSVLNDILSRLDPPEAEVQIDRLITGRLQSLQTYVTQQLIRAAEIRASANLAATKMSECVLGQSKRVDFCGKGYHLMSFPQSAPHGVVFLHVTYVFAQEKNFTTAPAICHDGKAHFPREGVFVSNGTHWFVTQRNFYEPQIITTDNTFVSGNCDVVIGIVNNTVYDPLQPELDSGGGSGGGQIYEGKLTAEGLRFGIVASRFNHALVDRLVEGAIDAIVRHGGREEDITLVRVPGSWEIPVAAGELARKEDIDAVIAIGVLIRGATPHFDYIASEVSKGLADLSLELRKPITFGVITADTLEQAIERAGTKHGNKGWEAALSAIEMANLFKSLR

SEQ ID NO: 7862 - protein, 1307 aa, Artificial Sequence
  SARS-CoV-2/Hong Kong/case85_VM20002868/2020__EPI_ISL_414519 spike protein (1-1147)(K986P_V987P_P1069F) LumSynth construct
MFVFLVLVPLVSSQCVNLTTRTQLPPAYTNSFTRGVYYPDKVFRSSVLHSTQDLFLPFFSNVTWFHAIHVSGTNGTKRFDNPVLPFNDGVYFASTEKSNIIRGWIFGTTLDSKTQSLLIVNNATNVVIKVCEFQFCNDPFLGVYYHKNNKSWMESEFRVYSSANNCTFEYVSQPFLMDLEGKQGNFKNLREFVFKNIDGYFKIYSKHTPINLVRDLPQGFSALEPLVDLPIGINITRFQTLLALHRSYLTPGDSSSGWTAGAAAYYVGYLQPRTFLLKYNENGTITDAVDCALDPLSETKCTLKSFTVEKGIYQTSNFRVQPTESIVRFPNITNLCPFGEVFNATRFASVYAWNRKRISNCVADYSVLYNSASFSTFKCYGVSPTKLNDLCFTNVYADSFVIRGDEVRQIAPGQTGKIADYNYKLPDDFTGCVIAWNSNNLDSKVGGNYNYLYRLFRKSNLKPFERDISTEIYQAGSTPCNGVEGFNCYFPLQSYGFQPTNGVGYQPYRVVVLSFELLHAPATVCGPKKSTNLVKNKCVNFNFNGLTGTGVLTESNKKFLPFQQFGRDIADTTDAVRDPQTLEILDITPCSFGGVSVITPGTNTSNQVAVLYQDVNCTEVPVAIHADQLTPTWRVYSTGSNVFQTRAGCLIGAEHVNNSYECDIPIGAGICASYQTQTNSPRRARSVASQSIIAYTMSLGAENSVAYSNNSIAIPTNFTISVTTEILPVSMTKTSVDCTMYICGDSTECSNLLLQYGSFCTQLNRALTGIAVEQDKNTQEVFAQVKQIYKTPPIKDFGGFNFSQILPDPSKPSKRSFIEDLLFNKVTLADAGFIKQYGDCLGDIAARDLICAQKFNGLTVLPPLLTDEMIAQYTSALLAGTITSGWTFGAGAALQIPFAMQMAYRFNGIGVTQNVLYENQKLIANQFNSAIGKIQDSLSSTASALGKLQDVVNQNAQALNTLVKQLSSNFGAISSVLNDILSRLDPPEAEVQIDRLITGRLQSLQTYVTQQLIRAAEIRASANLAATKMSECVLGQSKRVDFCGKGYHLMSFPQSAPHGVVFLHVTYVFAQEKNFTTAPAICHDGKAHFPREGVFVSNGTHWFVTQRNFYEPQIITTDNTFVSGNCDVVIGIVNNTVYDPLQPELDSGGGSGGGQIYEGKLTAEGLRFGIVASRFNHALVDRLVEGAIDAIVRHGGREEDITLVRVPGSWEIPVAAGELARKEDIDAVIAIGVLIRGATPHFDYIASEVSKGLADLSLELRKPITFGVITADTLEQAIERAGTKHGNKGWEAALSAIEMANLFKSLR

SEQ ID NO: 7863 - protein, 1307 aa, Artificial Sequence; identical to SEQ ID NO: 7853
  SARS-CoV-2/England/200990660/2020__EPI_ISL_414523 spike protein (1-1147)(K986P_V987P_P1069F) LumSynth construct

SEQ ID NO: 7864 - protein, 1307 aa, Artificial Sequence
  SARS-CoV-2/Australia/NSW09/2020__EPI_ISL_413595 spike protein (1-1147)(K986P_V987P_P1069F) LumSynth construct
MFVFLVLLPLVSSQCVNLTTRTQLPPAYTNSFTRGVYYPDKVFRSSVLHSTQDLFLPFFSNVTWFHAIHVSGTNGTKRFDNPVLPFNDGVYFASTEKSNIIRGWIFGTTLDSKTQSLLIVNNATNVVIKVCEFQFCNDPFLGVYYHKNNKSWMESEFRVYSSANNCTFEYVSQPFLMDLEGKQGNFKNLREFVFKNIDGYFKIYSKHTPINLVRDLPQGFSALEPLVDLPIGINITRFQTLLALHRSYLTPGDSSSGWTAGAAAYYVGYLQPRTFLLKYNENGTITDAVDCALDPLSETKCTLKSFTVEKGIYQTSNFRVQPTESIVRFPNITNLCPFGEVFNATRFASVYAWNRKRISNCVADYSVLYNSASFSTFKCYGVSPTKLNDLCFTNVYADSFVIRGDEVRQIAPGQTGKIADYNYKLPDDFTGCVIAWNSNNLDSKVGGNYNYLYRLFRKSNLKPFERDISTEIYQAGSTPCNGVEGFNCYFPLQSYGFQPTNGVGYQPYRVVVLSFELLHAPATVCGPKKSTNLVKNKCVNFNFNGLTGTGVLTESNKKFLPFQQFGRDIADTTDAVRDPQTLEILDITPCSFGGVSVITPGTNTSNQVAVLYQDVNCTEVPVAIHADQLTPTWRVYSTGSNVFQTRAGCLIGAEHVNNSYECDIPIGAGICASYQTQTNSPRRARSVASQSIIAYTMSLGAENSVAYSNNSIAIPTNFTISVTTEILPVSMTKTSVDCTMYICGDSTECSNLLLQYGSFCTQLNRALTGIAVEQDKNTQEVFAQVKQIYKTPPIKDFGGFNFSQILPDPSKPSKRSFIEDLLFNKVTLADAGFIKQYGDCLGDIAARDLICAQKFNGLTVLPPLLTDEMIAQYTSALLAGTITSGWTFGAGAALQIPFAMQMAYRFNGIGVTQNVLYENQKLIANQFNSAIGKIQDSLSFTASALGKLQDVVNQNAQALNTLVKQLSSNFGAISSVLNDILSRLDPPEAEVQIDRLITGRLQSLQTYVTQQLIRAAEIRASANLAATKMSECVLGQSKRVDFCGKGYHLMSFPQSAPHGVVFLHVTYVFAQEKNFTTAPAICHDGKAHFPREGVFVSNGTHWFVTQRNFYEPQIITTDNTFVSGNCDVVIGIVNNTVYDPLQPELDSGGGSGGGQIYEGKLTAEGLRFGIVASRFNHALVDRLVEGAIDAIVRHGGREEDITLVRVPGSWEIPVAAGELARKEDIDAVIAIGVLIRGATPHFDYIASEVSKGLADLSLELRKPITFGVITADTLEQAIERAGTKHGNKGWEAALSAIEMANLFKSLR

SEQ ID NO: 7865 - protein, 1307 aa, Artificial Sequence; identical to SEQ ID NO: 7845
  SARS-CoV-2/Australia/NSW10/2020__EPI_ISL_413596 spike protein (1-1147)(K986P_V987P_P1069F) LumSynth construct

SEQ ID NO: 7866 - protein, 1307 aa, Artificial Sequence
  SARS-CoV-2/Switzerland/1000477797/2020__EPI_ISL_413023 spike protein (1-1147)(K986P_V987P_P1069F) LumSynth construct
MFVFLVLLPLVSSQCVNLTTRTQLPPAYTNSFTRGVYYPDKVFRSSVLHSTQDLFLPFFSNVTWFHAIHVSGTNGTKRFDNPVLPFNDGVYFASTEKSNIIRGWIFGTTLDSKTQSLLIVNNATNVVIKVCEFQFCNDPFLGVYYHKNNKSWMESEFRVYSSANNCTFEYVSQPFLMDLEGKQGNFKNLREFVFKNIDGYFNIYSKHTPINLVRDLPQGFSALEPLVDLPIGINITRFQTLLALHRSYLTPGDSSSGWTAGAAAYYVGYLQPRTFLLKYNENGTITDAVDCALDPLSETKCTLKSFTVEKGIYQTSNFRVQPTESIVRFPNITNLCPFGEVFNATRFASVYAWNRKRISNCVADYSVLYNSASFSTFKCYGVSPTKLNDLCFTNVYADSFVIRGDEVRQIAPGQTGKIADYNYKLPDDFTGCVIAWNSNNLDSKVGGNYNYLYRLFRKSNLKPFERDISTEIYQAGSTPCNGVEGFNCYFPLQSYGFQPTNGVGYQPYRVVVLSFELLHAPATVCGPKKSTNLVKNKCVNFNFNGLTGTGVLTESNKKFLPFQQFGRDIADTTDAVRDPQTLEILDITPCSFGGVSVITPGTNTSNQVAVLYQGVNCTEVPVAIHADQLTPTWRVYSTGSNVFQTRAGCLIGAEHVNNSYECDIPIGAGICASYQTQTNSPRRARSVASQSIIAYTMSLGAENSVAYSNNSIAIPTNFTISVTTEILPVSMTKTSVDCTMYICGDSTECSNLLLQYGSFCTQLNRALTGIAVEQDKNTQEVFAQVKQIYKTPPIKDFGGFNFSQILPDPSKPSKRSFIEDLLFNKVTLADAGFIKQYGDCLGDIAARDLICAQKFNGLTVLPPLLTDEMIAQYTSALLAGTITSGWTFGAGAALQIPFAMQMAYRFNGIGVTQNVLYENQKLIANQFNSAIGKIQDSLSSTASALGKLQDVVNQNAQALNTLVKQLSSNFGAISSVLNDILSRLDPPEAEVQIDRLITGRLQSLQTYVTQQLIRAAEIRASANLAATKMSECVLGQSKRVDFCGKGYHLMSFPQSAPHGVVFLHVTYVFAQEKNFTTAPAICHDGKAHFPREGVFVSNGTHWFVTQRNFYEPQIITTDNTFVSGNCDVVIGIVNNTVYDPLQPELDSGGGSGGGQIYEGKLTAEGLRFGIVASRFNHALVDRLVEGAIDAIVRHGGREEDITLVRVPGSWEIPVAAGELARKEDIDAVIAIGVLIRGATPHFDYIASEVSKGLADLSLELRKPITFGVITADTLEQAIERAGTKHGNKGWEAALSAIEMANLFKSLR

SEQ ID NO: 7867 - protein, 1307 aa, Artificial Sequence
  SARS-CoV-2/Belgium/BA-02291/2020__EPI_ISL_415159 spike protein (1-1147)(K986P_V987P_P1069F) LumSynth construct
MFVFLVLLPLVSSQCVNLTTRTQLPPAYTNSFTRGVYYPDKVFRSSVLHSTQDLFLPFFSNVTWFHAIHVSGTNGTKRFDNPVLPFNDGVYFASTEKSNIIRGWIFGTTLDSKTQSLLIVNNATNVVIKVCEFQFCNDPFLGVYYHKNNKSWMESEFRVYSSANNCTFEYVSQPFLMDLEGKQGNFKNLREFVFKNIDGYFKIYSKHTPINLVRDLPQGFSALEPLVDLPIGINITRFQTLLALHRSYLTPGDSSSGWTAGAAAYYVGYLQPRTFLLKYNENGTITDAVDCALDPLSETKCTLKSFTVEKGIYQTSNFRVQPTESIVRFPNITNLCPFGEVFNATRFASVYAWNRKRISNCVADYSVLYNSASFSTFKCYGVSPTKLNDLCFTNVYADSFVIRGDEVRQIAPGQTGKIADYNYKLPDDFTGCVIAWNSNNLDSKVGGNYNYLYRLFRRSNLKPFERDISTEIYQAGSTPCNGVEGFNCYFPLQSYGFQPTNGVGYQPYRVVVLSFELLPAPATVCGPKKSTNLVKNKCVNFNFNGLTGTGVLTESNKKFLPFQQFGRDIADTTDAVRDPQTLEILDITPCSFGGVSVITPGTNTSNQVAVLYQGVNCTEVPVAIHADQLTPTWRVYSTGSNVFQTRAGCLIGAEHVNNSYECDIPIGAGICASYQTQTNSPRRARSVASQSIIAYTMSLGAENSVAYSNNSIAIPTNFTISVTTEILPVSMTKTSVDCTMYICGDSTECSNLLLQYGSFCTQLNRALTGIAVEQDKNTQEVFAQVKQIYKTPPIKDFGGFNFSQILPDPSKPSKRSFIEDLLFNKVTLADAGFIKQYGDCLGDIAARDLICAQKFNGLTVLPPLLTDEMIAQYTSALLAGTITSGWTFGAGAALQIPFAMQMAYRFNGIGVTQNVLYENQKLIANQFNSAIGKIQDSLSSAAPALGKLQDVVNQNAQALNTLVKQLSSNFGAISSVLNDILSRLDPPEAEVQIDRLITGRLQSLQTYVTQQLIRAAEIRASANLAATKMSECVLGQSKRVDFCGKGYHLMSFPQSAPHGVVFLHVTYVFAQEKNFTTAPAICHDGKAHFPREGVFVSNGTHWFVTQRNFYEPQIITTDNTFVSGNCDVVIGIVNNTVYDPLQPELDSGGGSGGGQIYEGKLTAEGLRFGIVASRFNHALVDRLVEGAIDAIVRHGGREEDITLVRVPGSWEIPVAAGELARKEDIDAVIAIGVLIRGATPHFDYIASEVSKGLADLSLELRKPITFGVITADTLEQAIERAGTKHGNKGWEAALSAIEMANLFKSLR

SEQ ID NO: 7868 - protein, 1307 aa, Artificial Sequence
  SARS-CoV-2/USA/WA8-UW5/2020__EPI_ISL_413486 spike protein (1-1147)(K986P_V987P_P1069F) LumSynth construct
MFVFLVLLPLVSSQCVNLTTRTQLPPAYTNSFTRGVYYPDKVFRSSVLHSTQDLFLPFFSNVTWFHAIHVSGTNGTKRFDNPVLPFNDGVYFASTEKSNIIRGWIFGTTLDSKTQSLLIVNNATNVVIKVCEFQFCNDPFLGVYYHKNNKSWMESEFRVYSSANNCTFEYVSQPFLMDLEGKQGNFKNLREFVFKNIDGYFKIYSKHTPINLVRDLPQGFSALEPLVDLPIGINITRFQTLLALHRSYLTPGDSSSGWTAGAAAYYVGYLQPRTFLLKYNENGTITDAVDCALDPLSETKCTLKSFTVEKGIYQTSNFRVQPTESIVRFPNITNLCPFGEVFNATRFASVYAWNRKRISNCVADYSVLYNSASFSTFKCYGVSPTKLNDLCFTNVYADSFVIRGDEVRQIAPGQTGKIADYNYKLPDDFTGCVIAWNSNNLDSKVGGNYNYLYRLFRKSNLKPFERDISTEIYQAGSTPCNGVEGFNCYFPLQSYGFQPTNGVGYQPYRVVVLSFELLHAPATVCGPKKSTNLVKNKCVNFNFNGLTGTGVLTESNKKFLPFQQFGRDIADTTDAVRDPQTLEILDITPCSFGGVSVITPGTNTSNQVAVLYQDVNCTEVPVAIHADQLTPTWRVYSTGSNVFQTRAGCLIGAEYVNNSYECDIPIGAGICASYQTQTNSPRRARSVASQSIIAYTMSLGAENSVAYSNNSIAIPTNFTISVTTEILPVSMTKTSVDCTMYICGDSTECSNLLLQYGSFCTQLNRALTGIAVEQDKNTQEVFAQVKQIYKTPPIKDFGGFNFSQILPDPSKPSKRSFIEDLLFNKVTLADAGFIKQYGDCLGDIAARDLICAQKFNGLTVLPPLLTDEMIAQYTSALLAGTITSGWTFGAGAALQIPFAMQMAYRFNGIGVTQNVLYENQKLIANQFNSAIGKIQDSLSSTASALGKLQDVVNQNAQALNTLVKQLSSNFGAISSVLNDILSRLDPPEAEVQIDRLITGRLQSLQTYVTQQLIRAAEIRASANLAATKMSECVLGQSKRVDFCGKGYHLMSFPQSAPHGVVFLHVTYVFAQEKNFTTAPAICHDGKAHFPREGVFVSNGTHWFVTQRNFYEPQIITTDNTFVSGNCDVVIGIVNNTVYDPLQPELDSGGGSGGGQIYEGKLTAEGLRFGIVASRFNHALVDRLVEGAIDAIVRHGGREEDITLVRVPGSWEIPVAAGELARKEDIDAVIAIGVLIRGATPHFDYIASEVSKGLADLSLELRKPITFGVITADTLEQAIERAGTKHGNKGWEAALSAIEMANLFKSLR

SEQ ID NO: 7869 - protein, 1307 aa, Artificial Sequence
  SARS-CoV-2/England/20102000506/2020__EPI_ISL_415147 spike protein (1-1147)(K986P_V987P_P1069F) LumSynth construct
MFVFLVLLPLVSSQCVNLTTRTQLPPAYTNSFTRGVYYPDKVFRSSVLHSTQDLFLPFFSNVTWFHAIHVSGTNGTKRFDNPVLPFNDGVYFASTEKSNIIRGWIFGTTLDSKTQSLLIVNNATNVVIKVCEFQFCNDPFLGVYYHKNNKSWMESEFRVYSSANNCTFEYVSQPFLMDLEGKQGNFKNLREFVFKNIDGYFKIYSKHTPINLVRDLPQGFSALEPLVDLPIGINITRFQTLLALHRSYLTPGDSSSGWTAGAAAYYVGYLQPRTFLLKYNENGTITDAVDCALDPLSETKCTLKSFTVEKGIYQTSNFRVQPTESIVRFPNITNLCPFGEVFNATRFASVYAWNRKRISNCVADYSVLYNSASFSTFKCYGVSPTKLNDLCFTNVYADSFVIRGDEVRQIAPGQTGKIADYNYKLPDDFTGCVIAWNSNNLDSKVGGNYNYLYRLFRKSNLKPFERDISTEIYQAGSTPCNGVEGFNCYFPLQSYGFQPTNGVGYQPYRVVVLSFELLHAPATVCGPKKSTNLVKNKCVNFNFNGLTGTGVLTESNKKFLPFQQFGRDIADTTDAVRDPQTLEILDITPCSFGGVSVITPGTNTSNQVAVLYQGVNCTEVPVAIHADQLTPTWRVYSTGSNVFQTRAGCLIGAEHVNNSYECDIPIGAGICASYQTQTNSPRRARSVASQSIIAYTMSLGAENSVAYSNNSIAIPTNFTISVTTEILPVSMTKTSVDCTMYICGDSTECSNLLLQYGSFCTQLNRALTGIAVEQDKNTQEVFAQVKQIYKTPPIKDFGGFNFSQILPDPSKPSKRSFIEDLLFNKVTLADAGFIKQYGYCLGDIAARDLICAQKFNGLTVLPPLLTDEMIAQYTSALLAGTITSGWTFGAGAALQIPFAMQMAYRFNGIGVTQNVLYENQKLIANQFNSAIGKIQDSLSSTASALGKLQDVVNQNAQALNTLVKQLSSNFGAISSVLNDILSRLDPPEAEVQIDRLITGRLQSLQTYVTQQLIRAAEIRASANLAATKMSECVLGQSKRVDFCGKGYHLMSFPQSAPHGVVFLHVTYVFAQEKNFTTAPAICHDGKAHFPREGVFVSNGTHWFVTQRNFYEPQIITTDNTFVSGNCDVVIGIVNNTVYDPLQPELDSGGGSGGGQIYEGKLTAEGLRFGIVASRFNHALVDRLVEGAIDAIVRHGGREEDITLVRVPGSWEIPVAAGELARKEDIDAVIAIGVLIRGATPHFDYIASEVSKGLADLSLELRKPITFGVITADTLEQAIERAGTKHGNKGWEAALSAIEMANLFKSLR

SEQ ID NO: 7870 - protein, 1307 aa, Artificial Sequence
  SARS-CoV-2/Belgium/VAG-03013/2020__EPI_ISL_415155 spike protein (1-1147)(K986P_V987P_P1069F) LumSynth construct
MFVFLVLLPLVSSQCVNLTTRTQLPPAYTNSFTRGVYYPDKVFRSSVLHSTQDLFLPFFSNVTWFHAIHVSGTNGTKRFDNPVLPFNDGVYFASTEKSNIIRGWIFGTTLDSKTQSLLIVNNATNVVIKVCEFQFCNDPFLGVYYHKNNKSWMESEFRVYSSANNCTFEYVSQPFLMDLEGKQGNFKNLREFVFKNIDGYFKIYSKHTPINLVRDLPQGFSALEPLVDLPIGINITRFQTLLALHRSYLTPGDSSSGWTAGAAAYYVGYLQPRTFLLKYNENGTITDAVDCALDPLSETKCTLKSFTVEKGIYQTSNFRVQPTESIVRFPNITNLCPFGEVFNATRFASVYAWNRKRISNCVADYSVLYNSASFSTFKCYGVSPTKLNDLCFTNVYADSFVIRGDEVRQIAPGQTGKIADYNYKLPDDFTGCVIAWNSNNLDSKVGGNYNYLYRLFRKSNLKPFERDISTEIYQAGSTPCNGVEGFNCYFPLQSYGFQPTNGVGYQPYRVVVLSFELLHAPATVCGPKKSTNLVKNKCVNFNFNGLTGTGVLTESNKKFLPFQQFGRDIADTTDAVRDPQTLEILDITPCSFGGVSVITPGTNTSNQVAVLYQGVNCTEVPVAIHADQLTPTWRVYSTGSNVFQTRAGCLIGAEHVNNSYECDIPIGAGICASYQTQTNSPRRARSVASQSIIAYTMSLGAENSVAYSNNSIAIPTNFTISVTTEILPVSMTKTSVDCTMYICGDSTECSNLLLQYGSFCTQLNRALTGIAVEQDKNTQEVFAQVKQIYKTPPIKDFGGFNFSQILPDPSKPSKRSFIEDLLFNKVTLADAGFIKQYGDCLGDIAARDLICAQKFNGLTVLPPLLTDEMIAQYTSALLAGTITSGWTFGAGAALQIPFAMQMAYRFNGIGVTQNVLYENQKLIANQFNSAIGKIQDSLSSTATALGKLQDVVNQNAQALNTLVKQLSSNFGAISSVLNDILSRLDPPEAEVQIDRLITGRLQSLQTYVTQQLIRAAEIRASANLAATKMSECVLGQSKRVDFCGKGYHLMSFPQSAPHGVVFLHVTYVFAQEKNFTTAPAICHDGKAHFPREGVFVSNGTHWFVTQRNFYEPQIITTDNTFVSGNCDVVIGIVNNTVYDPLQPELDSGGGSGGGQIYEGKLTAEGLRFGIVASRFNHALVDRLVEGAIDAIVRHGGREEDITLVRVPGSWEIPVAAGELARKEDIDAVIAIGVLIRGATPHFDYIASEVSKGLADLSLELRKPITFGVITADTLEQAIERAGTKHGNKGWEAALSAIEMANLFKSLR

SEQ ID NO: 7871 - protein, 1307 aa, Artificial Sequence
  SARS-CoV-2/Belgium/BC-03016/2020__EPI_ISL_415157 spike protein (1-1147)(K986P_V987P_P1069F) LumSynth construct
MFVFLVLLPLVSSQCVNLTTRTQLPPAYTNSFTRGVYYPDKVFRSSVLHSTQDLFLPFFSNVTWFHAIHVSGTNGTKRFDNPVLPFNDGVYFASTEKSNIIRGWIFGTTLDSKTQSLLIVNNATNVVIKVCEFQFCNDPFLGVYYHKNNKSWMESEFRVYSSANNCTFEYVSQPFLMDLEGKQGNFKNLREFVFKNIDGYFKIYSKHTPINLVRDLPQGFSALEPLVDLPIGINITRFQTLLALHRSYLTPGDSSSGWTAGAAAYYVGYLQPRTFLLKYNENGTITDAVDCALDPLSETKCTLKSFTVEKGIYQTSNFRVQPTESIVRFPNITNLCPFGEVFNATRFASVYAWNRKRISNCVADYSVLYNSASFSTFKCYGVSPTKLNDLCFTNVYADSFVIRGDEVRQIAPGQTGKIADYNYKLPDDFTGCVIAWNSNNLDSKVGGNYNYLYRLFRKSNLKPFERDISTEIYQAGSTPCNGVEGFNCYFPLQSYGFQPTNGVGYQPYRVVVLSFELLHAPATVCGPKKSTNLVKNKCVNFNFNGLTGTGVLTESNKKFLPFQQFGRDIADTTDAVRDPQTLEILDITPCSFGGVSVITPGTNTSNQVAVLYQGVNCTEVPVAIHADQLTPTWRVYSTGSNVFQTRAGCLIGAEHVNNSYECDIPIGAGICASYQTQTNSPRRARSVASQSIIAYTMSLGAENSVAYSNNSIAIPTNFTISVTTEILPVSMTKTSVDCTMYICGDSTECSNLLLQYGSFCTQLNRALTGIAVEQDKNTQEVFAQVKQIYKTPPIKDFGGFNFSQILPDPSKPSKRSFIEDLLFNKVTLADAGFIKQYGDCLGDIAARDLICAQKFNGLTVLPPLLTDEMIAQYTSALLAGTITSGWTFGAGAALQIPFAMQMAYRFNGIGVTQNVLYENQKLIANQFNSAIGKIQDSLSSTAPALGKLQDVVNQNAQALNTLVKQLSSNFGAISSVLNDILSRLDPPEAEVQIDRLITGRLQSLQTYVTQQLIRAAEIRASANLAATKMSECVLGQSKRVDFCGKGYHLMSFPQSAPHGVVFLHVTYVFAQEKNFTTAPAICHDGKAHFPREGVFVSNGTHWFVTQRNFYEPQIITTDNTFVSGNCDVVIGIVNNTVYDPLQPELDSGGGSGGGQIYEGKLTAEGLRFGIVASRFNHALVDRLVEGAIDAIVRHGGREEDITLVRVPGSWEIPVAAGELARKEDIDAVIAIGVLIRGATPHFDYIASEVSKGLADLSLELRKPITFGVITADTLEQAIERAGTKHGNKGWEAALSAIEMANLFKSLR

SEQ ID NO: 7872 - protein, 1307 aa, Artificial Sequence
  SARS-CoV-2/Germany/BavPat3/2020__EPI_ISL_414521 spike protein (1-1147)(K986P_V987P_P1069F) LumSynth construct
MFVFLVLLPLVSSQCVNLTTRTQLPPAYTNSFTRGVYYPDKVFRSSVLHSTQDLFLPFFSNVTWFHAIHVSGTNGTKRFDNPVLPFNDGVYFASTEKSNIIRGWIFGTTLDSKTQSLLIVNNATNVVIKVCEFQFCNDPFLGVYYHKNNKSWMESEFRVYSSANNCTFEYVSQPFLMDLEGKQGNFKNLREFVFKNIDGYFKIYSKHTPINLVRDLPQGFSALEPLVDLPIGINITRFQTLLALHRSYLTPGDSSSGWTAGAAAYYVGYLQPRTFLLKYNENGTITDAVDCALDPLSETKCTLKSFTVEKGIYQTSNFRVQPTESIVRFPNITNLCPFGEVFNATRFASVYAWNRKRISNCVADYSVLYNSASFSTFKCYGVSPTKLNDLCFTNVYADSFVIRGDEVRQIAPGQTGKIADYNYKLPDDFTGCVIAWNSNNLDSKVGGNYNYLYRLFRKSNLKPFERDISTEIYQAGSTPCNGVEGFNCYFPLQSYGFQPTNGVGYQPYRVVVLSFELLHAPATVCGPKKSTNLVKNKCVNFNFNGLTGTGVLTESNKKFLPFQQFGRDIADTTDAVRDPQTLEILDITPCSFGGVSVITPGTNTSNQVAVLYQDVNCTEVPVAIHADQLTPTWRVYSTGSNVFQTRAGCLIGAEHVNNSYECDIPIGAGICASYQTQTNSPRRARSVASQSIIAYTMSLGAENSVAYSNNSIAIPTNFTISVTTEILPVSMTKTSVDCTMYICGDSTECSNLLLQYGSFCTQLNRALTGIAVEQDKNTQQVFAQVKQIYKTPPIKDFGGFNFSQILPDPSKPSKRSFIEDLLFNKVTLADAGFIKQYGDCLGDIAARDLICAQKFNGLTVLPPLLTDEMIAQYTSALLAGTITSGWTFGAGAALQIPFAMQMAYRFNGIGVTQNVLYENQKLIANQFNSAIGKIQDSLSSTASALGKLQDVVNQNAQALNTLVKQLSSNFGAISSVLNDILSRLDPPEAEVQIDRLITGRLQSLQTYVTQQLIRAAEIRASANLAATKMSECVLGQSKRVDFCGKGYHLMSFPQSAPHGVVFLHVTYVFAQEKNFTTAPAICHDGKAHFPREGVFVSNGTHWFVTQRNFYEPQIITTDNTFVSGNCDVVIGIVNNTVYDPLQPELDSGGGSGGGQIYEGKLTAEGLRFGIVASRFNHALVDRLVEGAIDAIVRHGGREEDITLVRVPGSWEIPVAAGELARKEDIDAVIAIGVLIRGATPHFDYIASEVSKGLADLSLELRKPITFGVITADTLEQAIERAGTKHGNKGWEAALSAIEMANLFKSLR

SEQ ID NO: 7873 - protein, 1307 aa, Artificial Sequence
  SARS-CoV-2/France/HF1805/2020__EPI_ISL_414628 spike protein (1-1147)(K986P_V987P_P1069F) LumSynth construct
MFVFLVLLPLVSSQCVNLTTRTQLPPAYTNSFTRGVYYPDKVFRSSVLHSTQDLFLPFFSNVTWFHAIHVSGTNGTKRFDNPVLPFNDGVYFASTEKSNIIRGWIFGTTLDSKTQSLLIVNNATNVVIKVCEFQFCNDPFLGVYYHKNNKSWMESEFRVYSSANNCTFEYVSQPFLMDLEGKQGNFKNLREFVFKNIDGYFKIYSKHTPINLVRDLPQGFSALEPLVDLPIGINITRFQTLLALHRSYLTPGDSSSGWTAGAAAYYVGYLQPRTFLLKYNENGTITDAVDCALDPLSETKCTLKSFTVEKGIYQTSNFRVQPTESIVRFPNITNLCPFGEVFNATRFASVYAWNRKRISNCVADYSVLYNSASFSTFKCYGVSPTKLNDLCFTNVYADSFVIRGDEVRQIAPGQTGKIADYNYKLPDDFTGCVIAWNSNNLDSKVGGNYNYLYRLFRKSNLKPFERDISTEIYQAGSTPCNGVEGFNCYFPLQSYGFQPTNGVGYQPYRVVVLSFELLHAPATVCGPKKSTNLVKNKCVNFNFNGLTGTGVLTESNKKFLPFQQFGRDIADTTDAVRDPQTLEILDITPCSFGGVSVITPGTNTSNQVAVLYQGVNCTEVPVAIHADQLTPTWRVYSTGSNVFQTRAGCLIGAEHVNNSYECDIPIGAGICASYQTQTNSPRRARSVASQSIIAYTMSLGAENSVAYSNNSIAIPTNFTISVTTEILPVSMTKTSVDCTMYICGDSTECSNLLLQYGSFCTQLNRALTGIAVEQDKNTQEVFAQVKQIYKTPPIKDFGGFNFSQILPDPSKPSKRSFIEDLLFNKVTLADAGFIKQYGDCLGDIAARDLICAQKFNGLTVLPPLLTDEMIAQYTSALLAGTITSGWTFGAGAALQIPFAMQMAYRFNGIGVTQNVLYENQKLIANQFNSAIGKIQDSLSSTASALGKLQDVVNQNAQALNTLVKQLSSNFGAISSVLNDILSRLDPPEAEVQIDRLITGRLQSLQTYVTQQLIRAAEIRASANLAATKMSECVLGQSKRVDFCGKGYHLMSFPQSAPHGVVFLHVTYVFAQEKNFTTAPAICHDGKAHFPREGVFVSNGTHWFVTQRNFYEPQIITTDNTFVSGNCDVVIGVVNNTVYDPLQPELDSGGGSGGGQIYEGKLTAEGLRFGIVASRFNHALVDRLVEGAIDAIVRHGGREEDITLVRVPGSWEIPVAAGELARKEDIDAVIAIGVLIRGATPHFDYIASEVSKGLADLSLELRKPITFGVITADTLEQAIERAGTKHGNKGWEAALSAIEMANLFKSLR

SEQ ID NO: 7874 - protein, 1307 aa, Artificial Sequence
  SARS-CoV-2/Netherlands/ZuidHolland_9/2020__EPI_ISL_414445 spike protein (1-1147)(K986P_V987P_P1069F) LumSynth construct
MFVFLVLLPLVSSQCVNLTTRTQLPPAYTNSFTRGVYYPDKVFRSSVLHSTQDLFLPFFSNVTWFHAIHVSGTNGTKRFDNPVLPFNDGVYFASTEKSNIIRGWIFGTTLDSKTQSLLIVNNATNVVIKVCEFQFCNDPFLGVYYHKNNKSWMESEFRVYSSANNCTFEYVSQPFLMDLEGKQGNFKNLREFVFKNIDGYFKIYSKHTPINLVRDLPQGFSALEPLVDLPIGINITRFQTLLALHRSYLTPGDSSSGWTAGAAAYYVGYLQPRTFLLKYNENGTITDAVDCALDPLSETKCTLKSFTVEKGIYQTSNFRVQPTESIVRFPNITNLCPFGEVFNATRFASVYAWNRKRISNCVADYSVLYNSASFSTFKCYGVSPTKLNDLCFTNVYADSFVIRGDEVRQIAPGQTGKIADYNYKLPDDFTGCVIAWNSNNLDSKVGGNYNYLYRLFRKSNLKPFERDISTEIYQAGSTPCNGVEGFNCYFPLQSYGFQPTNGVGYQPYRVVVLSFELLHAPATVCGPKKSTNLVKNKCVNFNFNGLTGTGVLTESNKKFLPFQQFGRDIADTTDAVRDPQTLEILDITPCSFGGVSVITPGTNTSNQVAVLYQGVNCTEVPVAIHADQLTPTWRVYSTGSNVFQTRAGCLIGAEHVNNSYECDIPIGAGICASYQTQTNSPRRARSVASQSIIAYTMSLGAENSVAYSNNSIAIPTNFTISVTTEILPVSMTKTSVDCTMYICGDSTECSNLLLQYGSFCTQLNRALTGIAVEQDKNTQEVFAQVKQIYKTPPIKDFGGFNFSQILPDPSKPSKRSFIEDLLFNKVTLADAGFIKQYGDCLGDIAARDLICVQKFNGLTVLPPLLTDEMIAQYTSALLAGTITSGWTFGAGAALQIPFAMQMAYRFNGIGVTQNVLYENQKLIANQFNSAIGKIQDSLSSTASALGKLQDVVNQNAQALNTLVKQLSSNFGAISSVLNDILSRLDPPEAEVQIDRLITGRLQSLQTYVTQQLIRAAEIRASANLAATKMSECVLGQSKRVDFCGKGYHLMSFPQSAPHGVVFLHVTYVFAQEKNFTTAPAICHDGKAHFPREGVFVSNGTHWFVTQRNFYEPQIITTDNTFVSGNCDVVIGIVNNTVYDPLQPELDSGGGSGGGQIYEGKLTAEGLRFGIVASRFNHALVDRLVEGAIDAIVRHGGREEDITLVRVPGSWEIPVAAGELARKEDIDAVIAIGVLIRGATPHFDYIASEVSKGLADLSLELRKPITFGVITADTLEQAIERAGTKHGNKGWEAALSAIEMANLFKSLR

SEQ ID NO: 7875 - protein, 1307 aa, Artificial Sequence
  SARS-CoV-2/Finland/FIN03032020A/2020__EPI_ISL_413602 spike protein (1-1147)(K986P_V987P_P1069F) LumSynth construct
MFVFLVLLPLVSSQCVNLTTRTQLPPAYTNSFTRGVYYPDKVFRSSVLHSTQDLFLPFFSNVTWFHAIHVSGTNGTKRFDNPVLPFNDGVYFASTEKSNIIRGWIFGTTLDSKTQSLLIVNNATNVVIKVCEFQFCNDPFLGVYYHKNNKSWMESEFRVYSSANNCTFEYVSQPFLMDLEGKQGNFKNLREFVFKNIDGYFKIYSKHTPINLVRDLPQGFSALEPLVDLPIGINITRFQTLLALHRSYLTPGDSSSGWTAGAAAYYVGYLQPRTFLLKYNENGTITDAVDCALDPLSETKCTLKSFTVEKGIYQTSNFRVQPTESIVRFPNITNLCPFGEVFNATRFASVYAWNRKRISNCVADYSVLYNSASFSTFKCYGVSPTKLNDLCFTNVYADSFVIRGDEVRQIAPGQTGKIADYNYKLPDDFTGCVISWNSNNLDSKVGGNYNYLYRLFRKSNLKPFERDISTEIYQAGSTPCNGVEGFNCYFPLQSYGFQPTNGVGYQPYRVVVLSFELLHAPATVCGPKKSTNLVKNKCVNFNFNGLTGTGVLTESNKKFLPFQQFGRDIADTTDAVRDPQTLEILDITPCSFGGVSVITPGTNTSNQVAVLYQGVNCTEVPVAIHADQLTPTWRVYSTGSNVFQTRAGCLIGAEHVNNSYECDIPIGAGICASYQTQTNSPRRARSVASQSIIAYTMSLGAENSVAYSNNSIAIPTNFTISVTTEILPVSMTKTSVDCTMYICGDSTECSNLLLQYGSFCTQLNRALTGIAVEQDKNTQEVFAQVKQIYKTPPIKDFGGFNFSQILPDPSKPSKRSFIEDLLFNKVTLADAGFIKQYGDCLGDIAARDLICAQKFNGLTVLPPLLTDEMIAQYTSALLAGTITSGWTFGAGAALQIPFAMQMAYRFNGIGVTQNVLYENQKLIANQFNSAIGKIQDSLSSTASALGKLQDVVNQNAQALNTLVKQLSSNFGAISSVLNDILSRLDPPEAEVQIDRLITGRLQSLQTYVTQQLIRAAEIRASANLAATKMSECVLGQSKRVDFCGKGYHLMSFPQSAPHGVVFLHVTYVFAQEKNFTTAPAICHDGKAHFPREGVFVSNGTHWFVTQRNFYEPQIITTDNTFVSGNCDVVIGIVNNTVYDPLQPELDSGGGSGGGQIYEGKLTAEGLRFGIVASRFNHALVDRLVEGAIDAIVRHGGREEDITLVRVPGSWEIPVAAGELARKEDIDAVIAIGVLIRGATPHFDYIASEVSKGLADLSLELRKPITFGVITADTLEQAIERAGTKHGNKGWEAALSAIEMANLFKSLR

SEQ ID NO: 7876 - protein, 1307 aa, Artificial Sequence
  SARS-CoV-2/France/GE1977/2020__EPI_ISL_414632 spike protein (1-1147)(K986P_V987P_P1069F) LumSynth construct
MFVFLVLLPLVSSQCVNLTTRTQLPPAYTNSFTRGVYYPDKVFRSSVLHSTQDLFLPFFSNVTWFHAIHVSGTNGTKRFDNPVLPFNDGVYFASTEKSNIIRGWIFGTTLDSKTQSLLIVNNATNVVIKVCEFQFCNDPFLGVYYHKNNKSWMESEFRVYSSANNCTFEYVSQPFLMDLEGKQGNFKNLREFVFKNIDGYFKIYSKHTPINLVRDLPQGFSALEPLVDLPIGINITRFQTLLALHRSYLTPGDSSSGWTAGAAAYYVGYLQPRTFLLKYNENGTITDAVDCALDPLSETKCTLKSFTVEKGIYQTSNFRVQPTESIVRFPNITNLCPFGEVFNATRFASVYAWNRKRISNCVADYSVLYNSASFSTFKCYGVSPTKLNDLCFTNVYADSFVIRGDEVRQIAPGQTGKIADYNYKLPDDFTGCVIAWNSNNLDSKVGGNYNYLYRLFRKSNLKPFERDISTEIYQAGSTPCNGVEGFNCYFPLQSYGFQPTNGVGYQPYRVVVLSFELLHAPATVCGPKKSTNLVKNKCVNFNFNGLTGTGVLTESNKKFLPFQQFGRDIADTTDAVRDPQTLEILDITPCSFGGVSVITPGTNTSNQVAVLYQGVNCTEVPVAIHADQLTPTWRVYSTGSNVFQTRAGCLIGAEHVNNSYECDIPIGAGICASYQTQTNSPRRARSVASQSIIAYTMSLGAENSVAYSNNSIAIPTNFTISVTTEILPVSMTKTSVDCTMYICGDSTECSNLLLQYGSFCTQLNRALTGIAVEQDKNTQEVFAQVKQIYKTPPIKDFGGFNFSQILPDPSKPSKRSFIEDLLFNKVTLADAGFIKQYGDCLGDIAARDLICAQKFNGLTVLPPLLTDEMIAQYTSALLAGTITSGWTFGAGAALQIPFAMQMAYRFNGIGVTQNVLYENQKLIANQFNSAIGKIQDSLFSTASALGKLQDVVNQNAQALNTLVKQLSSNFGAISSVLNDILSRLDPPEAEVQIDRLITGRLQSLQTYVTQQLIRAAEIRASANLAATKMSECVLGQSKRVDFCGKGYHLMSFPQSAPHGVVFLHVTYVFAQEKNFTTAPAICHDGKAHFPREGVFVSNGTHWFVTQRNFYEPQIITTDNTFVSGNCDVVIGIVNNTVYDPLQPELDSGGGSGGGQIYEGKLTAEGLRFGIVASRFNHALVDRLVEGAIDAIVRHGGREEDITLVRVPGSWEIPVAAGELARKEDIDAVIAIGVLIRGATPHFDYIASEVSKGLADLSLELRKPITFGVITADTLEQAIERAGTKHGNKGWEAALSAIEMANLFKSLR

SEQ ID NO: 7877 - protein, 1307 aa, Artificial Sequence
  SARS-CoV-2/Finland/FIN-313/2020__EPI_ISL_414641 spike protein (1-1147)(K986P_V987P_P1069F) LumSynth construct
MFVFLVLLPLVSSQCVNLTTRTQLPPAYTNSFTRGVYYPDKVFRSSVLHSTQDLFLPFFSNVTWFHAIHVSGTNGTKRFDNPVLPFNDGVYFASTEKSNIIRGWIFGTTLDSKTQSLLIVNNATNVVIKVCEFQFCNDPFLGVYYHKNNKSWMESEFRVYSSANNCTFEYVSQPFLMDLEGKQGNFKNLREFVFKNIDGYFKIYSKHTPINLVRDLPQGFSALEPLVDLPIGINITRFKTLLALHRSYLTPGDSSSGWTAGAAAYYVGYLQPRTFLLKYNENGTITDAVDCALDPLSETKCTLKSFTVEKGIYQTSNFRVQPTESIVRFPNITNLCPFGEVFNATRFASVYAWNRKRISNCVADYSVLYNSASFSTFKCYGVSPTKLNDLCFTNVYADSFVIRGDEVRQIAPGQTGKIADYNYKLPDDFTGCVIAWNSNNLDSKVGGNYNYLYRLFRKSNLKPFERDISTEIYQAGSTPCNGVEGFNCYFPLQSYGFQPTNGVGYQPYRVVVLSFELLHAPATVCGPKKSTNLVKNKCVNFNFNGLTGTGVLTESNKKFLPFQQFGRDIADTTDAVRDPQTLEILDITPCSFGGVSVITPGTNTSNQVAVLYQGVNCTEVPVAIHADQLTPTWRVYSTGSNVFQTRAGCLIGAEHVNNSYECDIPIGAGICASYQTQTNSPRRARSVASQSIIAYTMSLGAENSVAYSNNSIAIPTNFTISVTTEILPVSMTKTSVDCTMYICGDSTECSNLLLQYGSFCTQLNRALTGIAVEQDKNTQEVFAQVKQIYKTPPIKDFGGFNFSQILPDPSKPSKRSFIEDLLFNKVTLADAGFIKQYGDCLGDIAARDLICAQKFNGLTVLPPLLTDEMIAQYTSALLAGTITSGWTFGAGAALQIPFAMQMAYRFNGIGVTQNVLYENQKLIANQFNSAIGKIQDSLSSTASALGKLQDVVNQNAQALNTLVKQLSSNFGAISSVLNDILSRLDPPEAEVQIDRLITGRLQSLQTYVTQQLIRAAEIRASANLAATKMSECVLGQSKRVDFCGKGYHLMSFPQSAPHGVVFLHVTYVFAQEKNFTTAPAICHDGKAHFPREGVFVSNGTHWFVTQRNFYEPQIITTDNTFVSGNCDVVIGIVNNTVYDPLQPELDSGGGSGGGQIYEGKLTAEGLRFGIVASRFNHALVDRLVEGAIDAIVRHGGREEDITLVRVPGSWEIPVAAGELARKEDIDAVIAIGVLIRGATPHFDYIASEVSKGLADLSLELRKPITFGVITADTLEQAIERAGTKHGNKGWEAALSAIEMANLFKSLR

SEQ ID NO: 7878 - protein, 1307 aa, Artificial Sequence
  SARS-CoV-2/Netherlands/ZuidHolland_2/2020__EPI_ISL_414556 spike protein (1-1147)(K986P_V987P_P1069F) LumSynth construct
MFVFLVLLPLVSSQCVNLTTRTQLPPAYTNSFTRGVYYPDKVFRSSVLHSTQDLFLPFFSNVTWFHAIHVSGTNGTKRFDNPVLPFNDGVYFASTEKSNIIRGWIFGTTLDSKTQSLLIVNNATNVVIKVCEFQFCNDPFLGVYYHKNNKSWMESEFRVYSSANNCTFEYVSQPFLMDLEGKQGNFKNLREFVFKNIDGYFKIYSKHTPINLVRDLPQGFSALEPLVDLPIGINITRFQTLLALHRSYLTPGDSSSGWTAGAAAYYVGYLQPRTFLLKYNENGTITDAVDCALDPLSETKCTLKSFTVEKGIYQTSNFRVQPTESIVRFPNITNLCPFGEVFNATRFASVYAWNRKRISNCVADYSVLYNSASFSTFKCYGVSPTKLNDLCFTNVYADSFVIRGDEVRQIAPGQTGKIADYNYKLPDDFTGCVIAWNSNNLDSKVGGNYNYLYRLFRKSNLKPFERDISTEIYQAGSTPCNGVEGFNCYFPLQSYGFQPTNGVGYQPYRVVVLSFELLHAPATVCGPKKSTNLVKNKCVNFNFNGLTGTGVLTESNKKFLPFQQFGRDIADTTDAVRDPQTLEILDITPCSFGGVSVITPGTNTSNQVAVLYQGVNCTEVPVAIHADQLTPTWRVYSTGSNVFQTRAGCLIGAEHVNNSYECDIPIGAGICASYQTQTNSPRRARSVASQSIIAYTMSLGAENSVAYSNNSIAIPTNFTISVTTEILPVSMTKTSVDCTMYICGDSTECSNLLLQYGSFCTQLNRALTGIALEQDKNTQEVFAQVKQIYKTPPIKDFGGFNFSQILPDPSKPSKRSFIEDLLFNKVTLADAGFIKQYGDCLGDIAARDLICAQKFNGLTVLPPLLTDEMIAQYTSALLAGTITSGWTFGAGAALQIPFAMQMAYRFNGIGVTQNVLYENQKLIANQFNSAIGKIQDSLSSTASALGKLQDVVNQNAQALNTLVKQLSSNFGAISSVLNDILSRLDPPEAEVQIDRLITGRLQSLQTYVTQQLIRAAEIRASANLAATKMSECVLGQSKRVDFCGKGYHLMSFPQSAPHGVVFLHVTYVFAQEKNFTTAPAICHDGKAHFPREGVFVSNGTHWFVTQRNFYEPQIITTDNTFVSGNCDVVIGIVNNTVYDPLQPELDSGGGSGGGQIYEGKLTAEGLRFGIVASRFNHALVDRLVEGAIDAIVRHGGREEDITLVRVPGSWEIPVAAGELARKEDIDAVIAIGVLIRGATPHFDYIASEVSKGLADLSLELRKPITFGVITADTLEQAIERAGTKHGNKGWEAALSAIEMANLFKSLR

SEQ ID NO: 7879 - protein, 1307 aa, Artificial Sequence
  SARS-CoV-2/USA/WA-UW31/2020__EPI_ISL_414618 spike protein (1-1147)(K986P_V987P_P1069F) LumSynth construct
MFVFLVLLPLVSSQCVNLTTRTQLPPAYTNSFTRGVYYPDKVFRSSVLHSTQDLFLPFFSNVTWFHAIHVSGTNGTKRFDNPVLPFNDGVYFASTEKSNIIRGWIFGTTLDSKTQSLLIVNNATNVVIKVCEFQFCNDPFLGVYYHKNNKSWMESEFRVYSSANNCTFEYVSQPFLMDLEGKQGNFKNLREFVFKNIDGYFKIYSKHTPINLVRDLPQGFSALEPLVDLPIGINITRFQTLLALHRSYLTPGDSSSGWTAGAAAYYVGYLQPRTFLLKYNENGTITDAVDCALDPLSETKCTLKSFTVEKGIYQTSNFRVQPTESIVRFPNITNLCPFGEVFNATRFASVYAWNRKRISNCVADYSVLYNSASFSTFKCYGVSPTKLNDLCFTNVYADSFVIRGDEVRQIAPGQTGKIADYNYKLPDDFTGCVIAWNSNNLDSKVGGNYNYLYRLFRKSNLKPFERDISTEIYQAGSTPCNGAEGFNCYFPLQSYGFQPTNGVGYQPYRVVVLSFELLHAPATVCGPKKSTNLVKNKCVNFNFNGLTGTGVLTESNKKFLPFQQFGRDIADTTDAVRDPQTLEILDITPCSFGGVSVITPGTNTSNQVAVLYQDVNCTEVPVAIHADQLTPTWRVYSTGSNVFQTRAGCLIGAEHVNNSYECDIPIGAGICASYQTQTNSPRRARSVASQSIIAYTMSLGAENSVAYSNNSIAIPTNFTISVTTEILPVSMTKTSVDCTMYICGDSTECSNLLLQYGSFCTQLNRALTGIAVEQDKNTQEVFAQVKQIYKTPPIKDFGGFNFSQILPDPSKPSKRSFIEDLLFNKVTLADAGFIKQYGDCLGDIAARDLICAQKFNGLTVLPPLLTDEMIAQYTSALLAGTITSGWTFGAGAALQIPFAMQMAYRFNGIGVTQNVLYENQKLIANQFNSAIGKIQDSLSSTASALGKLQDVVNQNAQALNTLVKQLSSNFGAISSVLNDILSRLDPPEAEVQIDRLITGRLQSLQTYVTQQLIRAAEIRASANLAATKMSECVLGQSKRVDFCGKGYHLMSFPQSAPHGVVFLHVTYVFAQEKNFTTAPAICHDGKAHFPREGVFVSNGTHWFVTQRNFYEPQIITTDNTFVSGNCDVVIGIVNNTVYDPLQPELDSGGGSGGGQIYEGKLTAEGLRFGIVASRFNHALVDRLVEGAIDAIVRHGGREEDITLVRVPGSWEIPVAAGELARKEDIDAVIAIGVLIRGATPHFDYIASEVSKGLADLSLELRKPITFGVITADTLEQAIERAGTKHGNKGWEAALSAIEMANLFKSLR

SEQ ID NO: 7880 - protein, 1307 aa, Artificial Sequence
  SARS-CoV-2/South Korea/SNU01/2020__EPI_ISL_411929 spike protein (1-1147)(K986P_V987P_P1069F) LumSynth construct
MFVFLVLLPLVSSQCVNLTTRTQLPPAYTNSFTRGVYYPDKVFRSSVLHSTQDLFLPFFSNVTWFHAIHVSGTNGTKRFDNPVLPFNDGVYFASTEKSNIIRGWIFGTTLDSKTQSLLIVNNATNVVIKVCEFQFCNDPFLGVYYHKNNKSWMESEFRVYSSANNCTFEYVSQPFLMDLEGKQGNFKNLREFVFKNIDGYFKIYSKHTPINLVRDLPQGFWALEPLVDLPIGINITRFQTLLALHRSYLTPGDSSSGWTAGAAAYYVGYLQPRTFLLKYNENGTITDAVDCALDPLSETKCTLKSFTVEKGIYQTSNFRVQPTESIVRFPNITNLCPFGEVFNATRFASVYAWNRKRISNCVADYSVLYNSASFSTFKCYGVSPTKLNDLCFTNVYADSFVIRGDEVRQIAPGQTGKIADYNYKLPDDFTGCVIAWNSNNLDSKVGGNYNYLYRLFRKSNLKPFERDISTEIYQAGSTPCNGVEGFNCYFPLQSYGFQPTNGVGYQPYRVVVLSFELLHAPATVCGPKKSTNLVKNKCVNFNFNGLTGTGVLTESNKKFLPFQQFGRDIADTTDAVRDPQTLEILDITPCSFGGVSVITPGTNTSNQVAVLYQDVNCTEVPVAIHADQLTPTWRVYSTGSNVFQTRAGCLIGAEHVNNSYECDIPIGAGICASYQTQTNSPRRARSVASQSIIAYTMSLGAENSVAYSNNSIAIPTNFTISVTTEILPVSMTKTSVDCTMYICGDSTECSNLLLQYGSFCTQLNRALTGIAVEQDKNTQEVFAQVKQIYKTPPIKDFGGFNFSQILPDPSKPSKRSFIEDLLFNKVTLADAGFIKQYGDCLGDIAARDLICAQKFNGLTVLPPLLTDEMIAQYTSALLAGTITSGWTFGAGAALQIPFAMQMAYRFNGIGVTQNVLYENQKLIANQFNSAIGKIQDSLSSTASALGKLQDVVNQNAQALNTLVKQLSSNFGAISSVLNDILSRLDPPEAEVQIDRLITGRLQSLQTYVTQQLIRAAEIRASANLAATKMSECVLGQSKRVDFCGKGYHLMSFPQSAPHGVVFLHVTYVFAQEKNFTTAPAICHDGKAHFPREGVFVSNGTHWFVTQRNFYEPQIITTDNTFVSGNCDVVIGIVNNTVYDPLQPELDSGGGSGGGQIYEGKLTAEGLRFGIVASRFNHALVDRLVEGAIDAIVRHGGREEDITLVRVPGSWEIPVAAGELARKEDIDAVIAIGVLIRGATPHFDYIASEVSKGLADLSLELRKPITFGVITADTLEQAIERAGTKHGNKGWEAALSAIEMANLFKSLR

SEQ ID NO: 7881 - protein, 1307 aa, Artificial Sequence
  SARS-CoV-2/China/WF0004/2020__EPI_ISL_413694 spike protein (1-1147)(K986P_V987P_P1069F) LumSynth construct
MFVFLVLLPLVSSQCVNLTTRTQLPPAYTNSFTRGVYYPDKVFRSSVLHSTQDLFLPFFSNVTWFHAIHVSGTNGTKRFDNPVLPFNDGVYFASTEKSNIIRGWIFGTTLDSKTQSLLIVNNATNVVIKVCEFQFCNDPFLGVYYHKNNKSWTESEFRVYSSANNCTFEYVSQPFLMDLEGKQGNFKNLREFVFKNIDGYFKIYSKHTPINLVRDLPQGFSALEPLVDLPIGINITRFQTLLALHRSYLTPGDSSSGWTAGAAAYYVGYLQPRTFLLKYNENGTITDAVDCALDPLSETKCTLKSFTVEKGIYQTSNFRVQPTESIVRFPNITNLCPFGEVFNATRFASVYAWNRKRISNCVADYSVLYNSASFSTFKCYGVSPTKLNDLCFTNVYADSFVIRGDEVRQIAPGQTGKIADYNYKLPDDFTGCVIAWNSNNLDSKVGGNYNYLYRLFRKSNLKPFERDISTEIYQAGSTPCNGVEGFNCYFPLQSYGFQPTNGVGYQPYRVVVLSFELLHAPATVCGPKKSTNLVKNKCVNFNFNGLTGTGVLTESNKKFLPFQQFGRDIADTTDAVRDPQTLEILDITPCSFGGVSVITPGTNTSNQVAVLYQDVNCTEVPVAIHADQLTPTWRVYSTGSNVFQTRAGCLIGAEHVNNSYECDIPIGAGICASYQTQTNSPRRARSVASQSIIAYTMSLGAENSVAYSNNSIAIPTNFTISVTTEILPVSMTKTSVDCTMYICGDSTECSNLLLQYGSFCTQLNRALTGIAVEQDKNTQEVFAQVKQIYKTPPIKDFGGFNFSQILPDPSKPSKRSFIEDLLFNKVTLADAGFIKQYGDCLGDIAARDLICAQKFNGLTVLPPLLTDEMIAQYTSALLAGTITSGWTFGAGAALQIPFAMQMAYRFNGIGVTQNVLYENQKLIANQFNSAIGKIQDSLSSTASALGKLQDVVNQNAQALNTLVKQLSSNFGAISSVLNDILSRLDPPEAEVQIDRLITGRLQSLQTYVTQQLIRAAEIRASANLAATKMSECVLGQSKRFDFCGKGYHLMSFPQSAPHGVVFLHVTYVFAQEKNFTTAPAICHDGKAHFPREGVFVSNGTHWFVTQRNFYEPQIITTDNTFVSGNCDVVIGIVNNTVYDPLQPELDSGGGSGGGQIYEGKLTAEGLRFGIVASRFNHALVDRLVEGAIDAIVRHGGREEDITLVRVPGSWEIPVAAGELARKEDIDAVIAIGVLIRGATPHFDYIASEVSKGLADLSLELRKPITFGVITADTLEQAIERAGTKHGNKGWEAALSAIEMANLFKSLR

SEQ ID NO: 7882 - protein, 1307 aa, Artificial Sequence
  SARS-CoV-2/China/WF0028/2020__EPI_ISL_413791 spike protein (1-1147)(K986P_V987P_P1069F) LumSynth construct
MFVFLVLLPLVSSQCVNLTTRTQLPPAYTNSFTRGVYYPDKVFRSSVLHSTQDLFLPFFSNVTWFHAIHVSGTNGTKRFDNPVLPFNDGVYFASTEKSNIIRGWIFGTTLDSKTQSLLIVNNATNVVIKVCEFQFCNDPFLGVYYHKNNKSWMESEFRVYSSANNCTFEYVSQPFLMDLEGKQGNFKNLREFVFKNIDGYFKIYSKHTPINLVRDLPQGFSALEPLVDLPIGINITRFQTLLALHRSYLTPGDSSSGWTAGAAAYYVGYLQPRTFLLKYNENGTITDAVDCALDPLSETKCTLKSFTVEKGIYQTSNFRVQPTESIVRFPNITNLCPFGEVFNATRFASVYAWNRKRISNCVADYSVLYNSASFSTFKCYGVSPTKLNDLCFTNVYADSFVIRGDEVRQIAPGQTGKIADYNYKLPDDFTGCVIAWNSNNLDSKVGGNYNYLYRLFRKSNLKPFERDISTEIYQAGSTPCNGVEGFNCYFPLQSYGFQPTNGVGYQPYRVVVLSFELLHAPATVCGPKKSTNLVKNKCVNFNFNGLTGTGVLTESNKKFLPFQQFGRDIADTTDAVRDPQTLEILDITPCSFGGVSVITPGTNTSNQVAVLYQDVNCTEVPVAIHADQLTPTWRVYSTGSNVFQTRAGCLIGAEHVNNSYECDIPIGAGICASYQTQTNSPRRARSVASQSIIAYTMSLGAENSVAYSNNSIAIPTNFTISVTTEILPVSMTKTSVDCTMYICGDSTECSNLLLQYGSFCTQLNRALTGIAVEQDKNTQEVFAQVKQIYKTPPIKDFGGFNFSQILPDPSKPSKRSFIEDLLFNKVTLADAGFIKQYGDCLGDIAARDLICAQKFNGLTVLPPLLTDEMIAQYTSALLAGTITSGWTFGAGAALQIPFAMQMAYRFNGIGVTQNVLYENQKLIANQFNSAIGKIQDSLSSTASALGKLQDVVNQNAQALNTLVKQLSSNFGAISSVLNDILSRLDPPEAEVQIDRLITGRLQSLQTYVTQQLIRAAEIRASANLAATKMSECVLGQSKRVDFCGKGYHLMSFPQSAPHGVVFLHVTYVFAQEKNFTTAPAICHDGKAHFPREGVFVSNGTHWFVTQRNFYEPQIITTDNTFVSGNCDVVIGIVNNTVYDPLQPELESGGGSGGGQIYEGKLTAEGLRFGIVASRFNHALVDRLVEGAIDAIVRHGGREEDITLVRVPGSWEIPVAAGELARKEDIDAVIAIGVLIRGATPHFDYIASEVSKGLADLSLELRKPITFGVITADTLEQAIERAGTKHGNKGWEAALSAIEMANLFKSLR

SEQ ID NO: 7883 - protein, 1307 aa, Artificial Sequence
  SARS-CoV-2/2019-nCoV/USA-CruiseA-18/2020__MT159716.1 spike protein (1-1147)(K986P_V987P_P1069F) LumSynth construct
MFVFLVLLPLVSSQCVNLTTRTQLPPAYTNSFTRGVYYPDKVFRSSVLHSTQDLFLPFFSNVTWFHAIHVSGTNGTKRFDNPVLPFNDGVYFASTEKSNIIRGWIFGTTLDSKTQSLLIVNNATNVVIKVCEFQFCNDPFLGVYYHKNNKSWMESELRVYSSANNCTFEYVSQPFLMDLEGKQGNFKNLREFVFKNIDGYFKIYSKHTPINLVRDLPQGFSALEPLVDLPIGINITRFQTLLALHRSYLTPGDSSSGWTAGAAAYYVGYLQPRTFLLKYNENGTITDAVDCALDPLSETKCTLKSFTVEKGIYQTSNFRVQPTESIVRFPNITNLCPFGEVFNATRFASVYAWNRKRISNCVADYSVLYNSASFSTFKCYGVSPTKLNDLCFTNVYADSFVIRGDEVRQIAPGQTGKIADYNYKLPDDFTGCVIAWNSNNLDSKVGGNYNYLYRLFRKSNLKPFERDISTEIYQAGSTPCNGVEGFNCYFPLQSYGFQPTNGVGYQPYRVVVLSFELLHAPATVCGPKKSTNLVKNKCVNFNFNGLTGTGVLTESNKKFLPFQQFGRDIADTTDAVRDPQTLEILDITPCSFGGVSVITPGTNTSNQVAVLYQDVNCTEVPVAIHADQLTPTWRVYSTGSNVFQTRAGCLIGAEHVNNSYECDIPIGAGICASYQTQTNSPRRARSVASQSIIAYTMSLGAENSVAYSNNSIAIPTNFTISVTTEILPVSMTKTSVDCTMYICGDSTECSNLLLQYGSFCTQLNRALTGIAVEQDKNTQEVFAQVKQIYKTPPIKDFGGFNFSQILPDPSKPSKRSFIEDLLFNKVTLADAGFIKQYGDCLGDIAARDLICAQKFNGLTVLPPLLTDEMIAQYTSALLAGTITSGWTFGAGAALQIPFAMQMAYRFNGIGVTQNVLYENQKLIANQFNSAIGKIQDSLSSTASALGKLQDVVNQNAQALNTLVKQLSSNFGAISSVLNDILSRLDPPEAEVQIDRLITGRLQSLQTYVTQQLIRAAEIRASANLAATKMSECVLGQSKRVDFCGKGYHLMSFPQSAPHGVVFLHVTYVFAQEKNFTTAPAICHDGKAHFPREGVFVSNGTHWFVTQRNFYEPQIITTDNTFVSGNCDVVIGIVNNTVYDPLQPELDSGGGSGGGQIYEGKLTAEGLRFGIVASRFNHALVDRLVEGAIDAIVRHGGREEDITLVRVPGSWEIPVAAGELARKEDIDAVIAIGVLIRGATPHFDYIASEVSKGLADLSLELRKPITFGVITADTLEQAIERAGTKHGNKGWEAALSAIEMANLFKSLR

SEQ ID NO: 7884 - protein, 1307 aa, Artificial Sequence
  SARS-CoV-2/SARS-CoV-2/Yunnan-01/human/2020/CHN__MT049951.1 spike protein (1-1147)(K986P_V987P_P1069F) LumSynth construct
MFVFLVLLPLVSSQCVNLTTRTQLPPANTNSFTRGVYYPDKVFRSSVLHSTQDLFLPFFSNVTWFHAIHVSGTNGTKRFDNPVLPFNDGVYFASTEKSNIIRGWIFGTTLDSKTQSLLIVNNATNVVIKVCEFQFCNDPFLGVYYHKNNKSWMESEFRVYSSANNCTFEYVSQPFLMDLEGKQGNFKNLREFVFKNIDGYFKIYSKHTPINLVRDLPQGFSALEPLVDLPIGINITRFQTLLALHRSYLTPGDSSSGWTAGAAAYYVGYLQPRTFLLKYNENGTITDAVDCALDPLSETKCTLKSFTVEKGIYQTSNFRVQPTESIVRFPNITNLCPFGEVFNATRFASVYAWNRKRISNCVADYSVLYNSASFSTFKCYGVSPTKLNDLCFTNVYADSFVIRGDEVRQIAPGQTGKIADYNYKLPDDFTGCVIAWNSNNLDSKVGGNYNYLYRLFRKSNLKPFERDISTEIYQAGSTPCNGVEGFNCYFPLQSYGFQPTNGVGYQPYRVVVLSFELLHAPATVCGPKKSTNLVKNKCVNFNFNGLTGTGVLTESNKKFLPFQQFGRDIADTTDAVRDPQTLEILDITPCSFGGVSVITPGTNTSNQVAVLYQDVNCTEVPVAIHADQLTPTWRVYSTGSNVFQTRAGCLIGAEHVNNSYECDIPIGAGICASYQTQTNSPRRARSVASQSIIAYTMSLGAENSVAYSNNSIAIPTNFTISVTTEILPVSMTKTSVDCTMYICGDSTECSNLLLQYGSFCTQLNRALTGIAVEQDKNTQEVFAQVKQIYKTPPIKDFGGFNFSQILPDPSKPSKRSFIEDLLFNKVTLADAGFIKQYGDCLGDIAARDLICAQKFNGLTVLPPLLTDEMIAQYTSALLAGTITSGWTFGAGAALQIPFAMQMAYRFNGIGVTQNVLYENQKLIANQFNSAIGKIQDSLSSTASALGKLQDVVNQNAQALNTLVKQLSSNFGAISSVLNDILSRLDPPEAEVQIDRLITGRLQSLQTYVTQQLIRAAEIRASANLAATKMSECVLGQSKRVDFCGKGYHLMSFPQSAPHGVVFLHVTYVFAQEKNFTTAPAICHDGKAHFPREGVFVSNGTHWFVTQRNFYEPQIITTDNTFVSGNCDVVIGIVNNTVYDPLQPELDSGGGSGGGQIYEGKLTAEGLRFGIVASRFNHALVDRLVEGAIDAIVRHGGREEDITLVRVPGSWEIPVAAGELARKEDIDAVIAIGVLIRGATPHFDYIASEVSKGLADLSLELRKPITFGVITADTLEQAIERAGTKHGNKGWEAALSAIEMANLFKSLR

SEQ ID NO: 7885 - protein, 1307 aa, Artificial Sequence
  SARS-CoV-2/USA/WA-UW292/2020__EPI_ISL_418077 spike protein (1-1147)(K986P_V987P_P1069F) LumSynth construct
MFVFLVLLPLVSSQCVNLTTRTQLPPAYTNSFTRGVYYPDKVFRSSVLHSTQDLFLPFFSNVTWFHAIHVSGTNGTKRFDNPVLPFNDGVYFASTEKSNIIRGWIFGTTLDSKTQSLLIVNNATNVVIKVCEFQFCNDPFLGVYYHKNNKSWMESEFRVYSSANNCTFEYVSQPFLMDLEGKQGNFKNLREFVFKNIDGYFKIYSKHTPINLVRDLPQGFSALEPLVDLPIGINITRFQTLLALHRSYLTPGDSSSGWTAGAAAYYVGYLQPRTFLLKYNENGTITDAVDCALDPLSETKCTLKSFTVEKGIYQTSNFRVQPTESIVRFPNITNLCPFGEVFNATRFASVYAWNRKRISNCVADYSVLYNSASFSTFKCYGVSPTKLNDLCFTNVYADSFVIRGDEVRQIAPGQTGKIADYNYKLPDDFTGCVIAWNSNNLDSKVGGNYNYLYRLFRKSNLKPFERDISTEIYQASSTPCNGVEGFNCYFPLQSYGFQPTNGVGYQPYRVVVLSFELLHAPATVCGPKKSTNLVKNKCVNFNFNGLTGTGVLTESNKKFLPFQQFGRDIADTTDAVRDPQTLEILDITPCSFGGVSVITPGTNTSNQVAVLYQDVNCTEVPVAIHADQLTPTWRVYSTGSNVFQTRAGCLIGAEHVNNSYECDIPIGAGICASYQTQTNSPRRARSVASQSIIAYTMSLGAENSVAYSNNSIAIPTNFTISVTTEILPVSMTKTSVDCTMYICGDSTECSNLLLQYGSFCTQLNRALTGIAVEQDKNTQEVFAQVKQIYKTPPIKDFGGFNFSQILPDPSKPSKRSFIEDLLFNKVTLADAGFIKQYGDCLGDIAARDLICAQKFNGLTVLPPLLTDEMIAQYTSALLAGTITSGWTFGAGAALQIPFAMQMAYRFNGIGVTQNVLYENQKLIANQFNSAIGKIQDSLSSTASALGKLQDVVNQNAQALNTLVKQLSSNFGAISSVLNDILSRLDPPEAEVQIDRLITGRLQSLQTYVTQQLIRAAEIRASANLAATKMSECVLGQSKRVDFCGKGYHLMSFPQSAPHGVVFLHVTYVFAQEKNFTTAPAICHDGKAHFPREGVFVSNGTHWFVTQRNFYEPQIITTDNTFVSGNCDVVIGIVNNTVYDPLQPELDSGGGSGGGQIYEGKLTAEGLRFGIVASRFNHALVDRLVEGAIDAIVRHGGREEDITLVRVPGSWEIPVAAGELARKEDIDAVIAIGVLIRGATPHFDYIASEVSKGLADLSLELRKPITFGVITADTLEQAIERAGTKHGNKGWEAALSAIEMANLFKSLR

SEQ ID NO: 7886 - protein, 1307 aa, Artificial Sequence
  SARS-CoV-2/Iceland/192/2020__EPI_ISL_417819 spike protein (1-1147)(K986P_V987P_P1069F) LumSynth construct
MFVFFVLLPLVSSQCVNLTTRTQLPPAYTNSFTRGVYYPDKVFRSSVLHSTQDLFLPFFSNVTWFHAIHVSGTNGTKRFDNPVLPFNDGVYFASTEKSNIIRGWIFGTTLDSKTQSLLIVNNATNVVIKVCEFQFCNDPFLGVYYHKNNKSWMESEFRVYSSANNCTFEYVSQPFLMDLEGKQGNFKNLREFVFKNIDGYFKIYSKHTPINLVRDLPQGFSALEPLVDLPIGINITRFQTLLALHRSYLTPGDSSSGWTAGAAAYYVGYLQPRTFLLKYNENGTITDAVDCALDPLSETKCTLKSFTVEKGIYQTSNFRVQPTESIVRFPNITNLCPFGEVFNATRFASVYAWNRKRISNCVADYSVLYNSASFSTFKCYGVSPTKLNDLCFTNVYADSFVIRGDEVRQIAPGQTGKIADYNYKLPDDFTGCVIAWNSNNLDSKVGGNYNYLYRLFRKSNLKPFERDISTEIYQAGSTPCNGVEGFNCYFPLQSYGFQPTNGVGYQPYRVVVLSFELLHAPATVCGPKKSTNLVKNKCVNFNFNGLTGTGVLTESNKKFLPFQQFGRDIADTTDAVRDPQTLEILDITPCSFGGVSVITPGTNTSNQVAVLYQGVNCTEVPVAIHADQLTPTWRVYSTGSNVFQTRAGCLIGAEHVNNSYECDIPIGAGICASYQTQTNSPRRARSVASQSIIAYTMSLGAENSVAYSNNSIAIPTNFTISVTTEILPVSMTKTSVDCTMYICGDSTECSNLLLQYGSFCTQLNRALTGIAVEQDKNTQEVFAQVKQIYKTPPIKDFGGFNFSQILPDPSKPSKRSFIEDLLFNKVTLADAGFIKQYGDCLGDIAARDLICAQKFNGLTVLPPLLTDEMIAQYTSALLAGTITSGWTFGAGAALQIPFAMQMAYRFNGIGVTQNVLYENQKLIANQFNSAIGKIQDSLSSTASALGKLQDVVNQNAQALNTLVKQLSSNFGAISSVLNDILSRLDPPEAEVQIDRLITGRLQSLQTYVTQQLIRAAEIRASANLAATKMSECVLGQSKRVDFCGKGYHLMSFPQSAPHGVVFLHVTYVFAQEKNFTTAPAICHDGKAHFPREGVFVSNGTHWFVTQRNFYEPQIITTDNTFVSGNCDVVIGIVNNTVYDPLQPELDSGGGSGGGQIYEGKLTAEGLRFGIVASRFNHALVDRLVEGAIDAIVRHGGREEDITLVRVPGSWEIPVAAGELARKEDIDAVIAIGVLIRGATPHFDYIASEVSKGLADLSLELRKPITFGVITADTLEQAIERAGTKHGNKGWEAALSAIEMANLFKSLR

SEQ ID NO: 7887 - protein, 1307 aa, Artificial Sequence
  SARS-CoV-2/Belgium/ULG-6939/2020__EPI_ISL_417020 spike protein (1-1147)(K986P_V987P_P1069F) LumSynth construct
MFVFLVLLPLVSSQCVNLTTRTQLPPAYTNSFTRGVYYPDKVFRSSVLHSTQDLFLPFFSNVTWFHAIHVSGTNGTKRFDNPVLPFNDGVYFASTEKSNIIRGWIFGTTLDSKTQSLLIVNNATNVVIKVCEFQFCNDPFLGVYYHKNNKSWMESEFRVYSSANNCTFEYVSQPFLMDLEGKQGNFKNLREFVFKNIDGYFKIYSKHTPINLVRDLPQGFSALEPLVDLPIGINITRFQTLLALHRSYLTPGDSSSGWTAGAAAYYVGYLQPRTFLLKYNENGTITDAVDCALDPLSETKCTLKSFTVEKGIYQTSNFRVQPTESIVRFPNITNLCPFGEVFNATRFASVYAWNRKRISNCVADYSVLYNSASFSTFKCYGVSPTKLNDLCFTNVYADSFVIRGDEVRQIAPGQTGKIADYNYKLPDDFTGCVIAWNSNNLDSKVGGNYNYLYRLFRKSNLKPFERDISTEIYQAGSTPCNGVEGFNCYFPLQSYGFQPTNGVGYQPYRVVVLSFELLHAPATVCGPKKSTNLVKNKCVNFNFNGLTGTGVLTESNKKFLPFQQFGRDIADTTDAVRDPQTLEILDITPCSFGGVSVITPGTNTSNQVAVLYQGVNCTEVPVAIHADQLTPTWRVYSTGSNVFQTRAGCLIGAEHVNNSYECDIPIGAGICASYQTQTNSPRRARSVASQSIIAYTMSLGAENSVVYSNNSIAIPTNFTISVTTEILPVSMTKTSVDCTMYICGDSTECSNLLLQYGSFCTQLNRALTGIAVEQDKNTQEVFAQVKQIYKTPPIKDFGGFNFSQILPDPSKPSKRSFIEDLLFNKVTLADAGFIKQYGDCLGDIAARDLICAQKFNGLTVLPPLLTDEMIAQYTSALLAGTITSGWTFGAGAALQIPFAMQMAYRFNGIGVTQNVLYENQKLIANQFNSAIGKIQDSLSSTASALGKLQDVVNQNAQALNTLVKQLSSNFGAISSVLNDILSRLDPPEAEVQIDRLITGRLQSLQTYVTQQLIRAAEIRASANLAATKMSECVLGQSKRVDFCGKGYHLMSFPQSAPHGVVFLHVTYVFAQEKNFTTAPAICHDGKAHFPREGVFVSNGTHWFVTQRNFYEPQIITTDNTFVSGNCDVVIGIVNNTVYDPLQPELDSGGGSGGGQIYEGKLTAEGLRFGIVASRFNHALVDRLVEGAIDAIVRHGGREEDITLVRVPGSWEIPVAAGELARKEDIDAVIAIGVLIRGATPHFDYIASEVSKGLADLSLELRKPITFGVITADTLEQAIERAGTKHGNKGWEAALSAIEMANLFKSLR

SEQ ID NO: 7888 - protein, 1307 aa, Artificial Sequence
  SARS-CoV-2/France/HF2496/2020__EPI_ISL_418231 spike protein (1-1147)(K986P_V987P_P1069F) LumSynth construct
MFVFLVLLPLVSSQCVNLTTRTQLPPAYTNSFTRGVYYPDKVFRSSVLHSTQDLFLPFFSNVTWFHAIHVSGTNGTKRFDNPVLPFNDGVYFASTEKSNIIRGWIFGTTLDSKTQSLLIVNNATNVVIKVCEFQFCNDPFLGVYYHKNNKSWMESEFRVYSSANNCTFEYVSQPFLMDLEGKQGNFKNLREFVFKNIDGYFKIYSKHTPINLVRDLPQGFSALEPLVDLPIGINITRFQTLLALHRSYLTPGDSSSGWTAGAAAYYVGYLQPRTFLLKYNENGTITDAVDCALDPLSETKCTLKSFTVEKGIYQTSNFRVQPTESIVRFPNITNLCPFGEVFNATRFASVYAWNRKRISNCVADYSVLYNSASFSTFKCYGVSPTKLNDLCFTNVYADSFVIRGDEVRQIAPGQTGKIADYNYKLPDDFTGCVIAWNSNNLDSKVGGNYNYLYRLFRKSNLKPFERDISTEIYQAGSTPCNGVEGFNCYFPLQSYGFQPTNGVGYQPYRVVVLSFELLHAPATVCGPKKSTNLVKNKCVNFNFNGLTGTGVLTESNKKFLPFQQFGRDIADTTDAVRDPQTLEILDITPCSFGGVSVITPGTNTSNQVAVLYQGVNCTEVPVAIHADQLTPTWRVYSTGSNVFQTRAGCLIGAEHVNNSYECDIPIGAGICASYQTQTNSPRRARSVASQSIIAYTMSLGAENSVAYSNNSIAIPTNFTISVTTEILPVSMTKTSVDCTMYICGDSTECSNLLLQYGSFCTQLNRALTGIAVEQDKNTQEVFAQVKQIYKTPPIKDFGGFNFSQILPDPSKPSKRSFIEDLLFNKVTLADAGFIKQYGDCLGDIVARDLICAQKFNGLTVLPPLLTDEMIAQYTSALLAGTITSGWTFGAGAALQIPFAMQMAYRFNGIGVTQNVLYENQKLIANQFNSAIGKIQDSLSSTASALGKLQDVVNQNAQALNTLVKQLSSNFGAISSVLNDILSRLDPPEAEVQIDRLITGRLQSLQTYVTQQLIRAAEIRASANLAATKMSECVLGQSKRVDFCGKGYHLMSFPQSAPHGVVFLHVTYVFAQEKNFTTAPAICHDGKAHFPREGVFVSNGTHWFVTQRNFYEPQIITTDNTFVSGNCDVVIGIVNNTVYDPLQPELDSGGGSGGGQIYEGKLTAEGLRFGIVASRFNHALVDRLVEGAIDAIVRHGGREEDITLVRVPGSWEIPVAAGELARKEDIDAVIAIGVLIRGATPHFDYIASEVSKGLADLSLELRKPITFGVITADTLEQAIERAGTKHGNKGWEAALSAIEMANLFKSLR

SEQ ID NO: 7889 - protein, 1307 aa, Artificial Sequence
  SARS-CoV-2/USA/WA-UW291/2020__EPI_ISL_418076 spike protein (1-1147)(K986P_V987P_P1069F) LumSynth construct
MFVFLVLLPLVSSQCVNLTTRTQLPPAYTNSFTRGVYYPDKVFRSSVLHSTQDLFLPFFSNVTWFHAIHVSGTNGTKRFDNPVLPFNDGVYFASTEKSNIIRGWIFGTTLDSKTQSLLIVNNATNVVIKVCEFQFCNDPFLGVYYHKNNKSWMESEFRVYSSANNCTFEYVSQPFLMDLEGKQGNFKNLREFVFKNIDGYFKIYSKHTPINLVRDLPQGFSALEPLVDLPIGINITRFQTLLALHRSYLTPGDSSSGWTAGAAAYYVGYLQPRTFLLKYNENGTITDAVDCALDPLSETKCTLKSFTVEKGIYQTSNFRVQPTESIVRFPNITNLCPFGEVFNATRFASVYAWNRKRISNCVADYSVLYNSASFSTFKCYGVSPTKLNDLCFTNVYADSFVIRGDEVRQIAPGQTGKIADYNYKLPDDFTGCVIAWNSNNLDSKVGGNYNYLYRLFRKSNLKPFERDISTEIYQAGSTPCNGVEGFNCYFPLQSYGFQPTNGVGYQPYRVVVLSFELLHAPATVCGPKKSTNLVKNKCVNFNFNGLTGTGVLTESNKKFLPFQQFGRDIADTTDAVRDPQTLEILDITPCSFGGVSVITPGTNTSNQVAVLYQGVNCTEVPVAIHADQLTPTWRVYSTGSNVFQTRAGCLIGAEHVNNSYECDIPIGAGICASYQTQTNSPRRARSVASQSIIAYTMSLGAENSVAYSNNSIAIPTNFTISVTTEILPVSMTKTSVDCTMYICGDSTECSNLLLQYGSFCTQLNRALTGIAVEQDKNTQEVFAQVKQIYKTPPIKDFGGFNFSQILPDPSKPSKRSFIEDLLFNKVTLADAGFIKQYGDCLGDIAARDLICAQKFNGLTVLPPLLTDEMIAQYTSALLAGTITSGWTFGAGAALQIPFAMQMAYRFNGIGVTQNVLYENQKLIANQFNSAIGKIQYSLSSTASALGKLQDVVNQNAQALNTLVKQLSSNFGAISSVLNDILSRLDPPEAEVQIDRLITGRLQSLQTYVTQQLIRAAEIRASANLAATKMSECVLGQSKRVDFCGKGYHLMSFPQSAPHGVVFLHVTYVFAQEKNFTTAPAICHDGKAHFPREGVFVSNGTHWFVTQRNFYEPQIITTDNTFVSGNCDVVIGIVNNTVYDPLQPELDSGGGSGGGQIYEGKLTAEGLRFGIVASRFNHALVDRLVEGAIDAIVRHGGREEDITLVRVPGSWEIPVAAGELARKEDIDAVIAIGVLIRGATPHFDYIASEVSKGLADLSLELRKPITFGVITADTLEQAIERAGTKHGNKGWEAALSAIEMANLFKSLR

SEQ ID NO: 7890 - protein, 1307 aa, Artificial Sequence; identical to SEQ ID NO: 7853
  SARS-CoV-2/Portugal/PT0034/2020__EPI_ISL_418019 spike protein (1-1147)(K986P_V987P_P1069F) LumSynth construct

SEQ ID NO: 7891 - protein, 1307 aa, Artificial Sequence; identical to SEQ ID NO: 7845
  SARS-CoV-2/Iceland/202/2020__EPI_ISL_417750 spike protein (1-1147)(K986P_V987P_P1069F) LumSynth construct

SEQ ID NO: 7892 - protein, 1307 aa, Artificial Sequence
  SARS-CoV-2/USA/WA-UW261/2020__EPI_ISL_418046 spike protein (1-1147)(K986P_V987P_P1069F) LumSynth construct
MFVFLVLLPLVSSQCVNLTTRTQLPPAYTNSFTRGVYYPDKVFRSSVLHSTQDLFLPFFSNVTWFHAIHVSGTNGTKRFDNPVLPFNDGVYFASTEKSNIIRGWIFGTTLDSKTQSLLIVNNATNVVIKVCEFQFCNDPFLGVYYHKNNKSWMESEFRVYSSANNCTFEYVSQPFLMDLEGKQGNFKNLREFVFKNIDGYFKIYSKHTPINLVRDLPQGFSALEPLVDLPIGINITRFQTLLALHRSYLTPGDSSSGWTAGAAAYYVGYLQPRTFLLKYNENGTITDAVDCALDPLSETKCTLKSFTVEKGIYQTSNFRVQPTESIVRFPNITNLCPFGEVFNATRFTSVYAWNRKRISNCVADYSVLYNSASFSTFKCYGVSPTKLNDLCFTNVYADSFVIRGDEVRQIAPGQTGKIADYNYKLPDDFTGCVIAWNSNNLDSKVGGNYNYLYRLFRKSNLKPFERDISTEIYQAGSTPCNGVEGFNCYFPLQSYGFQPTNGVGYQPYRVVVLSFELLHAPATVCGPKKSTNLVKNKCVNFNFNGLTGTGVLTESNKKFLPFQQFGRDIADTTDAVRDPQTLEILDITPCSFGGVSVITPGTNTSNQVAVLYQDVNCTEVPVAIHADQLTPTWRVYSTGSNVFQTRAGCLIGAEHVNNSYECDIPIGAGICASYQTQTNSPRRARSVASQSIIAYTMSLGAENSVAYSNNSIAIPTNFTISVTTEILPVSMTKTSVDCTMYICGDSTECSNLLLQYGSFCTQLNRALTGIAVEQDKNTQEVFAQVKQIYKTPPIKDFGGFNFSQILPDPSKPSKRSFIEDLLFNKVTLADAGFIKQYGDCLGDIAARDLICAQKFNGLTVLPPLLTDEMIAQYTSALLAGTITSGWTFGAGAALQIPFAMQMAYRFNGIGVTQNVLYENQKLIANQFNSAIGKIQDSLSSTASALGKLQDVVNQNAQALNTLVKQLSSNFGAISSVLNDILSRLDPPEAEVQIDRLITGRLQSLQTYVTQQLIRAAEIRASANLAATKMSECVLGQSKRVDFCGKGYHLMSFPQSAPHGVVFLHVTYVFAQEKNFTTAPAICHDGKAHFPREGVFVSNGTHWFVTQRNFYEPQIITTDNTFVSGNCDVVIGIVNNTVYDPLQPELDSGGGSGGGQIYEGKLTAEGLRFGIVASRFNHALVDRLVEGAIDAIVRHGGREEDITLVRVPGSWEIPVAAGELARKEDIDAVIAIGVLIRGATPHFDYIASEVSKGLADLSLELRKPITFGVITADTLEQAIERAGTKHGNKGWEAALSAIEMANLFKSLR

SEQ ID NO: 7893 - protein, 1307 aa, Artificial Sequence
  SARS-CoV-2/Portugal/PT0035/2020__EPI_ISL_418020 spike protein (1-1147)(K986P_V987P_P1069F) LumSynth construct
MFVFLVLLPLVSSQCVNLTTRTQLPPAYTNSFTRGVYYPDKVFRSSVLHSTQDLFLPFFSNVTWFHAIHVSGTNGTKRFDNPVLPFNDGVYFASTEKSNIIRGWIFGTTLDSKTQSLLIVNNATNVVIKVCEFQFCNDPFLGVYYHKNNKSWMESEFRVYSSANNCTFEYVSQPFLMDLEGKQGNFKNLREFVFKNIDGYFKIYSKHTPINLVRDLPQGFSALEPLVDLPIGINITRFQTLLALHRSYLTPGDSSSGWTAGAAAYYVGYLQPRTFLLKYNENGTITDAVDCALDPLSETKCTLKSFTVEKGIYQTSNFRVQPTESIVRFPNITNLCPFGEVFNATRFASVYAWNRKRISNCVADYSVLYNSASFSTFKCYGVSPTKLNDLCFTNVYADSFVIRGDEVRQIAPGQTGKIADYNYKLPDDFTGCVIAWNSNNLDSKVGGNYNYLYRLFRKSNLKPFERDISTEIYQAGSTPCNGVEGFNCYFPLQSYGFQPTNGVGYQPYRVVVLSFELLHAPATVCGPKKSTNLVKNKCVNFNFNGLTGTGVLTESNKKFLPFQQFGRDIADTTDAVRDPQTLEILDITPCSFGGVSVITPGTNTSNQVAVLYQDVNCTEVPVAIHADQLTPTWRVYSTGSNVFQTRAGCLIGAEHVNNSYECDIPIGAGICASYQTQTNSPRRARSVASQSIIAYTMSLGAENSVAYSNNSIAIPTNFTISVTTEILPVSMTKTSVDCTMYICGDSTECSNLLLQYGSFCTQLNRALTGIAVEQDKNTQEVFAQVKQIYKTPPIKDFGGFNFSQILPDPSKPSKRSFIEDLLFNKVTLADAGFIKQYGDCLGDISARDLICAQKFNGLTVLPPLLTDEMIAQYTSALLAGTITSGWTFGAGAALQIPFAMQMAYRFNGIGVTQNVLYENQKLIANQFNSAIGKIQDSLSSTASALGKLQDVVNQNAQALNTLVKQLSSNFGAISSVLNDILSRLDPPEAEVQIDRLITGRLQSLQTYVTQQLIRAAEIRASANLAATKMSECVLGQSKRVDFCGKGYHLMSFPQSAPHGVVFLHVTYVFAQEKNFTTAPAICHDGKAHFPREGVFVSNGTHWFVTQRNFYEPQIITTDNTFVSGNCDVVIGIVNNTVYDPLQPELDSGGGSGGGQIYEGKLTAEGLRFGIVASRFNHALVDRLVEGAIDAIVRHGGREEDITLVRVPGSWEIPVAAGELARKEDIDAVIAIGVLIRGATPHFDYIASEVSKGLADLSLELRKPITFGVITADTLEQAIERAGTKHGNKGWEAALSAIEMANLFKSLR

SEQ ID NO: 7894 - protein, 1307 aa, Artificial Sequence
  SARS-CoV-2/USA/NY-NYUMC7/2020__EPI_ISL_418192 spike protein (1-1147)(K986P_V987P_P1069F) LumSynth construct
MFVFLVLLPLVSSQCVNLTTRTQLPPAYTNSFTRGVYYPDKVFRSSVLHSTQDLFLPFFSNVTWFHAIHVSGTNGTKRFDNPVLPFNDGVYFASTEKSNIIRGWIFGTTLDSKTQSLLIVNNATNVVIKVCEFQFCNDPFLGVYHHKNNKSWMESEFRVYSSANNCTFEYVSQPFLMDLEGKQGNFKNLREFVFKNIDGYFKIYSKHTPINLVRDLPQGFSALEPLVDLPIGINITRFQTLLALHRSYLTPGDSSSGWTAGAAAYYVGYLQPRTFLLKYNENGTITDAVDCALDPLSETKCTLKSFTVEKGIYQTSNFRVQPTESIVRFPNITNLCPFGEVFNATRFASVYAWNRKRISNCVADYSVLYNSASFSTFKCYGVSPTKLNDLCFTNVYADSFVIRGDEVRQIAPGQTGKIADYNYKLPDDFTGCVIAWNSNNLDSKVGGNYNYLYRLFRKSNLKPFERDISTEIYQAGSTPCNGVEGFNCYFPLQSYGFQPTNGVGYQPYRVVVLSFELLHAPATVCGPKKSTNLVKNKCVNFNFNGLTGTGVLTESNKKFLPFQQFGRDIADTTDAVRDPQTLEILDITPCSFGGVSVITPGTNTSNQVAVLYQGVNCTEVPVAIHADQLTPTWRVYSTGSNVFQTRAGCLIGAEHVNNSYECDIPIGAGICASYQTQTNSPRRARSVASQSIIAYTMSLGAENSVAYSNNSIAIPTNFTISVTTEILPVSMTKTSVDCTMYICGDSTECSNLLLQYGSFCTQLNRALTGIAVEQDKNTQEVFAQVKQIYKTPPIKDFGGFNFSQILPDPSKPSKRSFIEDLLFNKVTLADAGFIKQYGDCLGDIAARDLICAQKFNGLTVLPPLLTDEMIAQYTSALLAGTITSGWTFGAGAALQIPFAMQMAYRFNGIGVTQNVLYENQKLIANQFNSAIGKIQDSLSSTASALGKLQDVVNQNAQALNTLVKQLSSNFGAISSVLNDILSRLDPPEAEVQIDRLITGRLQSLQTYVTQQLIRAAEIRASANLAATKMSECVLGQSKRVDFCGKGYHLMSFPQSAPHGVVFLHVTYVFAQEKNFTTAPAICHDGKAHFPREGVFVSNGTHWFVTQRNFYEPQIITTDNTFVSGNCDVVIGIVNNTVYDPLQPELDSGGGSGGGQIYEGKLTAEGLRFGIVASRFNHALVDRLVEGAIDAIVRHGGREEDITLVRVPGSWEIPVAAGELARKEDIDAVIAIGVLIRGATPHFDYIASEVSKGLADLSLELRKPITFGVITADTLEQAIERAGTKHGNKGWEAALSAIEMANLFKSLR

SEQ ID NO: 7895 - protein, 1307 aa, Artificial Sequence
  SARS-CoV-2/Iceland/189/2020__EPI_ISL_417709 spike protein (1-1147)(K986P_V987P_P1069F) LumSynth construct
MFVFLVLLPLVSSQCVNLTTRTQLPPAYTNSFTRGVYYPDKVFRSSVLHSTQDLFLPFFSNVTWFHAIHVSGTNGTKRFDNPVLPFNDGVYFASTEKSNIIRGWIFGTTLDSKTQSLLIVNNATNVVIKVCEFQFCNDPFLGVYYHKNNKSWMESEFRVYSSANNCTFEYVSQPFLMDLEGKQGNFKNLREFVFKNIDGYFKIYSKHTPINLVRDLPQGFSALEPLVDLPIGINITRFQTLLALHRSYLTPGDSSSGWTAGAAAYYVGYLQPRTFLLKYNENGTITDAVDCALDPLSETKCTLKSFTVEKGIYQTSNFRVQPTESIVRFPNITNLCPFGEVFNATRFASVYAWNRKRISNCVADYSVLYNSASFSTFKCYGVSPTKLNDLCFTNVYADSFVIRGDEVRQIAPGQTGKIADYNYKLPDDFTGCVIAWNSNNLDSKVGGNYNYLYRLFRKSNLKPFERDISTEIYQAGSTPCNGVEGFNCYFPLQSYGFQPTNGVGYQPYRVVVLSFELLHAPATVCGPKKSTNLVKNKCVNFNFNGLTGTGVLTESNKKFLPFQQFGRDIADTTDAVRDPQTLEILDITPCSFGGVSVITPGTNTSNQVAVLYQGVNCTEVPVAIHADQLTPTWRVYSTGSNVFQTRAGCLIGAEHVNNSYECDIPIGAGICASYQTQTNSPRRARSVASQSIIAYTMSLGAENSVAYSNNSIAIPTNFTISVTTEILPVSMTKTSVDCTMYICGDSTECSNLLLQYGSFCTQLNRALTGIAVEQDKNTQEVFAQVKQIYKTPPIKDFGGFNFSQILPDPSKPSKRSFIEDLLFNKVTLADAGFTKQYGDCLGDIAARDLICAQKFNGLTVLPPLLTDEMIAQYTSALLAGTITSGWTFGAGAALQIPFAMQMAYRFNGIGVTQNVLYENQKLIANQFNSAIGKIQDSLSSTASALGKLQDVVNQNAQALNTLVKQLSSNFGAISSVLNDILSRLDPPEAEVQIDRLITGRLQSLQTYVTQQLIRAAEIRASANLAATKMSECVLGQSKRVDFCGKGYHLMSFPQSAPHGVVFLHVTYVFAQEKNFTTAPAICHDGKAHFPREGVFVSNGTHWFVTQRNFYEPQIITTDNTFVSGNCDVVIGIVNNTVYDPLQPELDSGGGSGGGQIYEGKLTAEGLRFGIVASRFNHALVDRLVEGAIDAIVRHGGREEDITLVRVPGSWEIPVAAGELARKEDIDAVIAIGVLIRGATPHFDYIASEVSKGLADLSLELRKPITFGVITADTLEQAIERAGTKHGNKGWEAALSAIEMANLFKSLR

SEQ ID NO: 7896 - protein, 1307 aa, Artificial Sequence
  SARS-CoV-2/Australia/NSW56/2020__EPI_ISL_417408 spike protein (1-1147)(K986P_V987P_P1069F) LumSynth construct
MFVFLVLLPLVSSQCVNLTTRTQLPPAYTNSFTRGVYYPDKVFRSSVLHSTQDLFLPFFSNVTWFHAIHVSGTNGTKRFDNPVLPFNDGVYFASTEKSNIIRGWIFGTTLDSKTQSLLIVNNATNVVIKVCEFQFCNDPFLGVYYHKNNKSWMESEFRVYSSANNCTFEYVSQPFLMDLEGKQGNFKNLREFVFKNIDGYFKIYSKHTPINLVRDLPQGFSALEPLVDLPIGINITRFQTLLALHRSYLTPGDSSSGWTAGAAAYYVGYLQPRTFLLKYNENGTITDAVDCALDPLSETKCTLKSFTVEKGIYQTSNFRVQPTESIVRFPNITNLCPFGEVFNATRFASVYAWNRKRISNCVADYSVLYNSASFSTFKCYGVSPTKLNDLCFTNVYADSFVIRGDEVRQIAPGQTGKIADYNYKLPDDFTGCVIAWNSNNLDSKVGGNYNYLYRLFRKSNLKPFERDISTEIYQAGSTPCNGVEGFNCYFPLQSYGFQPTNGVGYQPYRVVVLSFELLHAPATVCGPKKSTNLVKNKCVNFNFNGLTGTGVLTESNKKFLPFQQFGRDIADTTDAVRDPQTLEILDITPCSFGGVSVITPGTNTSNQVAVLYQDVNCTEVPVAIHADQLTPTWRVYSTGSNVFQTRAGCLIGAEHVNNSYECDIPIGAGICASYQTQTNSPRRARSVASQSIIAYTMSLGAENSVAYSNNSIAIPTNFTISVTTEILPVSMTKTSVDCTMYICGDSTECSNLLLQYGSFCTQLNRALTGIAVEQDKNTQEVFAQVKQIYKTPPIKDFGGFNFSQILPDSSKPSKRSFIEDLLFNKVTLADAGFIKQYGDCLGDIAARDLICAQKFNGLTVLPPLLTDEMIAQYTSALLAGTITSGWTFGAGAALQIPFAMQMAYRFNGIGVTQNVLYENQKLIANQFNSAIGKIQDSLSSTASALGKLQDVVNQNAQALNTLVKQLSSNFGAISSVLNDILSRLDPPEAEVQIDRLITGRLQSLQTYVTQQLIRAAEIRASANLAATKMSECVLGQSKRVDFCGKGYHLMSFPQSAPHGVVFLHVTYVFAQEKNFTTAPAICHDGKAHFPREGVFVSNGTHWFVTQRNFYEPQIITTDNTFVSGNCDVVIGIVNNTVYDPLQPELDSGGGSGGGQIYEGKLTAEGLRFGIVASRFNHALVDRLVEGAIDAIVRHGGREEDITLVRVPGSWEIPVAAGELARKEDIDAVIAIGVLIRGATPHFDYIASEVSKGLADLSLELRKPITFGVITADTLEQAIERAGTKHGNKGWEAALSAIEMANLFKSLR

SEQ ID NO: 7897 - protein, 1307 aa, Artificial Sequence
  SARS-CoV-2/Iceland/280/2020__EPI_ISL_417608 spike protein (1-1147)(K986P_V987P_P1069F) LumSynth construct
MFVFLVLLPLVSSQCVNLTTRTQLPPAYTNSFTRGVYYPDKVFRSSVLHSTQDLFLPFFSNVTWFHAIHVSGTNGTKRFDNPVLPFNDGVYFASTEKSNIIRGWIFGTTLDSKTQSLLIVNNATNVVIKVCEFQFCNDPFLGVYYHKNNKSWMESEFRVYSSANNCTFEYVSQPFLMDLEGKQGNFKNLREFVFKNIDGYFKIYSKHTPINLVRDLPQGFSALEPLVDLPIGINITRFQTLLALHRSYLTPGDSSSGWTAGAAAYYVGYLQPRTFLLKYNENGTITDAVDCALDPLSETKCTLKSFTVEKGIYQTSNFRVQPTESIVRFPNITNLCPFGEVFNATRFASVYAWNRKRISNCVADYSVLYNSASFSTFKCYGVSPTKLNDLCFTNVYADSFVIRGDEVRQIAPGQTGKIADYNYKLPDDFTGCVIAWNSNNLDSKVGGNYNYLYRLFRKSNLKPFERDISTEIYQAGSTPCNGVEGFNCYFPLQSYGFQPTNGVGYQPYRVVVLSFELLHAPATVCGPKKSTNLVKNKCVNFNFNGLTGTGVLTESNKKFLPFQQFGRDIADTTDAVRDPQTLEILDITPCSFGGVSVITPGTNTSNQVAVLYQGVNCTEVPVAIHADQLTPTWRVYSTGSNVFQTRAGCLIGAEHVNNSYECDIPIGAGICASYHTQTNSPRRARSVASQSIIAYTMSLGAENSVAYSNNSIAIPTNFTISVTTEILPVSMTKTSVDCTMYICGDSTECSNLLLQYGSFCTQLNRALTGIAVEQDKNTQEVFAQVKQIYKTPPIKDFGGFNFSQILPDPSKPSKRSFIEDLLFNKVTLADAGFIKQYGDCLGDIAARDLICAQKFNGLTVLPPLLTDEMIAQYTSALLAGTITSGWTFGAGAALQIPFAMQMAYRFNGIGVTQNVLYENQKLIANQFNSAIGKIQDSLSSTASALGKLQDVVNQNAQALNTLVKQLSSNFGAISSVLNDILSRLDPPEAEVQIDRLITGRLQSLQTYVTQQLIRAAEIRASANLAATKMSECVLGQSKRVDFCGKGYHLMSFPQSAPHGVVFLHVTYVFAQEKNFTTAPAICHDGKAHFPREGVFVSNGTHWFVTQRNFYEPQIITTDNTFVSGNCDVVIGIVNNTVYDPLQPELDSGGGSGGGQIYEGKLTAEGLRFGIVASRFNHALVDRLVEGAIDAIVRHGGREEDITLVRVPGSWEIPVAAGELARKEDIDAVIAIGVLIRGATPHFDYIASEVSKGLADLSLELRKPITFGVITADTLEQAIERAGTKHGNKGWEAALSAIEMANLFKSLR

SEQ ID NO: 7898 - protein, 1307 aa, Artificial Sequence; identical to SEQ ID NO: 7853
  SARS-CoV-2/Iceland/247/2020__EPI_ISL_417575 spike protein (1-1147)(K986P_V987P_P1069F) LumSynth construct

SEQ ID NO: 7899 - protein, 1307 aa, Artificial Sequence
  SARS-CoV-2/Iceland/238/2020__EPI_ISL_417566 spike protein (1-1147)(K986P_V987P_P1069F) LumSynth construct
MFVFLVLLPLVSSQCVNLTTRTQLPPAYTNSFTRGVYYPDKVFRSSVLHSTQDLFLPFFSNVTWFHAIHVSGTNGTKRFDNPVLPFNDGVYFASTEKSNIIRGWIFGTTLDSKTQSLLIVNNATNVVIKVCEFQFCNDPFLGVYYHKNNKSWMESEFRVYSSANNCTFEYVSQPFLMDLEGKQGNFKNLREFVFKNIDGYFKIYSKHTPINLVRDLPQGFSALEPLVDLPIGINITRFQTLLALHRSYLTPGDSSSGWTAGAAAYYVGYLQPRTFLLKYNENGTITDAVDCALDPLSETKCTLKSFTVEKGIYQTSNFRVQPTESIVRFPNITNLCPFGEVFNATRFASVYAWNRKRISNCVADYSVLYNSASFSTFKCYGVSPTKLNDLCFTNVYADSFVIRGDEVRQIAPGQTGKIADYNYKLPDDFTGCVIAWNSNNLDSKVGGNYNYLYRLFRKSNLKPFERDISTEIYQAGSTPCNGVEGFNCYFPLQSYGFQPTNGVGYQPYRVVVLSFELLHAPATVCGPKKSTNLVKNKCVNFNFNGLTGTGVLTESNKKFLPFQQFGRDIADTTDAVRDPQTLEILDITPCSFGGVSVITPGTNTSNQVAVLYQGVNCTEVPVAIHADQLTPTWRVYSTGSNVFQTRAGCLIGAEHVNNSYECDIPIGAGICASYQTQTNSPRRARSVASQSIIAYTMSLGAENSVAYSNNSIAIPTNFTISVTTEILPVSMTKTSVDCTMYICGDSTECSNLLLQYGSFCTQLNRALTGIAVEQDKNTQEVFAQVKQIYKTPPIKDFGGFNFSQILPDPSKPSKRSFIEDLLFNKVTLADVGFIKQYGDCLGDIAARDLICAQKFNGLTVLPPLLTDEMIAQYTSALLAGTITSGWTFGAGAALQIPFAMQMAYRFNGIGVTQNVLYENQKLIANQFNSAIGKIQDSLSSTASALGKLQDVVNQNAQALNTLVKQLSSNFGAISSVLNDILSRLDPPEAEVQIDRLITGRLQSLQTYVTQQLIRAAEIRASANLAATKMSECVLGQSKRVDFCGKGYHLMSFPQSAPHGVVFLHVTYVFAQEKNFTTAPAICHDGKAHFPREGVFVSNGTHWFVTQRNFYEPQIITTDNTFVSGNCDVVIGIVNNTVYDPLQPELDSGGGSGGGQIYEGKLTAEGLRFGIVASRFNHALVDRLVEGAIDAIVRHGGREEDITLVRVPGSWEIPVAAGELARKEDIDAVIAIGVLIRGATPHFDYIASEVSKGLADLSLELRKPITFGVITADTLEQAIERAGTKHGNKGWEAALSAIEMANLFKSLR

SEQ ID NO: 7900 - protein, 1307 aa, Artificial Sequence
  SARS-CoV-2/Greece/16/2020__EPI_ISL_418265 spike protein (1-1147)(K986P_V987P_P1069F) LumSynth construct
MFVFLVLLPLVSSQCVNLTTRTQLPPAYTNSFTRGVYYPDKVFRSSVLHSTQDLFLPFFSNVTWFHAIHVSGTNGTKRFDNPVLPFNDGVYFASTEKSNIIRGWIFGTTLDSKTQSLLIVNNATNVVIKVCEFQFCNDPFLGVYYHKNNKSWMESEFRVYSSANNCTFEYVSQPFLMDLEGKQGNFKNLREFVFKNVDGYFKIYSKHTPINLVRDLPQGFSALEPLVDLPIGINITRFQTLLALHRSYLTPGDSSSGWTAGAAAYYVGYLQPRTFLLKYNENGTITDAVDCALDPLSETKCTLKSFTVEKGIYQTSNFRVQPTESIVRFPNITNLCPFGEVFNATRFASVYAWNRKRISNCVADYSVLYNSASFSTFKCYGVSPTKLNDLCFTNVYADSFVIRGDEVRQIAPGQTGKIADYNYKLPDDFTGCVIAWNSNNLDSKVGGNYNYLYRLFRKSNLKPFERDISTEIYQAGSTPCNGVEGFNCYFPLQSYGFQPTNGVGYQPYRVVVLSFELLHAPATVCGPKKSTNLVKNKCVNFNFNGLTGTGVLTESNKKFLPFQQFGRDIADTTDAVRDPQTLEILDITPCSFGGVSVITPGTNTSNQVAVLYQDVNCTEVPVAIHADQLTPTWRVYSTGSNVFQTRAGCLIGAEHVNNSYECDIPIGAGICASYQTQTNSPRRARSVASQSIIAYTMSLGAENSVAYSNNSIAIPTNFTISVTTEILPVSMTKTSVDCTMYICGDSTECSNLLLQYGSFCTQLNRALTGIAVEQDKNTQEVFAQVKQIYKTPPIKDFGGFNFSQILPDPSKPSKRSFIEDLLFNKVTLADAGFIKQYGDCLGDIAARDLICAQKFNGLTVLPPLLTDEMIAQYTSALLAGTITSGWTFGAGAALQIPFAMQMAYRFNGIGVTQNVLYENQKLIANQFNSAIGKIQDSLSSTASALGKLQDVVNQNAQALNTLVKQLSSNFGAISSVLNDILSRLDPPEAEVQIDRLITGRLQSLQTYVTQQLIRAAEIRASANLAATKMSECVLGQSKRVDFCGKGYHLMSFPQSAPHGVVFLHVTYVFAQEKNFTTAPAICHDGKAHFPREGVFVSNGTHWFVTQRNFYEPQIITTDNTFVSGNCDVVIGIVNNTVYDPLQPELDSGGGSGGGQIYEGKLTAEGLRFGIVASRFNHALVDRLVEGAIDAIVRHGGREEDITLVRVPGSWEIPVAAGELARKEDIDAVIAIGVLIRGATPHFDYIASEVSKGLADLSLELRKPITFGVITADTLEQAIERAGTKHGNKGWEAALSAIEMANLFKSLR

SEQ ID NO: 7901 - protein, 1307 aa, Artificial Sequence
  SARS-CoV-2/Iceland/319/2020__EPI_ISL_417648 spike protein (1-1147)(K986P_V987P_P1069F) LumSynth construct
MFVFLVLLPLVSSQCVNLTTRTQLPPAYTNSFTRGVYYPDKVFRSSVLHSTQDLFLPFFSNVTWFHAIHVSGTNGTKRFDNPVLPFNDGVYFASTEKSNIIRGWIFGTTLDSKTQSLLIVNNATNVVIKVCEFQFCNDPFLGVYYHKNNKSWMESEFRVYSSANNCTFEYVSQPFLIDLEGKQGNFKNLREFVFKNIDGYFKIYSKHTPINLVRDLPQGFSALEPLVDLPIGINITRFQTLLALHRSYLTPGDSSSGWTAGAAAYYVGYLQPRTFLLKYNENGTITDAVDCALDPLSETKCTLKSFTVEKGIYQTSNFRVQPTESIVRFPNITNLCPFGEVFNATRFASVYAWNRKRISNCVADYSVLYNSASFSTFKCYGVSPTKLNDLCFTNVYADSFVIRGDEVRQIAPGQTGKIADYNYKLPDDFTGCVIAWNSNNLDSKVGGNYNYLYRLFRKSNLKPFERDISTEIYQAGSTPCNGVEGFNCYFPLQSYGFQPTNGVGYQPYRVVVLSFELLHAPATVCGPKKSTNLVKNKCVNFNFNGLTGTGVLTESNKKFLPFQQFGRDIADTTDAVRDPQTLEILDITPCSFGGVSVITPGTNTSNQVAVLYQGVNCTEVPVAIHADQLTPTWRVYSTGSNVFQTRAGCLIGAEHVNNSYECDIPIGAGICASYQTQTNSPRRARSVASQSIIAYTMSLGAENSVAYSNNSIAIPTNFTISVTTEILPVSMTKTSVDCTMYICGDSTECSNLLLQYGSFCTQLNRALTGIAVEQDKNTQEVFAQVKQIYKTPPIKDFGGFNFSQILPDPSKPSKRSFIEDLLFNKVTLADAGFIKQYGDCLGDIAARDLICAQKFNGLTVLPPLLTDEMIAQYTSALLAGTITSGWTFGAGAALQIPFAMQMAYRFNGIGVTQNVLYENQKLIANQFNSAIGKIQDSLSSTASALGKLQDVVNQNAQALNTLVKQLSSNFGAISSVLNDILSRLDPPEAEVQIDRLITGRLQSLQTYVTQQLIRAAEIRASANLAATKMSECVLGQSKRVDFCGKGYHLMSFPQSAPHGVVFLHVTYVFAQEKNFTTAPAICHDGKAHFPREGVFVSNGTHWFVTQRNFYEPQIITTDNTFVSGNCDVVIGIVNNTVYDPLQPELDSGGGSGGGQIYEGKLTAEGLRFGIVASRFNHALVDRLVEGAIDAIVRHGGREEDITLVRVPGSWEIPVAAGELARKEDIDAVIAIGVLIRGATPHFDYIASEVSKGLADLSLELRKPITFGVITADTLEQAIERAGTKHGNKGWEAALSAIEMANLFKSLR

SEQ ID NO: 7902 - protein, 1307 aa, Artificial Sequence
  SARS-CoV-2/Congo/94/2020__EPI_ISL_417947 spike protein (1-1147)(K986P_V987P_P1069F) LumSynth construct
MFVFLVLLPLVSSQCVNLTTRTQLPPAYTNSFTRGVYYPDKVFRSSVLHSTQDLFLPFFSNVTWFHAIHVSGTNGTKRFDNPVLPFNDGVYFASTEKSNIIRGWIFGTTLDSKTQSLLIVNNATNVVIKVCEFQFCNDPFLGVYYHKNNKSWMESEFRVYSSANNCTFEYVSQPFLMDLEGKQGNFKNLREFVFKNIDGYFKIYSKHTPINLVRDLPQGFSALEPLVDLPIGINITRFQTLLALHRSYLTPGDSSSGWTAGAAAYYVGYLQPRTFLLKYNENGTITDAVDCALDPLSETKCTLKSFTVEKGIYQTSNFRVQPTESIVRFPNITNLCPFGEVFNATRFASVYAWNRKRISNCVADYSVLYNSASFSTFKCYGVSPTKLNDLCFTNVYADSFVIRGDEVRQIAPGQTGKIADYNYKLPDDFTGCVIAWNSNNLDSKVGGNYNYLYRLFRKSNLKPFERDISTEIYQAGSTPCNGVEGFNCYFPLQSYGFQPTNGVGYQPYRVVVLSFELLHAPATVCGPKKSTNLVKNKCVNFNFNGLTGTGVLTESNKKFLPFQQFGRDIADTTDAVRDPQTLEILDITPCSFGGVSVITPGTNTSNQVAVLYQGVNCTEVPVAIHADQLTPTWRVYSTGSNVFQTRAGCLIGAEHVNNSYECDIPIGAGICASYQTQTNSPRRARSVASQSIIAYTMSLGAENSVAYSNNSIAIPTNFTISVTTEILPVSMTKTSVDCTMYICGDSTECSNLLLQYGSFCTQLNRALTGIAVEQDKNTQEVFAQVKQIYKTPPIKDFGGFNFSQILPDPSKPSKRSFIEDILFNKVTLADAGFIKQYGDCLGDIAARDLICAQKFNGLTVLPPLLTDEMIAQYTSALLAGTITSGWTFGAGAALQIPFAMQMAYRFNGIGVTQNVLYENQKLIANQFNSAIGKIQDSLSSTASALGKLQDVVNQNAQALNTLVKQLSSNFGAISSVLNDILSRLDPPEAEVQIDRLITGRLQSLQTYVTQQLIRAAEIRASANLAATKMSECVLGQSKRVDFCGKGYHLMSFPQSAPHGVVFLHVTYVFAQEKNFTTAPAICHDGKAHFPREGVFVSNGTHWFVTQRNFYEPQIITTDNTFVSGNCDVVIGIVNNTVYDPLQPELDSGGGSGGGQIYEGKLTAEGLRFGIVASRFNHALVDRLVEGAIDAIVRHGGREEDITLVRVPGSWEIPVAAGELARKEDIDAVIAIGVLIRGATPHFDYIASEVSKGLADLSLELRKPITFGVITADTLEQAIERAGTKHGNKGWEAALSAIEMANLFKSLR

SEQ ID NO: 7903 - protein, 1307 aa, Artificial Sequence
  SARS-CoV-2/Congo/158/2020__EPI_ISL_417950 spike protein (1-1147)(K986P_V987P_P1069F) LumSynth construct
MFVFLVLLPLVSSQCVNLTTRTQLPPAYTNSFTRGVYYPDKVFRSSVLHSTQDLFLPFFSNVTWFHAIHVSGTNGTKRFDNPVLPFNDGVYFASTEKSNIIRGWIFGTTLDSKTQSLLIVNNATNVVIKVCEFQFCNDPFLGVYYHKNNKSWMESEFRVYSSANNCTFEYVSQPFLMDLEGKQGNFKNLREFVFKNIDGYFKIYSKHTPINLVRDLPQGFSALEPLVDLPIGINITRFQTLLALHRSYLTPGDSSSGWTAGAAAYYVGYLQPRTFLLKYNENGTITDAVDCALDPLSETKCTLKSFTVEKGIYQTSNFRVQPTESIVRFPNITNLCPFGEVFNATRFASVYAWNRKRISNCVADYSVLYNSASFSTFKCYGVSPTKLNDLCFTNVYADSFVIRGDEVRQIAPGQTGKIADYNYKLPDDFTGCVIAWNSNNLDSKVGGNYNYLYRLFRKSNLKPFERDISTEIYQAGSTPCNGVEGFNCYFPLQSYGFQPTNGVGYQPYRVVVLSFELLHAPATVCGPKKSTNLVKNKCVNFNFNGLTGTGVLTESNKKFLPFQQFGRDIADTTDAVRDPQTLEILDITPCSFGGVSVITPGTNTSNQVAVLYQDVNCTEVPVAIHADQLTPTWRVYSTGSNVFQTRAGCLIGAEHVNNSYECDIPIGAGICASYQTQTNSPRRARSVASQSIIAYTMSLGAENSVAYSNNSIAIPTNFTISVTTEILPVSMTKTSVDCTMYICGDSTECSNLLLQYGSFCTQLNRALTGIAVEQDKNTQEVFAQVKQIYKTPPIKDFGGFNFSQILPDPSKPSKRSFIEDLLFNKVTLADAGFIKQYGDCLGDIAARDLICAQKFNGLTVLPPLLTDEMIAQYTSALLAGTITSGWTFGAGAALQIPFAMQMAYRFNGIGVTQNVLYENQKLIANQFNSAIGKIQDSLSSTASALGKLQDVVNQNAQALNTLVKQLSSNFGAISSVLNDILSRLDPPEAEVQIDRLITGRLQSLQTYVTQQLIRAAEIRASANLAATKMSECVLGQSKRVDFCGKGYHLMSFPQSAPHGVVFLHVTYVFAQEKNFTTAPAICHDGKAHFPREGVFVSNGTHWFVTQRNFYEPQIITTDNTFLSGNCDVVIGIVNNTVYDPLQPELDSGGGSGGGQIYEGKLTAEGLRFGIVASRFNHALVDRLVEGAIDAIVRHGGREEDITLVRVPGSWEIPVAAGELARKEDIDAVIAIGVLIRGATPHFDYIASEVSKGLADLSLELRKPITFGVITADTLEQAIERAGTKHGNKGWEAALSAIEMANLFKSLR

SEQ ID NO: 7904 - protein, 1307 aa, Artificial Sequence
  SARS-CoV-2/USA/UT-00034/2020__EPI_ISL_417977 spike protein (1-1147)(K986P_V987P_P1069F) LumSynth construct
MFVFLVLLPLVSSQCVNLTTRTQLPPAYTNSFTRGVYYPDKVFRSSVLHSTQDLFLPFFSNVTWFHAIHVSGTNGTKRFDNPVLPFNDGVYFASTEKSNIIRGWIFGTTLDSKTQSLLIVNNATNVVIKVCEFQFCNDPFLGVYYYKNNKSWMESEFRVYSSANNCTFEYVSQPFLMDLEGKQGNFKNLREFVFKNIDGYFKIYSKHTPINLVRDLPQGFSALEPLVDLPIGINITRFQTLLALHRSYLTPGDSSSGWTAGAAAYYVGYLQPRTFLLKYNENGTITDAVDCALDPLSETKCTLKSFTVEKGIYQTSNFRVQPTESIVRFPNITNLCPFGEVFNATRFASVYAWNRKRISNCVADYSVLYNSASFSTFKCYGVSPTKLNDLCFTNVYADSFVIRGDEVRQIAPGQTGKIADYNYKLPDDFTGCVIAWNSNNLDSKVGGNYNYLYRLFRKSNLKPFERDISTEIYQAGSTPCNGVEGFNCYFPLQSYGFQPTNGVGYQPYRVVVLSFELLHAPATVCGPKKSTNLVKNKCVNFNFNGLTGTGVLTESNKKFLPFQQFGRDIADTTDAVRDPQTLEILDITPCSFGGVSVITPGTNTSNQVAVLYQGVNCTEVPVAIHADQLTPTWRVYSTGSNVFQTRAGCLIGAEHVNNSYECDIPIGAGICASYQTQTNSPRRARSVASQSIIAYTMSLGAENSVAYSNNSIAIPTNFTISVTTEILPVSMTKTSVDCTMYICGDSTECSNLLLQYGSFCTQLNRALTGIAVEQDKNTQEVFAQVKQIYKTPPIKDFGGFNFSQILPDPSKPSKRSFIEDLLFNKVTLADAGFIKQYGDCLGDIAARDLICAQKFNGLTVLPPLLTDEMIAQYTSALLAGTITSGWTFGAGAALQIPFAMQMAYRFNGIGVTQNVLYENQKLIANQFNSAIGKIQDSLSSTASALGKLQDVVNQNAQALNTLVKQLSSNFGAISSVLNDILSRLDPPEAEVQIDRLITGRLQSLQTYVTQQLIRAAEIRASANLAATKMSECVLGQSKRVDFCGKGYHLMSFPQSAPHGVVFLHVTYVFAQEKNFTTAPAICHDGKAHFPREGVFVSNGTHWFVTQRNFYEPQIITTDNTFVSGNCDVVIGIVNNTVYDPLQPELDSGGGSGGGQIYEGKLTAEGLRFGIVASRFNHALVDRLVEGAIDAIVRHGGREEDITLVRVPGSWEIPVAAGELARKEDIDAVIAIGVLIRGATPHFDYIASEVSKGLADLSLELRKPITFGVITADTLEQAIERAGTKHGNKGWEAALSAIEMANLFKSLR

SEQ ID NO: 7905 - protein, 1307 aa, Artificial Sequence
  SARS-CoV-2/USA/UT-00033/2020__EPI_ISL_417976 spike protein (1-1147)(K986P_V987P_P1069F) LumSynth construct
MFVFLVLLPLVSSQCVNLTTRTQLPPAYTNSFTRGVYYPDKVFRSSVLHSTQDLFLPFFSNVTWFHAIHVSGTNGTKRFDNPVLPFNDGVYFASTEKSNIIRGWIFGTTLDSKTQSLLIVNNATNVVIKVCEFQFCNDPFLGVYYHKNNKSWMESEFRVYSSANNCTFEYVSQPFLMDLEGKQGNFKNLREFVFKNIDGYFKIYSKHTPINLVRDLPQGFSALEPLVDLPIGINITRFQTLLALHRSYLTPGDSSSGLTAGAAAYYVGYLQPRTFLLKYNENGTITDAVDCALDPLSETKCTLKSFTVEKGIYQTSNFRVQPTESIVRFPNITNLCPFGEVFNATRFASVYAWNRKRISNCVADYSVLYNSASFSTFKCYGVSPTKLNDLCFTNVYADSFVIRGDEVRQIAPGQTGKIADYNYKLPDDFTGCVIAWNSNNLDSKVGGNYNYLYRLFRKSNLKPFERDISTEIYQAGSTPCNGVEGFNCYFPLQSYGFQPTNGVGYQPYRVVVLSFELLHAPATVCGPKKSTNLVKNKCVNFNFNGLTGTGVLTESNKKFLPFQQFGRDIADTTDAVRDPQTLEILDITPCSFGGVSVITPGTNTSNQVAVLYQGVNCTEVPVAIHADQLTPTWRVYSTGSNVFQTRAGCLIGAEHVNNSYECDIPIGAGICASYQTQTNSPRRARSVASQSIIAYTMSLGAENSVAYSNNSIAIPTNFTISVTTEILPVSMTKTSVDCTMYICGDSTECSNLLLQYGSFCTQLNRALTGIAVEQDKNTQEVFAQVKQIYKTPPIKDFGGFNFSQILPDPSKPSKRSFIEDLLFNKVTLADAGFIKQYGDCLGDIAARDLICAQKFNGLTVLPPLLTDEMIAQYTSALLAGTITSGWTFGAGAALQIPFAMQMAYRFNGIGVTQNVLYENQKLIANQFNSAIGKIQDSLSSTASALGKLQDVVNQNAQALNTLVKQLSSNFGAISSVLNDILSRLDPPEAEVQIDRLITGRLQSLQTYVTQQLIRAAEIRASANLAATKMSECVLGQSKRVDFCGKGYHLMSFPQSAPHGVVFLHVTYVFAQEKNFTTAPAICHDGKAHFPREGVFVSNGTHWFVTQRNFYEPQIITTDNTFVSGNCDVVIGIVNNTVYDPLQPELDSGGGSGGGQIYEGKLTAEGLRFGIVASRFNHALVDRLVEGAIDAIVRHGGREEDITLVRVPGSWEIPVAAGELARKEDIDAVIAIGVLIRGATPHFDYIASEVSKGLADLSLELRKPITFGVITADTLEQAIERAGTKHGNKGWEAALSAIEMANLFKSLR

SEQ ID NO: 7906 - protein, 1307 aa, Artificial Sequence
  SARS-CoV-2/USA/WI-13/2020__EPI_ISL_417516 spike protein (1-1147)(K986P_V987P_P1069F) LumSynth construct
MFVFLVLLPLVSSQCVNLTTRTQLPPAYTNSFTRGVYYPDKVFRSSVLHSTQDLFLPFFSNVTWFHAIHVSGTNGTKRFDNPVLPFNDGVYFASTEKSNIIRGWIFGTTLDSKTQSLLIVNNATNVVIKVCEFQFCNDPFLGVYYHKNNKSWMESEFRVYSSANNCTFEYVSQPFLMDLEGKQGNFKNLREFVFKNIDGYFKIYSKHTPINLVRDLPQGFSALEPLVDLPIGINITRFQTLLALHRSYLTPGDSSSGWTAGAAAYYVGYLQPRTFLLKYNENGTITDAVDCALDPLSETKCTLKSFTVEKGIYQTSNFRVLPTESIVRFPNITNLCPFGEVFNATRFASVYAWNRKRISNCVADYSVLYNSASFSTFKCYGVSPTKLNDLCFTNVYADSFVIRGDEVRQIAPGQTGKIADYNYKLPDDFTGCVIAWNSNNLDSKVGGNYNYLYRLFRKSNLKPFERDISTEIYQAGSTPCNGVEGFNCYFPLQSYGFQPTNGVGYQPYRVVVLSFELLHAPATVCGPKKSTNLVKNKCVNFNFNGLTGTGVLTESNKKFLPFQQFGRDIADTTDAVRDPQTLEILDITPCSFGGVSVITPGTNTSNQVAVLYQGVNCTEVPVAIHADQLTPTWRVYSTGSNVFQTRAGCLIGAEHVNNSYECDIPIGAGICASYQTQTNSPRRARSVASQSIIAYTMSLGAENSVAYSNNSIAIPTNFTISVTTEILPVSMTKTSVDCTMYICGDSTECSNLLLQYGSFCTQLNRALTGIAVEQDKNTQEVFAQVKQIYKTPPIKDFGGFNFSQILPDPSKPSKRSFIEDLLFNKVTLADAGFIKQYGDCLGDIAARDLICAQKFNGLTVLPPLLTDEMIAQYTSALLAGTITSGWTFGAGAALQIPFAMQMAYRFNGIGVTQNVLYENQKLIANQFNSAIGKIQDSLSSTASALGKLQDVVNQNAQALNTLVKQLSSNFGAISSVLNDILSRLDPPEAEVQIDRLITGRLQSLQTYVTQQLIRAAEIRASANLAATKMSECVLGQSKRVDFCGKGYHLMSFPQSAPHGVVFLHVTYVFAQEKNFTTAPAICHDGKAHFPREGVFVSNGTHWFVTQRNFYEPQIITTDNTFVSGNCDVVIGIVNNTVYDPLQPELDSGGGSGGGQIYEGKLTAEGLRFGIVASRFNHALVDRLVEGAIDAIVRHGGREEDITLVRVPGSWEIPVAAGELARKEDIDAVIAIGVLIRGATPHFDYIASEVSKGLADLSLELRKPITFGVITADTLEQAIERAGTKHGNKGWEAALSAIEMANLFKSLR

SEQ ID NO: 7907 - protein, 1306 aa, Artificial Sequence
  SARS-CoV-2/India/1-27/2020__EPI_ISL_413522 spike protein (1-1146)(K985P_V986P_P1068F) LumSynth construct
MFVFLVLLPLVSSQCVNLTTRTQLPPAYTNSFTRGVYYPDKVFRSSVLHSTQDLFLPFFSNVTWFHAIHVSGTNGTKRFDNPVLPFNDGVYFASTEKSNIIRGWIFGTTLDSKTQSLLIVNNATNVVIKVCEFQFCNDPFLGVYHKNNKSWMESEFRVYSSANNCTFEYVSQPFLMDLEGKQGNFKNLREFVFKNIDGYFKIYSKHTPINLVRDLPQGFSALEPLVDLPIGINITRFQTLLALHRSYLTPGDSSSGWTAGAAAYYVGYLQPRTFLLKYNENGTITDAVDCALDPLSETKCTLKSFTVEKGIYQTSNFRVQPTESIVRFPNITNLCPFGEVFNATRFASVYAWNRKRISNCVADYSVLYNSASFSTFKCYGVSPTKLNDLCFTNVYADSFVIRGDEVIQIAPGQTGKIADYNYKLPDDFTGCVIAWNSNNLDSKVGGNYNYLYRLFRKSNLKPFERDISTEIYQAGSTPCNGVEGFNCYFPLQSYGFQPTNGVGYQPYRVVVLSFELLHAPATVCGPKKSTNLVKNKCVNFNFNGLTGTGVLTESNKKFLPFQQFGRDIADTTDAVRDPQTLEILDITPCSFGGVSVITPGTNTSNQVAVLYQDVNCTEVPVAIHADQLTPTWRVYSTGSNVFQTRAGCLIGAEHVNNSYECDIPIGAGICASYQTQTNSPRRARSVASQSIIAYTMSLGAENSVAYSNNSIAIPTNFTISVTTEILPVSMTKTSVDCTMYICGDSTECSNLLLQYGSFCTQLNRALTGIAVEQDKNTQEVFAQVKQIYKTPPIKDFGGFNFSQILPDPSKPSKRSFIEDLLFNKVTLADAGFIKQYGDCLGDIAARDLICAQKFNGLTVLPPLLTDEMIAQYTSALLAGTITSGWTFGAGAALQIPFAMQMAYRFNGIGVTQNVLYENQKLIANQFNSAIGKIQDSLSSTASALGKLQDVVNQNAQALNTLVKQLSSNFGAISSVLNDILSRLDPPEAEVQIDRLITGRLQSLQTYVTQQLIRAAEIRASANLAATKMSECVLGQSKRVDFCGKGYHLMSFPQSAPHGVVFLHVTYVFAQEKNFTTAPAICHDGKAHFPREGVFVSNGTHWFVTQRNFYEPQIITTDNTFVSGNCDVVIGIVNNTVYDPLQPELDSGGGSGGGQIYEGKLTAEGLRFGIVASRFNHALVDRLVEGAIDAIVRHGGREEDITLVRVPGSWEIPVAAGELARKEDIDAVIAIGVLIRGATPHFDYIASEVSKGLADLSLELRKPITFGVITADTLEQAIERAGTKHGNKGWEAALSAIEMANLFKSLR

SEQ ID NO: 7908 - protein, 1301 aa, Artificial Sequence
  SARS-CoV-2/pangolin/Guangxi/P4L/2017__EPI_ISL_410538 spike protein (1-1141)(K980P_V981P_P1063F) LumSynth construct
MFVFLFVLPLVSSQCVNLTTRTGIPPGYTNSSTRGVYYPDKVFRSSILHLTQDLFLPFFSNVTWFNTINYQGGFKKFDNPVLPFNDGVYFASTEKSNIIRGWIFGTTLDARTQSLLIVNNATNVVIKVCEFQFCTDPFLGVYYHNNNKTWVENEFRVYSSANNCTFEYISQPFLMDLEGKQGNFKNLREFVFKNVDGYFKIYSKHTPIDLVRDLPRGFAALEPLVDLPIGINITRFQTLLALHRSYLTPGNLESGWTTGAAAYYVGYLQQRTFLLSYNQNGTITDAVDCSLDPLSETKCTLKSLTVEKGIYQTSNFRVQPTISIVRFPNITNLCPFGEVFNASKFASVYAWNRKRISNCVADYSVLYNSTSFSTFKCYGVSPTKLNDLCFTNVYADSFVVKGDEVRQIAPGQTGVIADYNYKLPDDFTGCVIAWNSVKQDALTGGNYGYLYRLFRKSKLKPFERDISTEIYQAGSTPCNGQVGLNCYYPLERYGFHPTTGVNYQPFRVVVLSFELLNGPATVCGPKLSTTLVKDKCVNFNFNGLTGTGVLTTSKKQFLPFQQFGRDISDTTDAVRDPQTLEILDITPCSFGGVSVITPGTNTSNQVAVLYQDVNCTEVPMAIHAEQLTPAWRVYSAGANVFQTRAGCLVGAEHVNNSYECDIPVGAGICASYHSMSSLRSVNQRSIIAYTMSLGAENSVAYSNNSIAIPTNFTISVTTEILPVSMTKTSVDCTMYICGDSIECSNLLLQYGSFCTQLNRALTGIAVEQDKNTQEVFAQVKQIYKTPPIKDFGGFNFSQILPDPSKPSKRSFIEDLLFNKVTLADAGFIKQYGDCLGDIAARDLICAQKFNGLTVLPPLLTDEMIAQYTSALLAGTITSGWTFGAGAALQIPFAMQMAYRFNGIGVTQNVLYENQKLIANQFNSAIGKIQDSLSSTASALGKLQDVVNQNAQALNTLVKQLSSNFGAISSVLNDILSRLDPPEAEVQIDRLITGRLQSLQTYVTQQLIRAAEIRASANLAATKMSECVLGQSKRVDFCGKGYHLMSFPQSAPHGVVFLHVTYVFAQEKNFTTAPAICHEGKAHFPREGVFVSNGTHWFITQRNFYEPQIITTDNTFVSGSCDVVIGIVNNTVYDPLQPELDSGGGSGGGQIYEGKLTAEGLRFGIVASRFNHALVDRLVEGAIDAIVRHGGREEDITLVRVPGSWEIPVAAGELARKEDIDAVIAIGVLIRGATPHFDYIASEVSKGLADLSLELRKPITFGVITADTLEQAIERAGTKHGNKGWEAALSAIEMANLFKSLR

SEQ ID NO: 7909 - protein, 1301 aa, Artificial Sequence
  SARS-CoV-2/pangolin/Guangxi/P5L/2017__EPI_ISL_410540 spike protein (1-1141)(K980P_V981P_P1063F) LumSynth construct
MFVFLFVLPLVSSQCVNLTTRTGIPPGYTNSSTRGVYYPDKVFRSSILHLTQDLFLPFFSNVTWFNTINYQGGFKKFDNPVLPFNDGVYFASTEKSNIIRGWIFGTTLDARTQSLLIVNNATNVVIKVCEFQFCTDPFLGVYYHNNNKTWVENEFRVYSSANNCTFEYISQPFLMDLEGKQGNFKNLREFVFKNVDGYFKIYSKHTPIDLVRDLPRGFAALEPLVDLPIGINITRFQTLLALHRSYLTPGKLESGWTTGAAAYYVGYLQQRTFLLSYNQNGTITDAVDCSLDPLSETKCTLKSLTVEKGIYQTSNFRVQPTISIVRFPNITNLCPFGEVFNASKFASVYAWNRKRISNCVADYSVLYNSTSFSTFKCYGVSPTKLNDLCFTNVYADSFVVKGDEVRQIAPGQTGVIADYNYKLPDDFTGCVIAWNSVKQDALTGGNYGYLYRLFRKSKLKPFERDISTEIYQAGSTPCNGQVGLNCYYPLERYGFHPTTGVNYQPFRVVVLSFELLNGPATVCGPKLSTTLVKDKCVNFNFNGLTGTGVLTTSKKQFLPFQQFGRDISDTTDAVRDPQTLEILDITPCSFGGVSVITPGTNTSNQVAVLYQDVNCTEVPMAIHAEQLTPAWRVYSAGANVFQTRAGCLVGAEHVNNSYECDIPVGAGICASYHSMSSFRSVNQRSIIAYTMSLGAENSVAYSNNSIAIPTNFTISVTTEILPVSMTKTSVDCTMYICGDSIECSNLLLQYGSFCTQLNRALTGIAVEQDKNTQEVFAQVKQIYKTPPIKDFGGFNFSQILPDPSKPSKRSFIEDLLFNKVTLADAGFIKQYGDCLGDIAARDLICAQKFNGLTVLPPLLTDEMIAQYTSALLAGTITSGWTFGAGAALQIPFAMQMAYRFNGIGVTQNVLYENQKLIANQFNSAIGKIQDSLSSTASALGKLQDVVNQNAQALNTLVKQLSSNFGAISSVLNDILSRLDPPEAEVQIDRLITGRLQSLQTYVTQQLIRAAEIRASANLAATKMSECVLGQSKRVDFCGKGYHLMSFPQSAPHGVVFLHVTYVFAQEKNFTTAPAICHEGKAHFPREGVFVSNGTHWFITQRNFYEPQIITTDNTFVSGSCDVVIGIVNNTVYDPLQPELDSGGGSGGGQIYEGKLTAEGLRFGIVASRFNHALVDRLVEGAIDAIVRHGGREEDITLVRVPGSWEIPVAAGELARKEDIDAVIAIGVLIRGATPHFDYIASEVSKGLADLSLELRKPITFGVITADTLEQAIERAGTKHGNKGWEAALSAIEMANLFKSLR

SEQ ID NO: 7910 - protein, 1301 aa, Artificial Sequence
  SARS-CoV-2/pangolin/Guangxi/P5E/2017__EPI_ISL_410541 spike protein (1-1141)(K980P_V981P_P1063F) LumSynth construct
MFVFLFVLPLVSSQCVNLTTRTGIPPGYTNSSTRGVYYPDKVFRSSILHLTQDLFLPFFSNVTWFNTITYQGGSKKFDNPVLPFNDGVYFASTEKSNIIRGWIFGTTLDARTQSLLIVNNATNVVIKVCEFQFCTDPFLGVYYHNNNKTWVENEFRVYSSANNCTFEYISQPFLMDLEGKQGNFKNLREFVFKNVDGYFKIYSKHTPIDLVRDLPRGFAALEPLVDLPIGINITRFQTLLALHRSYLTPGKLESGWTTGAAAYYVGYLQQRTFLLSYNQNGTITDAVDCSLDPLSETKCTLKSLTVEKGIYQTSNFRVQPTISIVRFPNITNLCPFGEVFNASKFASVYAWNRKRISNCVADYSVLYNSTSFSTFKCYGVSPTKLNDLCFTNVYADSFVVKGDEVRQIAPGQTGVIADYNYKLPDDFTGCVIAWNSVKQDALTGDNYGYLYRLFRKSKLKPFERDISTEIYQAGSTPCNGQVGLNCYYPLERYGFHPTTGVNYQPFRVVVLSFELLNGPATVCGPKLSTTLVKDKCVNFNFNGLTGTGVLTTSKKQFLPFQQFGRDISDTTDAVRDPQTLEILDITPCSFGGVSVITPGTNTSNQVAVLYQDVNCTEVPMAIHAEQLTPAWRVYSAGANVFQTRAGCLVGAEHVNNSYECDIPVGAGICASYHSMSSFRSVNQRSIIAYTMSLGAENSVAYSNNSIAIPTNFTISVTTEILPVSMTKTSVDCTMYICGDSIECSNLLLQYGSFCTQLNRALTGIAVEQDKNTQEVFAQVKQIYKTPPIKDFGGFNFSQILPDPSKPSKRSFIEDLLFNKVTLADAGFIKQYGDCLGDIAARDLICAQKFNGLTVLPPLLTDEMIAQYTSALLAGTITSGWTFGAGAALQIPFAMQMAYRFNGIGVTQNVLYENQKLIANQFNSAIGKIQDSLSSTASALGKLQDVVNQNAQALNTLVKQLSSNFGAISSVLNDILSRLDPPEAEVQIDRLITGRLQSLQTYVTQQLIRAAEIRASANLAATKMSECVLGQSKRVDFCGKGYHLMSFPQSAPHGVVFLHVTYVFAQEKNFTTAPAICHEGKAHFPREGVFVSNGTHWFITQRNFYEPQIITTDNTFVSGSCDVVIGIVNNTVYDPLQPELDSGGGSGGGQIYEGKLTAEGLRFGIVASRFNHALVDRLVEGAIDAIVRHGGREEDITLVRVPGSWEIPVAAGELARKEDIDAVIAIGVLIRGATPHFDYIASEVSKGLADLSLELRKPITFGVITADTLEQAIERAGTKHGNKGWEAALSAIEMANLFKSLR

SEQ ID NO: 7911 - protein, 1299 aa, Artificial Sequence
  SARS-CoV-2/pangolin/Guangxi/P1E/2017__EPI_ISL_410539 spike protein (1-1139)(K978P_V979P_P1061F) LumSynth construct
MFVFLFVLPLVSSQCVNLTTRTGIQPGYTNSSTRGVYYPDKVFRSSILHLTQDLFLPFFSNVTWFNTINYQGGFKKFDNPVLPFNDGVYFASTEKSNIIRGWIFGTTLDARTQSLLIVNNATNVVIKVCEFQFCTDPFLGVYYHNNNKTWVENEFRVYSSANNCTFEYISQPFLMDLEGKQGNFKNLREFVFKNVDGYFKIYSKHTPIDLVRDLPRGFAALEPLVDLPIGINITRFQTLLALHRSYLTPGKLESGWTTGAAAYYVGYLQQRTFLLSYNQNGTITDAVDCSLDPLSETKCTLKSLTVEKGIYQTSNFRVQPTISIVRFPNITNLCPFGEVFNASKFASVYAWNRKRISNCVADYSVLYNSTSFSTFKCYGVSPTKLNDLCFTNVYADSFVVKGDEVRQIAPGQTGVIADYNYKLPDDFTGCVIAWNSVKQDALTGGNYLYRLFRKSKLKPFERDISTEIYQAGSTPCNGQVGLNCYYPLERYGFHPTTGVNYQPFRVVVLSFELLNGPATVCGPKLSTTLVKDKCVNFNFNGLTGTGVLTTSKKQFLPFQQFGRDISDTTDAVRDPQTLEILDITPCSFGGVSVITPGTNTSNQVAVLYQDVNCTEVPMAIHAEQLTPAWRVYSAGANVFQTRAGCLVGAEHVNNSYECDIPVGAGICASYHSMSSLRSVNQRSIIAYTMSLGAENSVAYSNNSIAIPTNFTISVTTEILPVSMTKTSVDCTMYICGDSIECSNLLLQYGSFCTQLNRALTGIAVEQDKNTQEVFAQVKQIYKTPPIKDFGGFNFSQILPDPSKPSKRSFIEDLLFNKVTLADAGFIKQYGDCLGDIAARDLICAQKFNGLTVLPPLLTDEMIAQYTSALLAGTITSGWTFGAGAALQIPFAMQMAYRFNGIGVTQNVLYENQKLIANQFNSAIGKIQDSLSSTASALGKLQDVVNQNAQALNTLVKQLSSNFGAISSVLNDILSRLDPPEAEVQIDRLITGRLQSLQTYVTQQLIRAAEIRASANLAATKMSECVLGQSKRVDFCGKGYHLMSFPQSAPHGVVFLHVTYVFAQEKNFTTAPAICHEGKAHFPREGVFVSNGTHWFITQRNFYEPQIITTDNTFVSGSCDVVIGIVNNTVYDPLQPELDSGGGSGGGQIYEGKLTAEGLRFGIVASRFNHALVDRLVEGAIDAIVRHGGREEDITLVRVPGSWEIPVAAGELARKEDIDAVIAIGVLIRGATPHFDYIASEVSKGLADLSLELRKPITFGVITADTLEQAIERAGTKHGNKGWEAALSAIEMANLFKSLR

SEQ ID NO: 7912 - protein, 1307 aa, Artificial Sequence
  SARS-CoV-2/Wuhan/WIV05/2019__EPI_ISL_402128 spike protein (1-1147)(K986P_V987P_ H1048Q_H1064N_ H1083N_H1101N) LumSynth construct
MFVFLVLLPLVSSQCVNLTTRTQLPPAYTNSFTRGVYYPDKVFRSSVLHSTQDLFLPFFSNVTWFHAIHVSGTNGTKRFDNPVLPFNDGVYFASTEKSNIIRGWIFGTTLDSKTQSLLIVNNATNVVIKVCEFQFCNDPFLGVYYHKNNKSWMESEFRVYSSANNCTFEYVSQPFLMDLEGKQGNFKNLREFVFKNIDGYFKIYSKHTPINLVRDLPQGFSALEPLVDLPIGINITRFQTLLALHRSYLTPGDSSSGWTAGAAAYYVGYLQPRTFLLKYNENGTITDAVDCALDPLSETKCTLKSFTVEKGIYQTSNFRVQPTESIVRFPNITNLCPFGEVFNATRFASVYAWNRKRISNCVADYSVLYNSASFSTFKCYGVSPTKLNDLCFTNVYADSFVIRGDEVRQIAPGQTGKIADYNYKLPDDFTGCVIAWNSNNLDSKVGGNYNYLYRLFRKSNLKPFERDISTEIYQAGSTPCNGVEGFNCYFPLQSYGFQPTNGVGYQPYRVVVLSFELLHAPATVCGPKKSTNLVKNKCVNFNFNGLTGTGVLTESNKKFLPFQQFGRDIADTTDAVRDPQTLEILDITPCSFGGVSVITPGTNTSNQVAVLYQDVNCTEVPVAIHADQLTPTWRVYSTGSNVFQTRAGCLIGAEHVNNSYECDIPIGAGICASYQTQTNSPRRARSVASQSIIAYTMSLGAENSVAYSNNSIAIPTNFTISVTTEILPVSMTKTSVDCTMYICGDSTECSNLLLQYGSFCTQLNRALTGIAVEQDKNTQEVFAQVKQIYKTPPIKDFGGFNFSQILPDPSKPSKRSFIEDLLFNKVTLADAGFIKQYGDCLGDIAARDLICAQKFNGLTVLPPLLTDEMIAQYTSALLAGTITSGWTFGAGAALQIPFAMQMAYRFNGIGVTQNVLYENQKLIANQFNSAIGKIQDSLSSTASALGKLQDVVNQNAQALNTLVKQLSSNFGAISSVLNDILSRLDPPEAEVQIDRLITGRLQSLQTYVTQQLIRAAEIRASANLAATKMSECVLGQSKRVDFCGKGYQLMSFPQSAPHGVVFLNVTYVPAQEKNFTTAPAICNDGKAHFPREGVFVSNGTNWFVTQRNFYEPQIITTDNTFVSGNCDVVIGIVNNTVYDPLQPELDSGGGSGGGQIYEGKLTAEGLRFGIVASRFNHALVDRLVEGAIDAIVRHGGREEDITLVRVPGSWEIPVAAGELARKEDIDAVIAIGVLIRGATPHFDYIASEVSKGLADLSLELRKPITFGVITADTLEQAIERAGTKHGNKGWEAALSAIEMANLFKSLR

SEQ ID NO: 7913 - protein, 1303 aa, Artificial Sequence
  SARS-CoV-2/bat/Yunnan/RaTG13/2013__EPI_ISL_402131 spike protein (1-1143)(K982P_V983P_ H1044Q_H1060N_ H1079N_H1097N) LumSynth construct
MFVFLVLLPLVSSQCVNLTTRTQLPPAYTNSSTRGVYYPDKVFRSSVLHLTQDLFLPFFSNVTWFHAIHVSGTNGIKRFDNPVLPFNDGVYFASTEKSNIIRGWIFGTTLDSKTQSLLIVNNATNVVIKVCEFQFCNDPFLGVYYHKNNKSWMESEFRVYSSANNCTFEYVSQPFLMDLEGKQGNFKNLREFVFKNIDGYFKIYSKHTPINLVRDLPPGFSALEPLVDLPIGINITRFQTLLALHRSYLTPGDSSSGWTAGAAAYYVGYLQPRTFLLKYNENGTITDAVDCALDPLSETKCTLKSFTVEKGIYQTSNFRVQPTDSIVRFPNITNLCPFGEVFNATTFASVYAWNRKRISNCVADYSVLYNSTSFSTFKCYGVSPTKLNDLCFTNVYADSFVITGDEVRQIAPGQTGKIADYNYKLPDDFTGCVIAWNSKHIDAKEGGNFNYLYRLFRKANLKPFERDISTEIYQAGSKPCNGQTGLNCYYPLYRYGFYPTDGVGHQPYRVVVLSFELLNAPATVCGPKKSTNLVKNKCVNFNFNGLTGTGVLTESNKKFLPFQQFGRDIADTTDAVRDPQTLEILDITPCSFGGVSVITPGTNASNQVAVLYQDVNCTEVPVAIHADQLTPTWRVYSTGSNVFQTRAGCLIGAEHVNNSYECDIPIGAGICASYQTQTNSRSVASQSIIAYTMSLGAENSVAYSNNSIAIPTNFTISVTTEILPVSMTKTSVDCTMYICGDSTECSNLLLQYGSFCTQLNRALTGIAVEQDKNTQEVFAQVKQIYKTPPIKDFGGFNFSQILPDPSKPSKRSFIEDLLFNKVTLADAGFIKQYGDCLGDIAARDLICAQKFNGLTVLPPLLTDEMIAQYTSALLAGTITSGWTFGAGAALQIPFAMQMAYRFNGIGVTQNVLYENQKLIANQFNSAIGKIQDSLSSTASALGKLQDVVNQNAQALNTLVKQLSSNFGAISSVLNDILSRLDPPEAEVQIDRLITGRLQSLQTYVTQQLIRAAEIRASANLAATKMSECVLGQSKRVDFCGKGYQLMSFPQSAPHGVVFLNVTYVPAQEKNFTTAPAICNDGKAHFPREGVFVSNGTNWFVTQRNFYEPQIITTDNTFVSGSCDVVIGIVNNTVYDPLQPELDSGGGSGGGQIYEGKLTAEGLRFGIVASRFNHALVDRLVEGAIDAIVRHGGREEDITLVRVPGSWEIPVAAGELARKEDIDAVIAIGVLIRGATPHFDYIASEVSKGLADLSLELRKPITFGVITADTLEQAIERAGTKHGNKGWEAALSAIEMANLFKSLR

SEQ ID NO: 7914 - protein, 1307 aa, Artificial Sequence
  SARS-CoV-2/Wuhan/HBCDC-HB-01/2019__EPI_ISL_402132 spike protein (1-1147)(K986P_V987P_ H1048Q_H1064N_ H1083N_H1101N) LumSynth construct
MFVFLVLLPLVSSQCVNLTTRTQLPPAYTNSITRGVYYPDKVFRSSVLHSTQDLFLPFFSNVTWFHAIHVSGTNGTKRFDNPVLPFNDGVYFASTEKSNIIRGWIFGTTLDSKTQSLLIVNNATNVVIKVCEFQFCNDPFLGVYYHKNNKSWMESEFRVYSSANNCTFEYVSQPFLMDLEGKQGNFKNLREFVFKNIDGYFKIYSKHTPINLVRDLPQGFSALEPLVDLPIGINITRFQTLLALHRSYLTPGDSSSGWTAGAAAYYVGYLQPRTFLLKYNENGTITDAVDCALDPLSETKCTLKSFTVEKGIYQTSNFRVQPTESIVRFPNITNLCPFGEVFNATRFASVYAWNRKRISNCVADYSVLYNSASFSTFKCYGVSPTKLNDLCFTNVYADSFVIRGDEVRQIAPGQTGKIADYNYKLPDDFTGCVIAWNSNNLDSKVGGNYNYLYRLFRKSNLKPFERDISTEIYQAGSTPCNGVEGFNCYFPLQSYGFQPTNGVGYQPYRVVVLSFELLHAPATVCGPKKSTNLVKNKCVNFNFNGLTGTGVLTESNKKFLPFQQFGRDIADTTDAVRDPQTLEILDITPCSFGGVSVITPGTNTSNQVAVLYQDVNCTEVPVAIHADQLTPTWRVYSTGSNVFQTRAGCLIGAEHVNNSYECDIPIGAGICASYQTQTNSPRRARSVASQSIIAYTMSLGAENSVAYSNNSIAIPTNFTISVTTEILPVSMTKTSVDCTMYICGDSTECSNLLLQYGSFCTQLNRALTGIAVEQDKNTQEVFAQVKQIYKTPPIKDFGGFNFSQILPDPSKPSKRSFIEDLLFNKVTLADAGFIKQYGDCLGDIAARDLICAQKFNGLTVLPPLLTDEMIAQYTSALLAGTITSGWTFGAGAALQIPFAMQMAYRFNGIGVTQNVLYENQKLIANQFNSAIGKIQDSLSSTASALGKLQDVVNQNAQALNTLVKQLSSNFGAISSVLNDILSRLDPPEAEVQIDRLITGRLQSLQTYVTQQLIRAAEIRASANLAATKMSECVLGQSKRVDFCGKGYQLMSFPQSAPHGVVFLNVTYVPAQEKNFTTAPAICNDGKAHFPREGVFVSNGTNWFVTQRNFYEPQIITTDNTFVSGNCDVVIGIVNNTVYDPLQPELDSGGGSGGGQIYEGKLTAEGLRFGIVASRFNHALVDRLVEGAIDAIVRHGGREEDITLVRVPGSWEIPVAAGELARKEDIDAVIAIGVLIRGATPHFDYIASEVSKGLADLSLELRKPITFGVITADTLEQAIERAGTKHGNKGWEAALSAIEMANLFKSLR

SEQ ID NO: 7915 - protein, 1307 aa, Artificial Sequence
  SARS-CoV-2/Guangdong/20SF028/2020__EPI_ISL_403936 spike protein (1-1147)(K986P_V987P_ H1048Q_H1064N_ H1083N_H1101N) LumSynth construct
MFVFLVLLPLVSSQCVNLTTRTQLPPAYTNSFTRGVYYPDKVFRSSVLYSTQDLFLPFFSNVTWFHAIHVSGTNGTKRFDNPVLPFNDGVYFASTEKSNIIRGWIFGTTLDSKTQSLLIVNNATNVVIKVCEFQFCNDPFLGVYYHKNNKSWMESEFRVYSSANNCTFEYVSQPFLMDLEGKQGNFKNLREFVFKNIDGYFKIYSKHTPINLVRDLPQGFSALEPLVDLPIGINITRFQTLLALHRSYLTPGDSSSGWTAGAAAYYVGYLQPRTFLLKYNENGTITDAVDCALDPLSETKCTLKSFTVEKGIYQTSNFRVQPTESIVRFPNITNLCPFGEVFNATRFASVYAWNRKRISNCVADYSVLYNSASFSTFKCYGVSPTKLNDLCFTNVYADSFVIRGDEVRQIAPGQTGKIADYNYKLPDDFTGCVIAWNSNNLDSKVGGNYNYLYRLFRKSNLKPFERDISTEIYQAGSTPCNGVEGFNCYFPLQSYGFQPTNGVGYQPYRVVVLSFELLHAPATVCGPKKSTNLVKNKCVNFNFNGLTGTGVLTESNKKFLPFQQFGRDIADTTDAVRDPQTLEILDITPCSFGGVSVITPGTNTSNQVAVLYQDVNCTEVPVAIHADQLTPTWRVYSTGSNVFQTRAGCLIGAEHVNNSYECDIPIGAGICASYQTQTNSPRRARSVASQSIIAYTMSLGAENSVAYSNNSIAIPTNFTISVTTEILPVSMTKTSVDCTMYICGDSTECSNLLLQYGSFCTQLNRALTGIAVEQDKNTQEVFAQVKQIYKTPPIKDFGGFNFSQILPDPSKPSKRSFIEDLLFNKVTLADAGFIKQYGDCLGDIAARDLICAQKFNGLTVLPPLLTDEMIAQYTSALLAGTITSGWTFGAGAALQIPFAMQMAYRFNGIGVTQNVLYENQKLIANQFNSAIGKIQDSLSSTASALGKLQDVVNQNAQALNTLVKQLSSNFGAISSVLNDILSRLDPPEAEVQIDRLITGRLQSLQTYVTQQLIRAAEIRASANLAATKMSECVLGQSKRVDFCGKGYQLMSFPQSAPHGVVFLNVTYVPAQEKNFTTAPAICNDGKAHFPREGVFVSNGTNWFVTQRNFYEPQIITTDNTFVSGNCDVVIGIVNNTVYDPLQPELDSGGGSGGGQIYEGKLTAEGLRFGIVASRFNHALVDRLVEGAIDAIVRHGGREEDITLVRVPGSWEIPVAAGELARKEDIDAVIAIGVLIRGATPHFDYIASEVSKGLADLSLELRKPITFGVITADTLEQAIERAGTKHGNKGWEAALSAIEMANLFKSLR

SEQ ID NO: 7916 - protein, 1307 aa, Artificial Sequence
  SARS-CoV-2/Shenzhen/SZTH-001/2020__EPI_ISL_406592 spike protein (1-1147)(K986P_V987P_ H1048Q_H1064N_ H1083N_H1101N) LumSynth construct
MFVFLVLLPLVSSQCVNLTTRTQLPPAYTNSFTRGVYYPDKVFRSSVLHSTQDLFLPFFSNVTWFHAIHVSGTNGTKRFDNPVLPFNDGVYFASTEKSNIIRGWIFGTTLDSKTQSLLIVNNATNVVIKVCEFQFCNDPFLGVYYHKNNKSWMESEFRVYSSANNCTFEYVSQPFLMDLEGKQGNFKNLREFVFKNIDGYFKIYSKHTPINLVRDLPQGFSALEPLVDLPIGINITRFQTLLALHRSYLTPGDSSSGWTAGAAAYYVGYLQPRTFLLKYNENGTITDAVDCALDPLSETKCTLKSFTVEKGIYQTSNFRVQPTESIVRFPNITNLCPFGEVFNATRFASVYAWNRKRISNCVADYSVLYNSASFSTFKCYGVSPTKLNDLCFTNVYADSFVIRGDEVRQIAPGQTGKIADYNYKLPDDFTGCVIAWNSNNLDSKVGGNYNYLYRLFRKSNLKPFERDISTEIYQAGSTPCNGVEGFNCYFPLQSYGFQPTNGVGYQPYRVVVLSFELLHAPATVCGPKKSTNLVKNKCVNFNFNGLTGTGVLTESNKKFLPFQQFGRDIADTTDAVRDPQTLEILDITPCSFGGVSVITPGTNTSNQVAVLYQDVNCTEVPVAIHADQLTPTWRVYSTGSNVFQTRAGCLIGAEHVNNSYECDIPIGAGICASYQTQTNSPRRARSVASQSIIAYTMSLGAENSVAYSNNSIAIPTNFTISVTTEILPVSMTKTSVDCTMYICGDSTECSNLLLQYGSFCTQLNRALTGIAVEQDKNTQEVFAQVKQIYKTPPIKDFGGFNFSQILPDPSKPSKRSFIEDLLFNKVTLADAGFIKQYGDCLGDIAARDLICAQKFNGLTVLPPLLTDEMIAQYTSALLAGTITSGWTFGAGAALQIPFAMQMAYRFNGIGVTQNVLYENQKLIANQFNSAIGKIQDSLSSTASALGKLQDVVNQNAQALNTLVKQLSSNFGAISSVLNDILSRLDPPEAEVQIDRLITGRLQSLQTYVTQQLIRAAEIRASANLAATKMSECVLGQSKRVDFCGKGYQLMSFPQSAPHGVVFLNVTYVPAQEKNFTTAPAICNDGKAHFPREGVFVSNGTNWFVTQRNFYEPQIITTDNTFVSGNCDVLIGIVNNTVYDPLQPELDSGGGSGGGQIYEGKLTAEGLRFGIVASRFNHALVDRLVEGAIDAIVRHGGREEDITLVRVPGSWEIPVAAGELARKEDIDAVIAIGVLIRGATPHFDYIASEVSKGLADLSLELRKPITFGVITADTLEQAIERAGTKHGNKGWEAALSAIEMANLFKSLR

SEQ ID NO: 7917 - protein, 1307 aa, Artificial Sequence
  SARS-CoV-2/Shenzhen/SZTH-004/2020__EPI_ISL_406595 spike protein (1-1147)(K986P_V987P_ H1048Q_H1064N_ H1083N_H1101N) LumSynth construct
MFVFLVLLPLVSSQCVNLTTRTQLPPAYTNSFTRGVYYPDKVFRSSVLHSTQDLFLPFFSNVTWFHAIHVSGTNGTKRFDNPVLPFNDGVYFASTEKSNIIRGWIFGTTLDSKTQSLLIVNNATNVVIKVCEFQFCNDPFLGVYYHKNNKSWMESEFRVYSSANNCTFEYVSQPFLMDLEGKQGNFKNLREFVFKNIDGYFKIYSKHTPINLVRDLPQGFSALEPLVDLPIGINITRFQTLLALHRSYLTPGDSSSGWTAGAAAYYVGYLQPRTFLLKYNENGTITDAVDCALDPLSETKCTLKSFTVEKGIYQTSNFRVQPTESIVRFPNITNLCPFGEVFNATRFASVYAWDRKRISNCVAYYSVLYNSASFSTFKCYGVSPTKLNDLCFTNVYADSFVIRGDEVRQIAPGQTGKIADYNYKLPDDFTGCVIAWNSNNLDSKVGGNYNYLYRLFRKSNLKPFERDISTEIYQAGSTPCNGVEGFNCYFPLQSYGFQPTNGVGYQPYRVVVLSFELLHAPATVCGPKKSTNLVKNKCVNFNFNGLTGTGVLTESNKKFLPFQQFGRDIADTTDAVRDPQTLEILDITPCSFGGVSVITPGTNTSNQVAVLYQDVNCTEVPVAIHADQLTPTWRVYSTGSNVFQTRAGCLIGAEHVNNSYECDIPIGAGICASYQTQTNSPRRARSVASQSIIAYTMSLGAENSVAYSNNSIAIPTNFTISVTTEILPVSMTKTSVDCTMYICGDSTECSNLLLQYGSFCTQLNRALTGIAVEQDKNTQEVFAQVKQIYKTPPIKDFGGFNFSQILPDPSKPSKRSFIEDLLFNKVTLADAGFIKQYGDCLGDIAARDLICAQKFNGLTVLPPLLTDEMIAQYTSALLAGTITSGWTFGAGAALQIPFAMQMAYRFNGIGVTQNVLYENQKLIANQFNSAIGKIQDSLSSTASALGKLQDVVNQNAQALNTLVKQLSSNFGAISSVLNDILSRLDPPEAEVQIDRLITGRLQSLQTYVTQQLIRAAEIRASANLAATKMSECVLGQSKRVDFCGKGYQLMSFPQSAPHGVVFLNVTYVPAQEKNFTTAPAICNDGKAHFPREGVFVSNGTNWFVTQRNFYEPQIITTDNTFVSGNCDVVIGIVNNTVYDPLQPELDSGGGSGGGQIYEGKLTAEGLRFGIVASRFNHALVDRLVEGAIDAIVRHGGREEDITLVRVPGSWEIPVAAGELARKEDIDAVIAIGVLIRGATPHFDYIASEVSKGLADLSLELRKPITFGVITADTLEQAIERAGTKHGNKGWEAALSAIEMANLFKSLR

SEQ ID NO: 7918 - protein, 1307 aa, Artificial Sequence
  SARS-CoV-2/France/IDF0372/2020__EPI_ISL_406596 spike protein (1-1147)(K986P_V987P_ H1048Q_H1064N_ H1083N_H1101N) LumSynth construct
MFVFLVLLPLVSSQCVNLTTRTQLPPAYTNSFTRGVYYPDKVFRSSVLHSTQDLFLPFFSNVTWFHAIHVSGTNGTKRFDNPVLPFNDGVYFASTEKSNIIRGWIFGTTLDSKTQSLLIVNNATNVVIKVCEFQFCNDPFLGVYYHKNNKSWMESEFRVYSSANNCTFEYVSQPFLMDLEGKQGNFKNLREFVFKNIDGYFKIYSKHTPINLVRDLPQGFSALEPLVDLPIGINITRFQTLLALHRSYLTPGDSSSGWTAGAAAYYVGYLQPRTFLLKYNENGTITDAVDCALDPLSETKCTLKSFTVEKGIYQTSNFRVQPTESIVRFPNITNLCPFGEVFNATRFASVYAWNRKRISNCVADYSFLYNSASFSTFKCYGVSPTKLNDLCFTNVYADSFVIRGDEVRQIAPGQTGKIADYNYKLPDDFTGCVIAWNSNNLDSKVGGNYNYLYRLFRKSNLKPFERDISTEIYQAGSTPCNGVEGFNCYFPLQSYGFQPTNGVGYQPYRVVVLSFELLHAPATVCGPKKSTNLVKNKCVNFNFNGLTGTGVLTESNKKFLPFQQFGRDIADTTDAVRDPQTLEILDITPCSFGGVSVITPGTNTSNQVAVLYQDVNCTEVPVAIHADQLTPTWRVYSTGSNVFQTRAGCLIGAEHVNNSYECDIPIGAGICASYQTQTNSPRRARSVASQSIIAYTMSLGAENSVAYSNNSIAIPTNFTISVTTEILPVSMTKTSVDCTMYICGDSTECSNLLLQYGSFCTQLNRALTGIAVEQDKNTQEVFAQVKQIYKTPPIKDFGGFNFSQILPDPSKPSKRSFIEDLLFNKVTLADAGFIKQYGDCLGDIAARDLICAQKFNGLTVLPPLLTDEMIAQYTSALLAGTITSGWTFGAGAALQIPFAMQMAYRFNGIGVTQNVLYENQKLIANQFNSAIGKIQDSLSSTASALGKLQDVVNQNAQALNTLVKQLSSNFGAISSVLNDILSRLDPPEAEVQIDRLITGRLQSLQTYVTQQLIRAAEIRASANLAATKMSECVLGQSKRVDFCGKGYQLMSFPQSAPHGVVFLNVTYVPAQEKNFTTAPAICNDGKAHFPREGVFVSNGTNWFVTQRNFYEPQIITTDNTFVSGNCDVVIGIVNNTVYDPLQPELDSGGGSGGGQIYEGKLTAEGLRFGIVASRFNHALVDRLVEGAIDAIVRHGGREEDITLVRVPGSWEIPVAAGELARKEDIDAVIAIGVLIRGATPHFDYIASEVSKGLADLSLELRKPITFGVITADTLEQAIERAGTKHGNKGWEAALSAIEMANLFKSLR

SEQ ID NO: 7919 - protein, 1307 aa, Artificial Sequence
  SARS-CoV-2/Australia/VIC01/2020__EPI_ISL_406844 spike protein (1-1147)(K986P_V987P_ H1048Q_H1064N_ H1083N_H1101N) LumSynth construct
MFVFLVLLPLVSSQCVNLTTRTQLPPAYTNSFTRGVYYPDKVFRSSVLHSTQDLFLPFFSNVTWFHAIHVSGTNGTKRFDNPVLPFNDGVYFASTEKSNIIRGWIFGTTLDSKTQSLLIVNNATNVVIKVCEFQFCNDPFLGVYYHKNNKSWMESEFRVYSSANNCTFEYVSQPFLMDLEGKQGNFKNLREFVFKNIDGYFKIYSKHTPINLVRDLPQGFSALEPLVDLPIGINITRFQTLLALHRRYLTPGDSSSGWTAGAAAYYVGYLQPRTFLLKYNENGTITDAVDCALDPLSETKCTLKSFTVEKGIYQTSNFRVQPTESIVRFPNITNLCPFGEVFNATRFASVYAWNRKRISNCVADYSVLYNSASFSTFKCYGVSPTKLNDLCFTNVYADSFVIRGDEVRQIAPGQTGKIADYNYKLPDDFTGCVIAWNSNNLDSKVGGNYNYLYRLFRKSNLKPFERDISTEIYQAGSTPCNGVEGFNCYFPLQSYGFQPTNGVGYQPYRVVVLSFELLHAPATVCGPKKSTNLVKNKCVNFNFNGLTGTGVLTESNKKFLPFQQFGRDIADTTDAVRDPQTLEILDITPCSFGGVSVITPGTNTSNQVAVLYQDVNCTEVPVAIHADQLTPTWRVYSTGSNVFQTRAGCLIGAEHVNNSYECDIPIGAGICASYQTQTNSPRRARSVASQSIIAYTMSLGAENSVAYSNNSIAIPTNFTISVTTEILPVSMTKTSVDCTMYICGDSTECSNLLLQYGSFCTQLNRALTGIAVEQDKNTQEVFAQVKQIYKTPPIKDFGGFNFSQILPDPSKPSKRSFIEDLLFNKVTLADAGFIKQYGDCLGDIAARDLICAQKFNGLTVLPPLLTDEMIAQYTSALLAGTITSGWTFGAGAALQIPFAMQMAYRFNGIGVTQNVLYENQKLIANQFNSAIGKIQDSLSSTASALGKLQDVVNQNAQALNTLVKQLSSNFGAISSVLNDILSRLDPPEAEVQIDRLITGRLQSLQTYVTQQLIRAAEIRASANLAATKMSECVLGQSKRVDFCGKGYQLMSFPQSAPHGVVFLNVTYVPAQEKNFTTAPAICNDGKAHFPREGVFVSNGTNWFVTQRNFYEPQIITTDNTFVSGNCDVVIGIVNNTVYDPLQPELDSGGGSGGGQIYEGKLTAEGLRFGIVASRFNHALVDRLVEGAIDAIVRHGGREEDITLVRVPGSWEIPVAAGELARKEDIDAVIAIGVLIRGATPHFDYIASEVSKGLADLSLELRKPITFGVITADTLEQAIERAGTKHGNKGWEAALSAIEMANLFKSLR

SEQ ID NO: 7920 - protein, 1307 aa, Artificial Sequence
  SARS-CoV-2/Germany/BavPat1/2020__EPI_ISL_406862 spike protein (1-1147)(K986P_V987P_ H1048Q_H1064N_ H1083N_H1101N) LumSynth construct
MFVFLVLLPLVSSQCVNLTTRTQLPPAYTNSFTRGVYYPDKVFRSSVLHSTQDLFLPFFSNVTWFHAIHVSGTNGTKRFDNPVLPFNDGVYFASTEKSNIIRGWIFGTTLDSKTQSLLIVNNATNVVIKVCEFQFCNDPFLGVYYHKNNKSWMESEFRVYSSANNCTFEYVSQPFLMDLEGKQGNFKNLREFVFKNIDGYFKIYSKHTPINLVRDLPQGFSALEPLVDLPIGINITRFQTLLALHRSYLTPGDSSSGWTAGAAAYYVGYLQPRTFLLKYNENGTITDAVDCALDPLSETKCTLKSFTVEKGIYQTSNFRVQPTESIVRFPNITNLCPFGEVFNATRFASVYAWNRKRISNCVADYSVLYNSASFSTFKCYGVSPTKLNDLCFTNVYADSFVIRGDEVRQIAPGQTGKIADYNYKLPDDFTGCVIAWNSNNLDSKVGGNYNYLYRLFRKSNLKPFERDISTEIYQAGSTPCNGVEGFNCYFPLQSYGFQPTNGVGYQPYRVVVLSFELLHAPATVCGPKKSTNLVKNKCVNFNFNGLTGTGVLTESNKKFLPFQQFGRDIADTTDAVRDPQTLEILDITPCSFGGVSVITPGTNTSNQVAVLYQGVNCTEVPVAIHADQLTPTWRVYSTGSNVFQTRAGCLIGAEHVNNSYECDIPIGAGICASYQTQTNSPRRARSVASQSIIAYTMSLGAENSVAYSNNSIAIPTNFTISVTTEILPVSMTKTSVDCTMYICGDSTECSNLLLQYGSFCTQLNRALTGIAVEQDKNTQEVFAQVKQIYKTPPIKDFGGFNFSQILPDPSKPSKRSFIEDLLFNKVTLADAGFIKQYGDCLGDIAARDLICAQKFNGLTVLPPLLTDEMIAQYTSALLAGTITSGWTFGAGAALQIPFAMQMAYRFNGIGVTQNVLYENQKLIANQFNSAIGKIQDSLSSTASALGKLQDVVNQNAQALNTLVKQLSSNFGAISSVLNDILSRLDPPEAEVQIDRLITGRLQSLQTYVTQQLIRAAEIRASANLAATKMSECVLGQSKRVDFCGKGYQLMSFPQSAPHGVVFLNVTYVPAQEKNFTTAPAICNDGKAHFPREGVFVSNGTNWFVTQRNFYEPQIITTDNTFVSGNCDVVIGIVNNTVYDPLQPELDSGGGSGGGQIYEGKLTAEGLRFGIVASRFNHALVDRLVEGAIDAIVRHGGREEDITLVRVPGSWEIPVAAGELARKEDIDAVIAIGVLIRGATPHFDYIASEVSKGLADLSLELRKPITFGVITADTLEQAIERAGTKHGNKGWEAALSAIEMANLFKSLR

SEQ ID NO: 7921 - protein, 1307 aa, Artificial Sequence
  SARS-CoV-2/Wuhan/HBCDC-HB-02/2020__EPI_ISL_412978 spike protein (1-1147)(K986P_V987P_ H1048Q_H1064N_ H1083N_H1101N) LumSynth construct
MFVFLVLLPLVSSQCVNLTTRTQLPPAYTNSFTRGVYYPDKVFRSSVLHSTQDLFLPFFSNVTWFHAIHVSGTNGTKRFDNPVLPFNDGVYFASTEKSNIIRGWIFGTTLDSKTQSLLIVNNATNVVIKVCEFQFCNDPFLGVYYHKNNKSWMESEFRVYSSANNCTFEYVSQPFLMDLEGKQGNFKNLREFVFKNIDGYFKIYSKHTPINLVRDLPQGFSALEPLVDLPIGINITRFQTLLALHRSYLTPGDSSSGWTAGAAAYYVGYLQPRTFLLKYNENGTITDAVDCALDPLSETKCTLKSFTVEKGIYQTSNFRVQPTESIVRFPNITNLCPFGEVFNATRFASVYAWNRKRISNCVADYSVLYNSASFSTFKCYGVSPTKLNDLCFTNVYADSFVIRGDEVRQIAPGQTGKIADYNYKLPDDFTGCVIAWNSNNLDSKVGGNYNYLYRLFRKSNLKPFERDISTEIYQAGSTPCNGVEGFNCYFPLQSYGFQPTNGVGYQPYRVVVLSFELLHAPATVCGPKKSTNLVKNKCVNFNFNGLTGTGVLTESNKKFLPFQQFGRDIADTTDAVRDPQTLEILDITPCSFGGVSVITPGTNTSNQVAVLYQDVNCTEVPVAIHADQLTPTWRVYSTGSNVFQTRAGCLIGAEHVNNSYECDIPIGAGICASYQTQTNSPRRARSVASQSIIAYTMSLGAENSVAYSNNSIAIPTNFTISVTTEILPVSMTKTSVDCTMYICGDSTECSNFLLQYGSFCTQLNRALTGIAVEQDKNTQEVFAQVKQIYKTPPIKDFGGFNFSQILPDPSKPSKRSFIEDLLFNKVTLADAGFIKQYGDCLGDIAARDLICAQKFNGLTVLPPLLTDEMIAQYTSALLAGTITSGWTFGAGAALQIPFAMQMAYRFNGIGVTQNVLYENQKLIANQFNSAIGKIQDSLSSTASALGKLQDVVNQNAQALNTLVKQLSSNFGAISSVLNDILSRLDPPEAEVQIDRLITGRLQSLQTYVTQQLIRAAEIRASANLAATKMSECVLGQSKRVDFCGKGYQLMSFPQSAPHGVVFLNVTYVPAQEKNFTTAPAICNDGKAHFPREGVFVSNGTNWFVTQRNFYEPQIITTDNTFVSGNCDVVIGIVNNTVYDPLQPELDSGGGSGGGQIYEGKLTAEGLRFGIVASRFNHALVDRLVEGAIDAIVRHGGREEDITLVRVPGSWEIPVAAGELARKEDIDAVIAIGVLIRGATPHFDYIASEVSKGLADLSLELRKPITFGVITADTLEQAIERAGTKHGNKGWEAALSAIEMANLFKSLR

SEQ ID NO: 7922 - protein, 1307 aa, Artificial Sequence
  SARS-CoV-2/Australia/QLD02/2020__EPI_ISL_407896 spike protein (1-1147)(K986P_V987P_ H1048Q_H1064N_ H1083N_H1101N) LumSynth construct
MFVFLVLLPLVSSQCVNLTTRTQLPPAYTNSFTRGVYYPDKVFRSSVLHSTQDLFLPFFSNVTWFHAIHVSGTNGTKRFDNPVLPFNDGVYFASTEKSNIIRGWIFGTTLDSKTQSLLIVNNATNVVIKVCEFQFCNDPFLGVYYHKNNKSWMESEFRVYSSANNCTFEYVSQPFLMDLEGKQGNFKNLREFVFKNIDGYFKIYSKHTPINLVRDLPQGFSALEPLVDLPIGINITRFQTLLALHRSYLTPGDSSSGWTAGAAAYYVGYLQPRTFLLKYNENGTITDAVDCALDPLSETKCTLKSFTVEKGIYQTSNFRVQPTESIVRFPNITNLCPFGEVFNATRFASVYAWNRKRISNCVADYSVLYNSASFSTFKCYGVSPTKLNDLCFTNVYADSFVIRGDEVRQIAPGQTGKIADYNYKLPDDFTGCVIAWNSNNLDSKVGGNYNYLYRLFRKSNLKPFERDISTEIYQAGSTPCNGVEGFNCYFPLQSYGFQPTNGVGYQPYRVVVLSFELLHAPATVCGPKKSTNLVKNKCVNFNFNGLTGTGVLTESNKKFLPFQQFGRDIADTTDAVRDPQTLEILDITPCSFGGVSVITPGTNTSNQVAVLYQDVNCTEVPVAIHADQLTPTWRVYSTGSNVFQTRAGCLIGAEHVNNSYECDIPIGAGICASYQTQTNSPRRARSVASQSIIAYTMSLGAENSVAYSNNSIAIPTNFTISVTTEILPVSMTKTSVDCTMYICGDSTECSNLLLQYGSFCTQLNRALTGIAVEQDKNTQEVFAQVKQIYKTPPIKDFGGFNFSQILPDPSKPSKRSFIEDLLFNKVTLADAGFIKQYGDCLGDIAARDLICAQKFNGLTVLPPLLTDEMIAQYTSALLAGTITSGWTFGAGAALQIPFAMQMAYRFNGIGVTQNVLYENQKLIANQFNSAIGKIQDSLSSTASALGKLQDVVNQNAQALNTLVKQLSSNFGAISSVLNDILSRLDPPEAEVQIDRLITGRLQSLQTYVTQQLIRAAEIRASANLAATKMSECVLGQSKRVDFCGKGYQLMSFPQSAPHGVVFLNVTYVPAQEKNFTTAPAICNDGKAHFPREGVFVSNGTNWFVTQRNFYEPQIITTDNTFVSGNCDVVIGIVNNTVYDPLQLELDSGGGSGGGQIYEGKLTAEGLRFGIVASRFNHALVDRLVEGAIDAIVRHGGREEDITLVRVPGSWEIPVAAGELARKEDIDAVIAIGVLIRGATPHFDYIASEVSKGLADLSLELRKPITFGVITADTLEQAIERAGTKHGNKGWEAALSAIEMANLFKSLR

SEQ ID NO: 7923 - protein, 1307 aa, Artificial Sequence
  SARS-CoV-2/India/1-31/2020__EPI_ISL_413523 spike protein (1-1147)(K986P_V987P_ H1048Q_H1064N_ H1083N_H1101N) LumSynth construct
MFVFLVLLPLVSSQCVNLTTRTQLPPAYTNSFTRGVYYPDKVFRSSVLHSTQDLFLPFFSNVTWFHAIHVSGTNGTKRFDNPVLPFNDGVYFASTEKSNIIRGWIFGTTLDSKTQSLLIVNNATNVVIKVCEFQFCNDPFLGVYYHKNNKSWMESEFRVYSSANNCTFEYVSQPFLMDLEGKQGNFKNLREFVFKNIDGYFKIYSKHTPINLVRDLPQGFSALEPLVDLPIGINITRFQTLLALHRSYLTPGDSSSGWTAGAAAYYVGYLQPRTFLLKYNENGTITDAVDCALDPLSETKCTLKSFTVEKGIYQTSNFRVQPTESIVRFPNITNLCPFGEVFNATRFASVYAWNRKRISNCVADYSVLYNSASFSTFKCYGVSPTKLNDLCFTNVYADSFVIRGDEVRQIAPGQTGKIADYNYKLPDDFTGCVIAWNSNNLDSKVGGNYNYLYRLFRKSNLKPFERDISTEIYQAGSTPCNGVEGFNCYFPLQSYGFQPTNGVGYQPYRVVVLSFELLHAPATVCGPKKSTNLVKNKCVNFNFNGLTGTGVLTESNKKFLPFQQFGRDIADTTDAVRDPQTLEILDITPCSFGGVSVITPGTNTSNQVAVLYQDVNCTEVPVAIHADQLTPTWRVYSTGSNVFQTRAGCLIGAEHVNNSYECDIPIGAGICASYQTQTNSPRRARSVASQSIIAYTMSLGAENSVAYSNNSIAIPTNFTISVTTEILPVSMTKTSVDCTMYICGDSTECSNLLLQYGSFCTQLNRALTGIAVEQDKNTQEVFAQVKQIYKTPPIKDFGGFNFSQILPDPSKPSKRSFIEDLLFNKVTLADAGFIKQYGDCLGDIAARDLICAQKFNGLTVLPPLLTDEMIAQYTSALLAGTITSGWTFGAGAALQIPFAMQMAYRFNGIGVTQNVLYENQKLIANQFNSVIGKIQDSLSSTASALGKLQDVVNQNAQALNTLVKQLSSNFGAISSVLNDILSRLDPPEAEVQIDRLITGRLQSLQTYVTQQLIRAAEIRASANLAATKMSECVLGQSKRVDFCGKGYQLMSFPQSAPHGVVFLNVTYVPAQEKNFTTAPAICNDGKAHFPREGVFVSNGTNWFVTQRNFYEPQIITTDNTFVSGNCDVVIGIVNNTVYDPLQPELDSGGGSGGGQIYEGKLTAEGLRFGIVASRFNHALVDRLVEGAIDAIVRHGGREEDITLVRVPGSWEIPVAAGELARKEDIDAVIAIGVLIRGATPHFDYIASEVSKGLADLSLELRKPITFGVITADTLEQAIERAGTKHGNKGWEAALSAIEMANLFKSLR

SEQ ID NO: 7924 - protein, 1307 aa, Artificial Sequence
  SARS-CoV-2/Guangdong/GD2020087-P0008/2020__EPI_ISL_413863 spike protein (1-1147)(K986P_V987P_ H1048Q_H1064N_ H1083N_H1101N) LumSynth construct
MFVFLVLLPLVSSQCVNLTTRTQLPPAYTNSFTRGVYYPDKVFRSSVLHSTQDLFLPFFSNVTWFHAIHVSGTNGTKRFDNPVLPFNDGVYFASTEKSNIIRGWIFGTTLDSKTQSLLIVNNATNVVIKVCEFQFCNDPFLGVYYHKNNKSWMESEFRVYSSANNCTFEYVSQPFLMDLEGKQGNFKNLREFVFKNIDGYFKIYSKHTPINLVRDLPQGFSALEPLVDLPIGINITRFQTLLALHRSYLTPGDSSSGWTAGAAAYYVGYLQPRTFLLKYNENGTITDAVDCALDPLSETKCTLKSFTVEKGIYQTSNFRVQPTESIVRFPNITNLCPFGEVFNATRFASVYAWNRKRISNCVADYSVLYNSASFSTFKCYGVSPTKLNDLCFTNVYADSFVIRGDEVREIAPGQTGKIADYNYKLPDDFTGCVIAWNSNNLDSKVGGNYNYLYRLFRKSNLKPFERDISTEIYQAGSTPCNGVEGFNCYFPLQSYGFQPTNGVGYQPYRVVVLSFELLHAPATVCGPKKSTNLVKNKCVNFNFNGLTGTGVLTESNKKFLPFQQFGRDIADTTDAVRDPQTLEILDITPCSFGGVSVITPGTNTSNQVAVLYQDVNCTEVPVAIHADQLTPTWRVYSTGSNVFQTRAGCLIGAEHVNNSYECDIPIGAGICASYQTQTNSPRRARSVASQSIIAYTMSLGAENSVAYSNNSIAIPTNFTISVTTEILPVSMTKTSVDCTMYICGDSTECSNLLLQYGSFCTQLNRALTGIAVEQDKNTQEVFAQVKQIYKTPPIKDFGGFNFSQILPDPSKPSKRSFIEDLLFNKVTLADAGFIKQYGDCLGDIAARDLICAQKFNGLTVLPPLLTDEMIAQYTSALLAGTITSGWTFGAGAALQIPFAMQMAYRFNGIGVTQNVLYENQKLIANQFNSAIGKIQDSLSSTASALGKLQDVVNQNAQALNTLVKQLSSNFGAISSVLNDILSRLDPPEAEVQIDRLITGRLQSLQTYVTQQLIRAAEIRASANLAATKMSECVLGQSKRVDFCGKGYQLMSFPQSAPHGVVFLNVTYVPAQEKNFTTAPAICNDGKAHFPREGVFVSNGTNWFVTQRNFYEPQIITTDNTFVSGNCDVVIGIVNNTVYDPLQPELDSGGGSGGGQIYEGKLTAEGLRFGIVASRFNHALVDRLVEGAIDAIVRHGGREEDITLVRVPGSWEIPVAAGELARKEDIDAVIAIGVLIRGATPHFDYIASEVSKGLADLSLELRKPITFGVITADTLEQAIERAGTKHGNKGWEAALSAIEMANLFKSLR

SEQ ID NO: 7925 - protein, 1307 aa, Artificial Sequence
  SARS-CoV-2/Sweden/01/2020__EPI_ISL_411951 spike protein (1-1147)(K986P_V987P_ H1048Q_H1064N_ H1083N_H1101N) LumSynth construct
MFVFLVLLPLVSSQCVNLTTRTQLPPAYTNSFTRGVYYPDKVFRSSVLHSTQDLFLPFFSNVTWFHAIHVSGTNGTKRFDNPVLPFNDGVYFASTEKSNIIRGWIFGTTLDSKTQSLLIVNNATNVVIKVCEFQFCNDPFLGVYYHKNNKSWMESEFRVYSSANNCTFEYVSQPFLMDLEGKQGNFKNLREFVFKNIDGYFKIYSKHTPINLVRDLPQGFSALEPLVDLPIGINITRFQTLLALHRSYLTPGDSSSGWTAGAAAYYVGYLQPRTFLLKYNENGTITDAVDCALDPLSETKCTLKSFTVEKGIYQTSNFRVQPTESIVRFPNITNLCPFGEVFNATRFASVYAWNRKRISNCVADYSVLYNSASFSTFKCYGVSPTKLNDLCFTNVYADSFVIRGDEVRQIAPGQTGKIADYNYKLPDDFTGCVIAWNSNNLDSKVGGNYNYLYRLFRKSNLKPFERDISTEIYQAGSTPCNGVEGFNCYFPLQSYGFQPTNGVGYQPYRVVVLSFELLHAPATVCGPKKSTNLVKNKCVNFNFNGLTGTGVLTESNKKFLPFQQFGRDIADTTDAVRDPQTLEILDITPCSFGGVSVITPGTNTSNQVAVLYQDVNCTEVPVAIHADQLTPTWRVYSTGSNVFQTRAGCLIGAEHVNNSYECDIPIGAGICASYQTQTNSPRRARSVASQSIIAYTMSLGAENSVAYSNNSIAIPTNFTISVTTEILPVSMTKTSVDCTMYICGDSTECSNLLLQYGSFCTQLNRALTGIAVEQDKNTQEVFAQVKQIYKTPPIKDCGGFNFSQILPDPSKPSKRSFIEDLLFNKVTLADAGFIKQYGDCLGDIAARDLICAQKFNGLTVLPPLLTDEMIAQYTSALLAGTITSGWTFGAGAALQIPFAMQMAYRFNGIGVTQNVLYENQKLIANQFNSAIGKIQDSLSSTASALGKLQDVVNQNAQALNTLVKQLSSNFGAISSVLNDILSRLDPPEAEVQIDRLITGRLQSLQTYVTQQLIRAAEIRASANLAATKMSECVLGQSKRVDFCGKGYQLMSFPQSAPHGVVFLNVTYVPAQEKNFTTAPAICNDGKAHFPREGVFVSNGTNWFVTQRNFYEPQIITTDNTFVSGNCDVVIGIVNNTVYDPLQPELDSGGGSGGGQIYEGKLTAEGLRFGIVASRFNHALVDRLVEGAIDAIVRHGGREEDITLVRVPGSWEIPVAAGELARKEDIDAVIAIGVLIRGATPHFDYIASEVSKGLADLSLELRKPITFGVITADTLEQAIERAGTKHGNKGWEAALSAIEMANLFKSLR

SEQ ID NO: 7926 - protein, 1307 aa, Artificial Sequence
  SARS-CoV-2/Tianmen/HBCDC-HB-07/2020__EPI_ISL_412983 spike protein (1-1147)(K986P_V987P_ H1048Q_H1064N_ H1083N_H1101N) LumSynth construct
MFVFLVLLPLVSSQCVNLTTRTQLPPAYTNSFTRGVYYPDKVFRSSVLHSTQDLFLPFFSNVTWFHAIHVSGTNGTKRFDNPVLPFNDGVYFASTEKSNIIRGWIFGTTLDSKTQSLLIVNNATNVVIKVCEFQFCNDPFLGVYYHKNNKSWMESEFRVYSSANNCTFEYVSQPFLMDLEGKQGNFKNLREFVFKNIDGYFKIYSKHTPINLVRDLPQGFSALEPLVDLPIGINITRFQTLLALHRSYLTPGDSSSGWTAGAAAYYVGYLQPRTFLLKYNENGTITDAVDCALDPLSETKCTLKSFTVEKGIYQTSNFRVQPTESIVRFPNITNLCPFGEVFNATRFASVYAWNRKRISNCVADYSVLYNSASFSTFKCYGVSPTKLNDLCFTNVYADSFVIRGDEVRQIAPGQTGKIADYNYKLPDDFTGCVIAWNSNNLDSKVGGNYNYLYRLFRKSNLKPFERDISTEIYQAGSTPCNGVEGFNCYFPLQSYGFQPTNGVGYQPYRVVVLSFELLHAPATVCGPKKSTNLVKNKCVNFNFNGLTGTGVLTESNKKFLPFQQFGRDIADTTDAVRDPQTLEILDITPCSFGGVSVITPGTNTSNQVAVLYQDLNCTEVPVAIHADQLTPTWRVYSTGSNVFQTRAGCLIGAEHVNNSYECDIPIGAGICASYQTQTNSPRRARSVASQSIIAYTMSLGAENSVAYSNNSIAIPTNFTISVTTEILPVSMTKTSVDCTMYICGDSTECSNLLLQYGSFCTQLNRALTGIAVEQDKNTQEVFAQVKQIYKTPPIKDFGGFNFSQILPDPSKPSKRSFIEDLLFNKVTLADAGFIKQYGDCLGDIAARDLICAQKFNGLTVLPPLLTDEMIAQYTSALLAGTITSGWTFGAGAALQIPFAMQMAYRFNGIGVTQNVLYENQKLIANQFNSAIGKIQDSLSSTASALGKLQDVVNQNAQALNTLVKQLSSNFGAISSVLNDILSRLDPPEAEVQIDRLITGRLQSLQTYVTQQLIRAAEIRASANLAATKMSECVLGQSKRVDFCGKGYQLMSFPQSAPHGVVFLNVTYVPAQEKNFTTAPAICNDGKAHFPREGVFVSNGTNWFVTQRNFYEPQIITTDNTFVSGNCDVVIGIVNNTVYDPLQPELDSGGGSGGGQIYEGKLTAEGLRFGIVASRFNHALVDRLVEGAIDAIVRHGGREEDITLVRVPGSWEIPVAAGELARKEDIDAVIAIGVLIRGATPHFDYIASEVSKGLADLSLELRKPITFGVITADTLEQAIERAGTKHGNKGWEAALSAIEMANLFKSLR

SEQ ID NO: 7927 - protein, 1307 aa, Artificial Sequence
  SARS-CoV-2/Hong Kong/case42_VM20002493/2020__EPI_ISL_414527 spike protein (1-1147)(K986P_V987P_ H1048Q_H1064N_ H1083N_H1101N) LumSynth construct
MFVFLVLLPLVSSQCVNLTTRTQLPPAYTNSFTRGVYYPDKVFRSSVLHSTQDLFLPFFSNVTWFHAIHVSGTNGTKRFDNPVLPFNDGVYFASTEKSNIIRGWIFGTTLDSKTQSLLIVNNATNVVIKVCEFQFCNDPFLGVYYHKNNKSWMESEFRVYSSANNCTFEYVSQPFLMDLEGKQGNFKNLREFVFKNIDGYFKIYSKHTPINLVRDLPQGFSALEPLVDLPIGINITRFQTLLALHRSYLTPGDSSSGWTAGAAAYYVGYLQPRTFLLKYNENGTITDAVDCALDPLSETKCTLKSFTVEKGIYQTSNFRVQPTESIVRFPNITNLCPFGEVFNATRFASVYAWNRKRISNCVADYSVLYNSASFSTFKCYGVSPTKLNDLCFTNVYADSFVIRGDEVRQIAPGQTGKIADYNYKLPDDFTGCVIAWNSNNLDSKVGGNYNYLYRLFRKSNLKPFERDISTEIYQAGSTPCNGVEGFNCYFPLQSYGFQPTNGVGYQPYRVVVLSFELLHAPATVCGPKKSTNLVKNKCVNFNFNGLTGTGVLTESNKKFLPFQQFGRDIADTTDAVRDPQTLEILDITPCSFGGVSVITPGTNTSNQVAVLYQDVNCTEVPVAIHADQLTPTWRVYSTGSNVFQTRAGCLIGAEHVNNSYECDIPIGAGICASYQTQTNSPRRARSVASQSIIAYTMSLGAENSVAYSNNSIAIPTNFAISVTTEILPVSMTKTSVDCTMYICGDSTECSNLLLQYGSFCTQLNRALTGIAVEQDKNTQEVFAQVKQIYKTPPIKDFGGFNFSQILPDPSKPSKRSFIEDLLFNKVTLADAGFIKQYGDCLGDIAARDLICAQKFNGLTVLPPLLTDEMIAQYTSALLAGTITSGWTFGAGAALQIPFAMQMAYRFNGIGVTQNVLYENQKLIANQFNSAIGKIQDSLSSTASALGKLQDVVNQNAQALNTLVKQLSSNFGAISSVLNDILSRLDPPEAEVQIDRLITGRLQSLQTYVTQQLIRAAEIRASANLAATKMSECVLGQSKRVDFCGKGYQLMSFPQSAPHGVVFLNVTYVPAQEKNFTTAPAICNDGKAHFPREGVFVSNGTNWFVTQRNFYEPQIITTDNTFVSGNCDVVIGIVNNTVYDPLQPELDSGGGSGGGQIYEGKLTAEGLRFGIVASRFNHALVDRLVEGAIDAIVRHGGREEDITLVRVPGSWEIPVAAGELARKEDIDAVIAIGVLIRGATPHFDYIASEVSKGLADLSLELRKPITFGVITADTLEQAIERAGTKHGNKGWEAALSAIEMANLFKSLR

SEQ ID NO: 7928 - protein, 1307 aa, Artificial Sequence
  SARS-CoV-2/USA/CruiseA-23/2020__EPI_ISL_414482 spike protein (1-1147)(K986P_V987P_ H1048Q_H1064N_ H1083N_H1101N) LumSynth construct
MFVFLVLLPLVSSQCVNLTTRTQLPPAYTNSFTRGVYYPDKVFRSSVLHSTQDLFLPFFSNVTWFHAIHVSGTNGTKRFDNPVLPFNDGVYFASTEKSNIIRGWIFGTTLDSKTQSLLIVNNATNVVIKVCEFQFCNDPFLGVYYHKNNKSWMESEFRVYSSANNCTFEYVSQPFLMDLEVKQGNFKNLREFVFKNIDGYFKIYSKHTPINLVRDLPQGFSALEPLVDLPIGINITRFQTLLALHRSYLTPGDSSSGWTAGAAAYYVGYLQPRTFLLKYNENGTITDAVDCALDPLSETKCTLKSFTVEKGIYQTSNFRVQPTESIVRFPNITNLCPFGEVFNATRFASVYAWNRKRISNCVADYSVLYNSASFSTFKCYGVSPTKLNDLCFTNVYADSFVIRGDEVRQIAPGQTGKIADYNYKLPDDFTGCVIAWNSNNLDSKVGGNYNYLYRLFRKSNLKPFERDISTEIYQAGSTPCNGVEGFNCYFPLQSYGFQPTNGVGYQPYRVVVLSFELLHAPATVCGPKKSTNLVKNKCVNFNFNGLTGTGVLTESNKKFLPFQQFGRDIADTTDAVRDPQTLEILDITPCSFGGVSVITPGTNTSNQVAVLYQDVNCTEVPVAIHADQLTPTWRVYSTGSNVFQTRAGCLIGAEHVNNSYECDIPIGAGICASYQTQTNSPRRARSVASQSIIAYTMSLGAENSVAYSNNSIAIPTNFTISVTTEILPVSMTKTSVDCTMYICGDSTECSNLLLQYGSFCTQLNRALTGIAVEQDKNTQEVFAQVKQIYKTPPIKDFGGFNFSQILPDPSKPSKRSFIEDLLFNKVTLADAGFIKQYGDCLGDIAARDLICAQKFNGLTVLPPLLTDEMIAQYTSALLAGTITSGWTFGAGAALQIPFAMQMAYRFNGIGVTQNVLYENQKLIANQFNSAIGKIQDSLSSTASALGKLQDVVNQNAQALNTLVKQLSSNFGAISSVLNDILSRLDPPEAEVQIDRLITGRLQSLQTYVTQQLIRAAEIRASANLAATKMSECVLGQSKRVDFCGKGYQLMSFPQSAPHGVVFLNVTYVPAQEKNFTTAPAICNDGKAHFPREGVFVSNGTNWFVTQRNFYEPQIITTDNTFVSGNCDVVIGIVNNTVYDPLQPELDSGGGSGGGQIYEGKLTAEGLRFGIVASRFNHALVDRLVEGAIDAIVRHGGREEDITLVRVPGSWEIPVAAGELARKEDIDAVIAIGVLIRGATPHFDYIASEVSKGLADLSLELRKPITFGVITADTLEQAIERAGTKHGNKGWEAALSAIEMANLFKSLR

SEQ ID NO: 7929 - protein, 1307 aa, Artificial Sequence
  SARS-CoV-2/Hong Kong/case85_VM20002868/2020__EPI_ISL_414519 spike protein (1-1147)(K986P_V987P_ H1048Q_H1064N_ H1083N_H1101N) LumSynth construct
MFVFLVLVPLVSSQCVNLTTRTQLPPAYTNSFTRGVYYPDKVFRSSVLHSTQDLFLPFFSNVTWFHAIHVSGTNGTKRFDNPVLPFNDGVYFASTEKSNIIRGWIFGTTLDSKTQSLLIVNNATNVVIKVCEFQFCNDPFLGVYYHKNNKSWMESEFRVYSSANNCTFEYVSQPFLMDLEGKQGNFKNLREFVFKNIDGYFKIYSKHTPINLVRDLPQGFSALEPLVDLPIGINITRFQTLLALHRSYLTPGDSSSGWTAGAAAYYVGYLQPRTFLLKYNENGTITDAVDCALDPLSETKCTLKSFTVEKGIYQTSNFRVQPTESIVRFPNITNLCPFGEVFNATRFASVYAWNRKRISNCVADYSVLYNSASFSTFKCYGVSPTKLNDLCFTNVYADSFVIRGDEVRQIAPGQTGKIADYNYKLPDDFTGCVIAWNSNNLDSKVGGNYNYLYRLFRKSNLKPFERDISTEIYQAGSTPCNGVEGFNCYFPLQSYGFQPTNGVGYQPYRVVVLSFELLHAPATVCGPKKSTNLVKNKCVNFNFNGLTGTGVLTESNKKFLPFQQFGRDIADTTDAVRDPQTLEILDITPCSFGGVSVITPGTNTSNQVAVLYQDVNCTEVPVAIHADQLTPTWRVYSTGSNVFQTRAGCLIGAEHVNNSYECDIPIGAGICASYQTQTNSPRRARSVASQSIIAYTMSLGAENSVAYSNNSIAIPTNFTISVTTEILPVSMTKTSVDCTMYICGDSTECSNLLLQYGSFCTQLNRALTGIAVEQDKNTQEVFAQVKQIYKTPPIKDFGGFNFSQILPDPSKPSKRSFIEDLLFNKVTLADAGFIKQYGDCLGDIAARDLICAQKFNGLTVLPPLLTDEMIAQYTSALLAGTITSGWTFGAGAALQIPFAMQMAYRFNGIGVTQNVLYENQKLIANQFNSAIGKIQDSLSSTASALGKLQDVVNQNAQALNTLVKQLSSNFGAISSVLNDILSRLDPPEAEVQIDRLITGRLQSLQTYVTQQLIRAAEIRASANLAATKMSECVLGQSKRVDFCGKGYQLMSFPQSAPHGVVFLNVTYVPAQEKNFTTAPAICNDGKAHFPREGVFVSNGTNWFVTQRNFYEPQIITTDNTFVSGNCDVVIGIVNNTVYDPLQPELDSGGGSGGGQIYEGKLTAEGLRFGIVASRFNHALVDRLVEGAIDAIVRHGGREEDITLVRVPGSWEIPVAAGELARKEDIDAVIAIGVLIRGATPHFDYIASEVSKGLADLSLELRKPITFGVITADTLEQAIERAGTKHGNKGWEAALSAIEMANLFKSLR

SEQ ID NO: 7930 - protein, 1307 aa, Artificial Sequence; identical to SEQ ID NO: 7920
  SARS-CoV-2/England/200990660/2020__EPI_ISL_414523 spike protein (1-1147)(K986P_V987P_ H1048Q_H1064N_ H1083N_H1101N) LumSynth construct

SEQ ID NO: 7931 - protein, 1307 aa, Artificial Sequence
  SARS-CoV-2/Australia/NSW09/2020__EPI_ISL_413595 spike protein (1-1147)(K986P_V987P_ H1048Q_H1064N_ H1083N_H1101N) LumSynth construct
MFVFLVLLPLVSSQCVNLTTRTQLPPAYTNSFTRGVYYPDKVFRSSVLHSTQDLFLPFFSNVTWFHAIHVSGTNGTKRFDNPVLPFNDGVYFASTEKSNIIRGWIFGTTLDSKTQSLLIVNNATNVVIKVCEFQFCNDPFLGVYYHKNNKSWMESEFRVYSSANNCTFEYVSQPFLMDLEGKQGNFKNLREFVFKNIDGYFKIYSKHTPINLVRDLPQGFSALEPLVDLPIGINITRFQTLLALHRSYLTPGDSSSGWTAGAAAYYVGYLQPRTFLLKYNENGTITDAVDCALDPLSETKCTLKSFTVEKGIYQTSNFRVQPTESIVRFPNITNLCPFGEVFNATRFASVYAWNRKRISNCVADYSVLYNSASFSTFKCYGVSPTKLNDLCFTNVYADSFVIRGDEVRQIAPGQTGKIADYNYKLPDDFTGCVIAWNSNNLDSKVGGNYNYLYRLFRKSNLKPFERDISTEIYQAGSTPCNGVEGFNCYFPLQSYGFQPTNGVGYQPYRVVVLSFELLHAPATVCGPKKSTNLVKNKCVNFNFNGLTGTGVLTESNKKFLPFQQFGRDIADTTDAVRDPQTLEILDITPCSFGGVSVITPGTNTSNQVAVLYQDVNCTEVPVAIHADQLTPTWRVYSTGSNVFQTRAGCLIGAEHVNNSYECDIPIGAGICASYQTQTNSPRRARSVASQSIIAYTMSLGAENSVAYSNNSIAIPTNFTISVTTEILPVSMTKTSVDCTMYICGDSTECSNLLLQYGSFCTQLNRALTGIAVEQDKNTQEVFAQVKQIYKTPPIKDFGGFNFSQILPDPSKPSKRSFIEDLLFNKVTLADAGFIKQYGDCLGDIAARDLICAQKFNGLTVLPPLLTDEMIAQYTSALLAGTITSGWTFGAGAALQIPFAMQMAYRFNGIGVTQNVLYENQKLIANQFNSAIGKIQDSLSFTASALGKLQDVVNQNAQALNTLVKQLSSNFGAISSVLNDILSRLDPPEAEVQIDRLITGRLQSLQTYVTQQLIRAAEIRASANLAATKMSECVLGQSKRVDFCGKGYQLMSFPQSAPHGVVFLNVTYVPAQEKNFTTAPAICNDGKAHFPREGVFVSNGTNWFVTQRNFYEPQIITTDNTFVSGNCDVVIGIVNNTVYDPLQPELDSGGGSGGGQIYEGKLTAEGLRFGIVASRFNHALVDRLVEGAIDAIVRHGGREEDITLVRVPGSWEIPVAAGELARKEDIDAVIAIGVLIRGATPHFDYIASEVSKGLADLSLELRKPITFGVITADTLEQAIERAGTKHGNKGWEAALSAIEMANLFKSLR

SEQ ID NO: 7932 - protein, 1307 aa, Artificial Sequence; identical to SEQ ID NO: 7912
  SARS-CoV-2/Australia/NSW10/2020__EPI_ISL_413596 spike protein (1-1147)(K986P_V987P_ H1048Q_H1064N_ H1083N_H1101N) LumSynth construct

SEQ ID NO: 7933 - protein, 1307 aa, Artificial Sequence
  SARS-CoV-2/Switzerland/1000477797/2020__EPI_ISL_413023 spike protein (1-1147)(K986P_V987P_ H1048Q_H1064N_ H1083N_H1101N) LumSynth construct
MFVFLVLLPLVSSQCVNLTTRTQLPPAYTNSFTRGVYYPDKVFRSSVLHSTQDLFLPFFSNVTWFHAIHVSGTNGTKRFDNPVLPFNDGVYFASTEKSNIIRGWIFGTTLDSKTQSLLIVNNATNVVIKVCEFQFCNDPFLGVYYHKNNKSWMESEFRVYSSANNCTFEYVSQPFLMDLEGKQGNFKNLREFVFKNIDGYFNIYSKHTPINLVRDLPQGFSALEPLVDLPIGINITRFQTLLALHRSYLTPGDSSSGWTAGAAAYYVGYLQPRTFLLKYNENGTITDAVDCALDPLSETKCTLKSFTVEKGIYQTSNFRVQPTESIVRFPNITNLCPFGEVFNATRFASVYAWNRKRISNCVADYSVLYNSASFSTFKCYGVSPTKLNDLCFTNVYADSFVIRGDEVRQIAPGQTGKIADYNYKLPDDFTGCVIAWNSNNLDSKVGGNYNYLYRLFRKSNLKPFERDISTEIYQAGSTPCNGVEGFNCYFPLQSYGFQPTNGVGYQPYRVVVLSFELLHAPATVCGPKKSTNLVKNKCVNFNFNGLTGTGVLTESNKKFLPFQQFGRDIADTTDAVRDPQTLEILDITPCSFGGVSVITPGTNTSNQVAVLYQGVNCTEVPVAIHADQLTPTWRVYSTGSNVFQTRAGCLIGAEHVNNSYECDIPIGAGICASYQTQTNSPRRARSVASQSIIAYTMSLGAENSVAYSNNSIAIPTNFTISVTTEILPVSMTKTSVDCTMYICGDSTECSNLLLQYGSFCTQLNRALTGIAVEQDKNTQEVFAQVKQIYKTPPIKDFGGFNFSQILPDPSKPSKRSFIEDLLFNKVTLADAGFIKQYGDCLGDIAARDLICAQKFNGLTVLPPLLTDEMIAQYTSALLAGTITSGWTFGAGAALQIPFAMQMAYRFNGIGVTQNVLYENQKLIANQFNSAIGKIQDSLSSTASALGKLQDVVNQNAQALNTLVKQLSSNFGAISSVLNDILSRLDPPEAEVQIDRLITGRLQSLQTYVTQQLIRAAEIRASANLAATKMSECVLGQSKRVDFCGKGYQLMSFPQSAPHGVVFLNVTYVPAQEKNFTTAPAICNDGKAHFPREGVFVSNGTNWFVTQRNFYEPQIITTDNTFVSGNCDVVIGIVNNTVYDPLQPELDSGGGSGGGQIYEGKLTAEGLRFGIVASRFNHALVDRLVEGAIDAIVRHGGREEDITLVRVPGSWEIPVAAGELARKEDIDAVIAIGVLIRGATPHFDYIASEVSKGLADLSLELRKPITFGVITADTLEQAIERAGTKHGNKGWEAALSAIEMANLFKSLR

SEQ ID NO: 7934 - protein, 1307 aa, Artificial Sequence
  SARS-CoV-2/Belgium/BA-02291/2020__EPI_ISL_415159 spike protein (1-1147)(K986P_V987P_ H1048Q_H1064N_ H1083N_H1101N) LumSynth construct
MFVFLVLLPLVSSQCVNLTTRTQLPPAYTNSFTRGVYYPDKVFRSSVLHSTQDLFLPFFSNVTWFHAIHVSGTNGTKRFDNPVLPFNDGVYFASTEKSNIIRGWIFGTTLDSKTQSLLIVNNATNVVIKVCEFQFCNDPFLGVYYHKNNKSWMESEFRVYSSANNCTFEYVSQPFLMDLEGKQGNFKNLREFVFKNIDGYFKIYSKHTPINLVRDLPQGFSALEPLVDLPIGINITRFQTLLALHRSYLTPGDSSSGWTAGAAAYYVGYLQPRTFLLKYNENGTITDAVDCALDPLSETKCTLKSFTVEKGIYQTSNFRVQPTESIVRFPNITNLCPFGEVFNATRFASVYAWNRKRISNCVADYSVLYNSASFSTFKCYGVSPTKLNDLCFTNVYADSFVIRGDEVRQIAPGQTGKIADYNYKLPDDFTGCVIAWNSNNLDSKVGGNYNYLYRLFRRSNLKPFERDISTEIYQAGSTPCNGVEGFNCYFPLQSYGFQPTNGVGYQPYRVVVLSFELLPAPATVCGPKKSTNLVKNKCVNFNFNGLTGTGVLTESNKKFLPFQQFGRDIADTTDAVRDPQTLEILDITPCSFGGVSVITPGTNTSNQVAVLYQGVNCTEVPVAIHADQLTPTWRVYSTGSNVFQTRAGCLIGAEHVNNSYECDIPIGAGICASYQTQTNSPRRARSVASQSIIAYTMSLGAENSVAYSNNSIAIPTNFTISVTTEILPVSMTKTSVDCTMYICGDSTECSNLLLQYGSFCTQLNRALTGIAVEQDKNTQEVFAQVKQIYKTPPIKDFGGFNFSQILPDPSKPSKRSFIEDLLFNKVTLADAGFIKQYGDCLGDIAARDLICAQKFNGLTVLPPLLTDEMIAQYTSALLAGTITSGWTFGAGAALQIPFAMQMAYRFNGIGVTQNVLYENQKLIANQFNSAIGKIQDSLSSAAPALGKLQDVVNQNAQALNTLVKQLSSNFGAISSVLNDILSRLDPPEAEVQIDRLITGRLQSLQTYVTQQLIRAAEIRASANLAATKMSECVLGQSKRVDFCGKGYQLMSFPQSAPHGVVFLNVTYVPAQEKNFTTAPAICNDGKAHFPREGVFVSNGTNWFVTQRNFYEPQIITTDNTFVSGNCDVVIGIVNNTVYDPLQPELDSGGGSGGGQIYEGKLTAEGLRFGIVASRFNHALVDRLVEGAIDAIVRHGGREEDITLVRVPGSWEIPVAAGELARKEDIDAVIAIGVLIRGATPHFDYIASEVSKGLADLSLELRKPITFGVITADTLEQAIERAGTKHGNKGWEAALSAIEMANLFKSLR

SEQ ID NO: 7935 - protein, 1307 aa, Artificial Sequence
  SARS-CoV-2/USA/WA8-UW5/2020__EPI_ISL_413486 spike protein (1-1147)(K986P_V987P_ H1048Q_H1064N_ H1083N_H1101N) LumSynth construct
MFVFLVLLPLVSSQCVNLTTRTQLPPAYTNSFTRGVYYPDKVFRSSVLHSTQDLFLPFFSNVTWFHAIHVSGTNGTKRFDNPVLPFNDGVYFASTEKSNIIRGWIFGTTLDSKTQSLLIVNNATNVVIKVCEFQFCNDPFLGVYYHKNNKSWMESEFRVYSSANNCTFEYVSQPFLMDLEGKQGNFKNLREFVFKNIDGYFKIYSKHTPINLVRDLPQGFSALEPLVDLPIGINITRFQTLLALHRSYLTPGDSSSGWTAGAAAYYVGYLQPRTFLLKYNENGTITDAVDCALDPLSETKCTLKSFTVEKGIYQTSNFRVQPTESIVRFPNITNLCPFGEVFNATRFASVYAWNRKRISNCVADYSVLYNSASFSTFKCYGVSPTKLNDLCFTNVYADSFVIRGDEVRQIAPGQTGKIADYNYKLPDDFTGCVIAWNSNNLDSKVGGNYNYLYRLFRKSNLKPFERDISTEIYQAGSTPCNGVEGFNCYFPLQSYGFQPTNGVGYQPYRVVVLSFELLHAPATVCGPKKSTNLVKNKCVNFNFNGLTGTGVLTESNKKFLPFQQFGRDIADTTDAVRDPQTLEILDITPCSFGGVSVITPGTNTSNQVAVLYQDVNCTEVPVAIHADQLTPTWRVYSTGSNVFQTRAGCLIGAEYVNNSYECDIPIGAGICASYQTQTNSPRRARSVASQSIIAYTMSLGAENSVAYSNNSIAIPTNFTISVTTEILPVSMTKTSVDCTMYICGDSTECSNLLLQYGSFCTQLNRALTGIAVEQDKNTQEVFAQVKQIYKTPPIKDFGGFNFSQILPDPSKPSKRSFIEDLLFNKVTLADAGFIKQYGDCLGDIAARDLICAQKFNGLTVLPPLLTDEMIAQYTSALLAGTITSGWTFGAGAALQIPFAMQMAYRFNGIGVTQNVLYENQKLIANQFNSAIGKIQDSLSSTASALGKLQDVVNQNAQALNTLVKQLSSNFGAISSVLNDILSRLDPPEAEVQIDRLITGRLQSLQTYVTQQLIRAAEIRASANLAATKMSECVLGQSKRVDFCGKGYQLMSFPQSAPHGVVFLNVTYVPAQEKNFTTAPAICNDGKAHFPREGVFVSNGTNWFVTQRNFYEPQIITTDNTFVSGNCDVVIGIVNNTVYDPLQPELDSGGGSGGGQIYEGKLTAEGLRFGIVASRFNHALVDRLVEGAIDAIVRHGGREEDITLVRVPGSWEIPVAAGELARKEDIDAVIAIGVLIRGATPHFDYIASEVSKGLADLSLELRKPITFGVITADTLEQAIERAGTKHGNKGWEAALSAIEMANLFKSLR

SEQ ID NO: 7936 - protein, 1307 aa, Artificial Sequence
  SARS-CoV-2/England/20102000506/2020__EPI_ISL_415147 spike protein (1-1147)(K986P_V987P_ H1048Q_H1064N_ H1083N_H1101N) LumSynth construct
MFVFLVLLPLVSSQCVNLTTRTQLPPAYTNSFTRGVYYPDKVFRSSVLHSTQDLFLPFFSNVTWFHAIHVSGTNGTKRFDNPVLPFNDGVYFASTEKSNIIRGWIFGTTLDSKTQSLLIVNNATNVVIKVCEFQFCNDPFLGVYYHKNNKSWMESEFRVYSSANNCTFEYVSQPFLMDLEGKQGNFKNLREFVFKNIDGYFKIYSKHTPINLVRDLPQGFSALEPLVDLPIGINITRFQTLLALHRSYLTPGDSSSGWTAGAAAYYVGYLQPRTFLLKYNENGTITDAVDCALDPLSETKCTLKSFTVEKGIYQTSNFRVQPTESIVRFPNITNLCPFGEVFNATRFASVYAWNRKRISNCVADYSVLYNSASFSTFKCYGVSPTKLNDLCFTNVYADSFVIRGDEVRQIAPGQTGKIADYNYKLPDDFTGCVIAWNSNNLDSKVGGNYNYLYRLFRKSNLKPFERDISTEIYQAGSTPCNGVEGFNCYFPLQSYGFQPTNGVGYQPYRVVVLSFELLHAPATVCGPKKSTNLVKNKCVNFNFNGLTGTGVLTESNKKFLPFQQFGRDIADTTDAVRDPQTLEILDITPCSFGGVSVITPGTNTSNQVAVLYQGVNCTEVPVAIHADQLTPTWRVYSTGSNVFQTRAGCLIGAEHVNNSYECDIPIGAGICASYQTQTNSPRRARSVASQSIIAYTMSLGAENSVAYSNNSIAIPTNFTISVTTEILPVSMTKTSVDCTMYICGDSTECSNLLLQYGSFCTQLNRALTGIAVEQDKNTQEVFAQVKQIYKTPPIKDFGGFNFSQILPDPSKPSKRSFIEDLLFNKVTLADAGFIKQYGYCLGDIAARDLICAQKFNGLTVLPPLLTDEMIAQYTSALLAGTITSGWTFGAGAALQIPFAMQMAYRFNGIGVTQNVLYENQKLIANQFNSAIGKIQDSLSSTASALGKLQDVVNQNAQALNTLVKQLSSNFGAISSVLNDILSRLDPPEAEVQIDRLITGRLQSLQTYVTQQLIRAAEIRASANLAATKMSECVLGQSKRVDFCGKGYQLMSFPQSAPHGVVFLNVTYVPAQEKNFTTAPAICNDGKAHFPREGVFVSNGTNWFVTQRNFYEPQIITTDNTFVSGNCDVVIGIVNNTVYDPLQPELDSGGGSGGGQIYEGKLTAEGLRFGIVASRFNHALVDRLVEGAIDAIVRHGGREEDITLVRVPGSWEIPVAAGELARKEDIDAVIAIGVLIRGATPHFDYIASEVSKGLADLSLELRKPITFGVITADTLEQAIERAGTKHGNKGWEAALSAIEMANLFKSLR

SEQ ID NO: 7937 - protein, 1307 aa, Artificial Sequence
  SARS-CoV-2/Belgium/VAG-03013/2020__EPI_ISL_415155 spike protein (1-1147)(K986P_V987P_ H1048Q_H1064N_ H1083N_H1101N) LumSynth construct
MFVFLVLLPLVSSQCVNLTTRTQLPPAYTNSFTRGVYYPDKVFRSSVLHSTQDLFLPFFSNVTWFHAIHVSGTNGTKRFDNPVLPFNDGVYFASTEKSNIIRGWIFGTTLDSKTQSLLIVNNATNVVIKVCEFQFCNDPFLGVYYHKNNKSWMESEFRVYSSANNCTFEYVSQPFLMDLEGKQGNFKNLREFVFKNIDGYFKIYSKHTPINLVRDLPQGFSALEPLVDLPIGINITRFQTLLALHRSYLTPGDSSSGWTAGAAAYYVGYLQPRTFLLKYNENGTITDAVDCALDPLSETKCTLKSFTVEKGIYQTSNFRVQPTESIVRFPNITNLCPFGEVFNATRFASVYAWNRKRISNCVADYSVLYNSASFSTFKCYGVSPTKLNDLCFTNVYADSFVIRGDEVRQIAPGQTGKIADYNYKLPDDFTGCVIAWNSNNLDSKVGGNYNYLYRLFRKSNLKPFERDISTEIYQAGSTPCNGVEGFNCYFPLQSYGFQPTNGVGYQPYRVVVLSFELLHAPATVCGPKKSTNLVKNKCVNFNFNGLTGTGVLTESNKKFLPFQQFGRDIADTTDAVRDPQTLEILDITPCSFGGVSVITPGTNTSNQVAVLYQGVNCTEVPVAIHADQLTPTWRVYSTGSNVFQTRAGCLIGAEHVNNSYECDIPIGAGICASYQTQTNSPRRARSVASQSIIAYTMSLGAENSVAYSNNSIAIPTNFTISVTTEILPVSMTKTSVDCTMYICGDSTECSNLLLQYGSFCTQLNRALTGIAVEQDKNTQEVFAQVKQIYKTPPIKDFGGFNFSQILPDPSKPSKRSFIEDLLFNKVTLADAGFIKQYGDCLGDIAARDLICAQKFNGLTVLPPLLTDEMIAQYTSALLAGTITSGWTFGAGAALQIPFAMQMAYRFNGIGVTQNVLYENQKLIANQFNSAIGKIQDSLSSTATALGKLQDVVNQNAQALNTLVKQLSSNFGAISSVLNDILSRLDPPEAEVQIDRLITGRLQSLQTYVTQQLIRAAEIRASANLAATKMSECVLGQSKRVDFCGKGYQLMSFPQSAPHGVVFLNVTYVPAQEKNFTTAPAICNDGKAHFPREGVFVSNGTNWFVTQRNFYEPQIITTDNTFVSGNCDVVIGIVNNTVYDPLQPELDSGGGSGGGQIYEGKLTAEGLRFGIVASRFNHALVDRLVEGAIDAIVRHGGREEDITLVRVPGSWEIPVAAGELARKEDIDAVIAIGVLIRGATPHFDYIASEVSKGLADLSLELRKPITFGVITADTLEQAIERAGTKHGNKGWEAALSAIEMANLFKSLR

SEQ ID NO: 7938 - protein, 1307 aa, Artificial Sequence
  SARS-CoV-2/Belgium/BC-03016/2020__EPI_ISL_415157 spike protein (1-1147)(K986P_V987P_ H1048Q_H1064N_ H1083N_H1101N) LumSynth construct
MFVFLVLLPLVSSQCVNLTTRTQLPPAYTNSFTRGVYYPDKVFRSSVLHSTQDLFLPFFSNVTWFHAIHVSGTNGTKRFDNPVLPFNDGVYFASTEKSNIIRGWIFGTTLDSKTQSLLIVNNATNVVIKVCEFQFCNDPFLGVYYHKNNKSWMESEFRVYSSANNCTFEYVSQPFLMDLEGKQGNFKNLREFVFKNIDGYFKIYSKHTPINLVRDLPQGFSALEPLVDLPIGINITRFQTLLALHRSYLTPGDSSSGWTAGAAAYYVGYLQPRTFLLKYNENGTITDAVDCALDPLSETKCTLKSFTVEKGIYQTSNFRVQPTESIVRFPNITNLCPFGEVFNATRFASVYAWNRKRISNCVADYSVLYNSASFSTFKCYGVSPTKLNDLCFTNVYADSFVIRGDEVRQIAPGQTGKIADYNYKLPDDFTGCVIAWNSNNLDSKVGGNYNYLYRLFRKSNLKPFERDISTEIYQAGSTPCNGVEGFNCYFPLQSYGFQPTNGVGYQPYRVVVLSFELLHAPATVCGPKKSTNLVKNKCVNFNFNGLTGTGVLTESNKKFLPFQQFGRDIADTTDAVRDPQTLEILDITPCSFGGVSVITPGTNTSNQVAVLYQGVNCTEVPVAIHADQLTPTWRVYSTGSNVFQTRAGCLIGAEHVNNSYECDIPIGAGICASYQTQTNSPRRARSVASQSIIAYTMSLGAENSVAYSNNSIAIPTNFTISVTTEILPVSMTKTSVDCTMYICGDSTECSNLLLQYGSFCTQLNRALTGIAVEQDKNTQEVFAQVKQIYKTPPIKDFGGFNFSQILPDPSKPSKRSFIEDLLFNKVTLADAGFIKQYGDCLGDIAARDLICAQKFNGLTVLPPLLTDEMIAQYTSALLAGTITSGWTFGAGAALQIPFAMQMAYRFNGIGVTQNVLYENQKLIANQFNSAIGKIQDSLSSTAPALGKLQDVVNQNAQALNTLVKQLSSNFGAISSVLNDILSRLDPPEAEVQIDRLITGRLQSLQTYVTQQLIRAAEIRASANLAATKMSECVLGQSKRVDFCGKGYQLMSFPQSAPHGVVFLNVTYVPAQEKNFTTAPAICNDGKAHFPREGVFVSNGTNWFVTQRNFYEPQIITTDNTFVSGNCDVVIGIVNNTVYDPLQPELDSGGGSGGGQIYEGKLTAEGLRFGIVASRFNHALVDRLVEGAIDAIVRHGGREEDITLVRVPGSWEIPVAAGELARKEDIDAVIAIGVLIRGATPHFDYIASEVSKGLADLSLELRKPITFGVITADTLEQAIERAGTKHGNKGWEAALSAIEMANLFKSLR

SEQ ID NO: 7939 - protein, 1307 aa, Artificial Sequence
  SARS-CoV-2/Germany/BavPat3/2020__EPI_ISL_414521 spike protein (1-1147)(K986P_V987P_ H1048Q_H1064N_ H1083N_H1101N) LumSynth construct
MFVFLVLLPLVSSQCVNLTTRTQLPPAYTNSFTRGVYYPDKVFRSSVLHSTQDLFLPFFSNVTWFHAIHVSGTNGTKRFDNPVLPFNDGVYFASTEKSNIIRGWIFGTTLDSKTQSLLIVNNATNVVIKVCEFQFCNDPFLGVYYHKNNKSWMESEFRVYSSANNCTFEYVSQPFLMDLEGKQGNFKNLREFVFKNIDGYFKIYSKHTPINLVRDLPQGFSALEPLVDLPIGINITRFQTLLALHRSYLTPGDSSSGWTAGAAAYYVGYLQPRTFLLKYNENGTITDAVDCALDPLSETKCTLKSFTVEKGIYQTSNFRVQPTESIVRFPNITNLCPFGEVFNATRFASVYAWNRKRISNCVADYSVLYNSASFSTFKCYGVSPTKLNDLCFTNVYADSFVIRGDEVRQIAPGQTGKIADYNYKLPDDFTGCVIAWNSNNLDSKVGGNYNYLYRLFRKSNLKPFERDISTEIYQAGSTPCNGVEGFNCYFPLQSYGFQPTNGVGYQPYRVVVLSFELLHAPATVCGPKKSTNLVKNKCVNFNFNGLTGTGVLTESNKKFLPFQQFGRDIADTTDAVRDPQTLEILDITPCSFGGVSVITPGTNTSNQVAVLYQDVNCTEVPVAIHADQLTPTWRVYSTGSNVFQTRAGCLIGAEHVNNSYECDIPIGAGICASYQTQTNSPRRARSVASQSIIAYTMSLGAENSVAYSNNSIAIPTNFTISVTTEILPVSMTKTSVDCTMYICGDSTECSNLLLQYGSFCTQLNRALTGIAVEQDKNTQQVFAQVKQIYKTPPIKDFGGFNFSQILPDPSKPSKRSFIEDLLFNKVTLADAGFIKQYGDCLGDIAARDLICAQKFNGLTVLPPLLTDEMIAQYTSALLAGTITSGWTFGAGAALQIPFAMQMAYRFNGIGVTQNVLYENQKLIANQFNSAIGKIQDSLSSTASALGKLQDVVNQNAQALNTLVKQLSSNFGAISSVLNDILSRLDPPEAEVQIDRLITGRLQSLQTYVTQQLIRAAEIRASANLAATKMSECVLGQSKRVDFCGKGYQLMSFPQSAPHGVVFLNVTYVPAQEKNFTTAPAICNDGKAHFPREGVFVSNGTNWFVTQRNFYEPQIITTDNTFVSGNCDVVIGIVNNTVYDPLQPELDSGGGSGGGQIYEGKLTAEGLRFGIVASRFNHALVDRLVEGAIDAIVRHGGREEDITLVRVPGSWEIPVAAGELARKEDIDAVIAIGVLIRGATPHFDYIASEVSKGLADLSLELRKPITFGVITADTLEQAIERAGTKHGNKGWEAALSAIEMANLFKSLR

SEQ ID NO: 7940 - protein, 1307 aa, Artificial Sequence
  SARS-CoV-2/France/HF1805/2020__EPI_ISL_414628 spike protein (1-1147)(K986P_V987P_ H1048Q_H1064N_ H1083N_H1101N) LumSynth construct
MFVFLVLLPLVSSQCVNLTTRTQLPPAYTNSFTRGVYYPDKVFRSSVLHSTQDLFLPFFSNVTWFHAIHVSGTNGTKRFDNPVLPFNDGVYFASTEKSNIIRGWIFGTTLDSKTQSLLIVNNATNVVIKVCEFQFCNDPFLGVYYHKNNKSWMESEFRVYSSANNCTFEYVSQPFLMDLEGKQGNFKNLREFVFKNIDGYFKIYSKHTPINLVRDLPQGFSALEPLVDLPIGINITRFQTLLALHRSYLTPGDSSSGWTAGAAAYYVGYLQPRTFLLKYNENGTITDAVDCALDPLSETKCTLKSFTVEKGIYQTSNFRVQPTESIVRFPNITNLCPFGEVFNATRFASVYAWNRKRISNCVADYSVLYNSASFSTFKCYGVSPTKLNDLCFTNVYADSFVIRGDEVRQIAPGQTGKIADYNYKLPDDFTGCVIAWNSNNLDSKVGGNYNYLYRLFRKSNLKPFERDISTEIYQAGSTPCNGVEGFNCYFPLQSYGFQPTNGVGYQPYRVVVLSFELLHAPATVCGPKKSTNLVKNKCVNFNFNGLTGTGVLTESNKKFLPFQQFGRDIADTTDAVRDPQTLEILDITPCSFGGVSVITPGTNTSNQVAVLYQGVNCTEVPVAIHADQLTPTWRVYSTGSNVFQTRAGCLIGAEHVNNSYECDIPIGAGICASYQTQTNSPRRARSVASQSIIAYTMSLGAENSVAYSNNSIAIPTNFTISVTTEILPVSMTKTSVDCTMYICGDSTECSNLLLQYGSFCTQLNRALTGIAVEQDKNTQEVFAQVKQIYKTPPIKDFGGFNFSQILPDPSKPSKRSFIEDLLFNKVTLADAGFIKQYGDCLGDIAARDLICAQKFNGLTVLPPLLTDEMIAQYTSALLAGTITSGWTFGAGAALQIPFAMQMAYRFNGIGVTQNVLYENQKLIANQFNSAIGKIQDSLSSTASALGKLQDVVNQNAQALNTLVKQLSSNFGAISSVLNDILSRLDPPEAEVQIDRLITGRLQSLQTYVTQQLIRAAEIRASANLAATKMSECVLGQSKRVDFCGKGYQLMSFPQSAPHGVVFLNVTYVPAQEKNFTTAPAICNDGKAHFPREGVFVSNGTNWFVTQRNFYEPQIITTDNTFVSGNCDVVIGVVNNTVYDPLQPELDSGGGSGGGQIYEGKLTAEGLRFGIVASRFNHALVDRLVEGAIDAIVRHGGREEDITLVRVPGSWEIPVAAGELARKEDIDAVIAIGVLIRGATPHFDYIASEVSKGLADLSLELRKPITFGVITADTLEQAIERAGTKHGNKGWEAALSAIEMANLFKSLR

SEQ ID NO: 7941 - protein, 1307 aa, Artificial Sequence
  SARS-CoV-2/Netherlands/ZuidHolland_9/2020__EPI_ISL_414445 spike protein (1-1147)(K986P_V987P_ H1048Q_H1064N_ H1083N_H1101N) LumSynth construct
MFVFLVLLPLVSSQCVNLTTRTQLPPAYTNSFTRGVYYPDKVFRSSVLHSTQDLFLPFFSNVTWFHAIHVSGTNGTKRFDNPVLPFNDGVYFASTEKSNIIRGWIFGTTLDSKTQSLLIVNNATNVVIKVCEFQFCNDPFLGVYYHKNNKSWMESEFRVYSSANNCTFEYVSQPFLMDLEGKQGNFKNLREFVFKNIDGYFKIYSKHTPINLVRDLPQGFSALEPLVDLPIGINITRFQTLLALHRSYLTPGDSSSGWTAGAAAYYVGYLQPRTFLLKYNENGTITDAVDCALDPLSETKCTLKSFTVEKGIYQTSNFRVQPTESIVRFPNITNLCPFGEVFNATRFASVYAWNRKRISNCVADYSVLYNSASFSTFKCYGVSPTKLNDLCFTNVYADSFVIRGDEVRQIAPGQTGKIADYNYKLPDDFTGCVIAWNSNNLDSKVGGNYNYLYRLFRKSNLKPFERDISTEIYQAGSTPCNGVEGFNCYFPLQSYGFQPTNGVGYQPYRVVVLSFELLHAPATVCGPKKSTNLVKNKCVNFNFNGLTGTGVLTESNKKFLPFQQFGRDIADTTDAVRDPQTLEILDITPCSFGGVSVITPGTNTSNQVAVLYQGVNCTEVPVAIHADQLTPTWRVYSTGSNVFQTRAGCLIGAEHVNNSYECDIPIGAGICASYQTQTNSPRRARSVASQSIIAYTMSLGAENSVAYSNNSIAIPTNFTISVTTEILPVSMTKTSVDCTMYICGDSTECSNLLLQYGSFCTQLNRALTGIAVEQDKNTQEVFAQVKQIYKTPPIKDFGGFNFSQILPDPSKPSKRSFIEDLLFNKVTLADAGFIKQYGDCLGDIAARDLICVQKFNGLTVLPPLLTDEMIAQYTSALLAGTITSGWTFGAGAALQIPFAMQMAYRFNGIGVTQNVLYENQKLIANQFNSAIGKIQDSLSSTASALGKLQDVVNQNAQALNTLVKQLSSNFGAISSVLNDILSRLDPPEAEVQIDRLITGRLQSLQTYVTQQLIRAAEIRASANLAATKMSECVLGQSKRVDFCGKGYQLMSFPQSAPHGVVFLNVTYVPAQEKNFTTAPAICNDGKAHFPREGVFVSNGTNWFVTQRNFYEPQIITTDNTFVSGNCDVVIGIVNNTVYDPLQPELDSGGGSGGGQIYEGKLTAEGLRFGIVASRFNHALVDRLVEGAIDAIVRHGGREEDITLVRVPGSWEIPVAAGELARKEDIDAVIAIGVLIRGATPHFDYIASEVSKGLADLSLELRKPITFGVITADTLEQAIERAGTKHGNKGWEAALSAIEMANLFKSLR

SEQ ID NO: 7942 - protein, 1307 aa, Artificial Sequence
  SARS-CoV-2/Finland/FIN03032020A/2020__EPI_ISL_413602 spike protein (1-1147)(K986P_V987P_ H1048Q_H1064N_ H1083N_H1101N) LumSynth construct
MFVFLVLLPLVSSQCVNLTTRTQLPPAYTNSFTRGVYYPDKVFRSSVLHSTQDLFLPFFSNVTWFHAIHVSGTNGTKRFDNPVLPFNDGVYFASTEKSNIIRGWIFGTTLDSKTQSLLIVNNATNVVIKVCEFQFCNDPFLGVYYHKNNKSWMESEFRVYSSANNCTFEYVSQPFLMDLEGKQGNFKNLREFVFKNIDGYFKIYSKHTPINLVRDLPQGFSALEPLVDLPIGINITRFQTLLALHRSYLTPGDSSSGWTAGAAAYYVGYLQPRTFLLKYNENGTITDAVDCALDPLSETKCTLKSFTVEKGIYQTSNFRVQPTESIVRFPNITNLCPFGEVFNATRFASVYAWNRKRISNCVADYSVLYNSASFSTFKCYGVSPTKLNDLCFTNVYADSFVIRGDEVRQIAPGQTGKIADYNYKLPDDFTGCVISWNSNNLDSKVGGNYNYLYRLFRKSNLKPFERDISTEIYQAGSTPCNGVEGFNCYFPLQSYGFQPTNGVGYQPYRVVVLSFELLHAPATVCGPKKSTNLVKNKCVNFNFNGLTGTGVLTESNKKFLPFQQFGRDIADTTDAVRDPQTLEILDITPCSFGGVSVITPGTNTSNQVAVLYQGVNCTEVPVAIHADQLTPTWRVYSTGSNVFQTRAGCLIGAEHVNNSYECDIPIGAGICASYQTQTNSPRRARSVASQSIIAYTMSLGAENSVAYSNNSIAIPTNFTISVTTEILPVSMTKTSVDCTMYICGDSTECSNLLLQYGSFCTQLNRALTGIAVEQDKNTQEVFAQVKQIYKTPPIKDFGGFNFSQILPDPSKPSKRSFIEDLLFNKVTLADAGFIKQYGDCLGDIAARDLICAQKFNGLTVLPPLLTDEMIAQYTSALLAGTITSGWTFGAGAALQIPFAMQMAYRFNGIGVTQNVLYENQKLIANQFNSAIGKIQDSLSSTASALGKLQDVVNQNAQALNTLVKQLSSNFGAISSVLNDILSRLDPPEAEVQIDRLITGRLQSLQTYVTQQLIRAAEIRASANLAATKMSECVLGQSKRVDFCGKGYQLMSFPQSAPHGVVFLNVTYVPAQEKNFTTAPAICNDGKAHFPREGVFVSNGTNWFVTQRNFYEPQIITTDNTFVSGNCDVVIGIVNNTVYDPLQPELDSGGGSGGGQIYEGKLTAEGLRFGIVASRFNHALVDRLVEGAIDAIVRHGGREEDITLVRVPGSWEIPVAAGELARKEDIDAVIAIGVLIRGATPHFDYIASEVSKGLADLSLELRKPITFGVITADTLEQAIERAGTKHGNKGWEAALSAIEMANLFKSLR

SEQ ID NO: 7943 - protein, 1307 aa, Artificial Sequence
  SARS-CoV-2/France/GE1977/2020__EPI_ISL_414632 spike protein (1-1147)(K986P_V987P_ H1048Q_H1064N_ H1083N_H1101N) LumSynth construct
MFVFLVLLPLVSSQCVNLTTRTQLPPAYTNSFTRGVYYPDKVFRSSVLHSTQDLFLPFFSNVTWFHAIHVSGTNGTKRFDNPVLPFNDGVYFASTEKSNIIRGWIFGTTLDSKTQSLLIVNNATNVVIKVCEFQFCNDPFLGVYYHKNNKSWMESEFRVYSSANNCTFEYVSQPFLMDLEGKQGNFKNLREFVFKNIDGYFKIYSKHTPINLVRDLPQGFSALEPLVDLPIGINITRFQTLLALHRSYLTPGDSSSGWTAGAAAYYVGYLQPRTFLLKYNENGTITDAVDCALDPLSETKCTLKSFTVEKGIYQTSNFRVQPTESIVRFPNITNLCPFGEVFNATRFASVYAWNRKRISNCVADYSVLYNSASFSTFKCYGVSPTKLNDLCFTNVYADSFVIRGDEVRQIAPGQTGKIADYNYKLPDDFTGCVIAWNSNNLDSKVGGNYNYLYRLFRKSNLKPFERDISTEIYQAGSTPCNGVEGFNCYFPLQSYGFQPTNGVGYQPYRVVVLSFELLHAPATVCGPKKSTNLVKNKCVNFNFNGLTGTGVLTESNKKFLPFQQFGRDIADTTDAVRDPQTLEILDITPCSFGGVSVITPGTNTSNQVAVLYQGVNCTEVPVAIHADQLTPTWRVYSTGSNVFQTRAGCLIGAEHVNNSYECDIPIGAGICASYQTQTNSPRRARSVASQSIIAYTMSLGAENSVAYSNNSIAIPTNFTISVTTEILPVSMTKTSVDCTMYICGDSTECSNLLLQYGSFCTQLNRALTGIAVEQDKNTQEVFAQVKQIYKTPPIKDFGGFNFSQILPDPSKPSKRSFIEDLLFNKVTLADAGFIKQYGDCLGDIAARDLICAQKFNGLTVLPPLLTDEMIAQYTSALLAGTITSGWTFGAGAALQIPFAMQMAYRFNGIGVTQNVLYENQKLIANQFNSAIGKIQDSLFSTASALGKLQDVVNQNAQALNTLVKQLSSNFGAISSVLNDILSRLDPPEAEVQIDRLITGRLQSLQTYVTQQLIRAAEIRASANLAATKMSECVLGQSKRVDFCGKGYQLMSFPQSAPHGVVFLNVTYVPAQEKNFTTAPAICNDGKAHFPREGVFVSNGTNWFVTQRNFYEPQIITTDNTFVSGNCDVVIGIVNNTVYDPLQPELDSGGGSGGGQIYEGKLTAEGLRFGIVASRFNHALVDRLVEGAIDAIVRHGGREEDITLVRVPGSWEIPVAAGELARKEDIDAVIAIGVLIRGATPHFDYIASEVSKGLADLSLELRKPITFGVITADTLEQAIERAGTKHGNKGWEAALSAIEMANLFKSLR

SEQ ID NO: 7944 - protein, 1307 aa, Artificial Sequence
  SARS-CoV-2/Finland/FIN-313/2020__EPI_ISL_414641 spike protein (1-1147)(K986P_V987P_ H1048Q_H1064N_ H1083N_H1101N) LumSynth construct
MFVFLVLLPLVSSQCVNLTTRTQLPPAYTNSFTRGVYYPDKVFRSSVLHSTQDLFLPFFSNVTWFHAIHVSGTNGTKRFDNPVLPFNDGVYFASTEKSNIIRGWIFGTTLDSKTQSLLIVNNATNVVIKVCEFQFCNDPFLGVYYHKNNKSWMESEFRVYSSANNCTFEYVSQPFLMDLEGKQGNFKNLREFVFKNIDGYFKIYSKHTPINLVRDLPQGFSALEPLVDLPIGINITRFKTLLALHRSYLTPGDSSSGWTAGAAAYYVGYLQPRTFLLKYNENGTITDAVDCALDPLSETKCTLKSFTVEKGIYQTSNFRVQPTESIVRFPNITNLCPFGEVFNATRFASVYAWNRKRISNCVADYSVLYNSASFSTFKCYGVSPTKLNDLCFTNVYADSFVIRGDEVRQIAPGQTGKIADYNYKLPDDFTGCVIAWNSNNLDSKVGGNYNYLYRLFRKSNLKPFERDISTEIYQAGSTPCNGVEGFNCYFPLQSYGFQPTNGVGYQPYRVVVLSFELLHAPATVCGPKKSTNLVKNKCVNFNFNGLTGTGVLTESNKKFLPFQQFGRDIADTTDAVRDPQTLEILDITPCSFGGVSVITPGTNTSNQVAVLYQGVNCTEVPVAIHADQLTPTWRVYSTGSNVFQTRAGCLIGAEHVNNSYECDIPIGAGICASYQTQTNSPRRARSVASQSIIAYTMSLGAENSVAYSNNSIAIPTNFTISVTTEILPVSMTKTSVDCTMYICGDSTECSNLLLQYGSFCTQLNRALTGIAVEQDKNTQEVFAQVKQIYKTPPIKDFGGFNFSQILPDPSKPSKRSFIEDLLFNKVTLADAGFIKQYGDCLGDIAARDLICAQKFNGLTVLPPLLTDEMIAQYTSALLAGTITSGWTFGAGAALQIPFAMQMAYRFNGIGVTQNVLYENQKLIANQFNSAIGKIQDSLSSTASALGKLQDVVNQNAQALNTLVKQLSSNFGAISSVLNDILSRLDPPEAEVQIDRLITGRLQSLQTYVTQQLIRAAEIRASANLAATKMSECVLGQSKRVDFCGKGYQLMSFPQSAPHGVVFLNVTYVPAQEKNFTTAPAICNDGKAHFPREGVFVSNGTNWFVTQRNFYEPQIITTDNTFVSGNCDVVIGIVNNTVYDPLQPELDSGGGSGGGQIYEGKLTAEGLRFGIVASRFNHALVDRLVEGAIDAIVRHGGREEDITLVRVPGSWEIPVAAGELARKEDIDAVIAIGVLIRGATPHFDYIASEVSKGLADLSLELRKPITFGVITADTLEQAIERAGTKHGNKGWEAALSAIEMANLFKSLR

SEQ ID NO: 7945 - protein, 1307 aa, Artificial Sequence
  SARS-CoV-2/Netherlands/ZuidHolland_2/2020__EPI_ISL_414556 spike protein (1-1147)(K986P_V987P_ H1048Q_H1064N_ H1083N_H1101N) LumSynth construct
MFVFLVLLPLVSSQCVNLTTRTQLPPAYTNSFTRGVYYPDKVFRSSVLHSTQDLFLPFFSNVTWFHAIHVSGTNGTKRFDNPVLPFNDGVYFASTEKSNIIRGWIFGTTLDSKTQSLLIVNNATNVVIKVCEFQFCNDPFLGVYYHKNNKSWMESEFRVYSSANNCTFEYVSQPFLMDLEGKQGNFKNLREFVFKNIDGYFKIYSKHTPINLVRDLPQGFSALEPLVDLPIGINITRFQTLLALHRSYLTPGDSSSGWTAGAAAYYVGYLQPRTFLLKYNENGTITDAVDCALDPLSETKCTLKSFTVEKGIYQTSNFRVQPTESIVRFPNITNLCPFGEVFNATRFASVYAWNRKRISNCVADYSVLYNSASFSTFKCYGVSPTKLNDLCFTNVYADSFVIRGDEVRQIAPGQTGKIADYNYKLPDDFTGCVIAWNSNNLDSKVGGNYNYLYRLFRKSNLKPFERDISTEIYQAGSTPCNGVEGFNCYFPLQSYGFQPTNGVGYQPYRVVVLSFELLHAPATVCGPKKSTNLVKNKCVNFNFNGLTGTGVLTESNKKFLPFQQFGRDIADTTDAVRDPQTLEILDITPCSFGGVSVITPGTNTSNQVAVLYQGVNCTEVPVAIHADQLTPTWRVYSTGSNVFQTRAGCLIGAEHVNNSYECDIPIGAGICASYQTQTNSPRRARSVASQSIIAYTMSLGAENSVAYSNNSIAIPTNFTISVTTEILPVSMTKTSVDCTMYICGDSTECSNLLLQYGSFCTQLNRALTGIALEQDKNTQEVFAQVKQIYKTPPIKDFGGFNFSQILPDPSKPSKRSFIEDLLFNKVTLADAGFIKQYGDCLGDIAARDLICAQKFNGLTVLPPLLTDEMIAQYTSALLAGTITSGWTFGAGAALQIPFAMQMAYRFNGIGVTQNVLYENQKLIANQFNSAIGKIQDSLSSTASALGKLQDVVNQNAQALNTLVKQLSSNFGAISSVLNDILSRLDPPEAEVQIDRLITGRLQSLQTYVTQQLIRAAEIRASANLAATKMSECVLGQSKRVDFCGKGYQLMSFPQSAPHGVVFLNVTYVPAQEKNFTTAPAICNDGKAHFPREGVFVSNGTNWFVTQRNFYEPQIITTDNTFVSGNCDVVIGIVNNTVYDPLQPELDSGGGSGGGQIYEGKLTAEGLRFGIVASRFNHALVDRLVEGAIDAIVRHGGREEDITLVRVPGSWEIPVAAGELARKEDIDAVIAIGVLIRGATPHFDYIASEVSKGLADLSLELRKPITFGVITADTLEQAIERAGTKHGNKGWEAALSAIEMANLFKSLR

SEQ ID NO: 7946 - protein, 1307 aa, Artificial Sequence
  SARS-CoV-2/USA/WA-UW31/2020__EPI_ISL_414618 spike protein (1-1147)(K986P_V987P_ H1048Q_H1064N_ H1083N_H1101N) LumSynth construct
MFVFLVLLPLVSSQCVNLTTRTQLPPAYTNSFTRGVYYPDKVFRSSVLHSTQDLFLPFFSNVTWFHAIHVSGTNGTKRFDNPVLPFNDGVYFASTEKSNIIRGWIFGTTLDSKTQSLLIVNNATNVVIKVCEFQFCNDPFLGVYYHKNNKSWMESEFRVYSSANNCTFEYVSQPFLMDLEGKQGNFKNLREFVFKNIDGYFKIYSKHTPINLVRDLPQGFSALEPLVDLPIGINITRFQTLLALHRSYLTPGDSSSGWTAGAAAYYVGYLQPRTFLLKYNENGTITDAVDCALDPLSETKCTLKSFTVEKGIYQTSNFRVQPTESIVRFPNITNLCPFGEVFNATRFASVYAWNRKRISNCVADYSVLYNSASFSTFKCYGVSPTKLNDLCFTNVYADSFVIRGDEVRQIAPGQTGKIADYNYKLPDDFTGCVIAWNSNNLDSKVGGNYNYLYRLFRKSNLKPFERDISTEIYQAGSTPCNGAEGFNCYFPLQSYGFQPTNGVGYQPYRVVVLSFELLHAPATVCGPKKSTNLVKNKCVNFNFNGLTGTGVLTESNKKFLPFQQFGRDIADTTDAVRDPQTLEILDITPCSFGGVSVITPGTNTSNQVAVLYQDVNCTEVPVAIHADQLTPTWRVYSTGSNVFQTRAGCLIGAEHVNNSYECDIPIGAGICASYQTQTNSPRRARSVASQSIIAYTMSLGAENSVAYSNNSIAIPTNFTISVTTEILPVSMTKTSVDCTMYICGDSTECSNLLLQYGSFCTQLNRALTGIAVEQDKNTQEVFAQVKQIYKTPPIKDFGGFNFSQILPDPSKPSKRSFIEDLLFNKVTLADAGFIKQYGDCLGDIAARDLICAQKFNGLTVLPPLLTDEMIAQYTSALLAGTITSGWTFGAGAALQIPFAMQMAYRFNGIGVTQNVLYENQKLIANQFNSAIGKIQDSLSSTASALGKLQDVVNQNAQALNTLVKQLSSNFGAISSVLNDILSRLDPPEAEVQIDRLITGRLQSLQTYVTQQLIRAAEIRASANLAATKMSECVLGQSKRVDFCGKGYQLMSFPQSAPHGVVFLNVTYVPAQEKNFTTAPAICNDGKAHFPREGVFVSNGTNWFVTQRNFYEPQIITTDNTFVSGNCDVVIGIVNNTVYDPLQPELDSGGGSGGGQIYEGKLTAEGLRFGIVASRFNHALVDRLVEGAIDAIVRHGGREEDITLVRVPGSWEIPVAAGELARKEDIDAVIAIGVLIRGATPHFDYIASEVSKGLADLSLELRKPITFGVITADTLEQAIERAGTKHGNKGWEAALSAIEMANLFKSLR

SEQ ID NO: 7947 - protein, 1307 aa, Artificial Sequence
  SARS-CoV-2/South Korea/SNU01/2020__EPI_ISL_411929 spike protein (1-1147)(K986P_V987P_ H1048Q_H1064N_ H1083N_H1101N) LumSynth construct
MFVFLVLLPLVSSQCVNLTTRTQLPPAYTNSFTRGVYYPDKVFRSSVLHSTQDLFLPFFSNVTWFHAIHVSGTNGTKRFDNPVLPFNDGVYFASTEKSNIIRGWIFGTTLDSKTQSLLIVNNATNVVIKVCEFQFCNDPFLGVYYHKNNKSWMESEFRVYSSANNCTFEYVSQPFLMDLEGKQGNFKNLREFVFKNIDGYFKIYSKHTPINLVRDLPQGFWALEPLVDLPIGINITRFQTLLALHRSYLTPGDSSSGWTAGAAAYYVGYLQPRTFLLKYNENGTITDAVDCALDPLSETKCTLKSFTVEKGIYQTSNFRVQPTESIVRFPNITNLCPFGEVFNATRFASVYAWNRKRISNCVADYSVLYNSASFSTFKCYGVSPTKLNDLCFTNVYADSFVIRGDEVRQIAPGQTGKIADYNYKLPDDFTGCVIAWNSNNLDSKVGGNYNYLYRLFRKSNLKPFERDISTEIYQAGSTPCNGVEGFNCYFPLQSYGFQPTNGVGYQPYRVVVLSFELLHAPATVCGPKKSTNLVKNKCVNFNFNGLTGTGVLTESNKKFLPFQQFGRDIADTTDAVRDPQTLEILDITPCSFGGVSVITPGTNTSNQVAVLYQDVNCTEVPVAIHADQLTPTWRVYSTGSNVFQTRAGCLIGAEHVNNSYECDIPIGAGICASYQTQTNSPRRARSVASQSIIAYTMSLGAENSVAYSNNSIAIPTNFTISVTTEILPVSMTKTSVDCTMYICGDSTECSNLLLQYGSFCTQLNRALTGIAVEQDKNTQEVFAQVKQIYKTPPIKDFGGFNFSQILPDPSKPSKRSFIEDLLFNKVTLADAGFIKQYGDCLGDIAARDLICAQKFNGLTVLPPLLTDEMIAQYTSALLAGTITSGWTFGAGAALQIPFAMQMAYRFNGIGVTQNVLYENQKLIANQFNSAIGKIQDSLSSTASALGKLQDVVNQNAQALNTLVKQLSSNFGAISSVLNDILSRLDPPEAEVQIDRLITGRLQSLQTYVTQQLIRAAEIRASANLAATKMSECVLGQSKRVDFCGKGYQLMSFPQSAPHGVVFLNVTYVPAQEKNFTTAPAICNDGKAHFPREGVFVSNGTNWFVTQRNFYEPQIITTDNTFVSGNCDVVIGIVNNTVYDPLQPELDSGGGSGGGQIYEGKLTAEGLRFGIVASRFNHALVDRLVEGAIDAIVRHGGREEDITLVRVPGSWEIPVAAGELARKEDIDAVIAIGVLIRGATPHFDYIASEVSKGLADLSLELRKPITFGVITADTLEQAIERAGTKHGNKGWEAALSAIEMANLFKSLR

SEQ ID NO: 7948 - protein, 1307 aa, Artificial Sequence
  SARS-CoV-2/China/WF0004/2020__EPI_ISL_413694 spike protein (1-1147)(K986P_V987P_ H1048Q_H1064N_ H1083N_H1101N) LumSynth construct
MFVFLVLLPLVSSQCVNLTTRTQLPPAYTNSFTRGVYYPDKVFRSSVLHSTQDLFLPFFSNVTWFHAIHVSGTNGTKRFDNPVLPFNDGVYFASTEKSNIIRGWIFGTTLDSKTQSLLIVNNATNVVIKVCEFQFCNDPFLGVYYHKNNKSWTESEFRVYSSANNCTFEYVSQPFLMDLEGKQGNFKNLREFVFKNIDGYFKIYSKHTPINLVRDLPQGFSALEPLVDLPIGINITRFQTLLALHRSYLTPGDSSSGWTAGAAAYYVGYLQPRTFLLKYNENGTITDAVDCALDPLSETKCTLKSFTVEKGIYQTSNFRVQPTESIVRFPNITNLCPFGEVFNATRFASVYAWNRKRISNCVADYSVLYNSASFSTFKCYGVSPTKLNDLCFTNVYADSFVIRGDEVRQIAPGQTGKIADYNYKLPDDFTGCVIAWNSNNLDSKVGGNYNYLYRLFRKSNLKPFERDISTEIYQAGSTPCNGVEGFNCYFPLQSYGFQPTNGVGYQPYRVVVLSFELLHAPATVCGPKKSTNLVKNKCVNFNFNGLTGTGVLTESNKKFLPFQQFGRDIADTTDAVRDPQTLEILDITPCSFGGVSVITPGTNTSNQVAVLYQDVNCTEVPVAIHADQLTPTWRVYSTGSNVFQTRAGCLIGAEHVNNSYECDIPIGAGICASYQTQTNSPRRARSVASQSIIAYTMSLGAENSVAYSNNSIAIPTNFTISVTTEILPVSMTKTSVDCTMYICGDSTECSNLLLQYGSFCTQLNRALTGIAVEQDKNTQEVFAQVKQIYKTPPIKDFGGFNFSQILPDPSKPSKRSFIEDLLFNKVTLADAGFIKQYGDCLGDIAARDLICAQKFNGLTVLPPLLTDEMIAQYTSALLAGTITSGWTFGAGAALQIPFAMQMAYRFNGIGVTQNVLYENQKLIANQFNSAIGKIQDSLSSTASALGKLQDVVNQNAQALNTLVKQLSSNFGAISSVLNDILSRLDPPEAEVQIDRLITGRLQSLQTYVTQQLIRAAEIRASANLAATKMSECVLGQSKRFDFCGKGYQLMSFPQSAPHGVVFLNVTYVPAQEKNFTTAPAICNDGKAHFPREGVFVSNGTNWFVTQRNFYEPQIITTDNTFVSGNCDVVIGIVNNTVYDPLQPELDSGGGSGGGQIYEGKLTAEGLRFGIVASRFNHALVDRLVEGAIDAIVRHGGREEDITLVRVPGSWEIPVAAGELARKEDIDAVIAIGVLIRGATPHFDYIASEVSKGLADLSLELRKPITFGVITADTLEQAIERAGTKHGNKGWEAALSAIEMANLFKSLR

SEQ ID NO: 7949 - protein, 1307 aa, Artificial Sequence
  SARS-CoV-2/China/WF0028/2020__EPI_ISL_413791 spike protein (1-1147)(K986P_V987P_ H1048Q_H1064N_ H1083N_H1101N) LumSynth construct
MFVFLVLLPLVSSQCVNLTTRTQLPPAYTNSFTRGVYYPDKVFRSSVLHSTQDLFLPFFSNVTWFHAIHVSGTNGTKRFDNPVLPFNDGVYFASTEKSNIIRGWIFGTTLDSKTQSLLIVNNATNVVIKVCEFQFCNDPFLGVYYHKNNKSWMESEFRVYSSANNCTFEYVSQPFLMDLEGKQGNFKNLREFVFKNIDGYFKIYSKHTPINLVRDLPQGFSALEPLVDLPIGINITRFQTLLALHRSYLTPGDSSSGWTAGAAAYYVGYLQPRTFLLKYNENGTITDAVDCALDPLSETKCTLKSFTVEKGIYQTSNFRVQPTESIVRFPNITNLCPFGEVFNATRFASVYAWNRKRISNCVADYSVLYNSASFSTFKCYGVSPTKLNDLCFTNVYADSFVIRGDEVRQIAPGQTGKIADYNYKLPDDFTGCVIAWNSNNLDSKVGGNYNYLYRLFRKSNLKPFERDISTEIYQAGSTPCNGVEGFNCYFPLQSYGFQPTNGVGYQPYRVVVLSFELLHAPATVCGPKKSTNLVKNKCVNFNFNGLTGTGVLTESNKKFLPFQQFGRDIADTTDAVRDPQTLEILDITPCSFGGVSVITPGTNTSNQVAVLYQDVNCTEVPVAIHADQLTPTWRVYSTGSNVFQTRAGCLIGAEHVNNSYECDIPIGAGICASYQTQTNSPRRARSVASQSIIAYTMSLGAENSVAYSNNSIAIPTNFTISVTTEILPVSMTKTSVDCTMYICGDSTECSNLLLQYGSFCTQLNRALTGIAVEQDKNTQEVFAQVKQIYKTPPIKDFGGFNFSQILPDPSKPSKRSFIEDLLFNKVTLADAGFIKQYGDCLGDIAARDLICAQKFNGLTVLPPLLTDEMIAQYTSALLAGTITSGWTFGAGAALQIPFAMQMAYRFNGIGVTQNVLYENQKLIANQFNSAIGKIQDSLSSTASALGKLQDVVNQNAQALNTLVKQLSSNFGAISSVLNDILSRLDPPEAEVQIDRLITGRLQSLQTYVTQQLIRAAEIRASANLAATKMSECVLGQSKRVDFCGKGYQLMSFPQSAPHGVVFLNVTYVPAQEKNFTTAPAICNDGKAHFPREGVFVSNGTNWFVTQRNFYEPQIITTDNTFVSGNCDVVIGIVNNTVYDPLQPELESGGGSGGGQIYEGKLTAEGLRFGIVASRFNHALVDRLVEGAIDAIVRHGGREEDITLVRVPGSWEIPVAAGELARKEDIDAVIAIGVLIRGATPHFDYIASEVSKGLADLSLELRKPITFGVITADTLEQAIERAGTKHGNKGWEAALSAIEMANLFKSLR

SEQ ID NO: 7950 - protein, 1307 aa, Artificial Sequence
  SARS-CoV-2/2019-nCoV/USA-CruiseA-18/2020__MT159716.1 spike protein (1-1147)(K986P_V987P_ H1048Q_H1064N_ H1083N_H1101N) LumSynth construct
MFVFLVLLPLVSSQCVNLTTRTQLPPAYTNSFTRGVYYPDKVFRSSVLHSTQDLFLPFFSNVTWFHAIHVSGTNGTKRFDNPVLPFNDGVYFASTEKSNIIRGWIFGTTLDSKTQSLLIVNNATNVVIKVCEFQFCNDPFLGVYYHKNNKSWMESELRVYSSANNCTFEYVSQPFLMDLEGKQGNFKNLREFVFKNIDGYFKIYSKHTPINLVRDLPQGFSALEPLVDLPIGINITRFQTLLALHRSYLTPGDSSSGWTAGAAAYYVGYLQPRTFLLKYNENGTITDAVDCALDPLSETKCTLKSFTVEKGIYQTSNFRVQPTESIVRFPNITNLCPFGEVFNATRFASVYAWNRKRISNCVADYSVLYNSASFSTFKCYGVSPTKLNDLCFTNVYADSFVIRGDEVRQIAPGQTGKIADYNYKLPDDFTGCVIAWNSNNLDSKVGGNYNYLYRLFRKSNLKPFERDISTEIYQAGSTPCNGVEGFNCYFPLQSYGFQPTNGVGYQPYRVVVLSFELLHAPATVCGPKKSTNLVKNKCVNFNFNGLTGTGVLTESNKKFLPFQQFGRDIADTTDAVRDPQTLEILDITPCSFGGVSVITPGTNTSNQVAVLYQDVNCTEVPVAIHADQLTPTWRVYSTGSNVFQTRAGCLIGAEHVNNSYECDIPIGAGICASYQTQTNSPRRARSVASQSIIAYTMSLGAENSVAYSNNSIAIPTNFTISVTTEILPVSMTKTSVDCTMYICGDSTECSNLLLQYGSFCTQLNRALTGIAVEQDKNTQEVFAQVKQIYKTPPIKDFGGFNFSQILPDPSKPSKRSFIEDLLFNKVTLADAGFIKQYGDCLGDIAARDLICAQKFNGLTVLPPLLTDEMIAQYTSALLAGTITSGWTFGAGAALQIPFAMQMAYRFNGIGVTQNVLYENQKLIANQFNSAIGKIQDSLSSTASALGKLQDVVNQNAQALNTLVKQLSSNFGAISSVLNDILSRLDPPEAEVQIDRLITGRLQSLQTYVTQQLIRAAEIRASANLAATKMSECVLGQSKRVDFCGKGYQLMSFPQSAPHGVVFLNVTYVPAQEKNFTTAPAICNDGKAHFPREGVFVSNGTNWFVTQRNFYEPQIITTDNTFVSGNCDVVIGIVNNTVYDPLQPELDSGGGSGGGQIYEGKLTAEGLRFGIVASRFNHALVDRLVEGAIDAIVRHGGREEDITLVRVPGSWEIPVAAGELARKEDIDAVIAIGVLIRGATPHFDYIASEVSKGLADLSLELRKPITFGVITADTLEQAIERAGTKHGNKGWEAALSAIEMANLFKSLR

SEQ ID NO: 7951 - protein, 1307 aa, Artificial Sequence
  SARS-CoV-2/SARS-CoV-2/Yunnan-01/human/2020/CHN__MT049951.1 spike protein (1-1147)(K986P_V987P_ H1048Q_H1064N_ H1083N_H1101N) LumSynth construct
MFVFLVLLPLVSSQCVNLTTRTQLPPANTNSFTRGVYYPDKVFRSSVLHSTQDLFLPFFSNVTWFHAIHVSGTNGTKRFDNPVLPFNDGVYFASTEKSNIIRGWIFGTTLDSKTQSLLIVNNATNVVIKVCEFQFCNDPFLGVYYHKNNKSWMESEFRVYSSANNCTFEYVSQPFLMDLEGKQGNFKNLREFVFKNIDGYFKIYSKHTPINLVRDLPQGFSALEPLVDLPIGINITRFQTLLALHRSYLTPGDSSSGWTAGAAAYYVGYLQPRTFLLKYNENGTITDAVDCALDPLSETKCTLKSFTVEKGIYQTSNFRVQPTESIVRFPNITNLCPFGEVFNATRFASVYAWNRKRISNCVADYSVLYNSASFSTFKCYGVSPTKLNDLCFTNVYADSFVIRGDEVRQIAPGQTGKIADYNYKLPDDFTGCVIAWNSNNLDSKVGGNYNYLYRLFRKSNLKPFERDISTEIYQAGSTPCNGVEGFNCYFPLQSYGFQPTNGVGYQPYRVVVLSFELLHAPATVCGPKKSTNLVKNKCVNFNFNGLTGTGVLTESNKKFLPFQQFGRDIADTTDAVRDPQTLEILDITPCSFGGVSVITPGTNTSNQVAVLYQDVNCTEVPVAIHADQLTPTWRVYSTGSNVFQTRAGCLIGAEHVNNSYECDIPIGAGICASYQTQTNSPRRARSVASQSIIAYTMSLGAENSVAYSNNSIAIPTNFTISVTTEILPVSMTKTSVDCTMYICGDSTECSNLLLQYGSFCTQLNRALTGIAVEQDKNTQEVFAQVKQIYKTPPIKDFGGFNFSQILPDPSKPSKRSFIEDLLFNKVTLADAGFIKQYGDCLGDIAARDLICAQKFNGLTVLPPLLTDEMIAQYTSALLAGTITSGWTFGAGAALQIPFAMQMAYRFNGIGVTQNVLYENQKLIANQFNSAIGKIQDSLSSTASALGKLQDVVNQNAQALNTLVKQLSSNFGAISSVLNDILSRLDPPEAEVQIDRLITGRLQSLQTYVTQQLIRAAEIRASANLAATKMSECVLGQSKRVDFCGKGYQLMSFPQSAPHGVVFLNVTYVPAQEKNFTTAPAICNDGKAHFPREGVFVSNGTNWFVTQRNFYEPQIITTDNTFVSGNCDVVIGIVNNTVYDPLQPELDSGGGSGGGQIYEGKLTAEGLRFGIVASRFNHALVDRLVEGAIDAIVRHGGREEDITLVRVPGSWEIPVAAGELARKEDIDAVIAIGVLIRGATPHFDYIASEVSKGLADLSLELRKPITFGVITADTLEQAIERAGTKHGNKGWEAALSAIEMANLFKSLR

SEQ ID NO: 7952 - protein, 1307 aa, Artificial Sequence
  SARS-CoV-2/USA/WA-UW292/2020__EPI_ISL_418077 spike protein (1-1147)(K986P_V987P_ H1048Q_H1064N_ H1083N_H1101N) LumSynth construct
MFVFLVLLPLVSSQCVNLTTRTQLPPAYTNSFTRGVYYPDKVFRSSVLHSTQDLFLPFFSNVTWFHAIHVSGTNGTKRFDNPVLPFNDGVYFASTEKSNIIRGWIFGTTLDSKTQSLLIVNNATNVVIKVCEFQFCNDPFLGVYYHKNNKSWMESEFRVYSSANNCTFEYVSQPFLMDLEGKQGNFKNLREFVFKNIDGYFKIYSKHTPINLVRDLPQGFSALEPLVDLPIGINITRFQTLLALHRSYLTPGDSSSGWTAGAAAYYVGYLQPRTFLLKYNENGTITDAVDCALDPLSETKCTLKSFTVEKGIYQTSNFRVQPTESIVRFPNITNLCPFGEVFNATRFASVYAWNRKRISNCVADYSVLYNSASFSTFKCYGVSPTKLNDLCFTNVYADSFVIRGDEVRQIAPGQTGKIADYNYKLPDDFTGCVIAWNSNNLDSKVGGNYNYLYRLFRKSNLKPFERDISTEIYQASSTPCNGVEGFNCYFPLQSYGFQPTNGVGYQPYRVVVLSFELLHAPATVCGPKKSTNLVKNKCVNFNFNGLTGTGVLTESNKKFLPFQQFGRDIADTTDAVRDPQTLEILDITPCSFGGVSVITPGTNTSNQVAVLYQDVNCTEVPVAIHADQLTPTWRVYSTGSNVFQTRAGCLIGAEHVNNSYECDIPIGAGICASYQTQTNSPRRARSVASQSIIAYTMSLGAENSVAYSNNSIAIPTNFTISVTTEILPVSMTKTSVDCTMYICGDSTECSNLLLQYGSFCTQLNRALTGIAVEQDKNTQEVFAQVKQIYKTPPIKDFGGFNFSQILPDPSKPSKRSFIEDLLFNKVTLADAGFIKQYGDCLGDIAARDLICAQKFNGLTVLPPLLTDEMIAQYTSALLAGTITSGWTFGAGAALQIPFAMQMAYRFNGIGVTQNVLYENQKLIANQFNSAIGKIQDSLSSTASALGKLQDVVNQNAQALNTLVKQLSSNFGAISSVLNDILSRLDPPEAEVQIDRLITGRLQSLQTYVTQQLIRAAEIRASANLAATKMSECVLGQSKRVDFCGKGYQLMSFPQSAPHGVVFLNVTYVPAQEKNFTTAPAICNDGKAHFPREGVFVSNGTNWFVTQRNFYEPQIITTDNTFVSGNCDVVIGIVNNTVYDPLQPELDSGGGSGGGQIYEGKLTAEGLRFGIVASRFNHALVDRLVEGAIDAIVRHGGREEDITLVRVPGSWEIPVAAGELARKEDIDAVIAIGVLIRGATPHFDYIASEVSKGLADLSLELRKPITFGVITADTLEQAIERAGTKHGNKGWEAALSAIEMANLFKSLR

SEQ ID NO: 7953 - protein, 1307 aa, Artificial Sequence
  SARS-CoV-2/Iceland/192/2020__EPI_ISL_417819 spike protein (1-1147)(K986P_V987P_ H1048Q_H1064N_ H1083N_H1101N) LumSynth construct
MFVFFVLLPLVSSQCVNLTTRTQLPPAYTNSFTRGVYYPDKVFRSSVLHSTQDLFLPFFSNVTWFHAIHVSGTNGTKRFDNPVLPFNDGVYFASTEKSNIIRGWIFGTTLDSKTQSLLIVNNATNVVIKVCEFQFCNDPFLGVYYHKNNKSWMESEFRVYSSANNCTFEYVSQPFLMDLEGKQGNFKNLREFVFKNIDGYFKIYSKHTPINLVRDLPQGFSALEPLVDLPIGINITRFQTLLALHRSYLTPGDSSSGWTAGAAAYYVGYLQPRTFLLKYNENGTITDAVDCALDPLSETKCTLKSFTVEKGIYQTSNFRVQPTESIVRFPNITNLCPFGEVFNATRFASVYAWNRKRISNCVADYSVLYNSASFSTFKCYGVSPTKLNDLCFTNVYADSFVIRGDEVRQIAPGQTGKIADYNYKLPDDFTGCVIAWNSNNLDSKVGGNYNYLYRLFRKSNLKPFERDISTEIYQAGSTPCNGVEGFNCYFPLQSYGFQPTNGVGYQPYRVVVLSFELLHAPATVCGPKKSTNLVKNKCVNFNFNGLTGTGVLTESNKKFLPFQQFGRDIADTTDAVRDPQTLEILDITPCSFGGVSVITPGTNTSNQVAVLYQGVNCTEVPVAIHADQLTPTWRVYSTGSNVFQTRAGCLIGAEHVNNSYECDIPIGAGICASYQTQTNSPRRARSVASQSIIAYTMSLGAENSVAYSNNSIAIPTNFTISVTTEILPVSMTKTSVDCTMYICGDSTECSNLLLQYGSFCTQLNRALTGIAVEQDKNTQEVFAQVKQIYKTPPIKDFGGFNFSQILPDPSKPSKRSFIEDLLFNKVTLADAGFIKQYGDCLGDIAARDLICAQKFNGLTVLPPLLTDEMIAQYTSALLAGTITSGWTFGAGAALQIPFAMQMAYRFNGIGVTQNVLYENQKLIANQFNSAIGKIQDSLSSTASALGKLQDVVNQNAQALNTLVKQLSSNFGAISSVLNDILSRLDPPEAEVQIDRLITGRLQSLQTYVTQQLIRAAEIRASANLAATKMSECVLGQSKRVDFCGKGYQLMSFPQSAPHGVVFLNVTYVPAQEKNFTTAPAICNDGKAHFPREGVFVSNGTNWFVTQRNFYEPQIITTDNTFVSGNCDVVIGIVNNTVYDPLQPELDSGGGSGGGQIYEGKLTAEGLRFGIVASRFNHALVDRLVEGAIDAIVRHGGREEDITLVRVPGSWEIPVAAGELARKEDIDAVIAIGVLIRGATPHFDYIASEVSKGLADLSLELRKPITFGVITADTLEQAIERAGTKHGNKGWEAALSAIEMANLFKSLR

SEQ ID NO: 7954 - protein, 1307 aa, Artificial Sequence
  SARS-CoV-2/Belgium/ULG-6939/2020__EPI_ISL_417020 spike protein (1-1147)(K986P_V987P_ H1048Q_H1064N_ H1083N_H1101N) LumSynth construct
MFVFLVLLPLVSSQCVNLTTRTQLPPAYTNSFTRGVYYPDKVFRSSVLHSTQDLFLPFFSNVTWFHAIHVSGTNGTKRFDNPVLPFNDGVYFASTEKSNIIRGWIFGTTLDSKTQSLLIVNNATNVVIKVCEFQFCNDPFLGVYYHKNNKSWMESEFRVYSSANNCTFEYVSQPFLMDLEGKQGNFKNLREFVFKNIDGYFKIYSKHTPINLVRDLPQGFSALEPLVDLPIGINITRFQTLLALHRSYLTPGDSSSGWTAGAAAYYVGYLQPRTFLLKYNENGTITDAVDCALDPLSETKCTLKSFTVEKGIYQTSNFRVQPTESIVRFPNITNLCPFGEVFNATRFASVYAWNRKRISNCVADYSVLYNSASFSTFKCYGVSPTKLNDLCFTNVYADSFVIRGDEVRQIAPGQTGKIADYNYKLPDDFTGCVIAWNSNNLDSKVGGNYNYLYRLFRKSNLKPFERDISTEIYQAGSTPCNGVEGFNCYFPLQSYGFQPTNGVGYQPYRVVVLSFELLHAPATVCGPKKSTNLVKNKCVNFNFNGLTGTGVLTESNKKFLPFQQFGRDIADTTDAVRDPQTLEILDITPCSFGGVSVITPGTNTSNQVAVLYQGVNCTEVPVAIHADQLTPTWRVYSTGSNVFQTRAGCLIGAEHVNNSYECDIPIGAGICASYQTQTNSPRRARSVASQSIIAYTMSLGAENSVVYSNNSIAIPTNFTISVTTEILPVSMTKTSVDCTMYICGDSTECSNLLLQYGSFCTQLNRALTGIAVEQDKNTQEVFAQVKQIYKTPPIKDFGGFNFSQILPDPSKPSKRSFIEDLLFNKVTLADAGFIKQYGDCLGDIAARDLICAQKFNGLTVLPPLLTDEMIAQYTSALLAGTITSGWTFGAGAALQIPFAMQMAYRFNGIGVTQNVLYENQKLIANQFNSAIGKIQDSLSSTASALGKLQDVVNQNAQALNTLVKQLSSNFGAISSVLNDILSRLDPPEAEVQIDRLITGRLQSLQTYVTQQLIRAAEIRASANLAATKMSECVLGQSKRVDFCGKGYQLMSFPQSAPHGVVFLNVTYVPAQEKNFTTAPAICNDGKAHFPREGVFVSNGTNWFVTQRNFYEPQIITTDNTFVSGNCDVVIGIVNNTVYDPLQPELDSGGGSGGGQIYEGKLTAEGLRFGIVASRFNHALVDRLVEGAIDAIVRHGGREEDITLVRVPGSWEIPVAAGELARKEDIDAVIAIGVLIRGATPHFDYIASEVSKGLADLSLELRKPITFGVITADTLEQAIERAGTKHGNKGWEAALSAIEMANLFKSLR

SEQ ID NO: 7955 - protein, 1307 aa, Artificial Sequence
  SARS-CoV-2/France/HF2496/2020__EPI_ISL_418231 spike protein (1-1147)(K986P_V987P_ H1048Q_H1064N_ H1083N_H1101N) LumSynth construct
MFVFLVLLPLVSSQCVNLTTRTQLPPAYTNSFTRGVYYPDKVFRSSVLHSTQDLFLPFFSNVTWFHAIHVSGTNGTKRFDNPVLPFNDGVYFASTEKSNIIRGWIFGTTLDSKTQSLLIVNNATNVVIKVCEFQFCNDPFLGVYYHKNNKSWMESEFRVYSSANNCTFEYVSQPFLMDLEGKQGNFKNLREFVFKNIDGYFKIYSKHTPINLVRDLPQGFSALEPLVDLPIGINITRFQTLLALHRSYLTPGDSSSGWTAGAAAYYVGYLQPRTFLLKYNENGTITDAVDCALDPLSETKCTLKSFTVEKGIYQTSNFRVQPTESIVRFPNITNLCPFGEVFNATRFASVYAWNRKRISNCVADYSVLYNSASFSTFKCYGVSPTKLNDLCFTNVYADSFVIRGDEVRQIAPGQTGKIADYNYKLPDDFTGCVIAWNSNNLDSKVGGNYNYLYRLFRKSNLKPFERDISTEIYQAGSTPCNGVEGFNCYFPLQSYGFQPTNGVGYQPYRVVVLSFELLHAPATVCGPKKSTNLVKNKCVNFNFNGLTGTGVLTESNKKFLPFQQFGRDIADTTDAVRDPQTLEILDITPCSFGGVSVITPGTNTSNQVAVLYQGVNCTEVPVAIHADQLTPTWRVYSTGSNVFQTRAGCLIGAEHVNNSYECDIPIGAGICASYQTQTNSPRRARSVASQSIIAYTMSLGAENSVAYSNNSIAIPTNFTISVTTEILPVSMTKTSVDCTMYICGDSTECSNLLLQYGSFCTQLNRALTGIAVEQDKNTQEVFAQVKQIYKTPPIKDFGGFNFSQILPDPSKPSKRSFIEDLLFNKVTLADAGFIKQYGDCLGDIVARDLICAQKFNGLTVLPPLLTDEMIAQYTSALLAGTITSGWTFGAGAALQIPFAMQMAYRFNGIGVTQNVLYENQKLIANQFNSAIGKIQDSLSSTASALGKLQDVVNQNAQALNTLVKQLSSNFGAISSVLNDILSRLDPPEAEVQIDRLITGRLQSLQTYVTQQLIRAAEIRASANLAATKMSECVLGQSKRVDFCGKGYQLMSFPQSAPHGVVFLNVTYVPAQEKNFTTAPAICNDGKAHFPREGVFVSNGTNWFVTQRNFYEPQIITTDNTFVSGNCDVVIGIVNNTVYDPLQPELDSGGGSGGGQIYEGKLTAEGLRFGIVASRFNHALVDRLVEGAIDAIVRHGGREEDITLVRVPGSWEIPVAAGELARKEDIDAVIAIGVLIRGATPHFDYIASEVSKGLADLSLELRKPITFGVITADTLEQAIERAGTKHGNKGWEAALSAIEMANLFKSLR

SEQ ID NO: 7956 - protein, 1307 aa, Artificial Sequence
  SARS-CoV-2/USA/WA-UW291/2020__EPI_ISL_418076 spike protein (1-1147)(K986P_V987P_ H1048Q_H1064N_ H1083N_H1101N) LumSynth construct
MFVFLVLLPLVSSQCVNLTTRTQLPPAYTNSFTRGVYYPDKVFRSSVLHSTQDLFLPFFSNVTWFHAIHVSGTNGTKRFDNPVLPFNDGVYFASTEKSNIIRGWIFGTTLDSKTQSLLIVNNATNVVIKVCEFQFCNDPFLGVYYHKNNKSWMESEFRVYSSANNCTFEYVSQPFLMDLEGKQGNFKNLREFVFKNIDGYFKIYSKHTPINLVRDLPQGFSALEPLVDLPIGINITRFQTLLALHRSYLTPGDSSSGWTAGAAAYYVGYLQPRTFLLKYNENGTITDAVDCALDPLSETKCTLKSFTVEKGIYQTSNFRVQPTESIVRFPNITNLCPFGEVFNATRFASVYAWNRKRISNCVADYSVLYNSASFSTFKCYGVSPTKLNDLCFTNVYADSFVIRGDEVRQIAPGQTGKIADYNYKLPDDFTGCVIAWNSNNLDSKVGGNYNYLYRLFRKSNLKPFERDISTEIYQAGSTPCNGVEGFNCYFPLQSYGFQPTNGVGYQPYRVVVLSFELLHAPATVCGPKKSTNLVKNKCVNFNFNGLTGTGVLTESNKKFLPFQQFGRDIADTTDAVRDPQTLEILDITPCSFGGVSVITPGTNTSNQVAVLYQGVNCTEVPVAIHADQLTPTWRVYSTGSNVFQTRAGCLIGAEHVNNSYECDIPIGAGICASYQTQTNSPRRARSVASQSIIAYTMSLGAENSVAYSNNSIAIPTNFTISVTTEILPVSMTKTSVDCTMYICGDSTECSNLLLQYGSFCTQLNRALTGIAVEQDKNTQEVFAQVKQIYKTPPIKDFGGFNFSQILPDPSKPSKRSFIEDLLFNKVTLADAGFIKQYGDCLGDIAARDLICAQKFNGLTVLPPLLTDEMIAQYTSALLAGTITSGWTFGAGAALQIPFAMQMAYRFNGIGVTQNVLYENQKLIANQFNSAIGKIQYSLSSTASALGKLQDVVNQNAQALNTLVKQLSSNFGAISSVLNDILSRLDPPEAEVQIDRLITGRLQSLQTYVTQQLIRAAEIRASANLAATKMSECVLGQSKRVDFCGKGYQLMSFPQSAPHGVVFLNVTYVPAQEKNFTTAPAICNDGKAHFPREGVFVSNGTNWFVTQRNFYEPQIITTDNTFVSGNCDVVIGIVNNTVYDPLQPELDSGGGSGGGQIYEGKLTAEGLRFGIVASRFNHALVDRLVEGAIDAIVRHGGREEDITLVRVPGSWEIPVAAGELARKEDIDAVIAIGVLIRGATPHFDYIASEVSKGLADLSLELRKPITFGVITADTLEQAIERAGTKHGNKGWEAALSAIEMANLFKSLR

SEQ ID NO: 7957 - protein, 1307 aa, Artificial Sequence; identical to SEQ ID NO: 7920
  SARS-CoV-2/Portugal/PT0034/2020__EPI_ISL_418019 spike protein (1-1147)(K986P_V987P_ H1048Q_H1064N_ H1083N_H1101N) LumSynth construct

SEQ ID NO: 7958 - protein, 1307 aa, Artificial Sequence; identical to SEQ ID NO: 7912
  SARS-CoV-2/Iceland/202/2020__EPI_ISL_417750 spike protein (1-1147)(K986P_V987P_ H1048Q_H1064N_ H1083N_H1101N) LumSynth construct

SEQ ID NO: 7959 - protein, 1307 aa, Artificial Sequence
  SARS-CoV-2/USA/WA-UW261/2020__EPI_ISL_418046 spike protein (1-1147)(K986P_V987P_ H1048Q_H1064N_ H1083N_H1101N) LumSynth construct
MFVFLVLLPLVSSQCVNLTTRTQLPPAYTNSFTRGVYYPDKVFRSSVLHSTQDLFLPFFSNVTWFHAIHVSGTNGTKRFDNPVLPFNDGVYFASTEKSNIIRGWIFGTTLDSKTQSLLIVNNATNVVIKVCEFQFCNDPFLGVYYHKNNKSWMESEFRVYSSANNCTFEYVSQPFLMDLEGKQGNFKNLREFVFKNIDGYFKIYSKHTPINLVRDLPQGFSALEPLVDLPIGINITRFQTLLALHRSYLTPGDSSSGWTAGAAAYYVGYLQPRTFLLKYNENGTITDAVDCALDPLSETKCTLKSFTVEKGIYQTSNFRVQPTESIVRFPNITNLCPFGEVFNATRFTSVYAWNRKRISNCVADYSVLYNSASFSTFKCYGVSPTKLNDLCFTNVYADSFVIRGDEVRQIAPGQTGKIADYNYKLPDDFTGCVIAWNSNNLDSKVGGNYNYLYRLFRKSNLKPFERDISTEIYQAGSTPCNGVEGFNCYFPLQSYGFQPTNGVGYQPYRVVVLSFELLHAPATVCGPKKSTNLVKNKCVNFNFNGLTGTGVLTESNKKFLPFQQFGRDIADTTDAVRDPQTLEILDITPCSFGGVSVITPGTNTSNQVAVLYQDVNCTEVPVAIHADQLTPTWRVYSTGSNVFQTRAGCLIGAEHVNNSYECDIPIGAGICASYQTQTNSPRRARSVASQSIIAYTMSLGAENSVAYSNNSIAIPTNFTISVTTEILPVSMTKTSVDCTMYICGDSTECSNLLLQYGSFCTQLNRALTGIAVEQDKNTQEVFAQVKQIYKTPPIKDFGGFNFSQILPDPSKPSKRSFIEDLLFNKVTLADAGFIKQYGDCLGDIAARDLICAQKFNGLTVLPPLLTDEMIAQYTSALLAGTITSGWTFGAGAALQIPFAMQMAYRFNGIGVTQNVLYENQKLIANQFNSAIGKIQDSLSSTASALGKLQDVVNQNAQALNTLVKQLSSNFGAISSVLNDILSRLDPPEAEVQIDRLITGRLQSLQTYVTQQLIRAAEIRASANLAATKMSECVLGQSKRVDFCGKGYQLMSFPQSAPHGVVFLNVTYVPAQEKNFTTAPAICNDGKAHFPREGVFVSNGTNWFVTQRNFYEPQIITTDNTFVSGNCDVVIGIVNNTVYDPLQPELDSGGGSGGGQIYEGKLTAEGLRFGIVASRFNHALVDRLVEGAIDAIVRHGGREEDITLVRVPGSWEIPVAAGELARKEDIDAVIAIGVLIRGATPHFDYIASEVSKGLADLSLELRKPITFGVITADTLEQAIERAGTKHGNKGWEAALSAIEMANLFKSLR

SEQ ID NO: 7960 - protein, 1307 aa, Artificial Sequence
  SARS-CoV-2/Portugal/PT0035/2020__EPI_ISL_418020 spike protein (1-1147)(K986P_V987P_ H1048Q_H1064N_ H1083N_H1101N) LumSynth construct
MFVFLVLLPLVSSQCVNLTTRTQLPPAYTNSFTRGVYYPDKVFRSSVLHSTQDLFLPFFSNVTWFHAIHVSGTNGTKRFDNPVLPFNDGVYFASTEKSNIIRGWIFGTTLDSKTQSLLIVNNATNVVIKVCEFQFCNDPFLGVYYHKNNKSWMESEFRVYSSANNCTFEYVSQPFLMDLEGKQGNFKNLREFVFKNIDGYFKIYSKHTPINLVRDLPQGFSALEPLVDLPIGINITRFQTLLALHRSYLTPGDSSSGWTAGAAAYYVGYLQPRTFLLKYNENGTITDAVDCALDPLSETKCTLKSFTVEKGIYQTSNFRVQPTESIVRFPNITNLCPFGEVFNATRFASVYAWNRKRISNCVADYSVLYNSASFSTFKCYGVSPTKLNDLCFTNVYADSFVIRGDEVRQIAPGQTGKIADYNYKLPDDFTGCVIAWNSNNLDSKVGGNYNYLYRLFRKSNLKPFERDISTEIYQAGSTPCNGVEGFNCYFPLQSYGFQPTNGVGYQPYRVVVLSFELLHAPATVCGPKKSTNLVKNKCVNFNFNGLTGTGVLTESNKKFLPFQQFGRDIADTTDAVRDPQTLEILDITPCSFGGVSVITPGTNTSNQVAVLYQDVNCTEVPVAIHADQLTPTWRVYSTGSNVFQTRAGCLIGAEHVNNSYECDIPIGAGICASYQTQTNSPRRARSVASQSIIAYTMSLGAENSVAYSNNSIAIPTNFTISVTTEILPVSMTKTSVDCTMYICGDSTECSNLLLQYGSFCTQLNRALTGIAVEQDKNTQEVFAQVKQIYKTPPIKDFGGFNFSQILPDPSKPSKRSFIEDLLFNKVTLADAGFIKQYGDCLGDISARDLICAQKFNGLTVLPPLLTDEMIAQYTSALLAGTITSGWTFGAGAALQIPFAMQMAYRFNGIGVTQNVLYENQKLIANQFNSAIGKIQDSLSSTASALGKLQDVVNQNAQALNTLVKQLSSNFGAISSVLNDILSRLDPPEAEVQIDRLITGRLQSLQTYVTQQLIRAAEIRASANLAATKMSECVLGQSKRVDFCGKGYQLMSFPQSAPHGVVFLNVTYVPAQEKNFTTAPAICNDGKAHFPREGVFVSNGTNWFVTQRNFYEPQIITTDNTFVSGNCDVVIGIVNNTVYDPLQPELDSGGGSGGGQIYEGKLTAEGLRFGIVASRFNHALVDRLVEGAIDAIVRHGGREEDITLVRVPGSWEIPVAAGELARKEDIDAVIAIGVLIRGATPHFDYIASEVSKGLADLSLELRKPITFGVITADTLEQAIERAGTKHGNKGWEAALSAIEMANLFKSLR

SEQ ID NO: 7961 - protein, 1307 aa, Artificial Sequence
  SARS-CoV-2/USA/NY-NYUMC7/2020__EPI_ISL_418192 spike protein (1-1147)(K986P_V987P_ H1048Q_H1064N_ H1083N_H1101N) LumSynth construct
MFVFLVLLPLVSSQCVNLTTRTQLPPAYTNSFTRGVYYPDKVFRSSVLHSTQDLFLPFFSNVTWFHAIHVSGTNGTKRFDNPVLPFNDGVYFASTEKSNIIRGWIFGTTLDSKTQSLLIVNNATNVVIKVCEFQFCNDPFLGVYHHKNNKSWMESEFRVYSSANNCTFEYVSQPFLMDLEGKQGNFKNLREFVFKNIDGYFKIYSKHTPINLVRDLPQGFSALEPLVDLPIGINITRFQTLLALHRSYLTPGDSSSGWTAGAAAYYVGYLQPRTFLLKYNENGTITDAVDCALDPLSETKCTLKSFTVEKGIYQTSNFRVQPTESIVRFPNITNLCPFGEVFNATRFASVYAWNRKRISNCVADYSVLYNSASFSTFKCYGVSPTKLNDLCFTNVYADSFVIRGDEVRQIAPGQTGKIADYNYKLPDDFTGCVIAWNSNNLDSKVGGNYNYLYRLFRKSNLKPFERDISTEIYQAGSTPCNGVEGFNCYFPLQSYGFQPTNGVGYQPYRVVVLSFELLHAPATVCGPKKSTNLVKNKCVNFNFNGLTGTGVLTESNKKFLPFQQFGRDIADTTDAVRDPQTLEILDITPCSFGGVSVITPGTNTSNQVAVLYQGVNCTEVPVAIHADQLTPTWRVYSTGSNVFQTRAGCLIGAEHVNNSYECDIPIGAGICASYQTQTNSPRRARSVASQSIIAYTMSLGAENSVAYSNNSIAIPTNFTISVTTEILPVSMTKTSVDCTMYICGDSTECSNLLLQYGSFCTQLNRALTGIAVEQDKNTQEVFAQVKQIYKTPPIKDFGGFNFSQILPDPSKPSKRSFIEDLLFNKVTLADAGFIKQYGDCLGDIAARDLICAQKFNGLTVLPPLLTDEMIAQYTSALLAGTITSGWTFGAGAALQIPFAMQMAYRFNGIGVTQNVLYENQKLIANQFNSAIGKIQDSLSSTASALGKLQDVVNQNAQALNTLVKQLSSNFGAISSVLNDILSRLDPPEAEVQIDRLITGRLQSLQTYVTQQLIRAAEIRASANLAATKMSECVLGQSKRVDFCGKGYQLMSFPQSAPHGVVFLNVTYVPAQEKNFTTAPAICNDGKAHFPREGVFVSNGTNWFVTQRNFYEPQIITTDNTFVSGNCDVVIGIVNNTVYDPLQPELDSGGGSGGGQIYEGKLTAEGLRFGIVASRFNHALVDRLVEGAIDAIVRHGGREEDITLVRVPGSWEIPVAAGELARKEDIDAVIAIGVLIRGATPHFDYIASEVSKGLADLSLELRKPITFGVITADTLEQAIERAGTKHGNKGWEAALSAIEMANLFKSLR

SEQ ID NO: 7962 - protein, 1307 aa, Artificial Sequence
  SARS-CoV-2/Iceland/189/2020__EPI_ISL_417709 spike protein (1-1147)(K986P_V987P_ H1048Q_H1064N_ H1083N_H1101N) LumSynth construct
MFVFLVLLPLVSSQCVNLTTRTQLPPAYTNSFTRGVYYPDKVFRSSVLHSTQDLFLPFFSNVTWFHAIHVSGTNGTKRFDNPVLPFNDGVYFASTEKSNIIRGWIFGTTLDSKTQSLLIVNNATNVVIKVCEFQFCNDPFLGVYYHKNNKSWMESEFRVYSSANNCTFEYVSQPFLMDLEGKQGNFKNLREFVFKNIDGYFKIYSKHTPINLVRDLPQGFSALEPLVDLPIGINITRFQTLLALHRSYLTPGDSSSGWTAGAAAYYVGYLQPRTFLLKYNENGTITDAVDCALDPLSETKCTLKSFTVEKGIYQTSNFRVQPTESIVRFPNITNLCPFGEVFNATRFASVYAWNRKRISNCVADYSVLYNSASFSTFKCYGVSPTKLNDLCFTNVYADSFVIRGDEVRQIAPGQTGKIADYNYKLPDDFTGCVIAWNSNNLDSKVGGNYNYLYRLFRKSNLKPFERDISTEIYQAGSTPCNGVEGFNCYFPLQSYGFQPTNGVGYQPYRVVVLSFELLHAPATVCGPKKSTNLVKNKCVNFNFNGLTGTGVLTESNKKFLPFQQFGRDIADTTDAVRDPQTLEILDITPCSFGGVSVITPGTNTSNQVAVLYQGVNCTEVPVAIHADQLTPTWRVYSTGSNVFQTRAGCLIGAEHVNNSYECDIPIGAGICASYQTQTNSPRRARSVASQSIIAYTMSLGAENSVAYSNNSIAIPTNFTISVTTEILPVSMTKTSVDCTMYICGDSTECSNLLLQYGSFCTQLNRALTGIAVEQDKNTQEVFAQVKQIYKTPPIKDFGGFNFSQILPDPSKPSKRSFIEDLLFNKVTLADAGFTKQYGDCLGDIAARDLICAQKFNGLTVLPPLLTDEMIAQYTSALLAGTITSGWTFGAGAALQIPFAMQMAYRFNGIGVTQNVLYENQKLIANQFNSAIGKIQDSLSSTASALGKLQDVVNQNAQALNTLVKQLSSNFGAISSVLNDILSRLDPPEAEVQIDRLITGRLQSLQTYVTQQLIRAAEIRASANLAATKMSECVLGQSKRVDFCGKGYQLMSFPQSAPHGVVFLNVTYVPAQEKNFTTAPAICNDGKAHFPREGVFVSNGTNWFVTQRNFYEPQIITTDNTFVSGNCDVVIGIVNNTVYDPLQPELDSGGGSGGGQIYEGKLTAEGLRFGIVASRFNHALVDRLVEGAIDAIVRHGGREEDITLVRVPGSWEIPVAAGELARKEDIDAVIAIGVLIRGATPHFDYIASEVSKGLADLSLELRKPITFGVITADTLEQAIERAGTKHGNKGWEAALSAIEMANLFKSLR

SEQ ID NO: 7963 - protein, 1307 aa, Artificial Sequence
  SARS-CoV-2/Australia/NSW56/2020__EPI_ISL_417408 spike protein (1-1147)(K986P_V987P_ H1048Q_H1064N_ H1083N_H1101N) LumSynth construct
MFVFLVLLPLVSSQCVNLTTRTQLPPAYTNSFTRGVYYPDKVFRSSVLHSTQDLFLPFFSNVTWFHAIHVSGTNGTKRFDNPVLPFNDGVYFASTEKSNIIRGWIFGTTLDSKTQSLLIVNNATNVVIKVCEFQFCNDPFLGVYYHKNNKSWMESEFRVYSSANNCTFEYVSQPFLMDLEGKQGNFKNLREFVFKNIDGYFKIYSKHTPINLVRDLPQGFSALEPLVDLPIGINITRFQTLLALHRSYLTPGDSSSGWTAGAAAYYVGYLQPRTFLLKYNENGTITDAVDCALDPLSETKCTLKSFTVEKGIYQTSNFRVQPTESIVRFPNITNLCPFGEVFNATRFASVYAWNRKRISNCVADYSVLYNSASFSTFKCYGVSPTKLNDLCFTNVYADSFVIRGDEVRQIAPGQTGKIADYNYKLPDDFTGCVIAWNSNNLDSKVGGNYNYLYRLFRKSNLKPFERDISTEIYQAGSTPCNGVEGFNCYFPLQSYGFQPTNGVGYQPYRVVVLSFELLHAPATVCGPKKSTNLVKNKCVNFNFNGLTGTGVLTESNKKFLPFQQFGRDIADTTDAVRDPQTLEILDITPCSFGGVSVITPGTNTSNQVAVLYQDVNCTEVPVAIHADQLTPTWRVYSTGSNVFQTRAGCLIGAEHVNNSYECDIPIGAGICASYQTQTNSPRRARSVASQSIIAYTMSLGAENSVAYSNNSIAIPTNFTISVTTEILPVSMTKTSVDCTMYICGDSTECSNLLLQYGSFCTQLNRALTGIAVEQDKNTQEVFAQVKQIYKTPPIKDFGGFNFSQILPDSSKPSKRSFIEDLLFNKVTLADAGFIKQYGDCLGDIAARDLICAQKFNGLTVLPPLLTDEMIAQYTSALLAGTITSGWTFGAGAALQIPFAMQMAYRFNGIGVTQNVLYENQKLIANQFNSAIGKIQDSLSSTASALGKLQDVVNQNAQALNTLVKQLSSNFGAISSVLNDILSRLDPPEAEVQIDRLITGRLQSLQTYVTQQLIRAAEIRASANLAATKMSECVLGQSKRVDFCGKGYQLMSFPQSAPHGVVFLNVTYVPAQEKNFTTAPAICNDGKAHFPREGVFVSNGTNWFVTQRNFYEPQIITTDNTFVSGNCDVVIGIVNNTVYDPLQPELDSGGGSGGGQIYEGKLTAEGLRFGIVASRFNHALVDRLVEGAIDAIVRHGGREEDITLVRVPGSWEIPVAAGELARKEDIDAVIAIGVLIRGATPHFDYIASEVSKGLADLSLELRKPITFGVITADTLEQAIERAGTKHGNKGWEAALSAIEMANLFKSLR

SEQ ID NO: 7964 - protein, 1307 aa, Artificial Sequence
  SARS-CoV-2/Iceland/280/2020__EPI_ISL_417608 spike protein (1-1147)(K986P_V987P_ H1048Q_H1064N_ H1083N_H1101N) LumSynth construct
MFVFLVLLPLVSSQCVNLTTRTQLPPAYTNSFTRGVYYPDKVFRSSVLHSTQDLFLPFFSNVTWFHAIHVSGTNGTKRFDNPVLPFNDGVYFASTEKSNIIRGWIFGTTLDSKTQSLLIVNNATNVVIKVCEFQFCNDPFLGVYYHKNNKSWMESEFRVYSSANNCTFEYVSQPFLMDLEGKQGNFKNLREFVFKNIDGYFKIYSKHTPINLVRDLPQGFSALEPLVDLPIGINITRFQTLLALHRSYLTPGDSSSGWTAGAAAYYVGYLQPRTFLLKYNENGTITDAVDCALDPLSETKCTLKSFTVEKGIYQTSNFRVQPTESIVRFPNITNLCPFGEVFNATRFASVYAWNRKRISNCVADYSVLYNSASFSTFKCYGVSPTKLNDLCFTNVYADSFVIRGDEVRQIAPGQTGKIADYNYKLPDDFTGCVIAWNSNNLDSKVGGNYNYLYRLFRKSNLKPFERDISTEIYQAGSTPCNGVEGFNCYFPLQSYGFQPTNGVGYQPYRVVVLSFELLHAPATVCGPKKSTNLVKNKCVNFNFNGLTGTGVLTESNKKFLPFQQFGRDIADTTDAVRDPQTLEILDITPCSFGGVSVITPGTNTSNQVAVLYQGVNCTEVPVAIHADQLTPTWRVYSTGSNVFQTRAGCLIGAEHVNNSYECDIPIGAGICASYHTQTNSPRRARSVASQSIIAYTMSLGAENSVAYSNNSIAIPTNFTISVTTEILPVSMTKTSVDCTMYICGDSTECSNLLLQYGSFCTQLNRALTGIAVEQDKNTQEVFAQVKQIYKTPPIKDFGGFNFSQILPDPSKPSKRSFIEDLLFNKVTLADAGFIKQYGDCLGDIAARDLICAQKFNGLTVLPPLLTDEMIAQYTSALLAGTITSGWTFGAGAALQIPFAMQMAYRFNGIGVTQNVLYENQKLIANQFNSAIGKIQDSLSSTASALGKLQDVVNQNAQALNTLVKQLSSNFGAISSVLNDILSRLDPPEAEVQIDRLITGRLQSLQTYVTQQLIRAAEIRASANLAATKMSECVLGQSKRVDFCGKGYQLMSFPQSAPHGVVFLNVTYVPAQEKNFTTAPAICNDGKAHFPREGVFVSNGTNWFVTQRNFYEPQIITTDNTFVSGNCDVVIGIVNNTVYDPLQPELDSGGGSGGGQIYEGKLTAEGLRFGIVASRFNHALVDRLVEGAIDAIVRHGGREEDITLVRVPGSWEIPVAAGELARKEDIDAVIAIGVLIRGATPHFDYIASEVSKGLADLSLELRKPITFGVITADTLEQAIERAGTKHGNKGWEAALSAIEMANLFKSLR

SEQ ID NO: 7965 - protein, 1307 aa, Artificial Sequence; identical to SEQ ID NO: 7920
  SARS-CoV-2/Iceland/247/2020__EPI_ISL_417575 spike protein (1-1147)(K986P_V987P_ H1048Q_H1064N_ H1083N_H1101N) LumSynth construct

SEQ ID NO: 7966 - protein, 1307 aa, Artificial Sequence
  SARS-CoV-2/Iceland/238/2020__EPI_ISL_417566 spike protein (1-1147)(K986P_V987P_ H1048Q_H1064N_ H1083N_H1101N) LumSynth construct
MFVFLVLLPLVSSQCVNLTTRTQLPPAYTNSFTRGVYYPDKVFRSSVLHSTQDLFLPFFSNVTWFHAIHVSGTNGTKRFDNPVLPFNDGVYFASTEKSNIIRGWIFGTTLDSKTQSLLIVNNATNVVIKVCEFQFCNDPFLGVYYHKNNKSWMESEFRVYSSANNCTFEYVSQPFLMDLEGKQGNFKNLREFVFKNIDGYFKIYSKHTPINLVRDLPQGFSALEPLVDLPIGINITRFQTLLALHRSYLTPGDSSSGWTAGAAAYYVGYLQPRTFLLKYNENGTITDAVDCALDPLSETKCTLKSFTVEKGIYQTSNFRVQPTESIVRFPNITNLCPFGEVFNATRFASVYAWNRKRISNCVADYSVLYNSASFSTFKCYGVSPTKLNDLCFTNVYADSFVIRGDEVRQIAPGQTGKIADYNYKLPDDFTGCVIAWNSNNLDSKVGGNYNYLYRLFRKSNLKPFERDISTEIYQAGSTPCNGVEGFNCYFPLQSYGFQPTNGVGYQPYRVVVLSFELLHAPATVCGPKKSTNLVKNKCVNFNFNGLTGTGVLTESNKKFLPFQQFGRDIADTTDAVRDPQTLEILDITPCSFGGVSVITPGTNTSNQVAVLYQGVNCTEVPVAIHADQLTPTWRVYSTGSNVFQTRAGCLIGAEHVNNSYECDIPIGAGICASYQTQTNSPRRARSVASQSIIAYTMSLGAENSVAYSNNSIAIPTNFTISVTTEILPVSMTKTSVDCTMYICGDSTECSNLLLQYGSFCTQLNRALTGIAVEQDKNTQEVFAQVKQIYKTPPIKDFGGFNFSQILPDPSKPSKRSFIEDLLFNKVTLADVGFIKQYGDCLGDIAARDLICAQKFNGLTVLPPLLTDEMIAQYTSALLAGTITSGWTFGAGAALQIPFAMQMAYRFNGIGVTQNVLYENQKLIANQFNSAIGKIQDSLSSTASALGKLQDVVNQNAQALNTLVKQLSSNFGAISSVLNDILSRLDPPEAEVQIDRLITGRLQSLQTYVTQQLIRAAEIRASANLAATKMSECVLGQSKRVDFCGKGYQLMSFPQSAPHGVVFLNVTYVPAQEKNFTTAPAICNDGKAHFPREGVFVSNGTNWFVTQRNFYEPQIITTDNTFVSGNCDVVIGIVNNTVYDPLQPELDSGGGSGGGQIYEGKLTAEGLRFGIVASRFNHALVDRLVEGAIDAIVRHGGREEDITLVRVPGSWEIPVAAGELARKEDIDAVIAIGVLIRGATPHFDYIASEVSKGLADLSLELRKPITFGVITADTLEQAIERAGTKHGNKGWEAALSAIEMANLFKSLR

SEQ ID NO: 7967 - protein, 1307 aa, Artificial Sequence
  SARS-CoV-2/Greece/16/2020__EPI_ISL_418265 spike protein (1-1147)(K986P_V987P_ H1048Q_H1064N_ H1083N_H1101N) LumSynth construct
MFVFLVLLPLVSSQCVNLTTRTQLPPAYTNSFTRGVYYPDKVFRSSVLHSTQDLFLPFFSNVTWFHAIHVSGTNGTKRFDNPVLPFNDGVYFASTEKSNIIRGWIFGTTLDSKTQSLLIVNNATNVVIKVCEFQFCNDPFLGVYYHKNNKSWMESEFRVYSSANNCTFEYVSQPFLMDLEGKQGNFKNLREFVFKNVDGYFKIYSKHTPINLVRDLPQGFSALEPLVDLPIGINITRFQTLLALHRSYLTPGDSSSGWTAGAAAYYVGYLQPRTFLLKYNENGTITDAVDCALDPLSETKCTLKSFTVEKGIYQTSNFRVQPTESIVRFPNITNLCPFGEVFNATRFASVYAWNRKRISNCVADYSVLYNSASFSTFKCYGVSPTKLNDLCFTNVYADSFVIRGDEVRQIAPGQTGKIADYNYKLPDDFTGCVIAWNSNNLDSKVGGNYNYLYRLFRKSNLKPFERDISTEIYQAGSTPCNGVEGFNCYFPLQSYGFQPTNGVGYQPYRVVVLSFELLHAPATVCGPKKSTNLVKNKCVNFNFNGLTGTGVLTESNKKFLPFQQFGRDIADTTDAVRDPQTLEILDITPCSFGGVSVITPGTNTSNQVAVLYQDVNCTEVPVAIHADQLTPTWRVYSTGSNVFQTRAGCLIGAEHVNNSYECDIPIGAGICASYQTQTNSPRRARSVASQSIIAYTMSLGAENSVAYSNNSIAIPTNFTISVTTEILPVSMTKTSVDCTMYICGDSTECSNLLLQYGSFCTQLNRALTGIAVEQDKNTQEVFAQVKQIYKTPPIKDFGGFNFSQILPDPSKPSKRSFIEDLLFNKVTLADAGFIKQYGDCLGDIAARDLICAQKFNGLTVLPPLLTDEMIAQYTSALLAGTITSGWTFGAGAALQIPFAMQMAYRFNGIGVTQNVLYENQKLIANQFNSAIGKIQDSLSSTASALGKLQDVVNQNAQALNTLVKQLSSNFGAISSVLNDILSRLDPPEAEVQIDRLITGRLQSLQTYVTQQLIRAAEIRASANLAATKMSECVLGQSKRVDFCGKGYQLMSFPQSAPHGVVFLNVTYVPAQEKNFTTAPAICNDGKAHFPREGVFVSNGTNWFVTQRNFYEPQIITTDNTFVSGNCDVVIGIVNNTVYDPLQPELDSGGGSGGGQIYEGKLTAEGLRFGIVASRFNHALVDRLVEGAIDAIVRHGGREEDITLVRVPGSWEIPVAAGELARKEDIDAVIAIGVLIRGATPHFDYIASEVSKGLADLSLELRKPITFGVITADTLEQAIERAGTKHGNKGWEAALSAIEMANLFKSLR

SEQ ID NO: 7968 - protein, 1307 aa, Artificial Sequence
  SARS-CoV-2/Iceland/319/2020__EPI_ISL_417648 spike protein (1-1147)(K986P_V987P_ H1048Q_H1064N_ H1083N_H1101N) LumSynth construct
MFVFLVLLPLVSSQCVNLTTRTQLPPAYTNSFTRGVYYPDKVFRSSVLHSTQDLFLPFFSNVTWFHAIHVSGTNGTKRFDNPVLPFNDGVYFASTEKSNIIRGWIFGTTLDSKTQSLLIVNNATNVVIKVCEFQFCNDPFLGVYYHKNNKSWMESEFRVYSSANNCTFEYVSQPFLIDLEGKQGNFKNLREFVFKNIDGYFKIYSKHTPINLVRDLPQGFSALEPLVDLPIGINITRFQTLLALHRSYLTPGDSSSGWTAGAAAYYVGYLQPRTFLLKYNENGTITDAVDCALDPLSETKCTLKSFTVEKGIYQTSNFRVQPTESIVRFPNITNLCPFGEVFNATRFASVYAWNRKRISNCVADYSVLYNSASFSTFKCYGVSPTKLNDLCFTNVYADSFVIRGDEVRQIAPGQTGKIADYNYKLPDDFTGCVIAWNSNNLDSKVGGNYNYLYRLFRKSNLKPFERDISTEIYQAGSTPCNGVEGFNCYFPLQSYGFQPTNGVGYQPYRVVVLSFELLHAPATVCGPKKSTNLVKNKCVNFNFNGLTGTGVLTESNKKFLPFQQFGRDIADTTDAVRDPQTLEILDITPCSFGGVSVITPGTNTSNQVAVLYQGVNCTEVPVAIHADQLTPTWRVYSTGSNVFQTRAGCLIGAEHVNNSYECDIPIGAGICASYQTQTNSPRRARSVASQSIIAYTMSLGAENSVAYSNNSIAIPTNFTISVTTEILPVSMTKTSVDCTMYICGDSTECSNLLLQYGSFCTQLNRALTGIAVEQDKNTQEVFAQVKQIYKTPPIKDFGGFNFSQILPDPSKPSKRSFIEDLLFNKVTLADAGFIKQYGDCLGDIAARDLICAQKFNGLTVLPPLLTDEMIAQYTSALLAGTITSGWTFGAGAALQIPFAMQMAYRFNGIGVTQNVLYENQKLIANQFNSAIGKIQDSLSSTASALGKLQDVVNQNAQALNTLVKQLSSNFGAISSVLNDILSRLDPPEAEVQIDRLITGRLQSLQTYVTQQLIRAAEIRASANLAATKMSECVLGQSKRVDFCGKGYQLMSFPQSAPHGVVFLNVTYVPAQEKNFTTAPAICNDGKAHFPREGVFVSNGTNWFVTQRNFYEPQIITTDNTFVSGNCDVVIGIVNNTVYDPLQPELDSGGGSGGGQIYEGKLTAEGLRFGIVASRFNHALVDRLVEGAIDAIVRHGGREEDITLVRVPGSWEIPVAAGELARKEDIDAVIAIGVLIRGATPHFDYIASEVSKGLADLSLELRKPITFGVITADTLEQAIERAGTKHGNKGWEAALSAIEMANLFKSLR

SEQ ID NO: 7969 - protein, 1307 aa, Artificial Sequence
  SARS-CoV-2/Congo/94/2020__EPI_ISL_417947 spike protein (1-1147)(K986P_V987P_ H1048Q_H1064N_ H1083N_H1101N) LumSynth construct
MFVFLVLLPLVSSQCVNLTTRTQLPPAYTNSFTRGVYYPDKVFRSSVLHSTQDLFLPFFSNVTWFHAIHVSGTNGTKRFDNPVLPFNDGVYFASTEKSNIIRGWIFGTTLDSKTQSLLIVNNATNVVIKVCEFQFCNDPFLGVYYHKNNKSWMESEFRVYSSANNCTFEYVSQPFLMDLEGKQGNFKNLREFVFKNIDGYFKIYSKHTPINLVRDLPQGFSALEPLVDLPIGINITRFQTLLALHRSYLTPGDSSSGWTAGAAAYYVGYLQPRTFLLKYNENGTITDAVDCALDPLSETKCTLKSFTVEKGIYQTSNFRVQPTESIVRFPNITNLCPFGEVFNATRFASVYAWNRKRISNCVADYSVLYNSASFSTFKCYGVSPTKLNDLCFTNVYADSFVIRGDEVRQIAPGQTGKIADYNYKLPDDFTGCVIAWNSNNLDSKVGGNYNYLYRLFRKSNLKPFERDISTEIYQAGSTPCNGVEGFNCYFPLQSYGFQPTNGVGYQPYRVVVLSFELLHAPATVCGPKKSTNLVKNKCVNFNFNGLTGTGVLTESNKKFLPFQQFGRDIADTTDAVRDPQTLEILDITPCSFGGVSVITPGTNTSNQVAVLYQGVNCTEVPVAIHADQLTPTWRVYSTGSNVFQTRAGCLIGAEHVNNSYECDIPIGAGICASYQTQTNSPRRARSVASQSIIAYTMSLGAENSVAYSNNSIAIPTNFTISVTTEILPVSMTKTSVDCTMYICGDSTECSNLLLQYGSFCTQLNRALTGIAVEQDKNTQEVFAQVKQIYKTPPIKDFGGFNFSQILPDPSKPSKRSFIEDILFNKVTLADAGFIKQYGDCLGDIAARDLICAQKFNGLTVLPPLLTDEMIAQYTSALLAGTITSGWTFGAGAALQIPFAMQMAYRFNGIGVTQNVLYENQKLIANQFNSAIGKIQDSLSSTASALGKLQDVVNQNAQALNTLVKQLSSNFGAISSVLNDILSRLDPPEAEVQIDRLITGRLQSLQTYVTQQLIRAAEIRASANLAATKMSECVLGQSKRVDFCGKGYQLMSFPQSAPHGVVFLNVTYVPAQEKNFTTAPAICNDGKAHFPREGVFVSNGTNWFVTQRNFYEPQIITTDNTFVSGNCDVVIGIVNNTVYDPLQPELDSGGGSGGGQIYEGKLTAEGLRFGIVASRFNHALVDRLVEGAIDAIVRHGGREEDITLVRVPGSWEIPVAAGELARKEDIDAVIAIGVLIRGATPHFDYIASEVSKGLADLSLELRKPITFGVITADTLEQAIERAGTKHGNKGWEAALSAIEMANLFKSLR

SEQ ID NO: 7970 - protein, 1307 aa, Artificial Sequence
  SARS-CoV-2/Congo/158/2020__EPI_ISL_417950 spike protein (1-1147)(K986P_V987P_ H1048Q_H1064N_ H1083N_H1101N) LumSynth construct
MFVFLVLLPLVSSQCVNLTTRTQLPPAYTNSFTRGVYYPDKVFRSSVLHSTQDLFLPFFSNVTWFHAIHVSGTNGTKRFDNPVLPFNDGVYFASTEKSNIIRGWIFGTTLDSKTQSLLIVNNATNVVIKVCEFQFCNDPFLGVYYHKNNKSWMESEFRVYSSANNCTFEYVSQPFLMDLEGKQGNFKNLREFVFKNIDGYFKIYSKHTPINLVRDLPQGFSALEPLVDLPIGINITRFQTLLALHRSYLTPGDSSSGWTAGAAAYYVGYLQPRTFLLKYNENGTITDAVDCALDPLSETKCTLKSFTVEKGIYQTSNFRVQPTESIVRFPNITNLCPFGEVFNATRFASVYAWNRKRISNCVADYSVLYNSASFSTFKCYGVSPTKLNDLCFTNVYADSFVIRGDEVRQIAPGQTGKIADYNYKLPDDFTGCVIAWNSNNLDSKVGGNYNYLYRLFRKSNLKPFERDISTEIYQAGSTPCNGVEGFNCYFPLQSYGFQPTNGVGYQPYRVVVLSFELLHAPATVCGPKKSTNLVKNKCVNFNFNGLTGTGVLTESNKKFLPFQQFGRDIADTTDAVRDPQTLEILDITPCSFGGVSVITPGTNTSNQVAVLYQDVNCTEVPVAIHADQLTPTWRVYSTGSNVFQTRAGCLIGAEHVNNSYECDIPIGAGICASYQTQTNSPRRARSVASQSIIAYTMSLGAENSVAYSNNSIAIPTNFTISVTTEILPVSMTKTSVDCTMYICGDSTECSNLLLQYGSFCTQLNRALTGIAVEQDKNTQEVFAQVKQIYKTPPIKDFGGFNFSQILPDPSKPSKRSFIEDLLFNKVTLADAGFIKQYGDCLGDIAARDLICAQKFNGLTVLPPLLTDEMIAQYTSALLAGTITSGWTFGAGAALQIPFAMQMAYRFNGIGVTQNVLYENQKLIANQFNSAIGKIQDSLSSTASALGKLQDVVNQNAQALNTLVKQLSSNFGAISSVLNDILSRLDPPEAEVQIDRLITGRLQSLQTYVTQQLIRAAEIRASANLAATKMSECVLGQSKRVDFCGKGYQLMSFPQSAPHGVVFLNVTYVPAQEKNFTTAPAICNDGKAHFPREGVFVSNGTNWFVTQRNFYEPQIITTDNTFLSGNCDVVIGIVNNTVYDPLQPELDSGGGSGGGQIYEGKLTAEGLRFGIVASRFNHALVDRLVEGAIDAIVRHGGREEDITLVRVPGSWEIPVAAGELARKEDIDAVIAIGVLIRGATPHFDYIASEVSKGLADLSLELRKPITFGVITADTLEQAIERAGTKHGNKGWEAALSAIEMANLFKSLR

SEQ ID NO: 7971 - protein, 1307 aa, Artificial Sequence
  SARS-CoV-2/USA/UT-00034/2020__EPI_ISL_417977 spike protein (1-1147)(K986P_V987P_ H1048Q_H1064N_ H1083N_H1101N) LumSynth construct
MFVFLVLLPLVSSQCVNLTTRTQLPPAYTNSFTRGVYYPDKVFRSSVLHSTQDLFLPFFSNVTWFHAIHVSGTNGTKRFDNPVLPFNDGVYFASTEKSNIIRGWIFGTTLDSKTQSLLIVNNATNVVIKVCEFQFCNDPFLGVYYYKNNKSWMESEFRVYSSANNCTFEYVSQPFLMDLEGKQGNFKNLREFVFKNIDGYFKIYSKHTPINLVRDLPQGFSALEPLVDLPIGINITRFQTLLALHRSYLTPGDSSSGWTAGAAAYYVGYLQPRTFLLKYNENGTITDAVDCALDPLSETKCTLKSFTVEKGIYQTSNFRVQPTESIVRFPNITNLCPFGEVFNATRFASVYAWNRKRISNCVADYSVLYNSASFSTFKCYGVSPTKLNDLCFTNVYADSFVIRGDEVRQIAPGQTGKIADYNYKLPDDFTGCVIAWNSNNLDSKVGGNYNYLYRLFRKSNLKPFERDISTEIYQAGSTPCNGVEGFNCYFPLQSYGFQPTNGVGYQPYRVVVLSFELLHAPATVCGPKKSTNLVKNKCVNFNFNGLTGTGVLTESNKKFLPFQQFGRDIADTTDAVRDPQTLEILDITPCSFGGVSVITPGTNTSNQVAVLYQGVNCTEVPVAIHADQLTPTWRVYSTGSNVFQTRAGCLIGAEHVNNSYECDIPIGAGICASYQTQTNSPRRARSVASQSIIAYTMSLGAENSVAYSNNSIAIPTNFTISVTTEILPVSMTKTSVDCTMYICGDSTECSNLLLQYGSFCTQLNRALTGIAVEQDKNTQEVFAQVKQIYKTPPIKDFGGFNFSQILPDPSKPSKRSFIEDLLFNKVTLADAGFIKQYGDCLGDIAARDLICAQKFNGLTVLPPLLTDEMIAQYTSALLAGTITSGWTFGAGAALQIPFAMQMAYRFNGIGVTQNVLYENQKLIANQFNSAIGKIQDSLSSTASALGKLQDVVNQNAQALNTLVKQLSSNFGAISSVLNDILSRLDPPEAEVQIDRLITGRLQSLQTYVTQQLIRAAEIRASANLAATKMSECVLGQSKRVDFCGKGYQLMSFPQSAPHGVVFLNVTYVPAQEKNFTTAPAICNDGKAHFPREGVFVSNGTNWFVTQRNFYEPQIITTDNTFVSGNCDVVIGIVNNTVYDPLQPELDSGGGSGGGQIYEGKLTAEGLRFGIVASRFNHALVDRLVEGAIDAIVRHGGREEDITLVRVPGSWEIPVAAGELARKEDIDAVIAIGVLIRGATPHFDYIASEVSKGLADLSLELRKPITFGVITADTLEQAIERAGTKHGNKGWEAALSAIEMANLFKSLR

SEQ ID NO: 7972 - protein, 1307 aa, Artificial Sequence
  SARS-CoV-2/USA/UT-00033/2020__EPI_ISL_417976 spike protein (1-1147)(K986P_V987P_ H1048Q_H1064N_ H1083N_H1101N) LumSynth construct
MFVFLVLLPLVSSQCVNLTTRTQLPPAYTNSFTRGVYYPDKVFRSSVLHSTQDLFLPFFSNVTWFHAIHVSGTNGTKRFDNPVLPFNDGVYFASTEKSNIIRGWIFGTTLDSKTQSLLIVNNATNVVIKVCEFQFCNDPFLGVYYHKNNKSWMESEFRVYSSANNCTFEYVSQPFLMDLEGKQGNFKNLREFVFKNIDGYFKIYSKHTPINLVRDLPQGFSALEPLVDLPIGINITRFQTLLALHRSYLTPGDSSSGLTAGAAAYYVGYLQPRTFLLKYNENGTITDAVDCALDPLSETKCTLKSFTVEKGIYQTSNFRVQPTESIVRFPNITNLCPFGEVFNATRFASVYAWNRKRISNCVADYSVLYNSASFSTFKCYGVSPTKLNDLCFTNVYADSFVIRGDEVRQIAPGQTGKIADYNYKLPDDFTGCVIAWNSNNLDSKVGGNYNYLYRLFRKSNLKPFERDISTEIYQAGSTPCNGVEGFNCYFPLQSYGFQPTNGVGYQPYRVVVLSFELLHAPATVCGPKKSTNLVKNKCVNFNFNGLTGTGVLTESNKKFLPFQQFGRDIADTTDAVRDPQTLEILDITPCSFGGVSVITPGTNTSNQVAVLYQGVNCTEVPVAIHADQLTPTWRVYSTGSNVFQTRAGCLIGAEHVNNSYECDIPIGAGICASYQTQTNSPRRARSVASQSIIAYTMSLGAENSVAYSNNSIAIPTNFTISVTTEILPVSMTKTSVDCTMYICGDSTECSNLLLQYGSFCTQLNRALTGIAVEQDKNTQEVFAQVKQIYKTPPIKDFGGFNFSQILPDPSKPSKRSFIEDLLFNKVTLADAGFIKQYGDCLGDIAARDLICAQKFNGLTVLPPLLTDEMIAQYTSALLAGTITSGWTFGAGAALQIPFAMQMAYRFNGIGVTQNVLYENQKLIANQFNSAIGKIQDSLSSTASALGKLQDVVNQNAQALNTLVKQLSSNFGAISSVLNDILSRLDPPEAEVQIDRLITGRLQSLQTYVTQQLIRAAEIRASANLAATKMSECVLGQSKRVDFCGKGYQLMSFPQSAPHGVVFLNVTYVPAQEKNFTTAPAICNDGKAHFPREGVFVSNGTNWFVTQRNFYEPQIITTDNTFVSGNCDVVIGIVNNTVYDPLQPELDSGGGSGGGQIYEGKLTAEGLRFGIVASRFNHALVDRLVEGAIDAIVRHGGREEDITLVRVPGSWEIPVAAGELARKEDIDAVIAIGVLIRGATPHFDYIASEVSKGLADLSLELRKPITFGVITADTLEQAIERAGTKHGNKGWEAALSAIEMANLFKSLR

SEQ ID NO: 7973 - protein, 1307 aa, Artificial Sequence
  SARS-CoV-2/USA/WI-13/2020__EPI_ISL_417516 spike protein (1-1147)(K986P_V987P_ H1048Q_H1064N_ H1083N_H1101N) LumSynth construct
MFVFLVLLPLVSSQCVNLTTRTQLPPAYTNSFTRGVYYPDKVFRSSVLHSTQDLFLPFFSNVTWFHAIHVSGTNGTKRFDNPVLPFNDGVYFASTEKSNIIRGWIFGTTLDSKTQSLLIVNNATNVVIKVCEFQFCNDPFLGVYYHKNNKSWMESEFRVYSSANNCTFEYVSQPFLMDLEGKQGNFKNLREFVFKNIDGYFKIYSKHTPINLVRDLPQGFSALEPLVDLPIGINITRFQTLLALHRSYLTPGDSSSGWTAGAAAYYVGYLQPRTFLLKYNENGTITDAVDCALDPLSETKCTLKSFTVEKGIYQTSNFRVLPTESIVRFPNITNLCPFGEVFNATRFASVYAWNRKRISNCVADYSVLYNSASFSTFKCYGVSPTKLNDLCFTNVYADSFVIRGDEVRQIAPGQTGKIADYNYKLPDDFTGCVIAWNSNNLDSKVGGNYNYLYRLFRKSNLKPFERDISTEIYQAGSTPCNGVEGFNCYFPLQSYGFQPTNGVGYQPYRVVVLSFELLHAPATVCGPKKSTNLVKNKCVNFNFNGLTGTGVLTESNKKFLPFQQFGRDIADTTDAVRDPQTLEILDITPCSFGGVSVITPGTNTSNQVAVLYQGVNCTEVPVAIHADQLTPTWRVYSTGSNVFQTRAGCLIGAEHVNNSYECDIPIGAGICASYQTQTNSPRRARSVASQSIIAYTMSLGAENSVAYSNNSIAIPTNFTISVTTEILPVSMTKTSVDCTMYICGDSTECSNLLLQYGSFCTQLNRALTGIAVEQDKNTQEVFAQVKQIYKTPPIKDFGGFNFSQILPDPSKPSKRSFIEDLLFNKVTLADAGFIKQYGDCLGDIAARDLICAQKFNGLTVLPPLLTDEMIAQYTSALLAGTITSGWTFGAGAALQIPFAMQMAYRFNGIGVTQNVLYENQKLIANQFNSAIGKIQDSLSSTASALGKLQDVVNQNAQALNTLVKQLSSNFGAISSVLNDILSRLDPPEAEVQIDRLITGRLQSLQTYVTQQLIRAAEIRASANLAATKMSECVLGQSKRVDFCGKGYQLMSFPQSAPHGVVFLNVTYVPAQEKNFTTAPAICNDGKAHFPREGVFVSNGTNWFVTQRNFYEPQIITTDNTFVSGNCDVVIGIVNNTVYDPLQPELDSGGGSGGGQIYEGKLTAEGLRFGIVASRFNHALVDRLVEGAIDAIVRHGGREEDITLVRVPGSWEIPVAAGELARKEDIDAVIAIGVLIRGATPHFDYIASEVSKGLADLSLELRKPITFGVITADTLEQAIERAGTKHGNKGWEAALSAIEMANLFKSLR

SEQ ID NO: 7974 - protein, 1306 aa, Artificial Sequence
  SARS-CoV-2/India/1-27/2020__EPI_ISL_413522 spike protein (1-1146)(K985P_V986P_ H1047Q_H1063N_ H1082N_H1100N) LumSynth construct
MFVFLVLLPLVSSQCVNLTTRTQLPPAYTNSFTRGVYYPDKVFRSSVLHSTQDLFLPFFSNVTWFHAIHVSGTNGTKRFDNPVLPFNDGVYFASTEKSNIIRGWIFGTTLDSKTQSLLIVNNATNVVIKVCEFQFCNDPFLGVYHKNNKSWMESEFRVYSSANNCTFEYVSQPFLMDLEGKQGNFKNLREFVFKNIDGYFKIYSKHTPINLVRDLPQGFSALEPLVDLPIGINITRFQTLLALHRSYLTPGDSSSGWTAGAAAYYVGYLQPRTFLLKYNENGTITDAVDCALDPLSETKCTLKSFTVEKGIYQTSNFRVQPTESIVRFPNITNLCPFGEVFNATRFASVYAWNRKRISNCVADYSVLYNSASFSTFKCYGVSPTKLNDLCFTNVYADSFVIRGDEVIQIAPGQTGKIADYNYKLPDDFTGCVIAWNSNNLDSKVGGNYNYLYRLFRKSNLKPFERDISTEIYQAGSTPCNGVEGFNCYFPLQSYGFQPTNGVGYQPYRVVVLSFELLHAPATVCGPKKSTNLVKNKCVNFNFNGLTGTGVLTESNKKFLPFQQFGRDIADTTDAVRDPQTLEILDITPCSFGGVSVITPGTNTSNQVAVLYQDVNCTEVPVAIHADQLTPTWRVYSTGSNVFQTRAGCLIGAEHVNNSYECDIPIGAGICASYQTQTNSPRRARSVASQSIIAYTMSLGAENSVAYSNNSIAIPTNFTISVTTEILPVSMTKTSVDCTMYICGDSTECSNLLLQYGSFCTQLNRALTGIAVEQDKNTQEVFAQVKQIYKTPPIKDFGGFNFSQILPDPSKPSKRSFIEDLLFNKVTLADAGFIKQYGDCLGDIAARDLICAQKFNGLTVLPPLLTDEMIAQYTSALLAGTITSGWTFGAGAALQIPFAMQMAYRFNGIGVTQNVLYENQKLIANQFNSAIGKIQDSLSSTASALGKLQDVVNQNAQALNTLVKQLSSNFGAISSVLNDILSRLDPPEAEVQIDRLITGRLQSLQTYVTQQLIRAAEIRASANLAATKMSECVLGQSKRVDFCGKGYQLMSFPQSAPHGVVFLNVTYVPAQEKNFTTAPAICNDGKAHFPREGVFVSNGTNWFVTQRNFYEPQIITTDNTFVSGNCDVVIGIVNNTVYDPLQPELDSGGGSGGGQIYEGKLTAEGLRFGIVASRFNHALVDRLVEGAIDAIVRHGGREEDITLVRVPGSWEIPVAAGELARKEDIDAVIAIGVLIRGATPHFDYIASEVSKGLADLSLELRKPITFGVITADTLEQAIERAGTKHGNKGWEAALSAIEMANLFKSLR

SEQ ID NO: 7975 - protein, 1301 aa, Artificial Sequence
  SARS-CoV-2/pangolin/Guangxi/P4L/2017__EPI_ISL_410538 spike protein (1-1141)(K980P_V981P_ H1042Q_H1058N_ H1077N_H1095N) LumSynth construct
MFVFLFVLPLVSSQCVNLTTRTGIPPGYTNSSTRGVYYPDKVFRSSILHLTQDLFLPFFSNVTWFNTINYQGGFKKFDNPVLPFNDGVYFASTEKSNIIRGWIFGTTLDARTQSLLIVNNATNVVIKVCEFQFCTDPFLGVYYHNNNKTWVENEFRVYSSANNCTFEYISQPFLMDLEGKQGNFKNLREFVFKNVDGYFKIYSKHTPIDLVRDLPRGFAALEPLVDLPIGINITRFQTLLALHRSYLTPGNLESGWTTGAAAYYVGYLQQRTFLLSYNQNGTITDAVDCSLDPLSETKCTLKSLTVEKGIYQTSNFRVQPTISIVRFPNITNLCPFGEVFNASKFASVYAWNRKRISNCVADYSVLYNSTSFSTFKCYGVSPTKLNDLCFTNVYADSFVVKGDEVRQIAPGQTGVIADYNYKLPDDFTGCVIAWNSVKQDALTGGNYGYLYRLFRKSKLKPFERDISTEIYQAGSTPCNGQVGLNCYYPLERYGFHPTTGVNYQPFRVVVLSFELLNGPATVCGPKLSTTLVKDKCVNFNFNGLTGTGVLTTSKKQFLPFQQFGRDISDTTDAVRDPQTLEILDITPCSFGGVSVITPGTNTSNQVAVLYQDVNCTEVPMAIHAEQLTPAWRVYSAGANVFQTRAGCLVGAEHVNNSYECDIPVGAGICASYHSMSSLRSVNQRSIIAYTMSLGAENSVAYSNNSIAIPTNFTISVTTEILPVSMTKTSVDCTMYICGDSIECSNLLLQYGSFCTQLNRALTGIAVEQDKNTQEVFAQVKQIYKTPPIKDFGGFNFSQILPDPSKPSKRSFIEDLLFNKVTLADAGFIKQYGDCLGDIAARDLICAQKFNGLTVLPPLLTDEMIAQYTSALLAGTITSGWTFGAGAALQIPFAMQMAYRFNGIGVTQNVLYENQKLIANQFNSAIGKIQDSLSSTASALGKLQDVVNQNAQALNTLVKQLSSNFGAISSVLNDILSRLDPPEAEVQIDRLITGRLQSLQTYVTQQLIRAAEIRASANLAATKMSECVLGQSKRVDFCGKGYQLMSFPQSAPHGVVFLNVTYVPAQEKNFTTAPAICNEGKAHFPREGVFVSNGTNWFITQRNFYEPQIITTDNTFVSGSCDVVIGIVNNTVYDPLQPELDSGGGSGGGQIYEGKLTAEGLRFGIVASRFNHALVDRLVEGAIDAIVRHGGREEDITLVRVPGSWEIPVAAGELARKEDIDAVIAIGVLIRGATPHFDYIASEVSKGLADLSLELRKPITFGVITADTLEQAIERAGTKHGNKGWEAALSAIEMANLFKSLR

SEQ ID NO: 7976 - protein, 1301 aa, Artificial Sequence
  SARS-CoV-2/pangolin/Guangxi/P5L/2017__EPI_ISL_410540 spike protein (1-1141)(K980P_V981P_ H1042Q_H1058N_ H1077N_H1095N) LumSynth construct
MFVFLFVLPLVSSQCVNLTTRTGIPPGYTNSSTRGVYYPDKVFRSSILHLTQDLFLPFFSNVTWFNTINYQGGFKKFDNPVLPFNDGVYFASTEKSNIIRGWIFGTTLDARTQSLLIVNNATNVVIKVCEFQFCTDPFLGVYYHNNNKTWVENEFRVYSSANNCTFEYISQPFLMDLEGKQGNFKNLREFVFKNVDGYFKIYSKHTPIDLVRDLPRGFAALEPLVDLPIGINITRFQTLLALHRSYLTPGKLESGWTTGAAAYYVGYLQQRTFLLSYNQNGTITDAVDCSLDPLSETKCTLKSLTVEKGIYQTSNFRVQPTISIVRFPNITNLCPFGEVFNASKFASVYAWNRKRISNCVADYSVLYNSTSFSTFKCYGVSPTKLNDLCFTNVYADSFVVKGDEVRQIAPGQTGVIADYNYKLPDDFTGCVIAWNSVKQDALTGGNYGYLYRLFRKSKLKPFERDISTEIYQAGSTPCNGQVGLNCYYPLERYGFHPTTGVNYQPFRVVVLSFELLNGPATVCGPKLSTTLVKDKCVNFNFNGLTGTGVLTTSKKQFLPFQQFGRDISDTTDAVRDPQTLEILDITPCSFGGVSVITPGTNTSNQVAVLYQDVNCTEVPMAIHAEQLTPAWRVYSAGANVFQTRAGCLVGAEHVNNSYECDIPVGAGICASYHSMSSFRSVNQRSIIAYTMSLGAENSVAYSNNSIAIPTNFTISVTTEILPVSMTKTSVDCTMYICGDSIECSNLLLQYGSFCTQLNRALTGIAVEQDKNTQEVFAQVKQIYKTPPIKDFGGFNFSQILPDPSKPSKRSFIEDLLFNKVTLADAGFIKQYGDCLGDIAARDLICAQKFNGLTVLPPLLTDEMIAQYTSALLAGTITSGWTFGAGAALQIPFAMQMAYRFNGIGVTQNVLYENQKLIANQFNSAIGKIQDSLSSTASALGKLQDVVNQNAQALNTLVKQLSSNFGAISSVLNDILSRLDPPEAEVQIDRLITGRLQSLQTYVTQQLIRAAEIRASANLAATKMSECVLGQSKRVDFCGKGYQLMSFPQSAPHGVVFLNVTYVPAQEKNFTTAPAICNEGKAHFPREGVFVSNGTNWFITQRNFYEPQIITTDNTFVSGSCDVVIGIVNNTVYDPLQPELDSGGGSGGGQIYEGKLTAEGLRFGIVASRFNHALVDRLVEGAIDAIVRHGGREEDITLVRVPGSWEIPVAAGELARKEDIDAVIAIGVLIRGATPHFDYIASEVSKGLADLSLELRKPITFGVITADTLEQAIERAGTKHGNKGWEAALSAIEMANLFKSLR

SEQ ID NO: 7977 - protein, 1301 aa, Artificial Sequence
  SARS-CoV-2/pangolin/Guangxi/P5E/2017__EPI_ISL_410541 spike protein (1-1141)(K980P_V981P_ H1042Q_H1058N_ H1077N_H1095N) LumSynth construct
MFVFLFVLPLVSSQCVNLTTRTGIPPGYTNSSTRGVYYPDKVFRSSILHLTQDLFLPFFSNVTWFNTITYQGGSKKFDNPVLPFNDGVYFASTEKSNIIRGWIFGTTLDARTQSLLIVNNATNVVIKVCEFQFCTDPFLGVYYHNNNKTWVENEFRVYSSANNCTFEYISQPFLMDLEGKQGNFKNLREFVFKNVDGYFKIYSKHTPIDLVRDLPRGFAALEPLVDLPIGINITRFQTLLALHRSYLTPGKLESGWTTGAAAYYVGYLQQRTFLLSYNQNGTITDAVDCSLDPLSETKCTLKSLTVEKGIYQTSNFRVQPTISIVRFPNITNLCPFGEVFNASKFASVYAWNRKRISNCVADYSVLYNSTSFSTFKCYGVSPTKLNDLCFTNVYADSFVVKGDEVRQIAPGQTGVIADYNYKLPDDFTGCVIAWNSVKQDALTGDNYGYLYRLFRKSKLKPFERDISTEIYQAGSTPCNGQVGLNCYYPLERYGFHPTTGVNYQPFRVVVLSFELLNGPATVCGPKLSTTLVKDKCVNFNFNGLTGTGVLTTSKKQFLPFQQFGRDISDTTDAVRDPQTLEILDITPCSFGGVSVITPGTNTSNQVAVLYQDVNCTEVPMAIHAEQLTPAWRVYSAGANVFQTRAGCLVGAEHVNNSYECDIPVGAGICASYHSMSSFRSVNQRSIIAYTMSLGAENSVAYSNNSIAIPTNFTISVTTEILPVSMTKTSVDCTMYICGDSIECSNLLLQYGSFCTQLNRALTGIAVEQDKNTQEVFAQVKQIYKTPPIKDFGGFNFSQILPDPSKPSKRSFIEDLLFNKVTLADAGFIKQYGDCLGDIAARDLICAQKFNGLTVLPPLLTDEMIAQYTSALLAGTITSGWTFGAGAALQIPFAMQMAYRFNGIGVTQNVLYENQKLIANQFNSAIGKIQDSLSSTASALGKLQDVVNQNAQALNTLVKQLSSNFGAISSVLNDILSRLDPPEAEVQIDRLITGRLQSLQTYVTQQLIRAAEIRASANLAATKMSECVLGQSKRVDFCGKGYQLMSFPQSAPHGVVFLNVTYVPAQEKNFTTAPAICNEGKAHFPREGVFVSNGTNWFITQRNFYEPQIITTDNTFVSGSCDVVIGIVNNTVYDPLQPELDSGGGSGGGQIYEGKLTAEGLRFGIVASRFNHALVDRLVEGAIDAIVRHGGREEDITLVRVPGSWEIPVAAGELARKEDIDAVIAIGVLIRGATPHFDYIASEVSKGLADLSLELRKPITFGVITADTLEQAIERAGTKHGNKGWEAALSAIEMANLFKSLR

SEQ ID NO: 7978 - protein, 1299 aa, Artificial Sequence
  SARS-CoV-2/pangolin/Guangxi/P1E/2017__EPI_ISL_410539 spike protein (1-1139)(K978P_V979P_ H1040Q_H1056N_ H1075N_H1093N) LumSynth construct
MFVFLFVLPLVSSQCVNLTTRTGIQPGYTNSSTRGVYYPDKVFRSSILHLTQDLFLPFFSNVTWFNTINYQGGFKKFDNPVLPFNDGVYFASTEKSNIIRGWIFGTTLDARTQSLLIVNNATNVVIKVCEFQFCTDPFLGVYYHNNNKTWVENEFRVYSSANNCTFEYISQPFLMDLEGKQGNFKNLREFVFKNVDGYFKIYSKHTPIDLVRDLPRGFAALEPLVDLPIGINITRFQTLLALHRSYLTPGKLESGWTTGAAAYYVGYLQQRTFLLSYNQNGTITDAVDCSLDPLSETKCTLKSLTVEKGIYQTSNFRVQPTISIVRFPNITNLCPFGEVFNASKFASVYAWNRKRISNCVADYSVLYNSTSFSTFKCYGVSPTKLNDLCFTNVYADSFVVKGDEVRQIAPGQTGVIADYNYKLPDDFTGCVIAWNSVKQDALTGGNYLYRLFRKSKLKPFERDISTEIYQAGSTPCNGQVGLNCYYPLERYGFHPTTGVNYQPFRVVVLSFELLNGPATVCGPKLSTTLVKDKCVNFNFNGLTGTGVLTTSKKQFLPFQQFGRDISDTTDAVRDPQTLEILDITPCSFGGVSVITPGTNTSNQVAVLYQDVNCTEVPMAIHAEQLTPAWRVYSAGANVFQTRAGCLVGAEHVNNSYECDIPVGAGICASYHSMSSLRSVNQRSIIAYTMSLGAENSVAYSNNSIAIPTNFTISVTTEILPVSMTKTSVDCTMYICGDSIECSNLLLQYGSFCTQLNRALTGIAVEQDKNTQEVFAQVKQIYKTPPIKDFGGFNFSQILPDPSKPSKRSFIEDLLFNKVTLADAGFIKQYGDCLGDIAARDLICAQKFNGLTVLPPLLTDEMIAQYTSALLAGTITSGWTFGAGAALQIPFAMQMAYRFNGIGVTQNVLYENQKLIANQFNSAIGKIQDSLSSTASALGKLQDVVNQNAQALNTLVKQLSSNFGAISSVLNDILSRLDPPEAEVQIDRLITGRLQSLQTYVTQQLIRAAEIRASANLAATKMSECVLGQSKRVDFCGKGYQLMSFPQSAPHGVVFLNVTYVPAQEKNFTTAPAICNEGKAHFPREGVFVSNGTNWFITQRNFYEPQIITTDNTFVSGSCDVVIGIVNNTVYDPLQPELDSGGGSGGGQIYEGKLTAEGLRFGIVASRFNHALVDRLVEGAIDAIVRHGGREEDITLVRVPGSWEIPVAAGELARKEDIDAVIAIGVLIRGATPHFDYIASEVSKGLADLSLELRKPITFGVITADTLEQAIERAGTKHGNKGWEAALSAIEMANLFKSLR

SEQ ID NO: 7979 - protein, 1307 aa, Artificial Sequence
  SARS-CoV-2/Wuhan/WIV05/2019__EPI_ISL_402128 spike protein (1-1147)(I712C_T1077C) LumSynth construct
MFVFLVLLPLVSSQCVNLTTRTQLPPAYTNSFTRGVYYPDKVFRSSVLHSTQDLFLPFFSNVTWFHAIHVSGTNGTKRFDNPVLPFNDGVYFASTEKSNIIRGWIFGTTLDSKTQSLLIVNNATNVVIKVCEFQFCNDPFLGVYYHKNNKSWMESEFRVYSSANNCTFEYVSQPFLMDLEGKQGNFKNLREFVFKNIDGYFKIYSKHTPINLVRDLPQGFSALEPLVDLPIGINITRFQTLLALHRSYLTPGDSSSGWTAGAAAYYVGYLQPRTFLLKYNENGTITDAVDCALDPLSETKCTLKSFTVEKGIYQTSNFRVQPTESIVRFPNITNLCPFGEVFNATRFASVYAWNRKRISNCVADYSVLYNSASFSTFKCYGVSPTKLNDLCFTNVYADSFVIRGDEVRQIAPGQTGKIADYNYKLPDDFTGCVIAWNSNNLDSKVGGNYNYLYRLFRKSNLKPFERDISTEIYQAGSTPCNGVEGFNCYFPLQSYGFQPTNGVGYQPYRVVVLSFELLHAPATVCGPKKSTNLVKNKCVNFNFNGLTGTGVLTESNKKFLPFQQFGRDIADTTDAVRDPQTLEILDITPCSFGGVSVITPGTNTSNQVAVLYQDVNCTEVPVAIHADQLTPTWRVYSTGSNVFQTRAGCLIGAEHVNNSYECDIPIGAGICASYQTQTNSPRRARSVASQSIIAYTMSLGAENSVAYSNNSCAIPTNFTISVTTEILPVSMTKTSVDCTMYICGDSTECSNLLLQYGSFCTQLNRALTGIAVEQDKNTQEVFAQVKQIYKTPPIKDFGGFNFSQILPDPSKPSKRSFIEDLLFNKVTLADAGFIKQYGDCLGDIAARDLICAQKFNGLTVLPPLLTDEMIAQYTSALLAGTITSGWTFGAGAALQIPFAMQMAYRFNGIGVTQNVLYENQKLIANQFNSAIGKIQDSLSSTASALGKLQDVVNQNAQALNTLVKQLSSNFGAISSVLNDILSRLDKVEAEVQIDRLITGRLQSLQTYVTQQLIRAAEIRASANLAATKMSECVLGQSKRVDFCGKGYHLMSFPQSAPHGVVFLHVTYVPAQEKNFTCAPAICHDGKAHFPREGVFVSNGTHWFVTQRNFYEPQIITTDNTFVSGNCDVVIGIVNNTVYDPLQPELDSGGGSGGGQIYEGKLTAEGLRFGIVASRFNHALVDRLVEGAIDAIVRHGGREEDITLVRVPGSWEIPVAAGELARKEDIDAVIAIGVLIRGATPHFDYIASEVSKGLADLSLELRKPITFGVITADTLEQAIERAGTKHGNKGWEAALSAIEMANLFKSLR

SEQ ID NO: 7980 - protein, 1303 aa, Artificial Sequence
  SARS-CoV-2/bat/Yunnan/RaTG13/2013__EPI_ISL_402131 spike protein (1-1143)(I708C_T1073C) LumSynth construct
MFVFLVLLPLVSSQCVNLTTRTQLPPAYTNSSTRGVYYPDKVFRSSVLHLTQDLFLPFFSNVTWFHAIHVSGTNGIKRFDNPVLPFNDGVYFASTEKSNIIRGWIFGTTLDSKTQSLLIVNNATNVVIKVCEFQFCNDPFLGVYYHKNNKSWMESEFRVYSSANNCTFEYVSQPFLMDLEGKQGNFKNLREFVFKNIDGYFKIYSKHTPINLVRDLPPGFSALEPLVDLPIGINITRFQTLLALHRSYLTPGDSSSGWTAGAAAYYVGYLQPRTFLLKYNENGTITDAVDCALDPLSETKCTLKSFTVEKGIYQTSNFRVQPTDSIVRFPNITNLCPFGEVFNATTFASVYAWNRKRISNCVADYSVLYNSTSFSTFKCYGVSPTKLNDLCFTNVYADSFVITGDEVRQIAPGQTGKIADYNYKLPDDFTGCVIAWNSKHIDAKEGGNFNYLYRLFRKANLKPFERDISTEIYQAGSKPCNGQTGLNCYYPLYRYGFYPTDGVGHQPYRVVVLSFELLNAPATVCGPKKSTNLVKNKCVNFNFNGLTGTGVLTESNKKFLPFQQFGRDIADTTDAVRDPQTLEILDITPCSFGGVSVITPGTNASNQVAVLYQDVNCTEVPVAIHADQLTPTWRVYSTGSNVFQTRAGCLIGAEHVNNSYECDIPIGAGICASYQTQTNSRSVASQSIIAYTMSLGAENSVAYSNNSCAIPTNFTISVTTEILPVSMTKTSVDCTMYICGDSTECSNLLLQYGSFCTQLNRALTGIAVEQDKNTQEVFAQVKQIYKTPPIKDFGGFNFSQILPDPSKPSKRSFIEDLLFNKVTLADAGFIKQYGDCLGDIAARDLICAQKFNGLTVLPPLLTDEMIAQYTSALLAGTITSGWTFGAGAALQIPFAMQMAYRFNGIGVTQNVLYENQKLIANQFNSAIGKIQDSLSSTASALGKLQDVVNQNAQALNTLVKQLSSNFGAISSVLNDILSRLDKVEAEVQIDRLITGRLQSLQTYVTQQLIRAAEIRASANLAATKMSECVLGQSKRVDFCGKGYHLMSFPQSAPHGVVFLHVTYVPAQEKNFTCAPAICHDGKAHFPREGVFVSNGTHWFVTQRNFYEPQIITTDNTFVSGSCDVVIGIVNNTVYDPLQPELDSGGGSGGGQIYEGKLTAEGLRFGIVASRFNHALVDRLVEGAIDAIVRHGGREEDITLVRVPGSWEIPVAAGELARKEDIDAVIAIGVLIRGATPHFDYIASEVSKGLADLSLELRKPITFGVITADTLEQAIERAGTKHGNKGWEAALSAIEMANLFKSLR

SEQ ID NO: 7981 - protein, 1307 aa, Artificial Sequence
  SARS-CoV-2/Wuhan/HBCDC-HB-01/2019__EPI_ISL_402132 spike protein (1-1147)(I712C_T1077C) LumSynth construct
MFVFLVLLPLVSSQCVNLTTRTQLPPAYTNSITRGVYYPDKVFRSSVLHSTQDLFLPFFSNVTWFHAIHVSGTNGTKRFDNPVLPFNDGVYFASTEKSNIIRGWIFGTTLDSKTQSLLIVNNATNVVIKVCEFQFCNDPFLGVYYHKNNKSWMESEFRVYSSANNCTFEYVSQPFLMDLEGKQGNFKNLREFVFKNIDGYFKIYSKHTPINLVRDLPQGFSALEPLVDLPIGINITRFQTLLALHRSYLTPGDSSSGWTAGAAAYYVGYLQPRTFLLKYNENGTITDAVDCALDPLSETKCTLKSFTVEKGIYQTSNFRVQPTESIVRFPNITNLCPFGEVFNATRFASVYAWNRKRISNCVADYSVLYNSASFSTFKCYGVSPTKLNDLCFTNVYADSFVIRGDEVRQIAPGQTGKIADYNYKLPDDFTGCVIAWNSNNLDSKVGGNYNYLYRLFRKSNLKPFERDISTEIYQAGSTPCNGVEGFNCYFPLQSYGFQPTNGVGYQPYRVVVLSFELLHAPATVCGPKKSTNLVKNKCVNFNFNGLTGTGVLTESNKKFLPFQQFGRDIADTTDAVRDPQTLEILDITPCSFGGVSVITPGTNTSNQVAVLYQDVNCTEVPVAIHADQLTPTWRVYSTGSNVFQTRAGCLIGAEHVNNSYECDIPIGAGICASYQTQTNSPRRARSVASQSIIAYTMSLGAENSVAYSNNSCAIPTNFTISVTTEILPVSMTKTSVDCTMYICGDSTECSNLLLQYGSFCTQLNRALTGIAVEQDKNTQEVFAQVKQIYKTPPIKDFGGFNFSQILPDPSKPSKRSFIEDLLFNKVTLADAGFIKQYGDCLGDIAARDLICAQKFNGLTVLPPLLTDEMIAQYTSALLAGTITSGWTFGAGAALQIPFAMQMAYRFNGIGVTQNVLYENQKLIANQFNSAIGKIQDSLSSTASALGKLQDVVNQNAQALNTLVKQLSSNFGAISSVLNDILSRLDKVEAEVQIDRLITGRLQSLQTYVTQQLIRAAEIRASANLAATKMSECVLGQSKRVDFCGKGYHLMSFPQSAPHGVVFLHVTYVPAQEKNFTCAPAICHDGKAHFPREGVFVSNGTHWFVTQRNFYEPQIITTDNTFVSGNCDVVIGIVNNTVYDPLQPELDSGGGSGGGQIYEGKLTAEGLRFGIVASRFNHALVDRLVEGAIDAIVRHGGREEDITLVRVPGSWEIPVAAGELARKEDIDAVIAIGVLIRGATPHFDYIASEVSKGLADLSLELRKPITFGVITADTLEQAIERAGTKHGNKGWEAALSAIEMANLFKSLR

SEQ ID NO: 7982 - protein, 1307 aa, Artificial Sequence
  SARS-CoV-2/Guangdong/20SF028/2020__EPI_ISL_403936 spike protein (1-1147)(I712C_T1077C) LumSynth construct
MFVFLVLLPLVSSQCVNLTTRTQLPPAYTNSFTRGVYYPDKVFRSSVLYSTQDLFLPFFSNVTWFHAIHVSGTNGTKRFDNPVLPFNDGVYFASTEKSNIIRGWIFGTTLDSKTQSLLIVNNATNVVIKVCEFQFCNDPFLGVYYHKNNKSWMESEFRVYSSANNCTFEYVSQPFLMDLEGKQGNFKNLREFVFKNIDGYFKIYSKHTPINLVRDLPQGFSALEPLVDLPIGINITRFQTLLALHRSYLTPGDSSSGWTAGAAAYYVGYLQPRTFLLKYNENGTITDAVDCALDPLSETKCTLKSFTVEKGIYQTSNFRVQPTESIVRFPNITNLCPFGEVFNATRFASVYAWNRKRISNCVADYSVLYNSASFSTFKCYGVSPTKLNDLCFTNVYADSFVIRGDEVRQIAPGQTGKIADYNYKLPDDFTGCVIAWNSNNLDSKVGGNYNYLYRLFRKSNLKPFERDISTEIYQAGSTPCNGVEGFNCYFPLQSYGFQPTNGVGYQPYRVVVLSFELLHAPATVCGPKKSTNLVKNKCVNFNFNGLTGTGVLTESNKKFLPFQQFGRDIADTTDAVRDPQTLEILDITPCSFGGVSVITPGTNTSNQVAVLYQDVNCTEVPVAIHADQLTPTWRVYSTGSNVFQTRAGCLIGAEHVNNSYECDIPIGAGICASYQTQTNSPRRARSVASQSIIAYTMSLGAENSVAYSNNSCAIPTNFTISVTTEILPVSMTKTSVDCTMYICGDSTECSNLLLQYGSFCTQLNRALTGIAVEQDKNTQEVFAQVKQIYKTPPIKDFGGFNFSQILPDPSKPSKRSFIEDLLFNKVTLADAGFIKQYGDCLGDIAARDLICAQKFNGLTVLPPLLTDEMIAQYTSALLAGTITSGWTFGAGAALQIPFAMQMAYRFNGIGVTQNVLYENQKLIANQFNSAIGKIQDSLSSTASALGKLQDVVNQNAQALNTLVKQLSSNFGAISSVLNDILSRLDKVEAEVQIDRLITGRLQSLQTYVTQQLIRAAEIRASANLAATKMSECVLGQSKRVDFCGKGYHLMSFPQSAPHGVVFLHVTYVPAQEKNFTCAPAICHDGKAHFPREGVFVSNGTHWFVTQRNFYEPQIITTDNTFVSGNCDVVIGIVNNTVYDPLQPELDSGGGSGGGQIYEGKLTAEGLRFGIVASRFNHALVDRLVEGAIDAIVRHGGREEDITLVRVPGSWEIPVAAGELARKEDIDAVIAIGVLIRGATPHFDYIASEVSKGLADLSLELRKPITFGVITADTLEQAIERAGTKHGNKGWEAALSAIEMANLFKSLR

SEQ ID NO: 7983 - protein, 1307 aa, Artificial Sequence
  SARS-CoV-2/Shenzhen/SZTH-001/2020__EPI_ISL_406592 spike protein (1-1147)(I712C_T1077C) LumSynth construct
MFVFLVLLPLVSSQCVNLTTRTQLPPAYTNSFTRGVYYPDKVFRSSVLHSTQDLFLPFFSNVTWFHAIHVSGTNGTKRFDNPVLPFNDGVYFASTEKSNIIRGWIFGTTLDSKTQSLLIVNNATNVVIKVCEFQFCNDPFLGVYYHKNNKSWMESEFRVYSSANNCTFEYVSQPFLMDLEGKQGNFKNLREFVFKNIDGYFKIYSKHTPINLVRDLPQGFSALEPLVDLPIGINITRFQTLLALHRSYLTPGDSSSGWTAGAAAYYVGYLQPRTFLLKYNENGTITDAVDCALDPLSETKCTLKSFTVEKGIYQTSNFRVQPTESIVRFPNITNLCPFGEVFNATRFASVYAWNRKRISNCVADYSVLYNSASFSTFKCYGVSPTKLNDLCFTNVYADSFVIRGDEVRQIAPGQTGKIADYNYKLPDDFTGCVIAWNSNNLDSKVGGNYNYLYRLFRKSNLKPFERDISTEIYQAGSTPCNGVEGFNCYFPLQSYGFQPTNGVGYQPYRVVVLSFELLHAPATVCGPKKSTNLVKNKCVNFNFNGLTGTGVLTESNKKFLPFQQFGRDIADTTDAVRDPQTLEILDITPCSFGGVSVITPGTNTSNQVAVLYQDVNCTEVPVAIHADQLTPTWRVYSTGSNVFQTRAGCLIGAEHVNNSYECDIPIGAGICASYQTQTNSPRRARSVASQSIIAYTMSLGAENSVAYSNNSCAIPTNFTISVTTEILPVSMTKTSVDCTMYICGDSTECSNLLLQYGSFCTQLNRALTGIAVEQDKNTQEVFAQVKQIYKTPPIKDFGGFNFSQILPDPSKPSKRSFIEDLLFNKVTLADAGFIKQYGDCLGDIAARDLICAQKFNGLTVLPPLLTDEMIAQYTSALLAGTITSGWTFGAGAALQIPFAMQMAYRFNGIGVTQNVLYENQKLIANQFNSAIGKIQDSLSSTASALGKLQDVVNQNAQALNTLVKQLSSNFGAISSVLNDILSRLDKVEAEVQIDRLITGRLQSLQTYVTQQLIRAAEIRASANLAATKMSECVLGQSKRVDFCGKGYHLMSFPQSAPHGVVFLHVTYVPAQEKNFTCAPAICHDGKAHFPREGVFVSNGTHWFVTQRNFYEPQIITTDNTFVSGNCDVLIGIVNNTVYDPLQPELDSGGGSGGGQIYEGKLTAEGLRFGIVASRFNHALVDRLVEGAIDAIVRHGGREEDITLVRVPGSWEIPVAAGELARKEDIDAVIAIGVLIRGATPHFDYIASEVSKGLADLSLELRKPITFGVITADTLEQAIERAGTKHGNKGWEAALSAIEMANLFKSLR

SEQ ID NO: 7984 - protein, 1307 aa, Artificial Sequence
  SARS-CoV-2/Shenzhen/SZTH-004/2020__EPI_ISL_406595 spike protein (1-1147)(I712C_T1077C) LumSynth construct
MFVFLVLLPLVSSQCVNLTTRTQLPPAYTNSFTRGVYYPDKVFRSSVLHSTQDLFLPFFSNVTWFHAIHVSGTNGTKRFDNPVLPFNDGVYFASTEKSNIIRGWIFGTTLDSKTQSLLIVNNATNVVIKVCEFQFCNDPFLGVYYHKNNKSWMESEFRVYSSANNCTFEYVSQPFLMDLEGKQGNFKNLREFVFKNIDGYFKIYSKHTPINLVRDLPQGFSALEPLVDLPIGINITRFQTLLALHRSYLTPGDSSSGWTAGAAAYYVGYLQPRTFLLKYNENGTITDAVDCALDPLSETKCTLKSFTVEKGIYQTSNFRVQPTESIVRFPNITNLCPFGEVFNATRFASVYAWDRKRISNCVAYYSVLYNSASFSTFKCYGVSPTKLNDLCFTNVYADSFVIRGDEVRQIAPGQTGKIADYNYKLPDDFTGCVIAWNSNNLDSKVGGNYNYLYRLFRKSNLKPFERDISTEIYQAGSTPCNGVEGFNCYFPLQSYGFQPTNGVGYQPYRVVVLSFELLHAPATVCGPKKSTNLVKNKCVNFNFNGLTGTGVLTESNKKFLPFQQFGRDIADTTDAVRDPQTLEILDITPCSFGGVSVITPGTNTSNQVAVLYQDVNCTEVPVAIHADQLTPTWRVYSTGSNVFQTRAGCLIGAEHVNNSYECDIPIGAGICASYQTQTNSPRRARSVASQSIIAYTMSLGAENSVAYSNNSCAIPTNFTISVTTEILPVSMTKTSVDCTMYICGDSTECSNLLLQYGSFCTQLNRALTGIAVEQDKNTQEVFAQVKQIYKTPPIKDFGGFNFSQILPDPSKPSKRSFIEDLLFNKVTLADAGFIKQYGDCLGDIAARDLICAQKFNGLTVLPPLLTDEMIAQYTSALLAGTITSGWTFGAGAALQIPFAMQMAYRFNGIGVTQNVLYENQKLIANQFNSAIGKIQDSLSSTASALGKLQDVVNQNAQALNTLVKQLSSNFGAISSVLNDILSRLDKVEAEVQIDRLITGRLQSLQTYVTQQLIRAAEIRASANLAATKMSECVLGQSKRVDFCGKGYHLMSFPQSAPHGVVFLHVTYVPAQEKNFTCAPAICHDGKAHFPREGVFVSNGTHWFVTQRNFYEPQIITTDNTFVSGNCDVVIGIVNNTVYDPLQPELDSGGGSGGGQIYEGKLTAEGLRFGIVASRFNHALVDRLVEGAIDAIVRHGGREEDITLVRVPGSWEIPVAAGELARKEDIDAVIAIGVLIRGATPHFDYIASEVSKGLADLSLELRKPITFGVITADTLEQAIERAGTKHGNKGWEAALSAIEMANLFKSLR

SEQ ID NO: 7985 - protein, 1307 aa, Artificial Sequence
  SARS-CoV-2/France/IDF0372/2020__EPI_ISL_406596 spike protein (1-1147)(I712C_T1077C) LumSynth construct
MFVFLVLLPLVSSQCVNLTTRTQLPPAYTNSFTRGVYYPDKVFRSSVLHSTQDLFLPFFSNVTWFHAIHVSGTNGTKRFDNPVLPFNDGVYFASTEKSNIIRGWIFGTTLDSKTQSLLIVNNATNVVIKVCEFQFCNDPFLGVYYHKNNKSWMESEFRVYSSANNCTFEYVSQPFLMDLEGKQGNFKNLREFVFKNIDGYFKIYSKHTPINLVRDLPQGFSALEPLVDLPIGINITRFQTLLALHRSYLTPGDSSSGWTAGAAAYYVGYLQPRTFLLKYNENGTITDAVDCALDPLSETKCTLKSFTVEKGIYQTSNFRVQPTESIVRFPNITNLCPFGEVFNATRFASVYAWNRKRISNCVADYSFLYNSASFSTFKCYGVSPTKLNDLCFTNVYADSFVIRGDEVRQIAPGQTGKIADYNYKLPDDFTGCVIAWNSNNLDSKVGGNYNYLYRLFRKSNLKPFERDISTEIYQAGSTPCNGVEGFNCYFPLQSYGFQPTNGVGYQPYRVVVLSFELLHAPATVCGPKKSTNLVKNKCVNFNFNGLTGTGVLTESNKKFLPFQQFGRDIADTTDAVRDPQTLEILDITPCSFGGVSVITPGTNTSNQVAVLYQDVNCTEVPVAIHADQLTPTWRVYSTGSNVFQTRAGCLIGAEHVNNSYECDIPIGAGICASYQTQTNSPRRARSVASQSIIAYTMSLGAENSVAYSNNSCAIPTNFTISVTTEILPVSMTKTSVDCTMYICGDSTECSNLLLQYGSFCTQLNRALTGIAVEQDKNTQEVFAQVKQIYKTPPIKDFGGFNFSQILPDPSKPSKRSFIEDLLFNKVTLADAGFIKQYGDCLGDIAARDLICAQKFNGLTVLPPLLTDEMIAQYTSALLAGTITSGWTFGAGAALQIPFAMQMAYRFNGIGVTQNVLYENQKLIANQFNSAIGKIQDSLSSTASALGKLQDVVNQNAQALNTLVKQLSSNFGAISSVLNDILSRLDKVEAEVQIDRLITGRLQSLQTYVTQQLIRAAEIRASANLAATKMSECVLGQSKRVDFCGKGYHLMSFPQSAPHGVVFLHVTYVPAQEKNFTCAPAICHDGKAHFPREGVFVSNGTHWFVTQRNFYEPQIITTDNTFVSGNCDVVIGIVNNTVYDPLQPELDSGGGSGGGQIYEGKLTAEGLRFGIVASRFNHALVDRLVEGAIDAIVRHGGREEDITLVRVPGSWEIPVAAGELARKEDIDAVIAIGVLIRGATPHFDYIASEVSKGLADLSLELRKPITFGVITADTLEQAIERAGTKHGNKGWEAALSAIEMANLFKSLR

SEQ ID NO: 7986 - protein, 1307 aa, Artificial Sequence
  SARS-CoV-2/Australia/VIC01/2020__EPI_ISL_406844 spike protein (1-1147)(I712C_T1077C) LumSynth construct
MFVFLVLLPLVSSQCVNLTTRTQLPPAYTNSFTRGVYYPDKVFRSSVLHSTQDLFLPFFSNVTWFHAIHVSGTNGTKRFDNPVLPFNDGVYFASTEKSNIIRGWIFGTTLDSKTQSLLIVNNATNVVIKVCEFQFCNDPFLGVYYHKNNKSWMESEFRVYSSANNCTFEYVSQPFLMDLEGKQGNFKNLREFVFKNIDGYFKIYSKHTPINLVRDLPQGFSALEPLVDLPIGINITRFQTLLALHRRYLTPGDSSSGWTAGAAAYYVGYLQPRTFLLKYNENGTITDAVDCALDPLSETKCTLKSFTVEKGIYQTSNFRVQPTESIVRFPNITNLCPFGEVFNATRFASVYAWNRKRISNCVADYSVLYNSASFSTFKCYGVSPTKLNDLCFTNVYADSFVIRGDEVRQIAPGQTGKIADYNYKLPDDFTGCVIAWNSNNLDSKVGGNYNYLYRLFRKSNLKPFERDISTEIYQAGSTPCNGVEGFNCYFPLQSYGFQPTNGVGYQPYRVVVLSFELLHAPATVCGPKKSTNLVKNKCVNFNFNGLTGTGVLTESNKKFLPFQQFGRDIADTTDAVRDPQTLEILDITPCSFGGVSVITPGTNTSNQVAVLYQDVNCTEVPVAIHADQLTPTWRVYSTGSNVFQTRAGCLIGAEHVNNSYECDIPIGAGICASYQTQTNSPRRARSVASQSIIAYTMSLGAENSVAYSNNSCAIPTNFTISVTTEILPVSMTKTSVDCTMYICGDSTECSNLLLQYGSFCTQLNRALTGIAVEQDKNTQEVFAQVKQIYKTPPIKDFGGFNFSQILPDPSKPSKRSFIEDLLFNKVTLADAGFIKQYGDCLGDIAARDLICAQKFNGLTVLPPLLTDEMIAQYTSALLAGTITSGWTFGAGAALQIPFAMQMAYRFNGIGVTQNVLYENQKLIANQFNSAIGKIQDSLSSTASALGKLQDVVNQNAQALNTLVKQLSSNFGAISSVLNDILSRLDKVEAEVQIDRLITGRLQSLQTYVTQQLIRAAEIRASANLAATKMSECVLGQSKRVDFCGKGYHLMSFPQSAPHGVVFLHVTYVPAQEKNFTCAPAICHDGKAHFPREGVFVSNGTHWFVTQRNFYEPQIITTDNTFVSGNCDVVIGIVNNTVYDPLQPELDSGGGSGGGQIYEGKLTAEGLRFGIVASRFNHALVDRLVEGAIDAIVRHGGREEDITLVRVPGSWEIPVAAGELARKEDIDAVIAIGVLIRGATPHFDYIASEVSKGLADLSLELRKPITFGVITADTLEQAIERAGTKHGNKGWEAALSAIEMANLFKSLR

SEQ ID NO: 7987 - protein, 1307 aa, Artificial Sequence
  SARS-CoV-2/Germany/BavPat1/2020__EPI_ISL_406862 spike protein (1-1147)(I712C_T1077C) LumSynth construct
MFVFLVLLPLVSSQCVNLTTRTQLPPAYTNSFTRGVYYPDKVFRSSVLHSTQDLFLPFFSNVTWFHAIHVSGTNGTKRFDNPVLPFNDGVYFASTEKSNIIRGWIFGTTLDSKTQSLLIVNNATNVVIKVCEFQFCNDPFLGVYYHKNNKSWMESEFRVYSSANNCTFEYVSQPFLMDLEGKQGNFKNLREFVFKNIDGYFKIYSKHTPINLVRDLPQGFSALEPLVDLPIGINITRFQTLLALHRSYLTPGDSSSGWTAGAAAYYVGYLQPRTFLLKYNENGTITDAVDCALDPLSETKCTLKSFTVEKGIYQTSNFRVQPTESIVRFPNITNLCPFGEVFNATRFASVYAWNRKRISNCVADYSVLYNSASFSTFKCYGVSPTKLNDLCFTNVYADSFVIRGDEVRQIAPGQTGKIADYNYKLPDDFTGCVIAWNSNNLDSKVGGNYNYLYRLFRKSNLKPFERDISTEIYQAGSTPCNGVEGFNCYFPLQSYGFQPTNGVGYQPYRVVVLSFELLHAPATVCGPKKSTNLVKNKCVNFNFNGLTGTGVLTESNKKFLPFQQFGRDIADTTDAVRDPQTLEILDITPCSFGGVSVITPGTNTSNQVAVLYQGVNCTEVPVAIHADQLTPTWRVYSTGSNVFQTRAGCLIGAEHVNNSYECDIPIGAGICASYQTQTNSPRRARSVASQSIIAYTMSLGAENSVAYSNNSCAIPTNFTISVTTEILPVSMTKTSVDCTMYICGDSTECSNLLLQYGSFCTQLNRALTGIAVEQDKNTQEVFAQVKQIYKTPPIKDFGGFNFSQILPDPSKPSKRSFIEDLLFNKVTLADAGFIKQYGDCLGDIAARDLICAQKFNGLTVLPPLLTDEMIAQYTSALLAGTITSGWTFGAGAALQIPFAMQMAYRFNGIGVTQNVLYENQKLIANQFNSAIGKIQDSLSSTASALGKLQDVVNQNAQALNTLVKQLSSNFGAISSVLNDILSRLDKVEAEVQIDRLITGRLQSLQTYVTQQLIRAAEIRASANLAATKMSECVLGQSKRVDFCGKGYHLMSFPQSAPHGVVFLHVTYVPAQEKNFTCAPAICHDGKAHFPREGVFVSNGTHWFVTQRNFYEPQIITTDNTFVSGNCDVVIGIVNNTVYDPLQPELDSGGGSGGGQIYEGKLTAEGLRFGIVASRFNHALVDRLVEGAIDAIVRHGGREEDITLVRVPGSWEIPVAAGELARKEDIDAVIAIGVLIRGATPHFDYIASEVSKGLADLSLELRKPITFGVITADTLEQAIERAGTKHGNKGWEAALSAIEMANLFKSLR

SEQ ID NO: 7988 - protein, 1307 aa, Artificial Sequence
  SARS-CoV-2/Wuhan/HBCDC-HB-02/2020__EPI_ISL_412978 spike protein (1-1147)(I712C_T1077C) LumSynth construct
MFVFLVLLPLVSSQCVNLTTRTQLPPAYTNSFTRGVYYPDKVFRSSVLHSTQDLFLPFFSNVTWFHAIHVSGTNGTKRFDNPVLPFNDGVYFASTEKSNIIRGWIFGTTLDSKTQSLLIVNNATNVVIKVCEFQFCNDPFLGVYYHKNNKSWMESEFRVYSSANNCTFEYVSQPFLMDLEGKQGNFKNLREFVFKNIDGYFKIYSKHTPINLVRDLPQGFSALEPLVDLPIGINITRFQTLLALHRSYLTPGDSSSGWTAGAAAYYVGYLQPRTFLLKYNENGTITDAVDCALDPLSETKCTLKSFTVEKGIYQTSNFRVQPTESIVRFPNITNLCPFGEVFNATRFASVYAWNRKRISNCVADYSVLYNSASFSTFKCYGVSPTKLNDLCFTNVYADSFVIRGDEVRQIAPGQTGKIADYNYKLPDDFTGCVIAWNSNNLDSKVGGNYNYLYRLFRKSNLKPFERDISTEIYQAGSTPCNGVEGFNCYFPLQSYGFQPTNGVGYQPYRVVVLSFELLHAPATVCGPKKSTNLVKNKCVNFNFNGLTGTGVLTESNKKFLPFQQFGRDIADTTDAVRDPQTLEILDITPCSFGGVSVITPGTNTSNQVAVLYQDVNCTEVPVAIHADQLTPTWRVYSTGSNVFQTRAGCLIGAEHVNNSYECDIPIGAGICASYQTQTNSPRRARSVASQSIIAYTMSLGAENSVAYSNNSCAIPTNFTISVTTEILPVSMTKTSVDCTMYICGDSTECSNFLLQYGSFCTQLNRALTGIAVEQDKNTQEVFAQVKQIYKTPPIKDFGGFNFSQILPDPSKPSKRSFIEDLLFNKVTLADAGFIKQYGDCLGDIAARDLICAQKFNGLTVLPPLLTDEMIAQYTSALLAGTITSGWTFGAGAALQIPFAMQMAYRFNGIGVTQNVLYENQKLIANQFNSAIGKIQDSLSSTASALGKLQDVVNQNAQALNTLVKQLSSNFGAISSVLNDILSRLDKVEAEVQIDRLITGRLQSLQTYVTQQLIRAAEIRASANLAATKMSECVLGQSKRVDFCGKGYHLMSFPQSAPHGVVFLHVTYVPAQEKNFTCAPAICHDGKAHFPREGVFVSNGTHWFVTQRNFYEPQIITTDNTFVSGNCDVVIGIVNNTVYDPLQPELDSGGGSGGGQIYEGKLTAEGLRFGIVASRFNHALVDRLVEGAIDAIVRHGGREEDITLVRVPGSWEIPVAAGELARKEDIDAVIAIGVLIRGATPHFDYIASEVSKGLADLSLELRKPITFGVITADTLEQAIERAGTKHGNKGWEAALSAIEMANLFKSLR

SEQ ID NO: 7989 - protein, 1307 aa, Artificial Sequence
  SARS-CoV-2/Australia/QLD02/2020__EPI_ISL_407896 spike protein (1-1147)(I712C_T1077C) LumSynth construct
MFVFLVLLPLVSSQCVNLTTRTQLPPAYTNSFTRGVYYPDKVFRSSVLHSTQDLFLPFFSNVTWFHAIHVSGTNGTKRFDNPVLPFNDGVYFASTEKSNIIRGWIFGTTLDSKTQSLLIVNNATNVVIKVCEFQFCNDPFLGVYYHKNNKSWMESEFRVYSSANNCTFEYVSQPFLMDLEGKQGNFKNLREFVFKNIDGYFKIYSKHTPINLVRDLPQGFSALEPLVDLPIGINITRFQTLLALHRSYLTPGDSSSGWTAGAAAYYVGYLQPRTFLLKYNENGTITDAVDCALDPLSETKCTLKSFTVEKGIYQTSNFRVQPTESIVRFPNITNLCPFGEVFNATRFASVYAWNRKRISNCVADYSVLYNSASFSTFKCYGVSPTKLNDLCFTNVYADSFVIRGDEVRQIAPGQTGKIADYNYKLPDDFTGCVIAWNSNNLDSKVGGNYNYLYRLFRKSNLKPFERDISTEIYQAGSTPCNGVEGFNCYFPLQSYGFQPTNGVGYQPYRVVVLSFELLHAPATVCGPKKSTNLVKNKCVNFNFNGLTGTGVLTESNKKFLPFQQFGRDIADTTDAVRDPQTLEILDITPCSFGGVSVITPGTNTSNQVAVLYQDVNCTEVPVAIHADQLTPTWRVYSTGSNVFQTRAGCLIGAEHVNNSYECDIPIGAGICASYQTQTNSPRRARSVASQSIIAYTMSLGAENSVAYSNNSCAIPTNFTISVTTEILPVSMTKTSVDCTMYICGDSTECSNLLLQYGSFCTQLNRALTGIAVEQDKNTQEVFAQVKQIYKTPPIKDFGGFNFSQILPDPSKPSKRSFIEDLLFNKVTLADAGFIKQYGDCLGDIAARDLICAQKFNGLTVLPPLLTDEMIAQYTSALLAGTITSGWTFGAGAALQIPFAMQMAYRFNGIGVTQNVLYENQKLIANQFNSAIGKIQDSLSSTASALGKLQDVVNQNAQALNTLVKQLSSNFGAISSVLNDILSRLDKVEAEVQIDRLITGRLQSLQTYVTQQLIRAAEIRASANLAATKMSECVLGQSKRVDFCGKGYHLMSFPQSAPHGVVFLHVTYVPAQEKNFTCAPAICHDGKAHFPREGVFVSNGTHWFVTQRNFYEPQIITTDNTFVSGNCDVVIGIVNNTVYDPLQLELDSGGGSGGGQIYEGKLTAEGLRFGIVASRFNHALVDRLVEGAIDAIVRHGGREEDITLVRVPGSWEIPVAAGELARKEDIDAVIAIGVLIRGATPHFDYIASEVSKGLADLSLELRKPITFGVITADTLEQAIERAGTKHGNKGWEAALSAIEMANLFKSLR

SEQ ID NO: 7990 - protein, 1307 aa, Artificial Sequence
  SARS-CoV-2/India/1-31/2020__EPI_ISL_413523 spike protein (1-1147)(I712C_T1077C) LumSynth construct
MFVFLVLLPLVSSQCVNLTTRTQLPPAYTNSFTRGVYYPDKVFRSSVLHSTQDLFLPFFSNVTWFHAIHVSGTNGTKRFDNPVLPFNDGVYFASTEKSNIIRGWIFGTTLDSKTQSLLIVNNATNVVIKVCEFQFCNDPFLGVYYHKNNKSWMESEFRVYSSANNCTFEYVSQPFLMDLEGKQGNFKNLREFVFKNIDGYFKIYSKHTPINLVRDLPQGFSALEPLVDLPIGINITRFQTLLALHRSYLTPGDSSSGWTAGAAAYYVGYLQPRTFLLKYNENGTITDAVDCALDPLSETKCTLKSFTVEKGIYQTSNFRVQPTESIVRFPNITNLCPFGEVFNATRFASVYAWNRKRISNCVADYSVLYNSASFSTFKCYGVSPTKLNDLCFTNVYADSFVIRGDEVRQIAPGQTGKIADYNYKLPDDFTGCVIAWNSNNLDSKVGGNYNYLYRLFRKSNLKPFERDISTEIYQAGSTPCNGVEGFNCYFPLQSYGFQPTNGVGYQPYRVVVLSFELLHAPATVCGPKKSTNLVKNKCVNFNFNGLTGTGVLTESNKKFLPFQQFGRDIADTTDAVRDPQTLEILDITPCSFGGVSVITPGTNTSNQVAVLYQDVNCTEVPVAIHADQLTPTWRVYSTGSNVFQTRAGCLIGAEHVNNSYECDIPIGAGICASYQTQTNSPRRARSVASQSIIAYTMSLGAENSVAYSNNSCAIPTNFTISVTTEILPVSMTKTSVDCTMYICGDSTECSNLLLQYGSFCTQLNRALTGIAVEQDKNTQEVFAQVKQIYKTPPIKDFGGFNFSQILPDPSKPSKRSFIEDLLFNKVTLADAGFIKQYGDCLGDIAARDLICAQKFNGLTVLPPLLTDEMIAQYTSALLAGTITSGWTFGAGAALQIPFAMQMAYRFNGIGVTQNVLYENQKLIANQFNSVIGKIQDSLSSTASALGKLQDVVNQNAQALNTLVKQLSSNFGAISSVLNDILSRLDKVEAEVQIDRLITGRLQSLQTYVTQQLIRAAEIRASANLAATKMSECVLGQSKRVDFCGKGYHLMSFPQSAPHGVVFLHVTYVPAQEKNFTCAPAICHDGKAHFPREGVFVSNGTHWFVTQRNFYEPQIITTDNTFVSGNCDVVIGIVNNTVYDPLQPELDSGGGSGGGQIYEGKLTAEGLRFGIVASRFNHALVDRLVEGAIDAIVRHGGREEDITLVRVPGSWEIPVAAGELARKEDIDAVIAIGVLIRGATPHFDYIASEVSKGLADLSLELRKPITFGVITADTLEQAIERAGTKHGNKGWEAALSAIEMANLFKSLR

SEQ ID NO: 7991 - protein, 1307 aa, Artificial Sequence
  SARS-CoV-2/Guangdong/GD2020087-P0008/2020__EPI_ISL_413863 spike protein (1-1147)(I712C_T1077C) LumSynth construct
MFVFLVLLPLVSSQCVNLTTRTQLPPAYTNSFTRGVYYPDKVFRSSVLHSTQDLFLPFFSNVTWFHAIHVSGTNGTKRFDNPVLPFNDGVYFASTEKSNIIRGWIFGTTLDSKTQSLLIVNNATNVVIKVCEFQFCNDPFLGVYYHKNNKSWMESEFRVYSSANNCTFEYVSQPFLMDLEGKQGNFKNLREFVFKNIDGYFKIYSKHTPINLVRDLPQGFSALEPLVDLPIGINITRFQTLLALHRSYLTPGDSSSGWTAGAAAYYVGYLQPRTFLLKYNENGTITDAVDCALDPLSETKCTLKSFTVEKGIYQTSNFRVQPTESIVRFPNITNLCPFGEVFNATRFASVYAWNRKRISNCVADYSVLYNSASFSTFKCYGVSPTKLNDLCFTNVYADSFVIRGDEVREIAPGQTGKIADYNYKLPDDFTGCVIAWNSNNLDSKVGGNYNYLYRLFRKSNLKPFERDISTEIYQAGSTPCNGVEGFNCYFPLQSYGFQPTNGVGYQPYRVVVLSFELLHAPATVCGPKKSTNLVKNKCVNFNFNGLTGTGVLTESNKKFLPFQQFGRDIADTTDAVRDPQTLEILDITPCSFGGVSVITPGTNTSNQVAVLYQDVNCTEVPVAIHADQLTPTWRVYSTGSNVFQTRAGCLIGAEHVNNSYECDIPIGAGICASYQTQTNSPRRARSVASQSIIAYTMSLGAENSVAYSNNSCAIPTNFTISVTTEILPVSMTKTSVDCTMYICGDSTECSNLLLQYGSFCTQLNRALTGIAVEQDKNTQEVFAQVKQIYKTPPIKDFGGFNFSQILPDPSKPSKRSFIEDLLFNKVTLADAGFIKQYGDCLGDIAARDLICAQKFNGLTVLPPLLTDEMIAQYTSALLAGTITSGWTFGAGAALQIPFAMQMAYRFNGIGVTQNVLYENQKLIANQFNSAIGKIQDSLSSTASALGKLQDVVNQNAQALNTLVKQLSSNFGAISSVLNDILSRLDKVEAEVQIDRLITGRLQSLQTYVTQQLIRAAEIRASANLAATKMSECVLGQSKRVDFCGKGYHLMSFPQSAPHGVVFLHVTYVPAQEKNFTCAPAICHDGKAHFPREGVFVSNGTHWFVTQRNFYEPQIITTDNTFVSGNCDVVIGIVNNTVYDPLQPELDSGGGSGGGQIYEGKLTAEGLRFGIVASRFNHALVDRLVEGAIDAIVRHGGREEDITLVRVPGSWEIPVAAGELARKEDIDAVIAIGVLIRGATPHFDYIASEVSKGLADLSLELRKPITFGVITADTLEQAIERAGTKHGNKGWEAALSAIEMANLFKSLR

SEQ ID NO: 7992 - protein, 1307 aa, Artificial Sequence
  SARS-CoV-2/Sweden/01/2020__EPI_ISL_411951 spike protein (1-1147)(I712C_T1077C) LumSynth construct
MFVFLVLLPLVSSQCVNLTTRTQLPPAYTNSFTRGVYYPDKVFRSSVLHSTQDLFLPFFSNVTWFHAIHVSGTNGTKRFDNPVLPFNDGVYFASTEKSNIIRGWIFGTTLDSKTQSLLIVNNATNVVIKVCEFQFCNDPFLGVYYHKNNKSWMESEFRVYSSANNCTFEYVSQPFLMDLEGKQGNFKNLREFVFKNIDGYFKIYSKHTPINLVRDLPQGFSALEPLVDLPIGINITRFQTLLALHRSYLTPGDSSSGWTAGAAAYYVGYLQPRTFLLKYNENGTITDAVDCALDPLSETKCTLKSFTVEKGIYQTSNFRVQPTESIVRFPNITNLCPFGEVFNATRFASVYAWNRKRISNCVADYSVLYNSASFSTFKCYGVSPTKLNDLCFTNVYADSFVIRGDEVRQIAPGQTGKIADYNYKLPDDFTGCVIAWNSNNLDSKVGGNYNYLYRLFRKSNLKPFERDISTEIYQAGSTPCNGVEGFNCYFPLQSYGFQPTNGVGYQPYRVVVLSFELLHAPATVCGPKKSTNLVKNKCVNFNFNGLTGTGVLTESNKKFLPFQQFGRDIADTTDAVRDPQTLEILDITPCSFGGVSVITPGTNTSNQVAVLYQDVNCTEVPVAIHADQLTPTWRVYSTGSNVFQTRAGCLIGAEHVNNSYECDIPIGAGICASYQTQTNSPRRARSVASQSIIAYTMSLGAENSVAYSNNSCAIPTNFTISVTTEILPVSMTKTSVDCTMYICGDSTECSNLLLQYGSFCTQLNRALTGIAVEQDKNTQEVFAQVKQIYKTPPIKDCGGFNFSQILPDPSKPSKRSFIEDLLFNKVTLADAGFIKQYGDCLGDIAARDLICAQKFNGLTVLPPLLTDEMIAQYTSALLAGTITSGWTFGAGAALQIPFAMQMAYRFNGIGVTQNVLYENQKLIANQFNSAIGKIQDSLSSTASALGKLQDVVNQNAQALNTLVKQLSSNFGAISSVLNDILSRLDKVEAEVQIDRLITGRLQSLQTYVTQQLIRAAEIRASANLAATKMSECVLGQSKRVDFCGKGYHLMSFPQSAPHGVVFLHVTYVPAQEKNFTCAPAICHDGKAHFPREGVFVSNGTHWFVTQRNFYEPQIITTDNTFVSGNCDVVIGIVNNTVYDPLQPELDSGGGSGGGQIYEGKLTAEGLRFGIVASRFNHALVDRLVEGAIDAIVRHGGREEDITLVRVPGSWEIPVAAGELARKEDIDAVIAIGVLIRGATPHFDYIASEVSKGLADLSLELRKPITFGVITADTLEQAIERAGTKHGNKGWEAALSAIEMANLFKSLR

SEQ ID NO: 7993 - protein, 1307 aa, Artificial Sequence
  SARS-CoV-2/Tianmen/HBCDC-HB-07/2020__EPI_ISL_412983 spike protein (1-1147)(I712C_T1077C) LumSynth construct
MFVFLVLLPLVSSQCVNLTTRTQLPPAYTNSFTRGVYYPDKVFRSSVLHSTQDLFLPFFSNVTWFHAIHVSGTNGTKRFDNPVLPFNDGVYFASTEKSNIIRGWIFGTTLDSKTQSLLIVNNATNVVIKVCEFQFCNDPFLGVYYHKNNKSWMESEFRVYSSANNCTFEYVSQPFLMDLEGKQGNFKNLREFVFKNIDGYFKIYSKHTPINLVRDLPQGFSALEPLVDLPIGINITRFQTLLALHRSYLTPGDSSSGWTAGAAAYYVGYLQPRTFLLKYNENGTITDAVDCALDPLSETKCTLKSFTVEKGIYQTSNFRVQPTESIVRFPNITNLCPFGEVFNATRFASVYAWNRKRISNCVADYSVLYNSASFSTFKCYGVSPTKLNDLCFTNVYADSFVIRGDEVRQIAPGQTGKIADYNYKLPDDFTGCVIAWNSNNLDSKVGGNYNYLYRLFRKSNLKPFERDISTEIYQAGSTPCNGVEGFNCYFPLQSYGFQPTNGVGYQPYRVVVLSFELLHAPATVCGPKKSTNLVKNKCVNFNFNGLTGTGVLTESNKKFLPFQQFGRDIADTTDAVRDPQTLEILDITPCSFGGVSVITPGTNTSNQVAVLYQDLNCTEVPVAIHADQLTPTWRVYSTGSNVFQTRAGCLIGAEHVNNSYECDIPIGAGICASYQTQTNSPRRARSVASQSIIAYTMSLGAENSVAYSNNSCAIPTNFTISVTTEILPVSMTKTSVDCTMYICGDSTECSNLLLQYGSFCTQLNRALTGIAVEQDKNTQEVFAQVKQIYKTPPIKDFGGFNFSQILPDPSKPSKRSFIEDLLFNKVTLADAGFIKQYGDCLGDIAARDLICAQKFNGLTVLPPLLTDEMIAQYTSALLAGTITSGWTFGAGAALQIPFAMQMAYRFNGIGVTQNVLYENQKLIANQFNSAIGKIQDSLSSTASALGKLQDVVNQNAQALNTLVKQLSSNFGAISSVLNDILSRLDKVEAEVQIDRLITGRLQSLQTYVTQQLIRAAEIRASANLAATKMSECVLGQSKRVDFCGKGYHLMSFPQSAPHGVVFLHVTYVPAQEKNFTCAPAICHDGKAHFPREGVFVSNGTHWFVTQRNFYEPQIITTDNTFVSGNCDVVIGIVNNTVYDPLQPELDSGGGSGGGQIYEGKLTAEGLRFGIVASRFNHALVDRLVEGAIDAIVRHGGREEDITLVRVPGSWEIPVAAGELARKEDIDAVIAIGVLIRGATPHFDYIASEVSKGLADLSLELRKPITFGVITADTLEQAIERAGTKHGNKGWEAALSAIEMANLFKSLR

SEQ ID NO: 7994 - protein, 1307 aa, Artificial Sequence
  SARS-CoV-2/Hong Kong/case42_VM20002493/2020__EPI_ISL_414527 spike protein (1-1147)(I712C_T1077C) LumSynth construct
MFVFLVLLPLVSSQCVNLTTRTQLPPAYTNSFTRGVYYPDKVFRSSVLHSTQDLFLPFFSNVTWFHAIHVSGTNGTKRFDNPVLPFNDGVYFASTEKSNIIRGWIFGTTLDSKTQSLLIVNNATNVVIKVCEFQFCNDPFLGVYYHKNNKSWMESEFRVYSSANNCTFEYVSQPFLMDLEGKQGNFKNLREFVFKNIDGYFKIYSKHTPINLVRDLPQGFSALEPLVDLPIGINITRFQTLLALHRSYLTPGDSSSGWTAGAAAYYVGYLQPRTFLLKYNENGTITDAVDCALDPLSETKCTLKSFTVEKGIYQTSNFRVQPTESIVRFPNITNLCPFGEVFNATRFASVYAWNRKRISNCVADYSVLYNSASFSTFKCYGVSPTKLNDLCFTNVYADSFVIRGDEVRQIAPGQTGKIADYNYKLPDDFTGCVIAWNSNNLDSKVGGNYNYLYRLFRKSNLKPFERDISTEIYQAGSTPCNGVEGFNCYFPLQSYGFQPTNGVGYQPYRVVVLSFELLHAPATVCGPKKSTNLVKNKCVNFNFNGLTGTGVLTESNKKFLPFQQFGRDIADTTDAVRDPQTLEILDITPCSFGGVSVITPGTNTSNQVAVLYQDVNCTEVPVAIHADQLTPTWRVYSTGSNVFQTRAGCLIGAEHVNNSYECDIPIGAGICASYQTQTNSPRRARSVASQSIIAYTMSLGAENSVAYSNNSCAIPTNFAISVTTEILPVSMTKTSVDCTMYICGDSTECSNLLLQYGSFCTQLNRALTGIAVEQDKNTQEVFAQVKQIYKTPPIKDFGGFNFSQILPDPSKPSKRSFIEDLLFNKVTLADAGFIKQYGDCLGDIAARDLICAQKFNGLTVLPPLLTDEMIAQYTSALLAGTITSGWTFGAGAALQIPFAMQMAYRFNGIGVTQNVLYENQKLIANQFNSAIGKIQDSLSSTASALGKLQDVVNQNAQALNTLVKQLSSNFGAISSVLNDILSRLDKVEAEVQIDRLITGRLQSLQTYVTQQLIRAAEIRASANLAATKMSECVLGQSKRVDFCGKGYHLMSFPQSAPHGVVFLHVTYVPAQEKNFTCAPAICHDGKAHFPREGVFVSNGTHWFVTQRNFYEPQIITTDNTFVSGNCDVVIGIVNNTVYDPLQPELDSGGGSGGGQIYEGKLTAEGLRFGIVASRFNHALVDRLVEGAIDAIVRHGGREEDITLVRVPGSWEIPVAAGELARKEDIDAVIAIGVLIRGATPHFDYIASEVSKGLADLSLELRKPITFGVITADTLEQAIERAGTKHGNKGWEAALSAIEMANLFKSLR

SEQ ID NO: 7995 - protein, 1307 aa, Artificial Sequence
  SARS-CoV-2/USA/CruiseA-23/2020__EPI_ISL_414482 spike protein (1-1147)(I712C_T1077C) LumSynth construct
MFVFLVLLPLVSSQCVNLTTRTQLPPAYTNSFTRGVYYPDKVFRSSVLHSTQDLFLPFFSNVTWFHAIHVSGTNGTKRFDNPVLPFNDGVYFASTEKSNIIRGWIFGTTLDSKTQSLLIVNNATNVVIKVCEFQFCNDPFLGVYYHKNNKSWMESEFRVYSSANNCTFEYVSQPFLMDLEVKQGNFKNLREFVFKNIDGYFKIYSKHTPINLVRDLPQGFSALEPLVDLPIGINITRFQTLLALHRSYLTPGDSSSGWTAGAAAYYVGYLQPRTFLLKYNENGTITDAVDCALDPLSETKCTLKSFTVEKGIYQTSNFRVQPTESIVRFPNITNLCPFGEVFNATRFASVYAWNRKRISNCVADYSVLYNSASFSTFKCYGVSPTKLNDLCFTNVYADSFVIRGDEVRQIAPGQTGKIADYNYKLPDDFTGCVIAWNSNNLDSKVGGNYNYLYRLFRKSNLKPFERDISTEIYQAGSTPCNGVEGFNCYFPLQSYGFQPTNGVGYQPYRVVVLSFELLHAPATVCGPKKSTNLVKNKCVNFNFNGLTGTGVLTESNKKFLPFQQFGRDIADTTDAVRDPQTLEILDITPCSFGGVSVITPGTNTSNQVAVLYQDVNCTEVPVAIHADQLTPTWRVYSTGSNVFQTRAGCLIGAEHVNNSYECDIPIGAGICASYQTQTNSPRRARSVASQSIIAYTMSLGAENSVAYSNNSCAIPTNFTISVTTEILPVSMTKTSVDCTMYICGDSTECSNLLLQYGSFCTQLNRALTGIAVEQDKNTQEVFAQVKQIYKTPPIKDFGGFNFSQILPDPSKPSKRSFIEDLLFNKVTLADAGFIKQYGDCLGDIAARDLICAQKFNGLTVLPPLLTDEMIAQYTSALLAGTITSGWTFGAGAALQIPFAMQMAYRFNGIGVTQNVLYENQKLIANQFNSAIGKIQDSLSSTASALGKLQDVVNQNAQALNTLVKQLSSNFGAISSVLNDILSRLDKVEAEVQIDRLITGRLQSLQTYVTQQLIRAAEIRASANLAATKMSECVLGQSKRVDFCGKGYHLMSFPQSAPHGVVFLHVTYVPAQEKNFTCAPAICHDGKAHFPREGVFVSNGTHWFVTQRNFYEPQIITTDNTFVSGNCDVVIGIVNNTVYDPLQPELDSGGGSGGGQIYEGKLTAEGLRFGIVASRFNHALVDRLVEGAIDAIVRHGGREEDITLVRVPGSWEIPVAAGELARKEDIDAVIAIGVLIRGATPHFDYIASEVSKGLADLSLELRKPITFGVITADTLEQAIERAGTKHGNKGWEAALSAIEMANLFKSLR

SEQ ID NO: 7996 - protein, 1307 aa, Artificial Sequence
  SARS-CoV-2/Hong Kong/case85_VM20002868/2020__EPI_ISL_414519 spike protein (1-1147)(I712C_T1077C) LumSynth construct
MFVFLVLVPLVSSQCVNLTTRTQLPPAYTNSFTRGVYYPDKVFRSSVLHSTQDLFLPFFSNVTWFHAIHVSGTNGTKRFDNPVLPFNDGVYFASTEKSNIIRGWIFGTTLDSKTQSLLIVNNATNVVIKVCEFQFCNDPFLGVYYHKNNKSWMESEFRVYSSANNCTFEYVSQPFLMDLEGKQGNFKNLREFVFKNIDGYFKIYSKHTPINLVRDLPQGFSALEPLVDLPIGINITRFQTLLALHRSYLTPGDSSSGWTAGAAAYYVGYLQPRTFLLKYNENGTITDAVDCALDPLSETKCTLKSFTVEKGIYQTSNFRVQPTESIVRFPNITNLCPFGEVFNATRFASVYAWNRKRISNCVADYSVLYNSASFSTFKCYGVSPTKLNDLCFTNVYADSFVIRGDEVRQIAPGQTGKIADYNYKLPDDFTGCVIAWNSNNLDSKVGGNYNYLYRLFRKSNLKPFERDISTEIYQAGSTPCNGVEGFNCYFPLQSYGFQPTNGVGYQPYRVVVLSFELLHAPATVCGPKKSTNLVKNKCVNFNFNGLTGTGVLTESNKKFLPFQQFGRDIADTTDAVRDPQTLEILDITPCSFGGVSVITPGTNTSNQVAVLYQDVNCTEVPVAIHADQLTPTWRVYSTGSNVFQTRAGCLIGAEHVNNSYECDIPIGAGICASYQTQTNSPRRARSVASQSIIAYTMSLGAENSVAYSNNSCAIPTNFTISVTTEILPVSMTKTSVDCTMYICGDSTECSNLLLQYGSFCTQLNRALTGIAVEQDKNTQEVFAQVKQIYKTPPIKDFGGFNFSQILPDPSKPSKRSFIEDLLFNKVTLADAGFIKQYGDCLGDIAARDLICAQKFNGLTVLPPLLTDEMIAQYTSALLAGTITSGWTFGAGAALQIPFAMQMAYRFNGIGVTQNVLYENQKLIANQFNSAIGKIQDSLSSTASALGKLQDVVNQNAQALNTLVKQLSSNFGAISSVLNDILSRLDKVEAEVQIDRLITGRLQSLQTYVTQQLIRAAEIRASANLAATKMSECVLGQSKRVDFCGKGYHLMSFPQSAPHGVVFLHVTYVPAQEKNFTCAPAICHDGKAHFPREGVFVSNGTHWFVTQRNFYEPQIITTDNTFVSGNCDVVIGIVNNTVYDPLQPELDSGGGSGGGQIYEGKLTAEGLRFGIVASRFNHALVDRLVEGAIDAIVRHGGREEDITLVRVPGSWEIPVAAGELARKEDIDAVIAIGVLIRGATPHFDYIASEVSKGLADLSLELRKPITFGVITADTLEQAIERAGTKHGNKGWEAALSAIEMANLFKSLR

SEQ ID NO: 7997 - protein, 1307 aa, Artificial Sequence; identical to SEQ ID NO: 7987
  SARS-CoV-2/England/200990660/2020__EPI_ISL_414523 spike protein (1-1147)(I712C_T1077C) LumSynth construct

SEQ ID NO: 7998 - protein, 1307 aa, Artificial Sequence
  SARS-CoV-2/Australia/NSW09/2020__EPI_ISL_413595 spike protein (1-1147)(I712C_T1077C) LumSynth construct
MFVFLVLLPLVSSQCVNLTTRTQLPPAYTNSFTRGVYYPDKVFRSSVLHSTQDLFLPFFSNVTWFHAIHVSGTNGTKRFDNPVLPFNDGVYFASTEKSNIIRGWIFGTTLDSKTQSLLIVNNATNVVIKVCEFQFCNDPFLGVYYHKNNKSWMESEFRVYSSANNCTFEYVSQPFLMDLEGKQGNFKNLREFVFKNIDGYFKIYSKHTPINLVRDLPQGFSALEPLVDLPIGINITRFQTLLALHRSYLTPGDSSSGWTAGAAAYYVGYLQPRTFLLKYNENGTITDAVDCALDPLSETKCTLKSFTVEKGIYQTSNFRVQPTESIVRFPNITNLCPFGEVFNATRFASVYAWNRKRISNCVADYSVLYNSASFSTFKCYGVSPTKLNDLCFTNVYADSFVIRGDEVRQIAPGQTGKIADYNYKLPDDFTGCVIAWNSNNLDSKVGGNYNYLYRLFRKSNLKPFERDISTEIYQAGSTPCNGVEGFNCYFPLQSYGFQPTNGVGYQPYRVVVLSFELLHAPATVCGPKKSTNLVKNKCVNFNFNGLTGTGVLTESNKKFLPFQQFGRDIADTTDAVRDPQTLEILDITPCSFGGVSVITPGTNTSNQVAVLYQDVNCTEVPVAIHADQLTPTWRVYSTGSNVFQTRAGCLIGAEHVNNSYECDIPIGAGICASYQTQTNSPRRARSVASQSIIAYTMSLGAENSVAYSNNSCAIPTNFTISVTTEILPVSMTKTSVDCTMYICGDSTECSNLLLQYGSFCTQLNRALTGIAVEQDKNTQEVFAQVKQIYKTPPIKDFGGFNFSQILPDPSKPSKRSFIEDLLFNKVTLADAGFIKQYGDCLGDIAARDLICAQKFNGLTVLPPLLTDEMIAQYTSALLAGTITSGWTFGAGAALQIPFAMQMAYRFNGIGVTQNVLYENQKLIANQFNSAIGKIQDSLSFTASALGKLQDVVNQNAQALNTLVKQLSSNFGAISSVLNDILSRLDKVEAEVQIDRLITGRLQSLQTYVTQQLIRAAEIRASANLAATKMSECVLGQSKRVDFCGKGYHLMSFPQSAPHGVVFLHVTYVPAQEKNFTCAPAICHDGKAHFPREGVFVSNGTHWFVTQRNFYEPQIITTDNTFVSGNCDVVIGIVNNTVYDPLQPELDSGGGSGGGQIYEGKLTAEGLRFGIVASRFNHALVDRLVEGAIDAIVRHGGREEDITLVRVPGSWEIPVAAGELARKEDIDAVIAIGVLIRGATPHFDYIASEVSKGLADLSLELRKPITFGVITADTLEQAIERAGTKHGNKGWEAALSAIEMANLFKSLR

SEQ ID NO: 7999 - protein, 1307 aa, Artificial Sequence; identical to SEQ ID NO: 7979
  SARS-CoV-2/Australia/NSW10/2020__EPI_ISL_413596 spike protein (1-1147)(I712C_T1077C) LumSynth construct

SEQ ID NO: 8000 - protein, 1307 aa, Artificial Sequence
  SARS-CoV-2/Switzerland/1000477797/2020__EPI_ISL_413023 spike protein (1-1147)(I712C_T1077C) LumSynth construct
MFVFLVLLPLVSSQCVNLTTRTQLPPAYTNSFTRGVYYPDKVFRSSVLHSTQDLFLPFFSNVTWFHAIHVSGTNGTKRFDNPVLPFNDGVYFASTEKSNIIRGWIFGTTLDSKTQSLLIVNNATNVVIKVCEFQFCNDPFLGVYYHKNNKSWMESEFRVYSSANNCTFEYVSQPFLMDLEGKQGNFKNLREFVFKNIDGYFNIYSKHTPINLVRDLPQGFSALEPLVDLPIGINITRFQTLLALHRSYLTPGDSSSGWTAGAAAYYVGYLQPRTFLLKYNENGTITDAVDCALDPLSETKCTLKSFTVEKGIYQTSNFRVQPTESIVRFPNITNLCPFGEVFNATRFASVYAWNRKRISNCVADYSVLYNSASFSTFKCYGVSPTKLNDLCFTNVYADSFVIRGDEVRQIAPGQTGKIADYNYKLPDDFTGCVIAWNSNNLDSKVGGNYNYLYRLFRKSNLKPFERDISTEIYQAGSTPCNGVEGFNCYFPLQSYGFQPTNGVGYQPYRVVVLSFELLHAPATVCGPKKSTNLVKNKCVNFNFNGLTGTGVLTESNKKFLPFQQFGRDIADTTDAVRDPQTLEILDITPCSFGGVSVITPGTNTSNQVAVLYQGVNCTEVPVAIHADQLTPTWRVYSTGSNVFQTRAGCLIGAEHVNNSYECDIPIGAGICASYQTQTNSPRRARSVASQSIIAYTMSLGAENSVAYSNNSCAIPTNFTISVTTEILPVSMTKTSVDCTMYICGDSTECSNLLLQYGSFCTQLNRALTGIAVEQDKNTQEVFAQVKQIYKTPPIKDFGGFNFSQILPDPSKPSKRSFIEDLLFNKVTLADAGFIKQYGDCLGDIAARDLICAQKFNGLTVLPPLLTDEMIAQYTSALLAGTITSGWTFGAGAALQIPFAMQMAYRFNGIGVTQNVLYENQKLIANQFNSAIGKIQDSLSSTASALGKLQDVVNQNAQALNTLVKQLSSNFGAISSVLNDILSRLDKVEAEVQIDRLITGRLQSLQTYVTQQLIRAAEIRASANLAATKMSECVLGQSKRVDFCGKGYHLMSFPQSAPHGVVFLHVTYVPAQEKNFTCAPAICHDGKAHFPREGVFVSNGTHWFVTQRNFYEPQIITTDNTFVSGNCDVVIGIVNNTVYDPLQPELDSGGGSGGGQIYEGKLTAEGLRFGIVASRFNHALVDRLVEGAIDAIVRHGGREEDITLVRVPGSWEIPVAAGELARKEDIDAVIAIGVLIRGATPHFDYIASEVSKGLADLSLELRKPITFGVITADTLEQAIERAGTKHGNKGWEAALSAIEMANLFKSLR

SEQ ID NO: 8001 - protein, 1307 aa, Artificial Sequence
  SARS-CoV-2/Belgium/BA-02291/2020__EPI_ISL_415159 spike protein (1-1147)(I712C_T1077C) LumSynth construct
MFVFLVLLPLVSSQCVNLTTRTQLPPAYTNSFTRGVYYPDKVFRSSVLHSTQDLFLPFFSNVTWFHAIHVSGTNGTKRFDNPVLPFNDGVYFASTEKSNIIRGWIFGTTLDSKTQSLLIVNNATNVVIKVCEFQFCNDPFLGVYYHKNNKSWMESEFRVYSSANNCTFEYVSQPFLMDLEGKQGNFKNLREFVFKNIDGYFKIYSKHTPINLVRDLPQGFSALEPLVDLPIGINITRFQTLLALHRSYLTPGDSSSGWTAGAAAYYVGYLQPRTFLLKYNENGTITDAVDCALDPLSETKCTLKSFTVEKGIYQTSNFRVQPTESIVRFPNITNLCPFGEVFNATRFASVYAWNRKRISNCVADYSVLYNSASFSTFKCYGVSPTKLNDLCFTNVYADSFVIRGDEVRQIAPGQTGKIADYNYKLPDDFTGCVIAWNSNNLDSKVGGNYNYLYRLFRRSNLKPFERDISTEIYQAGSTPCNGVEGFNCYFPLQSYGFQPTNGVGYQPYRVVVLSFELLPAPATVCGPKKSTNLVKNKCVNFNFNGLTGTGVLTESNKKFLPFQQFGRDIADTTDAVRDPQTLEILDITPCSFGGVSVITPGTNTSNQVAVLYQGVNCTEVPVAIHADQLTPTWRVYSTGSNVFQTRAGCLIGAEHVNNSYECDIPIGAGICASYQTQTNSPRRARSVASQSIIAYTMSLGAENSVAYSNNSCAIPTNFTISVTTEILPVSMTKTSVDCTMYICGDSTECSNLLLQYGSFCTQLNRALTGIAVEQDKNTQEVFAQVKQIYKTPPIKDFGGFNFSQILPDPSKPSKRSFIEDLLFNKVTLADAGFIKQYGDCLGDIAARDLICAQKFNGLTVLPPLLTDEMIAQYTSALLAGTITSGWTFGAGAALQIPFAMQMAYRFNGIGVTQNVLYENQKLIANQFNSAIGKIQDSLSSAAPALGKLQDVVNQNAQALNTLVKQLSSNFGAISSVLNDILSRLDKVEAEVQIDRLITGRLQSLQTYVTQQLIRAAEIRASANLAATKMSECVLGQSKRVDFCGKGYHLMSFPQSAPHGVVFLHVTYVPAQEKNFTCAPAICHDGKAHFPREGVFVSNGTHWFVTQRNFYEPQIITTDNTFVSGNCDVVIGIVNNTVYDPLQPELDSGGGSGGGQIYEGKLTAEGLRFGIVASRFNHALVDRLVEGAIDAIVRHGGREEDITLVRVPGSWEIPVAAGELARKEDIDAVIAIGVLIRGATPHFDYIASEVSKGLADLSLELRKPITFGVITADTLEQAIERAGTKHGNKGWEAALSAIEMANLFKSLR

SEQ ID NO: 8002 - protein, 1307 aa, Artificial Sequence
  SARS-CoV-2/USA/WA8-UW5/2020__EPI_ISL_413486 spike protein (1-1147)(I712C_T1077C) LumSynth construct
MFVFLVLLPLVSSQCVNLTTRTQLPPAYTNSFTRGVYYPDKVFRSSVLHSTQDLFLPFFSNVTWFHAIHVSGTNGTKRFDNPVLPFNDGVYFASTEKSNIIRGWIFGTTLDSKTQSLLIVNNATNVVIKVCEFQFCNDPFLGVYYHKNNKSWMESEFRVYSSANNCTFEYVSQPFLMDLEGKQGNFKNLREFVFKNIDGYFKIYSKHTPINLVRDLPQGFSALEPLVDLPIGINITRFQTLLALHRSYLTPGDSSSGWTAGAAAYYVGYLQPRTFLLKYNENGTITDAVDCALDPLSETKCTLKSFTVEKGIYQTSNFRVQPTESIVRFPNITNLCPFGEVFNATRFASVYAWNRKRISNCVADYSVLYNSASFSTFKCYGVSPTKLNDLCFTNVYADSFVIRGDEVRQIAPGQTGKIADYNYKLPDDFTGCVIAWNSNNLDSKVGGNYNYLYRLFRKSNLKPFERDISTEIYQAGSTPCNGVEGFNCYFPLQSYGFQPTNGVGYQPYRVVVLSFELLHAPATVCGPKKSTNLVKNKCVNFNFNGLTGTGVLTESNKKFLPFQQFGRDIADTTDAVRDPQTLEILDITPCSFGGVSVITPGTNTSNQVAVLYQDVNCTEVPVAIHADQLTPTWRVYSTGSNVFQTRAGCLIGAEYVNNSYECDIPIGAGICASYQTQTNSPRRARSVASQSIIAYTMSLGAENSVAYSNNSCAIPTNFTISVTTEILPVSMTKTSVDCTMYICGDSTECSNLLLQYGSFCTQLNRALTGIAVEQDKNTQEVFAQVKQIYKTPPIKDFGGFNFSQILPDPSKPSKRSFIEDLLFNKVTLADAGFIKQYGDCLGDIAARDLICAQKFNGLTVLPPLLTDEMIAQYTSALLAGTITSGWTFGAGAALQIPFAMQMAYRFNGIGVTQNVLYENQKLIANQFNSAIGKIQDSLSSTASALGKLQDVVNQNAQALNTLVKQLSSNFGAISSVLNDILSRLDKVEAEVQIDRLITGRLQSLQTYVTQQLIRAAEIRASANLAATKMSECVLGQSKRVDFCGKGYHLMSFPQSAPHGVVFLHVTYVPAQEKNFTCAPAICHDGKAHFPREGVFVSNGTHWFVTQRNFYEPQIITTDNTFVSGNCDVVIGIVNNTVYDPLQPELDSGGGSGGGQIYEGKLTAEGLRFGIVASRFNHALVDRLVEGAIDAIVRHGGREEDITLVRVPGSWEIPVAAGELARKEDIDAVIAIGVLIRGATPHFDYIASEVSKGLADLSLELRKPITFGVITADTLEQAIERAGTKHGNKGWEAALSAIEMANLFKSLR

SEQ ID NO: 8003 - protein, 1307 aa, Artificial Sequence
  SARS-CoV-2/England/20102000506/2020__EPI_ISL_415147 spike protein (1-1147)(I712C_T1077C) LumSynth construct
MFVFLVLLPLVSSQCVNLTTRTQLPPAYTNSFTRGVYYPDKVFRSSVLHSTQDLFLPFFSNVTWFHAIHVSGTNGTKRFDNPVLPFNDGVYFASTEKSNIIRGWIFGTTLDSKTQSLLIVNNATNVVIKVCEFQFCNDPFLGVYYHKNNKSWMESEFRVYSSANNCTFEYVSQPFLMDLEGKQGNFKNLREFVFKNIDGYFKIYSKHTPINLVRDLPQGFSALEPLVDLPIGINITRFQTLLALHRSYLTPGDSSSGWTAGAAAYYVGYLQPRTFLLKYNENGTITDAVDCALDPLSETKCTLKSFTVEKGIYQTSNFRVQPTESIVRFPNITNLCPFGEVFNATRFASVYAWNRKRISNCVADYSVLYNSASFSTFKCYGVSPTKLNDLCFTNVYADSFVIRGDEVRQIAPGQTGKIADYNYKLPDDFTGCVIAWNSNNLDSKVGGNYNYLYRLFRKSNLKPFERDISTEIYQAGSTPCNGVEGFNCYFPLQSYGFQPTNGVGYQPYRVVVLSFELLHAPATVCGPKKSTNLVKNKCVNFNFNGLTGTGVLTESNKKFLPFQQFGRDIADTTDAVRDPQTLEILDITPCSFGGVSVITPGTNTSNQVAVLYQGVNCTEVPVAIHADQLTPTWRVYSTGSNVFQTRAGCLIGAEHVNNSYECDIPIGAGICASYQTQTNSPRRARSVASQSIIAYTMSLGAENSVAYSNNSCAIPTNFTISVTTEILPVSMTKTSVDCTMYICGDSTECSNLLLQYGSFCTQLNRALTGIAVEQDKNTQEVFAQVKQIYKTPPIKDFGGFNFSQILPDPSKPSKRSFIEDLLFNKVTLADAGFIKQYGYCLGDIAARDLICAQKFNGLTVLPPLLTDEMIAQYTSALLAGTITSGWTFGAGAALQIPFAMQMAYRFNGIGVTQNVLYENQKLIANQFNSAIGKIQDSLSSTASALGKLQDVVNQNAQALNTLVKQLSSNFGAISSVLNDILSRLDKVEAEVQIDRLITGRLQSLQTYVTQQLIRAAEIRASANLAATKMSECVLGQSKRVDFCGKGYHLMSFPQSAPHGVVFLHVTYVPAQEKNFTCAPAICHDGKAHFPREGVFVSNGTHWFVTQRNFYEPQIITTDNTFVSGNCDVVIGIVNNTVYDPLQPELDSGGGSGGGQIYEGKLTAEGLRFGIVASRFNHALVDRLVEGAIDAIVRHGGREEDITLVRVPGSWEIPVAAGELARKEDIDAVIAIGVLIRGATPHFDYIASEVSKGLADLSLELRKPITFGVITADTLEQAIERAGTKHGNKGWEAALSAIEMANLFKSLR

SEQ ID NO: 8004 - protein, 1307 aa, Artificial Sequence
  SARS-CoV-2/Belgium/VAG-03013/2020__EPI_ISL_415155 spike protein (1-1147)(I712C_T1077C) LumSynth construct
MFVFLVLLPLVSSQCVNLTTRTQLPPAYTNSFTRGVYYPDKVFRSSVLHSTQDLFLPFFSNVTWFHAIHVSGTNGTKRFDNPVLPFNDGVYFASTEKSNIIRGWIFGTTLDSKTQSLLIVNNATNVVIKVCEFQFCNDPFLGVYYHKNNKSWMESEFRVYSSANNCTFEYVSQPFLMDLEGKQGNFKNLREFVFKNIDGYFKIYSKHTPINLVRDLPQGFSALEPLVDLPIGINITRFQTLLALHRSYLTPGDSSSGWTAGAAAYYVGYLQPRTFLLKYNENGTITDAVDCALDPLSETKCTLKSFTVEKGIYQTSNFRVQPTESIVRFPNITNLCPFGEVFNATRFASVYAWNRKRISNCVADYSVLYNSASFSTFKCYGVSPTKLNDLCFTNVYADSFVIRGDEVRQIAPGQTGKIADYNYKLPDDFTGCVIAWNSNNLDSKVGGNYNYLYRLFRKSNLKPFERDISTEIYQAGSTPCNGVEGFNCYFPLQSYGFQPTNGVGYQPYRVVVLSFELLHAPATVCGPKKSTNLVKNKCVNFNFNGLTGTGVLTESNKKFLPFQQFGRDIADTTDAVRDPQTLEILDITPCSFGGVSVITPGTNTSNQVAVLYQGVNCTEVPVAIHADQLTPTWRVYSTGSNVFQTRAGCLIGAEHVNNSYECDIPIGAGICASYQTQTNSPRRARSVASQSIIAYTMSLGAENSVAYSNNSCAIPTNFTISVTTEILPVSMTKTSVDCTMYICGDSTECSNLLLQYGSFCTQLNRALTGIAVEQDKNTQEVFAQVKQIYKTPPIKDFGGFNFSQILPDPSKPSKRSFIEDLLFNKVTLADAGFIKQYGDCLGDIAARDLICAQKFNGLTVLPPLLTDEMIAQYTSALLAGTITSGWTFGAGAALQIPFAMQMAYRFNGIGVTQNVLYENQKLIANQFNSAIGKIQDSLSSTATALGKLQDVVNQNAQALNTLVKQLSSNFGAISSVLNDILSRLDKVEAEVQIDRLITGRLQSLQTYVTQQLIRAAEIRASANLAATKMSECVLGQSKRVDFCGKGYHLMSFPQSAPHGVVFLHVTYVPAQEKNFTCAPAICHDGKAHFPREGVFVSNGTHWFVTQRNFYEPQIITTDNTFVSGNCDVVIGIVNNTVYDPLQPELDSGGGSGGGQIYEGKLTAEGLRFGIVASRFNHALVDRLVEGAIDAIVRHGGREEDITLVRVPGSWEIPVAAGELARKEDIDAVIAIGVLIRGATPHFDYIASEVSKGLADLSLELRKPITFGVITADTLEQAIERAGTKHGNKGWEAALSAIEMANLFKSLR

SEQ ID NO: 8005 - protein, 1307 aa, Artificial Sequence
  SARS-CoV-2/Belgium/BC-03016/2020__EPI_ISL_415157 spike protein (1-1147)(I712C_T1077C) LumSynth construct
MFVFLVLLPLVSSQCVNLTTRTQLPPAYTNSFTRGVYYPDKVFRSSVLHSTQDLFLPFFSNVTWFHAIHVSGTNGTKRFDNPVLPFNDGVYFASTEKSNIIRGWIFGTTLDSKTQSLLIVNNATNVVIKVCEFQFCNDPFLGVYYHKNNKSWMESEFRVYSSANNCTFEYVSQPFLMDLEGKQGNFKNLREFVFKNIDGYFKIYSKHTPINLVRDLPQGFSALEPLVDLPIGINITRFQTLLALHRSYLTPGDSSSGWTAGAAAYYVGYLQPRTFLLKYNENGTITDAVDCALDPLSETKCTLKSFTVEKGIYQTSNFRVQPTESIVRFPNITNLCPFGEVFNATRFASVYAWNRKRISNCVADYSVLYNSASFSTFKCYGVSPTKLNDLCFTNVYADSFVIRGDEVRQIAPGQTGKIADYNYKLPDDFTGCVIAWNSNNLDSKVGGNYNYLYRLFRKSNLKPFERDISTEIYQAGSTPCNGVEGFNCYFPLQSYGFQPTNGVGYQPYRVVVLSFELLHAPATVCGPKKSTNLVKNKCVNFNFNGLTGTGVLTESNKKFLPFQQFGRDIADTTDAVRDPQTLEILDITPCSFGGVSVITPGTNTSNQVAVLYQGVNCTEVPVAIHADQLTPTWRVYSTGSNVFQTRAGCLIGAEHVNNSYECDIPIGAGICASYQTQTNSPRRARSVASQSIIAYTMSLGAENSVAYSNNSCAIPTNFTISVTTEILPVSMTKTSVDCTMYICGDSTECSNLLLQYGSFCTQLNRALTGIAVEQDKNTQEVFAQVKQIYKTPPIKDFGGFNFSQILPDPSKPSKRSFIEDLLFNKVTLADAGFIKQYGDCLGDIAARDLICAQKFNGLTVLPPLLTDEMIAQYTSALLAGTITSGWTFGAGAALQIPFAMQMAYRFNGIGVTQNVLYENQKLIANQFNSAIGKIQDSLSSTAPALGKLQDVVNQNAQALNTLVKQLSSNFGAISSVLNDILSRLDKVEAEVQIDRLITGRLQSLQTYVTQQLIRAAEIRASANLAATKMSECVLGQSKRVDFCGKGYHLMSFPQSAPHGVVFLHVTYVPAQEKNFTCAPAICHDGKAHFPREGVFVSNGTHWFVTQRNFYEPQIITTDNTFVSGNCDVVIGIVNNTVYDPLQPELDSGGGSGGGQIYEGKLTAEGLRFGIVASRFNHALVDRLVEGAIDAIVRHGGREEDITLVRVPGSWEIPVAAGELARKEDIDAVIAIGVLIRGATPHFDYIASEVSKGLADLSLELRKPITFGVITADTLEQAIERAGTKHGNKGWEAALSAIEMANLFKSLR

SEQ ID NO: 8006 - protein, 1307 aa, Artificial Sequence
  SARS-CoV-2/Germany/BavPat3/2020__EPI_ISL_414521 spike protein (1-1147)(I712C_T1077C) LumSynth construct
MFVFLVLLPLVSSQCVNLTTRTQLPPAYTNSFTRGVYYPDKVFRSSVLHSTQDLFLPFFSNVTWFHAIHVSGTNGTKRFDNPVLPFNDGVYFASTEKSNIIRGWIFGTTLDSKTQSLLIVNNATNVVIKVCEFQFCNDPFLGVYYHKNNKSWMESEFRVYSSANNCTFEYVSQPFLMDLEGKQGNFKNLREFVFKNIDGYFKIYSKHTPINLVRDLPQGFSALEPLVDLPIGINITRFQTLLALHRSYLTPGDSSSGWTAGAAAYYVGYLQPRTFLLKYNENGTITDAVDCALDPLSETKCTLKSFTVEKGIYQTSNFRVQPTESIVRFPNITNLCPFGEVFNATRFASVYAWNRKRISNCVADYSVLYNSASFSTFKCYGVSPTKLNDLCFTNVYADSFVIRGDEVRQIAPGQTGKIADYNYKLPDDFTGCVIAWNSNNLDSKVGGNYNYLYRLFRKSNLKPFERDISTEIYQAGSTPCNGVEGFNCYFPLQSYGFQPTNGVGYQPYRVVVLSFELLHAPATVCGPKKSTNLVKNKCVNFNFNGLTGTGVLTESNKKFLPFQQFGRDIADTTDAVRDPQTLEILDITPCSFGGVSVITPGTNTSNQVAVLYQDVNCTEVPVAIHADQLTPTWRVYSTGSNVFQTRAGCLIGAEHVNNSYECDIPIGAGICASYQTQTNSPRRARSVASQSIIAYTMSLGAENSVAYSNNSCAIPTNFTISVTTEILPVSMTKTSVDCTMYICGDSTECSNLLLQYGSFCTQLNRALTGIAVEQDKNTQQVFAQVKQIYKTPPIKDFGGFNFSQILPDPSKPSKRSFIEDLLFNKVTLADAGFIKQYGDCLGDIAARDLICAQKFNGLTVLPPLLTDEMIAQYTSALLAGTITSGWTFGAGAALQIPFAMQMAYRFNGIGVTQNVLYENQKLIANQFNSAIGKIQDSLSSTASALGKLQDVVNQNAQALNTLVKQLSSNFGAISSVLNDILSRLDKVEAEVQIDRLITGRLQSLQTYVTQQLIRAAEIRASANLAATKMSECVLGQSKRVDFCGKGYHLMSFPQSAPHGVVFLHVTYVPAQEKNFTCAPAICHDGKAHFPREGVFVSNGTHWFVTQRNFYEPQIITTDNTFVSGNCDVVIGIVNNTVYDPLQPELDSGGGSGGGQIYEGKLTAEGLRFGIVASRFNHALVDRLVEGAIDAIVRHGGREEDITLVRVPGSWEIPVAAGELARKEDIDAVIAIGVLIRGATPHFDYIASEVSKGLADLSLELRKPITFGVITADTLEQAIERAGTKHGNKGWEAALSAIEMANLFKSLR

SEQ ID NO: 8007 - protein, 1307 aa, Artificial Sequence
  SARS-CoV-2/France/HF1805/2020__EPI_ISL_414628 spike protein (1-1147)(I712C_T1077C) LumSynth construct
MFVFLVLLPLVSSQCVNLTTRTQLPPAYTNSFTRGVYYPDKVFRSSVLHSTQDLFLPFFSNVTWFHAIHVSGTNGTKRFDNPVLPFNDGVYFASTEKSNIIRGWIFGTTLDSKTQSLLIVNNATNVVIKVCEFQFCNDPFLGVYYHKNNKSWMESEFRVYSSANNCTFEYVSQPFLMDLEGKQGNFKNLREFVFKNIDGYFKIYSKHTPINLVRDLPQGFSALEPLVDLPIGINITRFQTLLALHRSYLTPGDSSSGWTAGAAAYYVGYLQPRTFLLKYNENGTITDAVDCALDPLSETKCTLKSFTVEKGIYQTSNFRVQPTESIVRFPNITNLCPFGEVFNATRFASVYAWNRKRISNCVADYSVLYNSASFSTFKCYGVSPTKLNDLCFTNVYADSFVIRGDEVRQIAPGQTGKIADYNYKLPDDFTGCVIAWNSNNLDSKVGGNYNYLYRLFRKSNLKPFERDISTEIYQAGSTPCNGVEGFNCYFPLQSYGFQPTNGVGYQPYRVVVLSFELLHAPATVCGPKKSTNLVKNKCVNFNFNGLTGTGVLTESNKKFLPFQQFGRDIADTTDAVRDPQTLEILDITPCSFGGVSVITPGTNTSNQVAVLYQGVNCTEVPVAIHADQLTPTWRVYSTGSNVFQTRAGCLIGAEHVNNSYECDIPIGAGICASYQTQTNSPRRARSVASQSIIAYTMSLGAENSVAYSNNSCAIPTNFTISVTTEILPVSMTKTSVDCTMYICGDSTECSNLLLQYGSFCTQLNRALTGIAVEQDKNTQEVFAQVKQIYKTPPIKDFGGFNFSQILPDPSKPSKRSFIEDLLFNKVTLADAGFIKQYGDCLGDIAARDLICAQKFNGLTVLPPLLTDEMIAQYTSALLAGTITSGWTFGAGAALQIPFAMQMAYRFNGIGVTQNVLYENQKLIANQFNSAIGKIQDSLSSTASALGKLQDVVNQNAQALNTLVKQLSSNFGAISSVLNDILSRLDKVEAEVQIDRLITGRLQSLQTYVTQQLIRAAEIRASANLAATKMSECVLGQSKRVDFCGKGYHLMSFPQSAPHGVVFLHVTYVPAQEKNFTCAPAICHDGKAHFPREGVFVSNGTHWFVTQRNFYEPQIITTDNTFVSGNCDVVIGVVNNTVYDPLQPELDSGGGSGGGQIYEGKLTAEGLRFGIVASRFNHALVDRLVEGAIDAIVRHGGREEDITLVRVPGSWEIPVAAGELARKEDIDAVIAIGVLIRGATPHFDYIASEVSKGLADLSLELRKPITFGVITADTLEQAIERAGTKHGNKGWEAALSAIEMANLFKSLR

SEQ ID NO: 8008 - protein, 1307 aa, Artificial Sequence
  SARS-CoV-2/Netherlands/ZuidHolland_9/2020__EPI_ISL_414445 spike protein (1-1147)(I712C_T1077C) LumSynth construct
MFVFLVLLPLVSSQCVNLTTRTQLPPAYTNSFTRGVYYPDKVFRSSVLHSTQDLFLPFFSNVTWFHAIHVSGTNGTKRFDNPVLPFNDGVYFASTEKSNIIRGWIFGTTLDSKTQSLLIVNNATNVVIKVCEFQFCNDPFLGVYYHKNNKSWMESEFRVYSSANNCTFEYVSQPFLMDLEGKQGNFKNLREFVFKNIDGYFKIYSKHTPINLVRDLPQGFSALEPLVDLPIGINITRFQTLLALHRSYLTPGDSSSGWTAGAAAYYVGYLQPRTFLLKYNENGTITDAVDCALDPLSETKCTLKSFTVEKGIYQTSNFRVQPTESIVRFPNITNLCPFGEVFNATRFASVYAWNRKRISNCVADYSVLYNSASFSTFKCYGVSPTKLNDLCFTNVYADSFVIRGDEVRQIAPGQTGKIADYNYKLPDDFTGCVIAWNSNNLDSKVGGNYNYLYRLFRKSNLKPFERDISTEIYQAGSTPCNGVEGFNCYFPLQSYGFQPTNGVGYQPYRVVVLSFELLHAPATVCGPKKSTNLVKNKCVNFNFNGLTGTGVLTESNKKFLPFQQFGRDIADTTDAVRDPQTLEILDITPCSFGGVSVITPGTNTSNQVAVLYQGVNCTEVPVAIHADQLTPTWRVYSTGSNVFQTRAGCLIGAEHVNNSYECDIPIGAGICASYQTQTNSPRRARSVASQSIIAYTMSLGAENSVAYSNNSCAIPTNFTISVTTEILPVSMTKTSVDCTMYICGDSTECSNLLLQYGSFCTQLNRALTGIAVEQDKNTQEVFAQVKQIYKTPPIKDFGGFNFSQILPDPSKPSKRSFIEDLLFNKVTLADAGFIKQYGDCLGDIAARDLICVQKFNGLTVLPPLLTDEMIAQYTSALLAGTITSGWTFGAGAALQIPFAMQMAYRFNGIGVTQNVLYENQKLIANQFNSAIGKIQDSLSSTASALGKLQDVVNQNAQALNTLVKQLSSNFGAISSVLNDILSRLDKVEAEVQIDRLITGRLQSLQTYVTQQLIRAAEIRASANLAATKMSECVLGQSKRVDFCGKGYHLMSFPQSAPHGVVFLHVTYVPAQEKNFTCAPAICHDGKAHFPREGVFVSNGTHWFVTQRNFYEPQIITTDNTFVSGNCDVVIGIVNNTVYDPLQPELDSGGGSGGGQIYEGKLTAEGLRFGIVASRFNHALVDRLVEGAIDAIVRHGGREEDITLVRVPGSWEIPVAAGELARKEDIDAVIAIGVLIRGATPHFDYIASEVSKGLADLSLELRKPITFGVITADTLEQAIERAGTKHGNKGWEAALSAIEMANLFKSLR

SEQ ID NO: 8009 - protein, 1307 aa, Artificial Sequence
  SARS-CoV-2/Finland/FIN03032020A/2020__EPI_ISL_413602 spike protein (1-1147)(I712C_T1077C) LumSynth construct
MFVFLVLLPLVSSQCVNLTTRTQLPPAYTNSFTRGVYYPDKVFRSSVLHSTQDLFLPFFSNVTWFHAIHVSGTNGTKRFDNPVLPFNDGVYFASTEKSNIIRGWIFGTTLDSKTQSLLIVNNATNVVIKVCEFQFCNDPFLGVYYHKNNKSWMESEFRVYSSANNCTFEYVSQPFLMDLEGKQGNFKNLREFVFKNIDGYFKIYSKHTPINLVRDLPQGFSALEPLVDLPIGINITRFQTLLALHRSYLTPGDSSSGWTAGAAAYYVGYLQPRTFLLKYNENGTITDAVDCALDPLSETKCTLKSFTVEKGIYQTSNFRVQPTESIVRFPNITNLCPFGEVFNATRFASVYAWNRKRISNCVADYSVLYNSASFSTFKCYGVSPTKLNDLCFTNVYADSFVIRGDEVRQIAPGQTGKIADYNYKLPDDFTGCVISWNSNNLDSKVGGNYNYLYRLFRKSNLKPFERDISTEIYQAGSTPCNGVEGFNCYFPLQSYGFQPTNGVGYQPYRVVVLSFELLHAPATVCGPKKSTNLVKNKCVNFNFNGLTGTGVLTESNKKFLPFQQFGRDIADTTDAVRDPQTLEILDITPCSFGGVSVITPGTNTSNQVAVLYQGVNCTEVPVAIHADQLTPTWRVYSTGSNVFQTRAGCLIGAEHVNNSYECDIPIGAGICASYQTQTNSPRRARSVASQSIIAYTMSLGAENSVAYSNNSCAIPTNFTISVTTEILPVSMTKTSVDCTMYICGDSTECSNLLLQYGSFCTQLNRALTGIAVEQDKNTQEVFAQVKQIYKTPPIKDFGGFNFSQILPDPSKPSKRSFIEDLLFNKVTLADAGFIKQYGDCLGDIAARDLICAQKFNGLTVLPPLLTDEMIAQYTSALLAGTITSGWTFGAGAALQIPFAMQMAYRFNGIGVTQNVLYENQKLIANQFNSAIGKIQDSLSSTASALGKLQDVVNQNAQALNTLVKQLSSNFGAISSVLNDILSRLDKVEAEVQIDRLITGRLQSLQTYVTQQLIRAAEIRASANLAATKMSECVLGQSKRVDFCGKGYHLMSFPQSAPHGVVFLHVTYVPAQEKNFTCAPAICHDGKAHFPREGVFVSNGTHWFVTQRNFYEPQIITTDNTFVSGNCDVVIGIVNNTVYDPLQPELDSGGGSGGGQIYEGKLTAEGLRFGIVASRFNHALVDRLVEGAIDAIVRHGGREEDITLVRVPGSWEIPVAAGELARKEDIDAVIAIGVLIRGATPHFDYIASEVSKGLADLSLELRKPITFGVITADTLEQAIERAGTKHGNKGWEAALSAIEMANLFKSLR

SEQ ID NO: 8010 - protein, 1307 aa, Artificial Sequence
  SARS-CoV-2/France/GE1977/2020__EPI_ISL_414632 spike protein (1-1147)(I712C_T1077C) LumSynth construct
MFVFLVLLPLVSSQCVNLTTRTQLPPAYTNSFTRGVYYPDKVFRSSVLHSTQDLFLPFFSNVTWFHAIHVSGTNGTKRFDNPVLPFNDGVYFASTEKSNIIRGWIFGTTLDSKTQSLLIVNNATNVVIKVCEFQFCNDPFLGVYYHKNNKSWMESEFRVYSSANNCTFEYVSQPFLMDLEGKQGNFKNLREFVFKNIDGYFKIYSKHTPINLVRDLPQGFSALEPLVDLPIGINITRFQTLLALHRSYLTPGDSSSGWTAGAAAYYVGYLQPRTFLLKYNENGTITDAVDCALDPLSETKCTLKSFTVEKGIYQTSNFRVQPTESIVRFPNITNLCPFGEVFNATRFASVYAWNRKRISNCVADYSVLYNSASFSTFKCYGVSPTKLNDLCFTNVYADSFVIRGDEVRQIAPGQTGKIADYNYKLPDDFTGCVIAWNSNNLDSKVGGNYNYLYRLFRKSNLKPFERDISTEIYQAGSTPCNGVEGFNCYFPLQSYGFQPTNGVGYQPYRVVVLSFELLHAPATVCGPKKSTNLVKNKCVNFNFNGLTGTGVLTESNKKFLPFQQFGRDIADTTDAVRDPQTLEILDITPCSFGGVSVITPGTNTSNQVAVLYQGVNCTEVPVAIHADQLTPTWRVYSTGSNVFQTRAGCLIGAEHVNNSYECDIPIGAGICASYQTQTNSPRRARSVASQSIIAYTMSLGAENSVAYSNNSCAIPTNFTISVTTEILPVSMTKTSVDCTMYICGDSTECSNLLLQYGSFCTQLNRALTGIAVEQDKNTQEVFAQVKQIYKTPPIKDFGGFNFSQILPDPSKPSKRSFIEDLLFNKVTLADAGFIKQYGDCLGDIAARDLICAQKFNGLTVLPPLLTDEMIAQYTSALLAGTITSGWTFGAGAALQIPFAMQMAYRFNGIGVTQNVLYENQKLIANQFNSAIGKIQDSLFSTASALGKLQDVVNQNAQALNTLVKQLSSNFGAISSVLNDILSRLDKVEAEVQIDRLITGRLQSLQTYVTQQLIRAAEIRASANLAATKMSECVLGQSKRVDFCGKGYHLMSFPQSAPHGVVFLHVTYVPAQEKNFTCAPAICHDGKAHFPREGVFVSNGTHWFVTQRNFYEPQIITTDNTFVSGNCDVVIGIVNNTVYDPLQPELDSGGGSGGGQIYEGKLTAEGLRFGIVASRFNHALVDRLVEGAIDAIVRHGGREEDITLVRVPGSWEIPVAAGELARKEDIDAVIAIGVLIRGATPHFDYIASEVSKGLADLSLELRKPITFGVITADTLEQAIERAGTKHGNKGWEAALSAIEMANLFKSLR

SEQ ID NO: 8011 - protein, 1307 aa, Artificial Sequence
  SARS-CoV-2/Finland/FIN-313/2020__EPI_ISL_414641 spike protein (1-1147)(I712C_T1077C) LumSynth construct
MFVFLVLLPLVSSQCVNLTTRTQLPPAYTNSFTRGVYYPDKVFRSSVLHSTQDLFLPFFSNVTWFHAIHVSGTNGTKRFDNPVLPFNDGVYFASTEKSNIIRGWIFGTTLDSKTQSLLIVNNATNVVIKVCEFQFCNDPFLGVYYHKNNKSWMESEFRVYSSANNCTFEYVSQPFLMDLEGKQGNFKNLREFVFKNIDGYFKIYSKHTPINLVRDLPQGFSALEPLVDLPIGINITRFKTLLALHRSYLTPGDSSSGWTAGAAAYYVGYLQPRTFLLKYNENGTITDAVDCALDPLSETKCTLKSFTVEKGIYQTSNFRVQPTESIVRFPNITNLCPFGEVFNATRFASVYAWNRKRISNCVADYSVLYNSASFSTFKCYGVSPTKLNDLCFTNVYADSFVIRGDEVRQIAPGQTGKIADYNYKLPDDFTGCVIAWNSNNLDSKVGGNYNYLYRLFRKSNLKPFERDISTEIYQAGSTPCNGVEGFNCYFPLQSYGFQPTNGVGYQPYRVVVLSFELLHAPATVCGPKKSTNLVKNKCVNFNFNGLTGTGVLTESNKKFLPFQQFGRDIADTTDAVRDPQTLEILDITPCSFGGVSVITPGTNTSNQVAVLYQGVNCTEVPVAIHADQLTPTWRVYSTGSNVFQTRAGCLIGAEHVNNSYECDIPIGAGICASYQTQTNSPRRARSVASQSIIAYTMSLGAENSVAYSNNSCAIPTNFTISVTTEILPVSMTKTSVDCTMYICGDSTECSNLLLQYGSFCTQLNRALTGIAVEQDKNTQEVFAQVKQIYKTPPIKDFGGFNFSQILPDPSKPSKRSFIEDLLFNKVTLADAGFIKQYGDCLGDIAARDLICAQKFNGLTVLPPLLTDEMIAQYTSALLAGTITSGWTFGAGAALQIPFAMQMAYRFNGIGVTQNVLYENQKLIANQFNSAIGKIQDSLSSTASALGKLQDVVNQNAQALNTLVKQLSSNFGAISSVLNDILSRLDKVEAEVQIDRLITGRLQSLQTYVTQQLIRAAEIRASANLAATKMSECVLGQSKRVDFCGKGYHLMSFPQSAPHGVVFLHVTYVPAQEKNFTCAPAICHDGKAHFPREGVFVSNGTHWFVTQRNFYEPQIITTDNTFVSGNCDVVIGIVNNTVYDPLQPELDSGGGSGGGQIYEGKLTAEGLRFGIVASRFNHALVDRLVEGAIDAIVRHGGREEDITLVRVPGSWEIPVAAGELARKEDIDAVIAIGVLIRGATPHFDYIASEVSKGLADLSLELRKPITFGVITADTLEQAIERAGTKHGNKGWEAALSAIEMANLFKSLR

SEQ ID NO: 8012 - protein, 1307 aa, Artificial Sequence
  SARS-CoV-2/Netherlands/ZuidHolland_2/2020__EPI_ISL_414556 spike protein (1-1147)(I712C_T1077C) LumSynth construct
MFVFLVLLPLVSSQCVNLTTRTQLPPAYTNSFTRGVYYPDKVFRSSVLHSTQDLFLPFFSNVTWFHAIHVSGTNGTKRFDNPVLPFNDGVYFASTEKSNIIRGWIFGTTLDSKTQSLLIVNNATNVVIKVCEFQFCNDPFLGVYYHKNNKSWMESEFRVYSSANNCTFEYVSQPFLMDLEGKQGNFKNLREFVFKNIDGYFKIYSKHTPINLVRDLPQGFSALEPLVDLPIGINITRFQTLLALHRSYLTPGDSSSGWTAGAAAYYVGYLQPRTFLLKYNENGTITDAVDCALDPLSETKCTLKSFTVEKGIYQTSNFRVQPTESIVRFPNITNLCPFGEVFNATRFASVYAWNRKRISNCVADYSVLYNSASFSTFKCYGVSPTKLNDLCFTNVYADSFVIRGDEVRQIAPGQTGKIADYNYKLPDDFTGCVIAWNSNNLDSKVGGNYNYLYRLFRKSNLKPFERDISTEIYQAGSTPCNGVEGFNCYFPLQSYGFQPTNGVGYQPYRVVVLSFELLHAPATVCGPKKSTNLVKNKCVNFNFNGLTGTGVLTESNKKFLPFQQFGRDIADTTDAVRDPQTLEILDITPCSFGGVSVITPGTNTSNQVAVLYQGVNCTEVPVAIHADQLTPTWRVYSTGSNVFQTRAGCLIGAEHVNNSYECDIPIGAGICASYQTQTNSPRRARSVASQSIIAYTMSLGAENSVAYSNNSCAIPTNFTISVTTEILPVSMTKTSVDCTMYICGDSTECSNLLLQYGSFCTQLNRALTGIALEQDKNTQEVFAQVKQIYKTPPIKDFGGFNFSQILPDPSKPSKRSFIEDLLFNKVTLADAGFIKQYGDCLGDIAARDLICAQKFNGLTVLPPLLTDEMIAQYTSALLAGTITSGWTFGAGAALQIPFAMQMAYRFNGIGVTQNVLYENQKLIANQFNSAIGKIQDSLSSTASALGKLQDVVNQNAQALNTLVKQLSSNFGAISSVLNDILSRLDKVEAEVQIDRLITGRLQSLQTYVTQQLIRAAEIRASANLAATKMSECVLGQSKRVDFCGKGYHLMSFPQSAPHGVVFLHVTYVPAQEKNFTCAPAICHDGKAHFPREGVFVSNGTHWFVTQRNFYEPQIITTDNTFVSGNCDVVIGIVNNTVYDPLQPELDSGGGSGGGQIYEGKLTAEGLRFGIVASRFNHALVDRLVEGAIDAIVRHGGREEDITLVRVPGSWEIPVAAGELARKEDIDAVIAIGVLIRGATPHFDYIASEVSKGLADLSLELRKPITFGVITADTLEQAIERAGTKHGNKGWEAALSAIEMANLFKSLR

SEQ ID NO: 8013 - protein, 1307 aa, Artificial Sequence
  SARS-CoV-2/USA/WA-UW31/2020__EPI_ISL_414618 spike protein (1-1147)(I712C_T1077C) LumSynth construct
MFVFLVLLPLVSSQCVNLTTRTQLPPAYTNSFTRGVYYPDKVFRSSVLHSTQDLFLPFFSNVTWFHAIHVSGTNGTKRFDNPVLPFNDGVYFASTEKSNIIRGWIFGTTLDSKTQSLLIVNNATNVVIKVCEFQFCNDPFLGVYYHKNNKSWMESEFRVYSSANNCTFEYVSQPFLMDLEGKQGNFKNLREFVFKNIDGYFKIYSKHTPINLVRDLPQGFSALEPLVDLPIGINITRFQTLLALHRSYLTPGDSSSGWTAGAAAYYVGYLQPRTFLLKYNENGTITDAVDCALDPLSETKCTLKSFTVEKGIYQTSNFRVQPTESIVRFPNITNLCPFGEVFNATRFASVYAWNRKRISNCVADYSVLYNSASFSTFKCYGVSPTKLNDLCFTNVYADSFVIRGDEVRQIAPGQTGKIADYNYKLPDDFTGCVIAWNSNNLDSKVGGNYNYLYRLFRKSNLKPFERDISTEIYQAGSTPCNGAEGFNCYFPLQSYGFQPTNGVGYQPYRVVVLSFELLHAPATVCGPKKSTNLVKNKCVNFNFNGLTGTGVLTESNKKFLPFQQFGRDIADTTDAVRDPQTLEILDITPCSFGGVSVITPGTNTSNQVAVLYQDVNCTEVPVAIHADQLTPTWRVYSTGSNVFQTRAGCLIGAEHVNNSYECDIPIGAGICASYQTQTNSPRRARSVASQSIIAYTMSLGAENSVAYSNNSCAIPTNFTISVTTEILPVSMTKTSVDCTMYICGDSTECSNLLLQYGSFCTQLNRALTGIAVEQDKNTQEVFAQVKQIYKTPPIKDFGGFNFSQILPDPSKPSKRSFIEDLLFNKVTLADAGFIKQYGDCLGDIAARDLICAQKFNGLTVLPPLLTDEMIAQYTSALLAGTITSGWTFGAGAALQIPFAMQMAYRFNGIGVTQNVLYENQKLIANQFNSAIGKIQDSLSSTASALGKLQDVVNQNAQALNTLVKQLSSNFGAISSVLNDILSRLDKVEAEVQIDRLITGRLQSLQTYVTQQLIRAAEIRASANLAATKMSECVLGQSKRVDFCGKGYHLMSFPQSAPHGVVFLHVTYVPAQEKNFTCAPAICHDGKAHFPREGVFVSNGTHWFVTQRNFYEPQIITTDNTFVSGNCDVVIGIVNNTVYDPLQPELDSGGGSGGGQIYEGKLTAEGLRFGIVASRFNHALVDRLVEGAIDAIVRHGGREEDITLVRVPGSWEIPVAAGELARKEDIDAVIAIGVLIRGATPHFDYIASEVSKGLADLSLELRKPITFGVITADTLEQAIERAGTKHGNKGWEAALSAIEMANLFKSLR

SEQ ID NO: 8014 - protein, 1307 aa, Artificial Sequence
  SARS-CoV-2/South Korea/SNU01/2020__EPI_ISL_411929 spike protein (1-1147)(I712C_T1077C) LumSynth construct
MFVFLVLLPLVSSQCVNLTTRTQLPPAYTNSFTRGVYYPDKVFRSSVLHSTQDLFLPFFSNVTWFHAIHVSGTNGTKRFDNPVLPFNDGVYFASTEKSNIIRGWIFGTTLDSKTQSLLIVNNATNVVIKVCEFQFCNDPFLGVYYHKNNKSWMESEFRVYSSANNCTFEYVSQPFLMDLEGKQGNFKNLREFVFKNIDGYFKIYSKHTPINLVRDLPQGFWALEPLVDLPIGINITRFQTLLALHRSYLTPGDSSSGWTAGAAAYYVGYLQPRTFLLKYNENGTITDAVDCALDPLSETKCTLKSFTVEKGIYQTSNFRVQPTESIVRFPNITNLCPFGEVFNATRFASVYAWNRKRISNCVADYSVLYNSASFSTFKCYGVSPTKLNDLCFTNVYADSFVIRGDEVRQIAPGQTGKIADYNYKLPDDFTGCVIAWNSNNLDSKVGGNYNYLYRLFRKSNLKPFERDISTEIYQAGSTPCNGVEGFNCYFPLQSYGFQPTNGVGYQPYRVVVLSFELLHAPATVCGPKKSTNLVKNKCVNFNFNGLTGTGVLTESNKKFLPFQQFGRDIADTTDAVRDPQTLEILDITPCSFGGVSVITPGTNTSNQVAVLYQDVNCTEVPVAIHADQLTPTWRVYSTGSNVFQTRAGCLIGAEHVNNSYECDIPIGAGICASYQTQTNSPRRARSVASQSIIAYTMSLGAENSVAYSNNSCAIPTNFTISVTTEILPVSMTKTSVDCTMYICGDSTECSNLLLQYGSFCTQLNRALTGIAVEQDKNTQEVFAQVKQIYKTPPIKDFGGFNFSQILPDPSKPSKRSFIEDLLFNKVTLADAGFIKQYGDCLGDIAARDLICAQKFNGLTVLPPLLTDEMIAQYTSALLAGTITSGWTFGAGAALQIPFAMQMAYRFNGIGVTQNVLYENQKLIANQFNSAIGKIQDSLSSTASALGKLQDVVNQNAQALNTLVKQLSSNFGAISSVLNDILSRLDKVEAEVQIDRLITGRLQSLQTYVTQQLIRAAEIRASANLAATKMSECVLGQSKRVDFCGKGYHLMSFPQSAPHGVVFLHVTYVPAQEKNFTCAPAICHDGKAHFPREGVFVSNGTHWFVTQRNFYEPQIITTDNTFVSGNCDVVIGIVNNTVYDPLQPELDSGGGSGGGQIYEGKLTAEGLRFGIVASRFNHALVDRLVEGAIDAIVRHGGREEDITLVRVPGSWEIPVAAGELARKEDIDAVIAIGVLIRGATPHFDYIASEVSKGLADLSLELRKPITFGVITADTLEQAIERAGTKHGNKGWEAALSAIEMANLFKSLR

SEQ ID NO: 8015 - protein, 1307 aa, Artificial Sequence
  SARS-CoV-2/China/WF0004/2020__EPI_ISL_413694 spike protein (1-1147)(I712C_T1077C) LumSynth construct
MFVFLVLLPLVSSQCVNLTTRTQLPPAYTNSFTRGVYYPDKVFRSSVLHSTQDLFLPFFSNVTWFHAIHVSGTNGTKRFDNPVLPFNDGVYFASTEKSNIIRGWIFGTTLDSKTQSLLIVNNATNVVIKVCEFQFCNDPFLGVYYHKNNKSWTESEFRVYSSANNCTFEYVSQPFLMDLEGKQGNFKNLREFVFKNIDGYFKIYSKHTPINLVRDLPQGFSALEPLVDLPIGINITRFQTLLALHRSYLTPGDSSSGWTAGAAAYYVGYLQPRTFLLKYNENGTITDAVDCALDPLSETKCTLKSFTVEKGIYQTSNFRVQPTESIVRFPNITNLCPFGEVFNATRFASVYAWNRKRISNCVADYSVLYNSASFSTFKCYGVSPTKLNDLCFTNVYADSFVIRGDEVRQIAPGQTGKIADYNYKLPDDFTGCVIAWNSNNLDSKVGGNYNYLYRLFRKSNLKPFERDISTEIYQAGSTPCNGVEGFNCYFPLQSYGFQPTNGVGYQPYRVVVLSFELLHAPATVCGPKKSTNLVKNKCVNFNFNGLTGTGVLTESNKKFLPFQQFGRDIADTTDAVRDPQTLEILDITPCSFGGVSVITPGTNTSNQVAVLYQDVNCTEVPVAIHADQLTPTWRVYSTGSNVFQTRAGCLIGAEHVNNSYECDIPIGAGICASYQTQTNSPRRARSVASQSIIAYTMSLGAENSVAYSNNSCAIPTNFTISVTTEILPVSMTKTSVDCTMYICGDSTECSNLLLQYGSFCTQLNRALTGIAVEQDKNTQEVFAQVKQIYKTPPIKDFGGFNFSQILPDPSKPSKRSFIEDLLFNKVTLADAGFIKQYGDCLGDIAARDLICAQKFNGLTVLPPLLTDEMIAQYTSALLAGTITSGWTFGAGAALQIPFAMQMAYRFNGIGVTQNVLYENQKLIANQFNSAIGKIQDSLSSTASALGKLQDVVNQNAQALNTLVKQLSSNFGAISSVLNDILSRLDKVEAEVQIDRLITGRLQSLQTYVTQQLIRAAEIRASANLAATKMSECVLGQSKRFDFCGKGYHLMSFPQSAPHGVVFLHVTYVPAQEKNFTCAPAICHDGKAHFPREGVFVSNGTHWFVTQRNFYEPQIITTDNTFVSGNCDVVIGIVNNTVYDPLQPELDSGGGSGGGQIYEGKLTAEGLRFGIVASRFNHALVDRLVEGAIDAIVRHGGREEDITLVRVPGSWEIPVAAGELARKEDIDAVIAIGVLIRGATPHFDYIASEVSKGLADLSLELRKPITFGVITADTLEQAIERAGTKHGNKGWEAALSAIEMANLFKSLR

SEQ ID NO: 8016 - protein, 1307 aa, Artificial Sequence
  SARS-CoV-2/China/WF0028/2020__EPI_ISL_413791 spike protein (1-1147)(I712C_T1077C) LumSynth construct
MFVFLVLLPLVSSQCVNLTTRTQLPPAYTNSFTRGVYYPDKVFRSSVLHSTQDLFLPFFSNVTWFHAIHVSGTNGTKRFDNPVLPFNDGVYFASTEKSNIIRGWIFGTTLDSKTQSLLIVNNATNVVIKVCEFQFCNDPFLGVYYHKNNKSWMESEFRVYSSANNCTFEYVSQPFLMDLEGKQGNFKNLREFVFKNIDGYFKIYSKHTPINLVRDLPQGFSALEPLVDLPIGINITRFQTLLALHRSYLTPGDSSSGWTAGAAAYYVGYLQPRTFLLKYNENGTITDAVDCALDPLSETKCTLKSFTVEKGIYQTSNFRVQPTESIVRFPNITNLCPFGEVFNATRFASVYAWNRKRISNCVADYSVLYNSASFSTFKCYGVSPTKLNDLCFTNVYADSFVIRGDEVRQIAPGQTGKIADYNYKLPDDFTGCVIAWNSNNLDSKVGGNYNYLYRLFRKSNLKPFERDISTEIYQAGSTPCNGVEGFNCYFPLQSYGFQPTNGVGYQPYRVVVLSFELLHAPATVCGPKKSTNLVKNKCVNFNFNGLTGTGVLTESNKKFLPFQQFGRDIADTTDAVRDPQTLEILDITPCSFGGVSVITPGTNTSNQVAVLYQDVNCTEVPVAIHADQLTPTWRVYSTGSNVFQTRAGCLIGAEHVNNSYECDIPIGAGICASYQTQTNSPRRARSVASQSIIAYTMSLGAENSVAYSNNSCAIPTNFTISVTTEILPVSMTKTSVDCTMYICGDSTECSNLLLQYGSFCTQLNRALTGIAVEQDKNTQEVFAQVKQIYKTPPIKDFGGFNFSQILPDPSKPSKRSFIEDLLFNKVTLADAGFIKQYGDCLGDIAARDLICAQKFNGLTVLPPLLTDEMIAQYTSALLAGTITSGWTFGAGAALQIPFAMQMAYRFNGIGVTQNVLYENQKLIANQFNSAIGKIQDSLSSTASALGKLQDVVNQNAQALNTLVKQLSSNFGAISSVLNDILSRLDKVEAEVQIDRLITGRLQSLQTYVTQQLIRAAEIRASANLAATKMSECVLGQSKRVDFCGKGYHLMSFPQSAPHGVVFLHVTYVPAQEKNFTCAPAICHDGKAHFPREGVFVSNGTHWFVTQRNFYEPQIITTDNTFVSGNCDVVIGIVNNTVYDPLQPELESGGGSGGGQIYEGKLTAEGLRFGIVASRFNHALVDRLVEGAIDAIVRHGGREEDITLVRVPGSWEIPVAAGELARKEDIDAVIAIGVLIRGATPHFDYIASEVSKGLADLSLELRKPITFGVITADTLEQAIERAGTKHGNKGWEAALSAIEMANLFKSLR

SEQ ID NO: 8017 - protein, 1307 aa, Artificial Sequence
  SARS-CoV-2/2019-nCoV/USA-CruiseA-18/2020__MT159716.1 spike protein (1-1147)(I712C_T1077C) LumSynth construct
MFVFLVLLPLVSSQCVNLTTRTQLPPAYTNSFTRGVYYPDKVFRSSVLHSTQDLFLPFFSNVTWFHAIHVSGTNGTKRFDNPVLPFNDGVYFASTEKSNIIRGWIFGTTLDSKTQSLLIVNNATNVVIKVCEFQFCNDPFLGVYYHKNNKSWMESELRVYSSANNCTFEYVSQPFLMDLEGKQGNFKNLREFVFKNIDGYFKIYSKHTPINLVRDLPQGFSALEPLVDLPIGINITRFQTLLALHRSYLTPGDSSSGWTAGAAAYYVGYLQPRTFLLKYNENGTITDAVDCALDPLSETKCTLKSFTVEKGIYQTSNFRVQPTESIVRFPNITNLCPFGEVFNATRFASVYAWNRKRISNCVADYSVLYNSASFSTFKCYGVSPTKLNDLCFTNVYADSFVIRGDEVRQIAPGQTGKIADYNYKLPDDFTGCVIAWNSNNLDSKVGGNYNYLYRLFRKSNLKPFERDISTEIYQAGSTPCNGVEGFNCYFPLQSYGFQPTNGVGYQPYRVVVLSFELLHAPATVCGPKKSTNLVKNKCVNFNFNGLTGTGVLTESNKKFLPFQQFGRDIADTTDAVRDPQTLEILDITPCSFGGVSVITPGTNTSNQVAVLYQDVNCTEVPVAIHADQLTPTWRVYSTGSNVFQTRAGCLIGAEHVNNSYECDIPIGAGICASYQTQTNSPRRARSVASQSIIAYTMSLGAENSVAYSNNSCAIPTNFTISVTTEILPVSMTKTSVDCTMYICGDSTECSNLLLQYGSFCTQLNRALTGIAVEQDKNTQEVFAQVKQIYKTPPIKDFGGFNFSQILPDPSKPSKRSFIEDLLFNKVTLADAGFIKQYGDCLGDIAARDLICAQKFNGLTVLPPLLTDEMIAQYTSALLAGTITSGWTFGAGAALQIPFAMQMAYRFNGIGVTQNVLYENQKLIANQFNSAIGKIQDSLSSTASALGKLQDVVNQNAQALNTLVKQLSSNFGAISSVLNDILSRLDKVEAEVQIDRLITGRLQSLQTYVTQQLIRAAEIRASANLAATKMSECVLGQSKRVDFCGKGYHLMSFPQSAPHGVVFLHVTYVPAQEKNFTCAPAICHDGKAHFPREGVFVSNGTHWFVTQRNFYEPQIITTDNTFVSGNCDVVIGIVNNTVYDPLQPELDSGGGSGGGQIYEGKLTAEGLRFGIVASRFNHALVDRLVEGAIDAIVRHGGREEDITLVRVPGSWEIPVAAGELARKEDIDAVIAIGVLIRGATPHFDYIASEVSKGLADLSLELRKPITFGVITADTLEQAIERAGTKHGNKGWEAALSAIEMANLFKSLR

SEQ ID NO: 8018 - protein, 1307 aa, Artificial Sequence
  SARS-CoV-2/SARS-CoV-2/Yunnan-01/human/2020/CHN__MT049951.1 spike protein (1-1147)(I712C_T1077C) LumSynth construct
MFVFLVLLPLVSSQCVNLTTRTQLPPANTNSFTRGVYYPDKVFRSSVLHSTQDLFLPFFSNVTWFHAIHVSGTNGTKRFDNPVLPFNDGVYFASTEKSNIIRGWIFGTTLDSKTQSLLIVNNATNVVIKVCEFQFCNDPFLGVYYHKNNKSWMESEFRVYSSANNCTFEYVSQPFLMDLEGKQGNFKNLREFVFKNIDGYFKIYSKHTPINLVRDLPQGFSALEPLVDLPIGINITRFQTLLALHRSYLTPGDSSSGWTAGAAAYYVGYLQPRTFLLKYNENGTITDAVDCALDPLSETKCTLKSFTVEKGIYQTSNFRVQPTESIVRFPNITNLCPFGEVFNATRFASVYAWNRKRISNCVADYSVLYNSASFSTFKCYGVSPTKLNDLCFTNVYADSFVIRGDEVRQIAPGQTGKIADYNYKLPDDFTGCVIAWNSNNLDSKVGGNYNYLYRLFRKSNLKPFERDISTEIYQAGSTPCNGVEGFNCYFPLQSYGFQPTNGVGYQPYRVVVLSFELLHAPATVCGPKKSTNLVKNKCVNFNFNGLTGTGVLTESNKKFLPFQQFGRDIADTTDAVRDPQTLEILDITPCSFGGVSVITPGTNTSNQVAVLYQDVNCTEVPVAIHADQLTPTWRVYSTGSNVFQTRAGCLIGAEHVNNSYECDIPIGAGICASYQTQTNSPRRARSVASQSIIAYTMSLGAENSVAYSNNSCAIPTNFTISVTTEILPVSMTKTSVDCTMYICGDSTECSNLLLQYGSFCTQLNRALTGIAVEQDKNTQEVFAQVKQIYKTPPIKDFGGFNFSQILPDPSKPSKRSFIEDLLFNKVTLADAGFIKQYGDCLGDIAARDLICAQKFNGLTVLPPLLTDEMIAQYTSALLAGTITSGWTFGAGAALQIPFAMQMAYRFNGIGVTQNVLYENQKLIANQFNSAIGKIQDSLSSTASALGKLQDVVNQNAQALNTLVKQLSSNFGAISSVLNDILSRLDKVEAEVQIDRLITGRLQSLQTYVTQQLIRAAEIRASANLAATKMSECVLGQSKRVDFCGKGYHLMSFPQSAPHGVVFLHVTYVPAQEKNFTCAPAICHDGKAHFPREGVFVSNGTHWFVTQRNFYEPQIITTDNTFVSGNCDVVIGIVNNTVYDPLQPELDSGGGSGGGQIYEGKLTAEGLRFGIVASRFNHALVDRLVEGAIDAIVRHGGREEDITLVRVPGSWEIPVAAGELARKEDIDAVIAIGVLIRGATPHFDYIASEVSKGLADLSLELRKPITFGVITADTLEQAIERAGTKHGNKGWEAALSAIEMANLFKSLR

SEQ ID NO: 8019 - protein, 1307 aa, Artificial Sequence
  SARS-CoV-2/USA/WA-UW292/2020__EPI_ISL_418077 spike protein (1-1147)(I712C_T1077C) LumSynth construct
MFVFLVLLPLVSSQCVNLTTRTQLPPAYTNSFTRGVYYPDKVFRSSVLHSTQDLFLPFFSNVTWFHAIHVSGTNGTKRFDNPVLPFNDGVYFASTEKSNIIRGWIFGTTLDSKTQSLLIVNNATNVVIKVCEFQFCNDPFLGVYYHKNNKSWMESEFRVYSSANNCTFEYVSQPFLMDLEGKQGNFKNLREFVFKNIDGYFKIYSKHTPINLVRDLPQGFSALEPLVDLPIGINITRFQTLLALHRSYLTPGDSSSGWTAGAAAYYVGYLQPRTFLLKYNENGTITDAVDCALDPLSETKCTLKSFTVEKGIYQTSNFRVQPTESIVRFPNITNLCPFGEVFNATRFASVYAWNRKRISNCVADYSVLYNSASFSTFKCYGVSPTKLNDLCFTNVYADSFVIRGDEVRQIAPGQTGKIADYNYKLPDDFTGCVIAWNSNNLDSKVGGNYNYLYRLFRKSNLKPFERDISTEIYQASSTPCNGVEGFNCYFPLQSYGFQPTNGVGYQPYRVVVLSFELLHAPATVCGPKKSTNLVKNKCVNFNFNGLTGTGVLTESNKKFLPFQQFGRDIADTTDAVRDPQTLEILDITPCSFGGVSVITPGTNTSNQVAVLYQDVNCTEVPVAIHADQLTPTWRVYSTGSNVFQTRAGCLIGAEHVNNSYECDIPIGAGICASYQTQTNSPRRARSVASQSIIAYTMSLGAENSVAYSNNSCAIPTNFTISVTTEILPVSMTKTSVDCTMYICGDSTECSNLLLQYGSFCTQLNRALTGIAVEQDKNTQEVFAQVKQIYKTPPIKDFGGFNFSQILPDPSKPSKRSFIEDLLFNKVTLADAGFIKQYGDCLGDIAARDLICAQKFNGLTVLPPLLTDEMIAQYTSALLAGTITSGWTFGAGAALQIPFAMQMAYRFNGIGVTQNVLYENQKLIANQFNSAIGKIQDSLSSTASALGKLQDVVNQNAQALNTLVKQLSSNFGAISSVLNDILSRLDKVEAEVQIDRLITGRLQSLQTYVTQQLIRAAEIRASANLAATKMSECVLGQSKRVDFCGKGYHLMSFPQSAPHGVVFLHVTYVPAQEKNFTCAPAICHDGKAHFPREGVFVSNGTHWFVTQRNFYEPQIITTDNTFVSGNCDVVIGIVNNTVYDPLQPELDSGGGSGGGQIYEGKLTAEGLRFGIVASRFNHALVDRLVEGAIDAIVRHGGREEDITLVRVPGSWEIPVAAGELARKEDIDAVIAIGVLIRGATPHFDYIASEVSKGLADLSLELRKPITFGVITADTLEQAIERAGTKHGNKGWEAALSAIEMANLFKSLR

SEQ ID NO: 8020 - protein, 1307 aa, Artificial Sequence
  SARS-CoV-2/Iceland/192/2020__EPI_ISL_417819 spike protein (1-1147)(I712C_T1077C) LumSynth construct
MFVFFVLLPLVSSQCVNLTTRTQLPPAYTNSFTRGVYYPDKVFRSSVLHSTQDLFLPFFSNVTWFHAIHVSGTNGTKRFDNPVLPFNDGVYFASTEKSNIIRGWIFGTTLDSKTQSLLIVNNATNVVIKVCEFQFCNDPFLGVYYHKNNKSWMESEFRVYSSANNCTFEYVSQPFLMDLEGKQGNFKNLREFVFKNIDGYFKIYSKHTPINLVRDLPQGFSALEPLVDLPIGINITRFQTLLALHRSYLTPGDSSSGWTAGAAAYYVGYLQPRTFLLKYNENGTITDAVDCALDPLSETKCTLKSFTVEKGIYQTSNFRVQPTESIVRFPNITNLCPFGEVFNATRFASVYAWNRKRISNCVADYSVLYNSASFSTFKCYGVSPTKLNDLCFTNVYADSFVIRGDEVRQIAPGQTGKIADYNYKLPDDFTGCVIAWNSNNLDSKVGGNYNYLYRLFRKSNLKPFERDISTEIYQAGSTPCNGVEGFNCYFPLQSYGFQPTNGVGYQPYRVVVLSFELLHAPATVCGPKKSTNLVKNKCVNFNFNGLTGTGVLTESNKKFLPFQQFGRDIADTTDAVRDPQTLEILDITPCSFGGVSVITPGTNTSNQVAVLYQGVNCTEVPVAIHADQLTPTWRVYSTGSNVFQTRAGCLIGAEHVNNSYECDIPIGAGICASYQTQTNSPRRARSVASQSIIAYTMSLGAENSVAYSNNSCAIPTNFTISVTTEILPVSMTKTSVDCTMYICGDSTECSNLLLQYGSFCTQLNRALTGIAVEQDKNTQEVFAQVKQIYKTPPIKDFGGFNFSQILPDPSKPSKRSFIEDLLFNKVTLADAGFIKQYGDCLGDIAARDLICAQKFNGLTVLPPLLTDEMIAQYTSALLAGTITSGWTFGAGAALQIPFAMQMAYRFNGIGVTQNVLYENQKLIANQFNSAIGKIQDSLSSTASALGKLQDVVNQNAQALNTLVKQLSSNFGAISSVLNDILSRLDKVEAEVQIDRLITGRLQSLQTYVTQQLIRAAEIRASANLAATKMSECVLGQSKRVDFCGKGYHLMSFPQSAPHGVVFLHVTYVPAQEKNFTCAPAICHDGKAHFPREGVFVSNGTHWFVTQRNFYEPQIITTDNTFVSGNCDVVIGIVNNTVYDPLQPELDSGGGSGGGQIYEGKLTAEGLRFGIVASRFNHALVDRLVEGAIDAIVRHGGREEDITLVRVPGSWEIPVAAGELARKEDIDAVIAIGVLIRGATPHFDYIASEVSKGLADLSLELRKPITFGVITADTLEQAIERAGTKHGNKGWEAALSAIEMANLFKSLR

SEQ ID NO: 8021 - protein, 1307 aa, Artificial Sequence
  SARS-CoV-2/Belgium/ULG-6939/2020__EPI_ISL_417020 spike protein (1-1147)(I712C_T1077C) LumSynth construct
MFVFLVLLPLVSSQCVNLTTRTQLPPAYTNSFTRGVYYPDKVFRSSVLHSTQDLFLPFFSNVTWFHAIHVSGTNGTKRFDNPVLPFNDGVYFASTEKSNIIRGWIFGTTLDSKTQSLLIVNNATNVVIKVCEFQFCNDPFLGVYYHKNNKSWMESEFRVYSSANNCTFEYVSQPFLMDLEGKQGNFKNLREFVFKNIDGYFKIYSKHTPINLVRDLPQGFSALEPLVDLPIGINITRFQTLLALHRSYLTPGDSSSGWTAGAAAYYVGYLQPRTFLLKYNENGTITDAVDCALDPLSETKCTLKSFTVEKGIYQTSNFRVQPTESIVRFPNITNLCPFGEVFNATRFASVYAWNRKRISNCVADYSVLYNSASFSTFKCYGVSPTKLNDLCFTNVYADSFVIRGDEVRQIAPGQTGKIADYNYKLPDDFTGCVIAWNSNNLDSKVGGNYNYLYRLFRKSNLKPFERDISTEIYQAGSTPCNGVEGFNCYFPLQSYGFQPTNGVGYQPYRVVVLSFELLHAPATVCGPKKSTNLVKNKCVNFNFNGLTGTGVLTESNKKFLPFQQFGRDIADTTDAVRDPQTLEILDITPCSFGGVSVITPGTNTSNQVAVLYQGVNCTEVPVAIHADQLTPTWRVYSTGSNVFQTRAGCLIGAEHVNNSYECDIPIGAGICASYQTQTNSPRRARSVASQSIIAYTMSLGAENSVVYSNNSCAIPTNFTISVTTEILPVSMTKTSVDCTMYICGDSTECSNLLLQYGSFCTQLNRALTGIAVEQDKNTQEVFAQVKQIYKTPPIKDFGGFNFSQILPDPSKPSKRSFIEDLLFNKVTLADAGFIKQYGDCLGDIAARDLICAQKFNGLTVLPPLLTDEMIAQYTSALLAGTITSGWTFGAGAALQIPFAMQMAYRFNGIGVTQNVLYENQKLIANQFNSAIGKIQDSLSSTASALGKLQDVVNQNAQALNTLVKQLSSNFGAISSVLNDILSRLDKVEAEVQIDRLITGRLQSLQTYVTQQLIRAAEIRASANLAATKMSECVLGQSKRVDFCGKGYHLMSFPQSAPHGVVFLHVTYVPAQEKNFTCAPAICHDGKAHFPREGVFVSNGTHWFVTQRNFYEPQIITTDNTFVSGNCDVVIGIVNNTVYDPLQPELDSGGGSGGGQIYEGKLTAEGLRFGIVASRFNHALVDRLVEGAIDAIVRHGGREEDITLVRVPGSWEIPVAAGELARKEDIDAVIAIGVLIRGATPHFDYIASEVSKGLADLSLELRKPITFGVITADTLEQAIERAGTKHGNKGWEAALSAIEMANLFKSLR

SEQ ID NO: 8022 - protein, 1307 aa, Artificial Sequence
  SARS-CoV-2/France/HF2496/2020__EPI_ISL_418231 spike protein (1-1147)(I712C_T1077C) LumSynth construct
MFVFLVLLPLVSSQCVNLTTRTQLPPAYTNSFTRGVYYPDKVFRSSVLHSTQDLFLPFFSNVTWFHAIHVSGTNGTKRFDNPVLPFNDGVYFASTEKSNIIRGWIFGTTLDSKTQSLLIVNNATNVVIKVCEFQFCNDPFLGVYYHKNNKSWMESEFRVYSSANNCTFEYVSQPFLMDLEGKQGNFKNLREFVFKNIDGYFKIYSKHTPINLVRDLPQGFSALEPLVDLPIGINITRFQTLLALHRSYLTPGDSSSGWTAGAAAYYVGYLQPRTFLLKYNENGTITDAVDCALDPLSETKCTLKSFTVEKGIYQTSNFRVQPTESIVRFPNITNLCPFGEVFNATRFASVYAWNRKRISNCVADYSVLYNSASFSTFKCYGVSPTKLNDLCFTNVYADSFVIRGDEVRQIAPGQTGKIADYNYKLPDDFTGCVIAWNSNNLDSKVGGNYNYLYRLFRKSNLKPFERDISTEIYQAGSTPCNGVEGFNCYFPLQSYGFQPTNGVGYQPYRVVVLSFELLHAPATVCGPKKSTNLVKNKCVNFNFNGLTGTGVLTESNKKFLPFQQFGRDIADTTDAVRDPQTLEILDITPCSFGGVSVITPGTNTSNQVAVLYQGVNCTEVPVAIHADQLTPTWRVYSTGSNVFQTRAGCLIGAEHVNNSYECDIPIGAGICASYQTQTNSPRRARSVASQSIIAYTMSLGAENSVAYSNNSCAIPTNFTISVTTEILPVSMTKTSVDCTMYICGDSTECSNLLLQYGSFCTQLNRALTGIAVEQDKNTQEVFAQVKQIYKTPPIKDFGGFNFSQILPDPSKPSKRSFIEDLLFNKVTLADAGFIKQYGDCLGDIVARDLICAQKFNGLTVLPPLLTDEMIAQYTSALLAGTITSGWTFGAGAALQIPFAMQMAYRFNGIGVTQNVLYENQKLIANQFNSAIGKIQDSLSSTASALGKLQDVVNQNAQALNTLVKQLSSNFGAISSVLNDILSRLDKVEAEVQIDRLITGRLQSLQTYVTQQLIRAAEIRASANLAATKMSECVLGQSKRVDFCGKGYHLMSFPQSAPHGVVFLHVTYVPAQEKNFTCAPAICHDGKAHFPREGVFVSNGTHWFVTQRNFYEPQIITTDNTFVSGNCDVVIGIVNNTVYDPLQPELDSGGGSGGGQIYEGKLTAEGLRFGIVASRFNHALVDRLVEGAIDAIVRHGGREEDITLVRVPGSWEIPVAAGELARKEDIDAVIAIGVLIRGATPHFDYIASEVSKGLADLSLELRKPITFGVITADTLEQAIERAGTKHGNKGWEAALSAIEMANLFKSLR

SEQ ID NO: 8023 - protein, 1307 aa, Artificial Sequence
  SARS-CoV-2/USA/WA-UW291/2020__EPI_ISL_418076 spike protein (1-1147)(I712C_T1077C) LumSynth construct
MFVFLVLLPLVSSQCVNLTTRTQLPPAYTNSFTRGVYYPDKVFRSSVLHSTQDLFLPFFSNVTWFHAIHVSGTNGTKRFDNPVLPFNDGVYFASTEKSNIIRGWIFGTTLDSKTQSLLIVNNATNVVIKVCEFQFCNDPFLGVYYHKNNKSWMESEFRVYSSANNCTFEYVSQPFLMDLEGKQGNFKNLREFVFKNIDGYFKIYSKHTPINLVRDLPQGFSALEPLVDLPIGINITRFQTLLALHRSYLTPGDSSSGWTAGAAAYYVGYLQPRTFLLKYNENGTITDAVDCALDPLSETKCTLKSFTVEKGIYQTSNFRVQPTESIVRFPNITNLCPFGEVFNATRFASVYAWNRKRISNCVADYSVLYNSASFSTFKCYGVSPTKLNDLCFTNVYADSFVIRGDEVRQIAPGQTGKIADYNYKLPDDFTGCVIAWNSNNLDSKVGGNYNYLYRLFRKSNLKPFERDISTEIYQAGSTPCNGVEGFNCYFPLQSYGFQPTNGVGYQPYRVVVLSFELLHAPATVCGPKKSTNLVKNKCVNFNFNGLTGTGVLTESNKKFLPFQQFGRDIADTTDAVRDPQTLEILDITPCSFGGVSVITPGTNTSNQVAVLYQGVNCTEVPVAIHADQLTPTWRVYSTGSNVFQTRAGCLIGAEHVNNSYECDIPIGAGICASYQTQTNSPRRARSVASQSIIAYTMSLGAENSVAYSNNSCAIPTNFTISVTTEILPVSMTKTSVDCTMYICGDSTECSNLLLQYGSFCTQLNRALTGIAVEQDKNTQEVFAQVKQIYKTPPIKDFGGFNFSQILPDPSKPSKRSFIEDLLFNKVTLADAGFIKQYGDCLGDIAARDLICAQKFNGLTVLPPLLTDEMIAQYTSALLAGTITSGWTFGAGAALQIPFAMQMAYRFNGIGVTQNVLYENQKLIANQFNSAIGKIQYSLSSTASALGKLQDVVNQNAQALNTLVKQLSSNFGAISSVLNDILSRLDKVEAEVQIDRLITGRLQSLQTYVTQQLIRAAEIRASANLAATKMSECVLGQSKRVDFCGKGYHLMSFPQSAPHGVVFLHVTYVPAQEKNFTCAPAICHDGKAHFPREGVFVSNGTHWFVTQRNFYEPQIITTDNTFVSGNCDVVIGIVNNTVYDPLQPELDSGGGSGGGQIYEGKLTAEGLRFGIVASRFNHALVDRLVEGAIDAIVRHGGREEDITLVRVPGSWEIPVAAGELARKEDIDAVIAIGVLIRGATPHFDYIASEVSKGLADLSLELRKPITFGVITADTLEQAIERAGTKHGNKGWEAALSAIEMANLFKSLR

SEQ ID NO: 8024 - protein, 1307 aa, Artificial Sequence; identical to SEQ ID NO: 7987
  SARS-CoV-2/Portugal/PT0034/2020__EPI_ISL_418019 spike protein (1-1147)(I712C_T1077C) LumSynth construct

SEQ ID NO: 8025 - protein, 1307 aa, Artificial Sequence; identical to SEQ ID NO: 7979
  SARS-CoV-2/Iceland/202/2020__EPI_ISL_417750 spike protein (1-1147)(I712C_T1077C) LumSynth construct

SEQ ID NO: 8026 - protein, 1307 aa, Artificial Sequence
  SARS-CoV-2/USA/WA-UW261/2020__EPI_ISL_418046 spike protein (1-1147)(I712C_T1077C) LumSynth construct
MFVFLVLLPLVSSQCVNLTTRTQLPPAYTNSFTRGVYYPDKVFRSSVLHSTQDLFLPFFSNVTWFHAIHVSGTNGTKRFDNPVLPFNDGVYFASTEKSNIIRGWIFGTTLDSKTQSLLIVNNATNVVIKVCEFQFCNDPFLGVYYHKNNKSWMESEFRVYSSANNCTFEYVSQPFLMDLEGKQGNFKNLREFVFKNIDGYFKIYSKHTPINLVRDLPQGFSALEPLVDLPIGINITRFQTLLALHRSYLTPGDSSSGWTAGAAAYYVGYLQPRTFLLKYNENGTITDAVDCALDPLSETKCTLKSFTVEKGIYQTSNFRVQPTESIVRFPNITNLCPFGEVFNATRFTSVYAWNRKRISNCVADYSVLYNSASFSTFKCYGVSPTKLNDLCFTNVYADSFVIRGDEVRQIAPGQTGKIADYNYKLPDDFTGCVIAWNSNNLDSKVGGNYNYLYRLFRKSNLKPFERDISTEIYQAGSTPCNGVEGFNCYFPLQSYGFQPTNGVGYQPYRVVVLSFELLHAPATVCGPKKSTNLVKNKCVNFNFNGLTGTGVLTESNKKFLPFQQFGRDIADTTDAVRDPQTLEILDITPCSFGGVSVITPGTNTSNQVAVLYQDVNCTEVPVAIHADQLTPTWRVYSTGSNVFQTRAGCLIGAEHVNNSYECDIPIGAGICASYQTQTNSPRRARSVASQSIIAYTMSLGAENSVAYSNNSCAIPTNFTISVTTEILPVSMTKTSVDCTMYICGDSTECSNLLLQYGSFCTQLNRALTGIAVEQDKNTQEVFAQVKQIYKTPPIKDFGGFNFSQILPDPSKPSKRSFIEDLLFNKVTLADAGFIKQYGDCLGDIAARDLICAQKFNGLTVLPPLLTDEMIAQYTSALLAGTITSGWTFGAGAALQIPFAMQMAYRFNGIGVTQNVLYENQKLIANQFNSAIGKIQDSLSSTASALGKLQDVVNQNAQALNTLVKQLSSNFGAISSVLNDILSRLDKVEAEVQIDRLITGRLQSLQTYVTQQLIRAAEIRASANLAATKMSECVLGQSKRVDFCGKGYHLMSFPQSAPHGVVFLHVTYVPAQEKNFTCAPAICHDGKAHFPREGVFVSNGTHWFVTQRNFYEPQIITTDNTFVSGNCDVVIGIVNNTVYDPLQPELDSGGGSGGGQIYEGKLTAEGLRFGIVASRFNHALVDRLVEGAIDAIVRHGGREEDITLVRVPGSWEIPVAAGELARKEDIDAVIAIGVLIRGATPHFDYIASEVSKGLADLSLELRKPITFGVITADTLEQAIERAGTKHGNKGWEAALSAIEMANLFKSLR

SEQ ID NO: 8027 - protein, 1307 aa, Artificial Sequence
  SARS-CoV-2/Portugal/PT0035/2020__EPI_ISL_418020 spike protein (1-1147)(I712C_T1077C) LumSynth construct
MFVFLVLLPLVSSQCVNLTTRTQLPPAYTNSFTRGVYYPDKVFRSSVLHSTQDLFLPFFSNVTWFHAIHVSGTNGTKRFDNPVLPFNDGVYFASTEKSNIIRGWIFGTTLDSKTQSLLIVNNATNVVIKVCEFQFCNDPFLGVYYHKNNKSWMESEFRVYSSANNCTFEYVSQPFLMDLEGKQGNFKNLREFVFKNIDGYFKIYSKHTPINLVRDLPQGFSALEPLVDLPIGINITRFQTLLALHRSYLTPGDSSSGWTAGAAAYYVGYLQPRTFLLKYNENGTITDAVDCALDPLSETKCTLKSFTVEKGIYQTSNFRVQPTESIVRFPNITNLCPFGEVFNATRFASVYAWNRKRISNCVADYSVLYNSASFSTFKCYGVSPTKLNDLCFTNVYADSFVIRGDEVRQIAPGQTGKIADYNYKLPDDFTGCVIAWNSNNLDSKVGGNYNYLYRLFRKSNLKPFERDISTEIYQAGSTPCNGVEGFNCYFPLQSYGFQPTNGVGYQPYRVVVLSFELLHAPATVCGPKKSTNLVKNKCVNFNFNGLTGTGVLTESNKKFLPFQQFGRDIADTTDAVRDPQTLEILDITPCSFGGVSVITPGTNTSNQVAVLYQDVNCTEVPVAIHADQLTPTWRVYSTGSNVFQTRAGCLIGAEHVNNSYECDIPIGAGICASYQTQTNSPRRARSVASQSIIAYTMSLGAENSVAYSNNSCAIPTNFTISVTTEILPVSMTKTSVDCTMYICGDSTECSNLLLQYGSFCTQLNRALTGIAVEQDKNTQEVFAQVKQIYKTPPIKDFGGFNFSQILPDPSKPSKRSFIEDLLFNKVTLADAGFIKQYGDCLGDISARDLICAQKFNGLTVLPPLLTDEMIAQYTSALLAGTITSGWTFGAGAALQIPFAMQMAYRFNGIGVTQNVLYENQKLIANQFNSAIGKIQDSLSSTASALGKLQDVVNQNAQALNTLVKQLSSNFGAISSVLNDILSRLDKVEAEVQIDRLITGRLQSLQTYVTQQLIRAAEIRASANLAATKMSECVLGQSKRVDFCGKGYHLMSFPQSAPHGVVFLHVTYVPAQEKNFTCAPAICHDGKAHFPREGVFVSNGTHWFVTQRNFYEPQIITTDNTFVSGNCDVVIGIVNNTVYDPLQPELDSGGGSGGGQIYEGKLTAEGLRFGIVASRFNHALVDRLVEGAIDAIVRHGGREEDITLVRVPGSWEIPVAAGELARKEDIDAVIAIGVLIRGATPHFDYIASEVSKGLADLSLELRKPITFGVITADTLEQAIERAGTKHGNKGWEAALSAIEMANLFKSLR

SEQ ID NO: 8028 - protein, 1307 aa, Artificial Sequence
  SARS-CoV-2/USA/NY-NYUMC7/2020__EPI_ISL_418192 spike protein (1-1147)(I712C_T1077C) LumSynth construct
MFVFLVLLPLVSSQCVNLTTRTQLPPAYTNSFTRGVYYPDKVFRSSVLHSTQDLFLPFFSNVTWFHAIHVSGTNGTKRFDNPVLPFNDGVYFASTEKSNIIRGWIFGTTLDSKTQSLLIVNNATNVVIKVCEFQFCNDPFLGVYHHKNNKSWMESEFRVYSSANNCTFEYVSQPFLMDLEGKQGNFKNLREFVFKNIDGYFKIYSKHTPINLVRDLPQGFSALEPLVDLPIGINITRFQTLLALHRSYLTPGDSSSGWTAGAAAYYVGYLQPRTFLLKYNENGTITDAVDCALDPLSETKCTLKSFTVEKGIYQTSNFRVQPTESIVRFPNITNLCPFGEVFNATRFASVYAWNRKRISNCVADYSVLYNSASFSTFKCYGVSPTKLNDLCFTNVYADSFVIRGDEVRQIAPGQTGKIADYNYKLPDDFTGCVIAWNSNNLDSKVGGNYNYLYRLFRKSNLKPFERDISTEIYQAGSTPCNGVEGFNCYFPLQSYGFQPTNGVGYQPYRVVVLSFELLHAPATVCGPKKSTNLVKNKCVNFNFNGLTGTGVLTESNKKFLPFQQFGRDIADTTDAVRDPQTLEILDITPCSFGGVSVITPGTNTSNQVAVLYQGVNCTEVPVAIHADQLTPTWRVYSTGSNVFQTRAGCLIGAEHVNNSYECDIPIGAGICASYQTQTNSPRRARSVASQSIIAYTMSLGAENSVAYSNNSCAIPTNFTISVTTEILPVSMTKTSVDCTMYICGDSTECSNLLLQYGSFCTQLNRALTGIAVEQDKNTQEVFAQVKQIYKTPPIKDFGGFNFSQILPDPSKPSKRSFIEDLLFNKVTLADAGFIKQYGDCLGDIAARDLICAQKFNGLTVLPPLLTDEMIAQYTSALLAGTITSGWTFGAGAALQIPFAMQMAYRFNGIGVTQNVLYENQKLIANQFNSAIGKIQDSLSSTASALGKLQDVVNQNAQALNTLVKQLSSNFGAISSVLNDILSRLDKVEAEVQIDRLITGRLQSLQTYVTQQLIRAAEIRASANLAATKMSECVLGQSKRVDFCGKGYHLMSFPQSAPHGVVFLHVTYVPAQEKNFTCAPAICHDGKAHFPREGVFVSNGTHWFVTQRNFYEPQIITTDNTFVSGNCDVVIGIVNNTVYDPLQPELDSGGGSGGGQIYEGKLTAEGLRFGIVASRFNHALVDRLVEGAIDAIVRHGGREEDITLVRVPGSWEIPVAAGELARKEDIDAVIAIGVLIRGATPHFDYIASEVSKGLADLSLELRKPITFGVITADTLEQAIERAGTKHGNKGWEAALSAIEMANLFKSLR

SEQ ID NO: 8029 - protein, 1307 aa, Artificial Sequence
  SARS-CoV-2/Iceland/189/2020__EPI_ISL_417709 spike protein (1-1147)(I712C_T1077C) LumSynth construct
MFVFLVLLPLVSSQCVNLTTRTQLPPAYTNSFTRGVYYPDKVFRSSVLHSTQDLFLPFFSNVTWFHAIHVSGTNGTKRFDNPVLPFNDGVYFASTEKSNIIRGWIFGTTLDSKTQSLLIVNNATNVVIKVCEFQFCNDPFLGVYYHKNNKSWMESEFRVYSSANNCTFEYVSQPFLMDLEGKQGNFKNLREFVFKNIDGYFKIYSKHTPINLVRDLPQGFSALEPLVDLPIGINITRFQTLLALHRSYLTPGDSSSGWTAGAAAYYVGYLQPRTFLLKYNENGTITDAVDCALDPLSETKCTLKSFTVEKGIYQTSNFRVQPTESIVRFPNITNLCPFGEVFNATRFASVYAWNRKRISNCVADYSVLYNSASFSTFKCYGVSPTKLNDLCFTNVYADSFVIRGDEVRQIAPGQTGKIADYNYKLPDDFTGCVIAWNSNNLDSKVGGNYNYLYRLFRKSNLKPFERDISTEIYQAGSTPCNGVEGFNCYFPLQSYGFQPTNGVGYQPYRVVVLSFELLHAPATVCGPKKSTNLVKNKCVNFNFNGLTGTGVLTESNKKFLPFQQFGRDIADTTDAVRDPQTLEILDITPCSFGGVSVITPGTNTSNQVAVLYQGVNCTEVPVAIHADQLTPTWRVYSTGSNVFQTRAGCLIGAEHVNNSYECDIPIGAGICASYQTQTNSPRRARSVASQSIIAYTMSLGAENSVAYSNNSCAIPTNFTISVTTEILPVSMTKTSVDCTMYICGDSTECSNLLLQYGSFCTQLNRALTGIAVEQDKNTQEVFAQVKQIYKTPPIKDFGGFNFSQILPDPSKPSKRSFIEDLLFNKVTLADAGFTKQYGDCLGDIAARDLICAQKFNGLTVLPPLLTDEMIAQYTSALLAGTITSGWTFGAGAALQIPFAMQMAYRFNGIGVTQNVLYENQKLIANQFNSAIGKIQDSLSSTASALGKLQDVVNQNAQALNTLVKQLSSNFGAISSVLNDILSRLDKVEAEVQIDRLITGRLQSLQTYVTQQLIRAAEIRASANLAATKMSECVLGQSKRVDFCGKGYHLMSFPQSAPHGVVFLHVTYVPAQEKNFTCAPAICHDGKAHFPREGVFVSNGTHWFVTQRNFYEPQIITTDNTFVSGNCDVVIGIVNNTVYDPLQPELDSGGGSGGGQIYEGKLTAEGLRFGIVASRFNHALVDRLVEGAIDAIVRHGGREEDITLVRVPGSWEIPVAAGELARKEDIDAVIAIGVLIRGATPHFDYIASEVSKGLADLSLELRKPITFGVITADTLEQAIERAGTKHGNKGWEAALSAIEMANLFKSLR

SEQ ID NO: 8030 - protein, 1307 aa, Artificial Sequence
  SARS-CoV-2/Australia/NSW56/2020__EPI_ISL_417408 spike protein (1-1147)(I712C_T1077C) LumSynth construct
MFVFLVLLPLVSSQCVNLTTRTQLPPAYTNSFTRGVYYPDKVFRSSVLHSTQDLFLPFFSNVTWFHAIHVSGTNGTKRFDNPVLPFNDGVYFASTEKSNIIRGWIFGTTLDSKTQSLLIVNNATNVVIKVCEFQFCNDPFLGVYYHKNNKSWMESEFRVYSSANNCTFEYVSQPFLMDLEGKQGNFKNLREFVFKNIDGYFKIYSKHTPINLVRDLPQGFSALEPLVDLPIGINITRFQTLLALHRSYLTPGDSSSGWTAGAAAYYVGYLQPRTFLLKYNENGTITDAVDCALDPLSETKCTLKSFTVEKGIYQTSNFRVQPTESIVRFPNITNLCPFGEVFNATRFASVYAWNRKRISNCVADYSVLYNSASFSTFKCYGVSPTKLNDLCFTNVYADSFVIRGDEVRQIAPGQTGKIADYNYKLPDDFTGCVIAWNSNNLDSKVGGNYNYLYRLFRKSNLKPFERDISTEIYQAGSTPCNGVEGFNCYFPLQSYGFQPTNGVGYQPYRVVVLSFELLHAPATVCGPKKSTNLVKNKCVNFNFNGLTGTGVLTESNKKFLPFQQFGRDIADTTDAVRDPQTLEILDITPCSFGGVSVITPGTNTSNQVAVLYQDVNCTEVPVAIHADQLTPTWRVYSTGSNVFQTRAGCLIGAEHVNNSYECDIPIGAGICASYQTQTNSPRRARSVASQSIIAYTMSLGAENSVAYSNNSCAIPTNFTISVTTEILPVSMTKTSVDCTMYICGDSTECSNLLLQYGSFCTQLNRALTGIAVEQDKNTQEVFAQVKQIYKTPPIKDFGGFNFSQILPDSSKPSKRSFIEDLLFNKVTLADAGFIKQYGDCLGDIAARDLICAQKFNGLTVLPPLLTDEMIAQYTSALLAGTITSGWTFGAGAALQIPFAMQMAYRFNGIGVTQNVLYENQKLIANQFNSAIGKIQDSLSSTASALGKLQDVVNQNAQALNTLVKQLSSNFGAISSVLNDILSRLDKVEAEVQIDRLITGRLQSLQTYVTQQLIRAAEIRASANLAATKMSECVLGQSKRVDFCGKGYHLMSFPQSAPHGVVFLHVTYVPAQEKNFTCAPAICHDGKAHFPREGVFVSNGTHWFVTQRNFYEPQIITTDNTFVSGNCDVVIGIVNNTVYDPLQPELDSGGGSGGGQIYEGKLTAEGLRFGIVASRFNHALVDRLVEGAIDAIVRHGGREEDITLVRVPGSWEIPVAAGELARKEDIDAVIAIGVLIRGATPHFDYIASEVSKGLADLSLELRKPITFGVITADTLEQAIERAGTKHGNKGWEAALSAIEMANLFKSLR

SEQ ID NO: 8031 - protein, 1307 aa, Artificial Sequence
  SARS-CoV-2/Iceland/280/2020__EPI_ISL_417608 spike protein (1-1147)(I712C_T1077C) LumSynth construct
MFVFLVLLPLVSSQCVNLTTRTQLPPAYTNSFTRGVYYPDKVFRSSVLHSTQDLFLPFFSNVTWFHAIHVSGTNGTKRFDNPVLPFNDGVYFASTEKSNIIRGWIFGTTLDSKTQSLLIVNNATNVVIKVCEFQFCNDPFLGVYYHKNNKSWMESEFRVYSSANNCTFEYVSQPFLMDLEGKQGNFKNLREFVFKNIDGYFKIYSKHTPINLVRDLPQGFSALEPLVDLPIGINITRFQTLLALHRSYLTPGDSSSGWTAGAAAYYVGYLQPRTFLLKYNENGTITDAVDCALDPLSETKCTLKSFTVEKGIYQTSNFRVQPTESIVRFPNITNLCPFGEVFNATRFASVYAWNRKRISNCVADYSVLYNSASFSTFKCYGVSPTKLNDLCFTNVYADSFVIRGDEVRQIAPGQTGKIADYNYKLPDDFTGCVIAWNSNNLDSKVGGNYNYLYRLFRKSNLKPFERDISTEIYQAGSTPCNGVEGFNCYFPLQSYGFQPTNGVGYQPYRVVVLSFELLHAPATVCGPKKSTNLVKNKCVNFNFNGLTGTGVLTESNKKFLPFQQFGRDIADTTDAVRDPQTLEILDITPCSFGGVSVITPGTNTSNQVAVLYQGVNCTEVPVAIHADQLTPTWRVYSTGSNVFQTRAGCLIGAEHVNNSYECDIPIGAGICASYHTQTNSPRRARSVASQSIIAYTMSLGAENSVAYSNNSCAIPTNFTISVTTEILPVSMTKTSVDCTMYICGDSTECSNLLLQYGSFCTQLNRALTGIAVEQDKNTQEVFAQVKQIYKTPPIKDFGGFNFSQILPDPSKPSKRSFIEDLLFNKVTLADAGFIKQYGDCLGDIAARDLICAQKFNGLTVLPPLLTDEMIAQYTSALLAGTITSGWTFGAGAALQIPFAMQMAYRFNGIGVTQNVLYENQKLIANQFNSAIGKIQDSLSSTASALGKLQDVVNQNAQALNTLVKQLSSNFGAISSVLNDILSRLDKVEAEVQIDRLITGRLQSLQTYVTQQLIRAAEIRASANLAATKMSECVLGQSKRVDFCGKGYHLMSFPQSAPHGVVFLHVTYVPAQEKNFTCAPAICHDGKAHFPREGVFVSNGTHWFVTQRNFYEPQIITTDNTFVSGNCDVVIGIVNNTVYDPLQPELDSGGGSGGGQIYEGKLTAEGLRFGIVASRFNHALVDRLVEGAIDAIVRHGGREEDITLVRVPGSWEIPVAAGELARKEDIDAVIAIGVLIRGATPHFDYIASEVSKGLADLSLELRKPITFGVITADTLEQAIERAGTKHGNKGWEAALSAIEMANLFKSLR

SEQ ID NO: 8032 - protein, 1307 aa, Artificial Sequence; identical to SEQ ID NO: 7987
  SARS-CoV-2/Iceland/247/2020__EPI_ISL_417575 spike protein (1-1147)(I712C_T1077C) LumSynth construct

SEQ ID NO: 8033 - protein, 1307 aa, Artificial Sequence
  SARS-CoV-2/Iceland/238/2020__EPI_ISL_417566 spike protein (1-1147)(I712C_T1077C) LumSynth construct
MFVFLVLLPLVSSQCVNLTTRTQLPPAYTNSFTRGVYYPDKVFRSSVLHSTQDLFLPFFSNVTWFHAIHVSGTNGTKRFDNPVLPFNDGVYFASTEKSNIIRGWIFGTTLDSKTQSLLIVNNATNVVIKVCEFQFCNDPFLGVYYHKNNKSWMESEFRVYSSANNCTFEYVSQPFLMDLEGKQGNFKNLREFVFKNIDGYFKIYSKHTPINLVRDLPQGFSALEPLVDLPIGINITRFQTLLALHRSYLTPGDSSSGWTAGAAAYYVGYLQPRTFLLKYNENGTITDAVDCALDPLSETKCTLKSFTVEKGIYQTSNFRVQPTESIVRFPNITNLCPFGEVFNATRFASVYAWNRKRISNCVADYSVLYNSASFSTFKCYGVSPTKLNDLCFTNVYADSFVIRGDEVRQIAPGQTGKIADYNYKLPDDFTGCVIAWNSNNLDSKVGGNYNYLYRLFRKSNLKPFERDISTEIYQAGSTPCNGVEGFNCYFPLQSYGFQPTNGVGYQPYRVVVLSFELLHAPATVCGPKKSTNLVKNKCVNFNFNGLTGTGVLTESNKKFLPFQQFGRDIADTTDAVRDPQTLEILDITPCSFGGVSVITPGTNTSNQVAVLYQGVNCTEVPVAIHADQLTPTWRVYSTGSNVFQTRAGCLIGAEHVNNSYECDIPIGAGICASYQTQTNSPRRARSVASQSIIAYTMSLGAENSVAYSNNSCAIPTNFTISVTTEILPVSMTKTSVDCTMYICGDSTECSNLLLQYGSFCTQLNRALTGIAVEQDKNTQEVFAQVKQIYKTPPIKDFGGFNFSQILPDPSKPSKRSFIEDLLFNKVTLADVGFIKQYGDCLGDIAARDLICAQKFNGLTVLPPLLTDEMIAQYTSALLAGTITSGWTFGAGAALQIPFAMQMAYRFNGIGVTQNVLYENQKLIANQFNSAIGKIQDSLSSTASALGKLQDVVNQNAQALNTLVKQLSSNFGAISSVLNDILSRLDKVEAEVQIDRLITGRLQSLQTYVTQQLIRAAEIRASANLAATKMSECVLGQSKRVDFCGKGYHLMSFPQSAPHGVVFLHVTYVPAQEKNFTCAPAICHDGKAHFPREGVFVSNGTHWFVTQRNFYEPQIITTDNTFVSGNCDVVIGIVNNTVYDPLQPELDSGGGSGGGQIYEGKLTAEGLRFGIVASRFNHALVDRLVEGAIDAIVRHGGREEDITLVRVPGSWEIPVAAGELARKEDIDAVIAIGVLIRGATPHFDYIASEVSKGLADLSLELRKPITFGVITADTLEQAIERAGTKHGNKGWEAALSAIEMANLFKSLR

SEQ ID NO: 8034 - protein, 1307 aa, Artificial Sequence
  SARS-CoV-2/Greece/16/2020__EPI_ISL_418265 spike protein (1-1147)(I712C_T1077C) LumSynth construct
MFVFLVLLPLVSSQCVNLTTRTQLPPAYTNSFTRGVYYPDKVFRSSVLHSTQDLFLPFFSNVTWFHAIHVSGTNGTKRFDNPVLPFNDGVYFASTEKSNIIRGWIFGTTLDSKTQSLLIVNNATNVVIKVCEFQFCNDPFLGVYYHKNNKSWMESEFRVYSSANNCTFEYVSQPFLMDLEGKQGNFKNLREFVFKNVDGYFKIYSKHTPINLVRDLPQGFSALEPLVDLPIGINITRFQTLLALHRSYLTPGDSSSGWTAGAAAYYVGYLQPRTFLLKYNENGTITDAVDCALDPLSETKCTLKSFTVEKGIYQTSNFRVQPTESIVRFPNITNLCPFGEVFNATRFASVYAWNRKRISNCVADYSVLYNSASFSTFKCYGVSPTKLNDLCFTNVYADSFVIRGDEVRQIAPGQTGKIADYNYKLPDDFTGCVIAWNSNNLDSKVGGNYNYLYRLFRKSNLKPFERDISTEIYQAGSTPCNGVEGFNCYFPLQSYGFQPTNGVGYQPYRVVVLSFELLHAPATVCGPKKSTNLVKNKCVNFNFNGLTGTGVLTESNKKFLPFQQFGRDIADTTDAVRDPQTLEILDITPCSFGGVSVITPGTNTSNQVAVLYQDVNCTEVPVAIHADQLTPTWRVYSTGSNVFQTRAGCLIGAEHVNNSYECDIPIGAGICASYQTQTNSPRRARSVASQSIIAYTMSLGAENSVAYSNNSCAIPTNFTISVTTEILPVSMTKTSVDCTMYICGDSTECSNLLLQYGSFCTQLNRALTGIAVEQDKNTQEVFAQVKQIYKTPPIKDFGGFNFSQILPDPSKPSKRSFIEDLLFNKVTLADAGFIKQYGDCLGDIAARDLICAQKFNGLTVLPPLLTDEMIAQYTSALLAGTITSGWTFGAGAALQIPFAMQMAYRFNGIGVTQNVLYENQKLIANQFNSAIGKIQDSLSSTASALGKLQDVVNQNAQALNTLVKQLSSNFGAISSVLNDILSRLDKVEAEVQIDRLITGRLQSLQTYVTQQLIRAAEIRASANLAATKMSECVLGQSKRVDFCGKGYHLMSFPQSAPHGVVFLHVTYVPAQEKNFTCAPAICHDGKAHFPREGVFVSNGTHWFVTQRNFYEPQIITTDNTFVSGNCDVVIGIVNNTVYDPLQPELDSGGGSGGGQIYEGKLTAEGLRFGIVASRFNHALVDRLVEGAIDAIVRHGGREEDITLVRVPGSWEIPVAAGELARKEDIDAVIAIGVLIRGATPHFDYIASEVSKGLADLSLELRKPITFGVITADTLEQAIERAGTKHGNKGWEAALSAIEMANLFKSLR

SEQ ID NO: 8035 - protein, 1307 aa, Artificial Sequence
  SARS-CoV-2/Iceland/319/2020__EPI_ISL_417648 spike protein (1-1147)(I712C_T1077C) LumSynth construct
MFVFLVLLPLVSSQCVNLTTRTQLPPAYTNSFTRGVYYPDKVFRSSVLHSTQDLFLPFFSNVTWFHAIHVSGTNGTKRFDNPVLPFNDGVYFASTEKSNIIRGWIFGTTLDSKTQSLLIVNNATNVVIKVCEFQFCNDPFLGVYYHKNNKSWMESEFRVYSSANNCTFEYVSQPFLIDLEGKQGNFKNLREFVFKNIDGYFKIYSKHTPINLVRDLPQGFSALEPLVDLPIGINITRFQTLLALHRSYLTPGDSSSGWTAGAAAYYVGYLQPRTFLLKYNENGTITDAVDCALDPLSETKCTLKSFTVEKGIYQTSNFRVQPTESIVRFPNITNLCPFGEVFNATRFASVYAWNRKRISNCVADYSVLYNSASFSTFKCYGVSPTKLNDLCFTNVYADSFVIRGDEVRQIAPGQTGKIADYNYKLPDDFTGCVIAWNSNNLDSKVGGNYNYLYRLFRKSNLKPFERDISTEIYQAGSTPCNGVEGFNCYFPLQSYGFQPTNGVGYQPYRVVVLSFELLHAPATVCGPKKSTNLVKNKCVNFNFNGLTGTGVLTESNKKFLPFQQFGRDIADTTDAVRDPQTLEILDITPCSFGGVSVITPGTNTSNQVAVLYQGVNCTEVPVAIHADQLTPTWRVYSTGSNVFQTRAGCLIGAEHVNNSYECDIPIGAGICASYQTQTNSPRRARSVASQSIIAYTMSLGAENSVAYSNNSCAIPTNFTISVTTEILPVSMTKTSVDCTMYICGDSTECSNLLLQYGSFCTQLNRALTGIAVEQDKNTQEVFAQVKQIYKTPPIKDFGGFNFSQILPDPSKPSKRSFIEDLLFNKVTLADAGFIKQYGDCLGDIAARDLICAQKFNGLTVLPPLLTDEMIAQYTSALLAGTITSGWTFGAGAALQIPFAMQMAYRFNGIGVTQNVLYENQKLIANQFNSAIGKIQDSLSSTASALGKLQDVVNQNAQALNTLVKQLSSNFGAISSVLNDILSRLDKVEAEVQIDRLITGRLQSLQTYVTQQLIRAAEIRASANLAATKMSECVLGQSKRVDFCGKGYHLMSFPQSAPHGVVFLHVTYVPAQEKNFTCAPAICHDGKAHFPREGVFVSNGTHWFVTQRNFYEPQIITTDNTFVSGNCDVVIGIVNNTVYDPLQPELDSGGGSGGGQIYEGKLTAEGLRFGIVASRFNHALVDRLVEGAIDAIVRHGGREEDITLVRVPGSWEIPVAAGELARKEDIDAVIAIGVLIRGATPHFDYIASEVSKGLADLSLELRKPITFGVITADTLEQAIERAGTKHGNKGWEAALSAIEMANLFKSLR

SEQ ID NO: 8036 - protein, 1307 aa, Artificial Sequence
  SARS-CoV-2/Congo/94/2020__EPI_ISL_417947 spike protein (1-1147)(I712C_T1077C) LumSynth construct
MFVFLVLLPLVSSQCVNLTTRTQLPPAYTNSFTRGVYYPDKVFRSSVLHSTQDLFLPFFSNVTWFHAIHVSGTNGTKRFDNPVLPFNDGVYFASTEKSNIIRGWIFGTTLDSKTQSLLIVNNATNVVIKVCEFQFCNDPFLGVYYHKNNKSWMESEFRVYSSANNCTFEYVSQPFLMDLEGKQGNFKNLREFVFKNIDGYFKIYSKHTPINLVRDLPQGFSALEPLVDLPIGINITRFQTLLALHRSYLTPGDSSSGWTAGAAAYYVGYLQPRTFLLKYNENGTITDAVDCALDPLSETKCTLKSFTVEKGIYQTSNFRVQPTESIVRFPNITNLCPFGEVFNATRFASVYAWNRKRISNCVADYSVLYNSASFSTFKCYGVSPTKLNDLCFTNVYADSFVIRGDEVRQIAPGQTGKIADYNYKLPDDFTGCVIAWNSNNLDSKVGGNYNYLYRLFRKSNLKPFERDISTEIYQAGSTPCNGVEGFNCYFPLQSYGFQPTNGVGYQPYRVVVLSFELLHAPATVCGPKKSTNLVKNKCVNFNFNGLTGTGVLTESNKKFLPFQQFGRDIADTTDAVRDPQTLEILDITPCSFGGVSVITPGTNTSNQVAVLYQGVNCTEVPVAIHADQLTPTWRVYSTGSNVFQTRAGCLIGAEHVNNSYECDIPIGAGICASYQTQTNSPRRARSVASQSIIAYTMSLGAENSVAYSNNSCAIPTNFTISVTTEILPVSMTKTSVDCTMYICGDSTECSNLLLQYGSFCTQLNRALTGIAVEQDKNTQEVFAQVKQIYKTPPIKDFGGFNFSQILPDPSKPSKRSFIEDILFNKVTLADAGFIKQYGDCLGDIAARDLICAQKFNGLTVLPPLLTDEMIAQYTSALLAGTITSGWTFGAGAALQIPFAMQMAYRFNGIGVTQNVLYENQKLIANQFNSAIGKIQDSLSSTASALGKLQDVVNQNAQALNTLVKQLSSNFGAISSVLNDILSRLDKVEAEVQIDRLITGRLQSLQTYVTQQLIRAAEIRASANLAATKMSECVLGQSKRVDFCGKGYHLMSFPQSAPHGVVFLHVTYVPAQEKNFTCAPAICHDGKAHFPREGVFVSNGTHWFVTQRNFYEPQIITTDNTFVSGNCDVVIGIVNNTVYDPLQPELDSGGGSGGGQIYEGKLTAEGLRFGIVASRFNHALVDRLVEGAIDAIVRHGGREEDITLVRVPGSWEIPVAAGELARKEDIDAVIAIGVLIRGATPHFDYIASEVSKGLADLSLELRKPITFGVITADTLEQAIERAGTKHGNKGWEAALSAIEMANLFKSLR

SEQ ID NO: 8037 - protein, 1307 aa, Artificial Sequence
  SARS-CoV-2/Congo/158/2020__EPI_ISL_417950 spike protein (1-1147)(I712C_T1077C) LumSynth construct
MFVFLVLLPLVSSQCVNLTTRTQLPPAYTNSFTRGVYYPDKVFRSSVLHSTQDLFLPFFSNVTWFHAIHVSGTNGTKRFDNPVLPFNDGVYFASTEKSNIIRGWIFGTTLDSKTQSLLIVNNATNVVIKVCEFQFCNDPFLGVYYHKNNKSWMESEFRVYSSANNCTFEYVSQPFLMDLEGKQGNFKNLREFVFKNIDGYFKIYSKHTPINLVRDLPQGFSALEPLVDLPIGINITRFQTLLALHRSYLTPGDSSSGWTAGAAAYYVGYLQPRTFLLKYNENGTITDAVDCALDPLSETKCTLKSFTVEKGIYQTSNFRVQPTESIVRFPNITNLCPFGEVFNATRFASVYAWNRKRISNCVADYSVLYNSASFSTFKCYGVSPTKLNDLCFTNVYADSFVIRGDEVRQIAPGQTGKIADYNYKLPDDFTGCVIAWNSNNLDSKVGGNYNYLYRLFRKSNLKPFERDISTEIYQAGSTPCNGVEGFNCYFPLQSYGFQPTNGVGYQPYRVVVLSFELLHAPATVCGPKKSTNLVKNKCVNFNFNGLTGTGVLTESNKKFLPFQQFGRDIADTTDAVRDPQTLEILDITPCSFGGVSVITPGTNTSNQVAVLYQDVNCTEVPVAIHADQLTPTWRVYSTGSNVFQTRAGCLIGAEHVNNSYECDIPIGAGICASYQTQTNSPRRARSVASQSIIAYTMSLGAENSVAYSNNSCAIPTNFTISVTTEILPVSMTKTSVDCTMYICGDSTECSNLLLQYGSFCTQLNRALTGIAVEQDKNTQEVFAQVKQIYKTPPIKDFGGFNFSQILPDPSKPSKRSFIEDLLFNKVTLADAGFIKQYGDCLGDIAARDLICAQKFNGLTVLPPLLTDEMIAQYTSALLAGTITSGWTFGAGAALQIPFAMQMAYRFNGIGVTQNVLYENQKLIANQFNSAIGKIQDSLSSTASALGKLQDVVNQNAQALNTLVKQLSSNFGAISSVLNDILSRLDKVEAEVQIDRLITGRLQSLQTYVTQQLIRAAEIRASANLAATKMSECVLGQSKRVDFCGKGYHLMSFPQSAPHGVVFLHVTYVPAQEKNFTCAPAICHDGKAHFPREGVFVSNGTHWFVTQRNFYEPQIITTDNTFLSGNCDVVIGIVNNTVYDPLQPELDSGGGSGGGQIYEGKLTAEGLRFGIVASRFNHALVDRLVEGAIDAIVRHGGREEDITLVRVPGSWEIPVAAGELARKEDIDAVIAIGVLIRGATPHFDYIASEVSKGLADLSLELRKPITFGVITADTLEQAIERAGTKHGNKGWEAALSAIEMANLFKSLR

SEQ ID NO: 8038 - protein, 1307 aa, Artificial Sequence
  SARS-CoV-2/USA/UT-00034/2020__EPI_ISL_417977 spike protein (1-1147)(I712C_T1077C) LumSynth construct
MFVFLVLLPLVSSQCVNLTTRTQLPPAYTNSFTRGVYYPDKVFRSSVLHSTQDLFLPFFSNVTWFHAIHVSGTNGTKRFDNPVLPFNDGVYFASTEKSNIIRGWIFGTTLDSKTQSLLIVNNATNVVIKVCEFQFCNDPFLGVYYYKNNKSWMESEFRVYSSANNCTFEYVSQPFLMDLEGKQGNFKNLREFVFKNIDGYFKIYSKHTPINLVRDLPQGFSALEPLVDLPIGINITRFQTLLALHRSYLTPGDSSSGWTAGAAAYYVGYLQPRTFLLKYNENGTITDAVDCALDPLSETKCTLKSFTVEKGIYQTSNFRVQPTESIVRFPNITNLCPFGEVFNATRFASVYAWNRKRISNCVADYSVLYNSASFSTFKCYGVSPTKLNDLCFTNVYADSFVIRGDEVRQIAPGQTGKIADYNYKLPDDFTGCVIAWNSNNLDSKVGGNYNYLYRLFRKSNLKPFERDISTEIYQAGSTPCNGVEGFNCYFPLQSYGFQPTNGVGYQPYRVVVLSFELLHAPATVCGPKKSTNLVKNKCVNFNFNGLTGTGVLTESNKKFLPFQQFGRDIADTTDAVRDPQTLEILDITPCSFGGVSVITPGTNTSNQVAVLYQGVNCTEVPVAIHADQLTPTWRVYSTGSNVFQTRAGCLIGAEHVNNSYECDIPIGAGICASYQTQTNSPRRARSVASQSIIAYTMSLGAENSVAYSNNSCAIPTNFTISVTTEILPVSMTKTSVDCTMYICGDSTECSNLLLQYGSFCTQLNRALTGIAVEQDKNTQEVFAQVKQIYKTPPIKDFGGFNFSQILPDPSKPSKRSFIEDLLFNKVTLADAGFIKQYGDCLGDIAARDLICAQKFNGLTVLPPLLTDEMIAQYTSALLAGTITSGWTFGAGAALQIPFAMQMAYRFNGIGVTQNVLYENQKLIANQFNSAIGKIQDSLSSTASALGKLQDVVNQNAQALNTLVKQLSSNFGAISSVLNDILSRLDKVEAEVQIDRLITGRLQSLQTYVTQQLIRAAEIRASANLAATKMSECVLGQSKRVDFCGKGYHLMSFPQSAPHGVVFLHVTYVPAQEKNFTCAPAICHDGKAHFPREGVFVSNGTHWFVTQRNFYEPQIITTDNTFVSGNCDVVIGIVNNTVYDPLQPELDSGGGSGGGQIYEGKLTAEGLRFGIVASRFNHALVDRLVEGAIDAIVRHGGREEDITLVRVPGSWEIPVAAGELARKEDIDAVIAIGVLIRGATPHFDYIASEVSKGLADLSLELRKPITFGVITADTLEQAIERAGTKHGNKGWEAALSAIEMANLFKSLR

SEQ ID NO: 8039 - protein, 1307 aa, Artificial Sequence
  SARS-CoV-2/USA/UT-00033/2020__EPI_ISL_417976 spike protein (1-1147)(I712C_T1077C) LumSynth construct
MFVFLVLLPLVSSQCVNLTTRTQLPPAYTNSFTRGVYYPDKVFRSSVLHSTQDLFLPFFSNVTWFHAIHVSGTNGTKRFDNPVLPFNDGVYFASTEKSNIIRGWIFGTTLDSKTQSLLIVNNATNVVIKVCEFQFCNDPFLGVYYHKNNKSWMESEFRVYSSANNCTFEYVSQPFLMDLEGKQGNFKNLREFVFKNIDGYFKIYSKHTPINLVRDLPQGFSALEPLVDLPIGINITRFQTLLALHRSYLTPGDSSSGLTAGAAAYYVGYLQPRTFLLKYNENGTITDAVDCALDPLSETKCTLKSFTVEKGIYQTSNFRVQPTESIVRFPNITNLCPFGEVFNATRFASVYAWNRKRISNCVADYSVLYNSASFSTFKCYGVSPTKLNDLCFTNVYADSFVIRGDEVRQIAPGQTGKIADYNYKLPDDFTGCVIAWNSNNLDSKVGGNYNYLYRLFRKSNLKPFERDISTEIYQAGSTPCNGVEGFNCYFPLQSYGFQPTNGVGYQPYRVVVLSFELLHAPATVCGPKKSTNLVKNKCVNFNFNGLTGTGVLTESNKKFLPFQQFGRDIADTTDAVRDPQTLEILDITPCSFGGVSVITPGTNTSNQVAVLYQGVNCTEVPVAIHADQLTPTWRVYSTGSNVFQTRAGCLIGAEHVNNSYECDIPIGAGICASYQTQTNSPRRARSVASQSIIAYTMSLGAENSVAYSNNSCAIPTNFTISVTTEILPVSMTKTSVDCTMYICGDSTECSNLLLQYGSFCTQLNRALTGIAVEQDKNTQEVFAQVKQIYKTPPIKDFGGFNFSQILPDPSKPSKRSFIEDLLFNKVTLADAGFIKQYGDCLGDIAARDLICAQKFNGLTVLPPLLTDEMIAQYTSALLAGTITSGWTFGAGAALQIPFAMQMAYRFNGIGVTQNVLYENQKLIANQFNSAIGKIQDSLSSTASALGKLQDVVNQNAQALNTLVKQLSSNFGAISSVLNDILSRLDKVEAEVQIDRLITGRLQSLQTYVTQQLIRAAEIRASANLAATKMSECVLGQSKRVDFCGKGYHLMSFPQSAPHGVVFLHVTYVPAQEKNFTCAPAICHDGKAHFPREGVFVSNGTHWFVTQRNFYEPQIITTDNTFVSGNCDVVIGIVNNTVYDPLQPELDSGGGSGGGQIYEGKLTAEGLRFGIVASRFNHALVDRLVEGAIDAIVRHGGREEDITLVRVPGSWEIPVAAGELARKEDIDAVIAIGVLIRGATPHFDYIASEVSKGLADLSLELRKPITFGVITADTLEQAIERAGTKHGNKGWEAALSAIEMANLFKSLR

SEQ ID NO: 8040 - protein, 1307 aa, Artificial Sequence
  SARS-CoV-2/USA/WI-13/2020__EPI_ISL_417516 spike protein (1-1147)(I712C_T1077C) LumSynth construct
MFVFLVLLPLVSSQCVNLTTRTQLPPAYTNSFTRGVYYPDKVFRSSVLHSTQDLFLPFFSNVTWFHAIHVSGTNGTKRFDNPVLPFNDGVYFASTEKSNIIRGWIFGTTLDSKTQSLLIVNNATNVVIKVCEFQFCNDPFLGVYYHKNNKSWMESEFRVYSSANNCTFEYVSQPFLMDLEGKQGNFKNLREFVFKNIDGYFKIYSKHTPINLVRDLPQGFSALEPLVDLPIGINITRFQTLLALHRSYLTPGDSSSGWTAGAAAYYVGYLQPRTFLLKYNENGTITDAVDCALDPLSETKCTLKSFTVEKGIYQTSNFRVLPTESIVRFPNITNLCPFGEVFNATRFASVYAWNRKRISNCVADYSVLYNSASFSTFKCYGVSPTKLNDLCFTNVYADSFVIRGDEVRQIAPGQTGKIADYNYKLPDDFTGCVIAWNSNNLDSKVGGNYNYLYRLFRKSNLKPFERDISTEIYQAGSTPCNGVEGFNCYFPLQSYGFQPTNGVGYQPYRVVVLSFELLHAPATVCGPKKSTNLVKNKCVNFNFNGLTGTGVLTESNKKFLPFQQFGRDIADTTDAVRDPQTLEILDITPCSFGGVSVITPGTNTSNQVAVLYQGVNCTEVPVAIHADQLTPTWRVYSTGSNVFQTRAGCLIGAEHVNNSYECDIPIGAGICASYQTQTNSPRRARSVASQSIIAYTMSLGAENSVAYSNNSCAIPTNFTISVTTEILPVSMTKTSVDCTMYICGDSTECSNLLLQYGSFCTQLNRALTGIAVEQDKNTQEVFAQVKQIYKTPPIKDFGGFNFSQILPDPSKPSKRSFIEDLLFNKVTLADAGFIKQYGDCLGDIAARDLICAQKFNGLTVLPPLLTDEMIAQYTSALLAGTITSGWTFGAGAALQIPFAMQMAYRFNGIGVTQNVLYENQKLIANQFNSAIGKIQDSLSSTASALGKLQDVVNQNAQALNTLVKQLSSNFGAISSVLNDILSRLDKVEAEVQIDRLITGRLQSLQTYVTQQLIRAAEIRASANLAATKMSECVLGQSKRVDFCGKGYHLMSFPQSAPHGVVFLHVTYVPAQEKNFTCAPAICHDGKAHFPREGVFVSNGTHWFVTQRNFYEPQIITTDNTFVSGNCDVVIGIVNNTVYDPLQPELDSGGGSGGGQIYEGKLTAEGLRFGIVASRFNHALVDRLVEGAIDAIVRHGGREEDITLVRVPGSWEIPVAAGELARKEDIDAVIAIGVLIRGATPHFDYIASEVSKGLADLSLELRKPITFGVITADTLEQAIERAGTKHGNKGWEAALSAIEMANLFKSLR

SEQ ID NO: 8041 - protein, 1306 aa, Artificial Sequence
  SARS-CoV-2/India/1-27/2020__EPI_ISL_413522 spike protein (1-1146)(I711C_T1076C) LumSynth construct
MFVFLVLLPLVSSQCVNLTTRTQLPPAYTNSFTRGVYYPDKVFRSSVLHSTQDLFLPFFSNVTWFHAIHVSGTNGTKRFDNPVLPFNDGVYFASTEKSNIIRGWIFGTTLDSKTQSLLIVNNATNVVIKVCEFQFCNDPFLGVYHKNNKSWMESEFRVYSSANNCTFEYVSQPFLMDLEGKQGNFKNLREFVFKNIDGYFKIYSKHTPINLVRDLPQGFSALEPLVDLPIGINITRFQTLLALHRSYLTPGDSSSGWTAGAAAYYVGYLQPRTFLLKYNENGTITDAVDCALDPLSETKCTLKSFTVEKGIYQTSNFRVQPTESIVRFPNITNLCPFGEVFNATRFASVYAWNRKRISNCVADYSVLYNSASFSTFKCYGVSPTKLNDLCFTNVYADSFVIRGDEVIQIAPGQTGKIADYNYKLPDDFTGCVIAWNSNNLDSKVGGNYNYLYRLFRKSNLKPFERDISTEIYQAGSTPCNGVEGFNCYFPLQSYGFQPTNGVGYQPYRVVVLSFELLHAPATVCGPKKSTNLVKNKCVNFNFNGLTGTGVLTESNKKFLPFQQFGRDIADTTDAVRDPQTLEILDITPCSFGGVSVITPGTNTSNQVAVLYQDVNCTEVPVAIHADQLTPTWRVYSTGSNVFQTRAGCLIGAEHVNNSYECDIPIGAGICASYQTQTNSPRRARSVASQSIIAYTMSLGAENSVAYSNNSCAIPTNFTISVTTEILPVSMTKTSVDCTMYICGDSTECSNLLLQYGSFCTQLNRALTGIAVEQDKNTQEVFAQVKQIYKTPPIKDFGGFNFSQILPDPSKPSKRSFIEDLLFNKVTLADAGFIKQYGDCLGDIAARDLICAQKFNGLTVLPPLLTDEMIAQYTSALLAGTITSGWTFGAGAALQIPFAMQMAYRFNGIGVTQNVLYENQKLIANQFNSAIGKIQDSLSSTASALGKLQDVVNQNAQALNTLVKQLSSNFGAISSVLNDILSRLDKVEAEVQIDRLITGRLQSLQTYVTQQLIRAAEIRASANLAATKMSECVLGQSKRVDFCGKGYHLMSFPQSAPHGVVFLHVTYVPAQEKNFTCAPAICHDGKAHFPREGVFVSNGTHWFVTQRNFYEPQIITTDNTFVSGNCDVVIGIVNNTVYDPLQPELDSGGGSGGGQIYEGKLTAEGLRFGIVASRFNHALVDRLVEGAIDAIVRHGGREEDITLVRVPGSWEIPVAAGELARKEDIDAVIAIGVLIRGATPHFDYIASEVSKGLADLSLELRKPITFGVITADTLEQAIERAGTKHGNKGWEAALSAIEMANLFKSLR

SEQ ID NO: 8042 - protein, 1301 aa, Artificial Sequence
  SARS-CoV-2/pangolin/Guangxi/P4L/2017__EPI_ISL_410538 spike protein (1-1141)(I706C_T1071C) LumSynth construct
MFVFLFVLPLVSSQCVNLTTRTGIPPGYTNSSTRGVYYPDKVFRSSILHLTQDLFLPFFSNVTWFNTINYQGGFKKFDNPVLPFNDGVYFASTEKSNIIRGWIFGTTLDARTQSLLIVNNATNVVIKVCEFQFCTDPFLGVYYHNNNKTWVENEFRVYSSANNCTFEYISQPFLMDLEGKQGNFKNLREFVFKNVDGYFKIYSKHTPIDLVRDLPRGFAALEPLVDLPIGINITRFQTLLALHRSYLTPGNLESGWTTGAAAYYVGYLQQRTFLLSYNQNGTITDAVDCSLDPLSETKCTLKSLTVEKGIYQTSNFRVQPTISIVRFPNITNLCPFGEVFNASKFASVYAWNRKRISNCVADYSVLYNSTSFSTFKCYGVSPTKLNDLCFTNVYADSFVVKGDEVRQIAPGQTGVIADYNYKLPDDFTGCVIAWNSVKQDALTGGNYGYLYRLFRKSKLKPFERDISTEIYQAGSTPCNGQVGLNCYYPLERYGFHPTTGVNYQPFRVVVLSFELLNGPATVCGPKLSTTLVKDKCVNFNFNGLTGTGVLTTSKKQFLPFQQFGRDISDTTDAVRDPQTLEILDITPCSFGGVSVITPGTNTSNQVAVLYQDVNCTEVPMAIHAEQLTPAWRVYSAGANVFQTRAGCLVGAEHVNNSYECDIPVGAGICASYHSMSSLRSVNQRSIIAYTMSLGAENSVAYSNNSCAIPTNFTISVTTEILPVSMTKTSVDCTMYICGDSIECSNLLLQYGSFCTQLNRALTGIAVEQDKNTQEVFAQVKQIYKTPPIKDFGGFNFSQILPDPSKPSKRSFIEDLLFNKVTLADAGFIKQYGDCLGDIAARDLICAQKFNGLTVLPPLLTDEMIAQYTSALLAGTITSGWTFGAGAALQIPFAMQMAYRFNGIGVTQNVLYENQKLIANQFNSAIGKIQDSLSSTASALGKLQDVVNQNAQALNTLVKQLSSNFGAISSVLNDILSRLDKVEAEVQIDRLITGRLQSLQTYVTQQLIRAAEIRASANLAATKMSECVLGQSKRVDFCGKGYHLMSFPQSAPHGVVFLHVTYVPAQEKNFTCAPAICHEGKAHFPREGVFVSNGTHWFITQRNFYEPQIITTDNTFVSGSCDVVIGIVNNTVYDPLQPELDSGGGSGGGQIYEGKLTAEGLRFGIVASRFNHALVDRLVEGAIDAIVRHGGREEDITLVRVPGSWEIPVAAGELARKEDIDAVIAIGVLIRGATPHFDYIASEVSKGLADLSLELRKPITFGVITADTLEQAIERAGTKHGNKGWEAALSAIEMANLFKSLR

SEQ ID NO: 8043 - protein, 1301 aa, Artificial Sequence
  SARS-CoV-2/pangolin/Guangxi/P5L/2017__EPI_ISL_410540 spike protein (1-1141)(I706C_T1071C) LumSynth construct
MFVFLFVLPLVSSQCVNLTTRTGIPPGYTNSSTRGVYYPDKVFRSSILHLTQDLFLPFFSNVTWFNTINYQGGFKKFDNPVLPFNDGVYFASTEKSNIIRGWIFGTTLDARTQSLLIVNNATNVVIKVCEFQFCTDPFLGVYYHNNNKTWVENEFRVYSSANNCTFEYISQPFLMDLEGKQGNFKNLREFVFKNVDGYFKIYSKHTPIDLVRDLPRGFAALEPLVDLPIGINITRFQTLLALHRSYLTPGKLESGWTTGAAAYYVGYLQQRTFLLSYNQNGTITDAVDCSLDPLSETKCTLKSLTVEKGIYQTSNFRVQPTISIVRFPNITNLCPFGEVFNASKFASVYAWNRKRISNCVADYSVLYNSTSFSTFKCYGVSPTKLNDLCFTNVYADSFVVKGDEVRQIAPGQTGVIADYNYKLPDDFTGCVIAWNSVKQDALTGGNYGYLYRLFRKSKLKPFERDISTEIYQAGSTPCNGQVGLNCYYPLERYGFHPTTGVNYQPFRVVVLSFELLNGPATVCGPKLSTTLVKDKCVNFNFNGLTGTGVLTTSKKQFLPFQQFGRDISDTTDAVRDPQTLEILDITPCSFGGVSVITPGTNTSNQVAVLYQDVNCTEVPMAIHAEQLTPAWRVYSAGANVFQTRAGCLVGAEHVNNSYECDIPVGAGICASYHSMSSFRSVNQRSIIAYTMSLGAENSVAYSNNSCAIPTNFTISVTTEILPVSMTKTSVDCTMYICGDSIECSNLLLQYGSFCTQLNRALTGIAVEQDKNTQEVFAQVKQIYKTPPIKDFGGFNFSQILPDPSKPSKRSFIEDLLFNKVTLADAGFIKQYGDCLGDIAARDLICAQKFNGLTVLPPLLTDEMIAQYTSALLAGTITSGWTFGAGAALQIPFAMQMAYRFNGIGVTQNVLYENQKLIANQFNSAIGKIQDSLSSTASALGKLQDVVNQNAQALNTLVKQLSSNFGAISSVLNDILSRLDKVEAEVQIDRLITGRLQSLQTYVTQQLIRAAEIRASANLAATKMSECVLGQSKRVDFCGKGYHLMSFPQSAPHGVVFLHVTYVPAQEKNFTCAPAICHEGKAHFPREGVFVSNGTHWFITQRNFYEPQIITTDNTFVSGSCDVVIGIVNNTVYDPLQPELDSGGGSGGGQIYEGKLTAEGLRFGIVASRFNHALVDRLVEGAIDAIVRHGGREEDITLVRVPGSWEIPVAAGELARKEDIDAVIAIGVLIRGATPHFDYIASEVSKGLADLSLELRKPITFGVITADTLEQAIERAGTKHGNKGWEAALSAIEMANLFKSLR

SEQ ID NO: 8044 - protein, 1301 aa, Artificial Sequence
  SARS-CoV-2/pangolin/Guangxi/P5E/2017__EPI_ISL_410541 spike protein (1-1141)(I706C_T1071C) LumSynth construct
MFVFLFVLPLVSSQCVNLTTRTGIPPGYTNSSTRGVYYPDKVFRSSILHLTQDLFLPFFSNVTWFNTITYQGGSKKFDNPVLPFNDGVYFASTEKSNIIRGWIFGTTLDARTQSLLIVNNATNVVIKVCEFQFCTDPFLGVYYHNNNKTWVENEFRVYSSANNCTFEYISQPFLMDLEGKQGNFKNLREFVFKNVDGYFKIYSKHTPIDLVRDLPRGFAALEPLVDLPIGINITRFQTLLALHRSYLTPGKLESGWTTGAAAYYVGYLQQRTFLLSYNQNGTITDAVDCSLDPLSETKCTLKSLTVEKGIYQTSNFRVQPTISIVRFPNITNLCPFGEVFNASKFASVYAWNRKRISNCVADYSVLYNSTSFSTFKCYGVSPTKLNDLCFTNVYADSFVVKGDEVRQIAPGQTGVIADYNYKLPDDFTGCVIAWNSVKQDALTGDNYGYLYRLFRKSKLKPFERDISTEIYQAGSTPCNGQVGLNCYYPLERYGFHPTTGVNYQPFRVVVLSFELLNGPATVCGPKLSTTLVKDKCVNFNFNGLTGTGVLTTSKKQFLPFQQFGRDISDTTDAVRDPQTLEILDITPCSFGGVSVITPGTNTSNQVAVLYQDVNCTEVPMAIHAEQLTPAWRVYSAGANVFQTRAGCLVGAEHVNNSYECDIPVGAGICASYHSMSSFRSVNQRSIIAYTMSLGAENSVAYSNNSCAIPTNFTISVTTEILPVSMTKTSVDCTMYICGDSIECSNLLLQYGSFCTQLNRALTGIAVEQDKNTQEVFAQVKQIYKTPPIKDFGGFNFSQILPDPSKPSKRSFIEDLLFNKVTLADAGFIKQYGDCLGDIAARDLICAQKFNGLTVLPPLLTDEMIAQYTSALLAGTITSGWTFGAGAALQIPFAMQMAYRFNGIGVTQNVLYENQKLIANQFNSAIGKIQDSLSSTASALGKLQDVVNQNAQALNTLVKQLSSNFGAISSVLNDILSRLDKVEAEVQIDRLITGRLQSLQTYVTQQLIRAAEIRASANLAATKMSECVLGQSKRVDFCGKGYHLMSFPQSAPHGVVFLHVTYVPAQEKNFTCAPAICHEGKAHFPREGVFVSNGTHWFITQRNFYEPQIITTDNTFVSGSCDVVIGIVNNTVYDPLQPELDSGGGSGGGQIYEGKLTAEGLRFGIVASRFNHALVDRLVEGAIDAIVRHGGREEDITLVRVPGSWEIPVAAGELARKEDIDAVIAIGVLIRGATPHFDYIASEVSKGLADLSLELRKPITFGVITADTLEQAIERAGTKHGNKGWEAALSAIEMANLFKSLR

SEQ ID NO: 8045 - protein, 1299 aa, Artificial Sequence
  SARS-CoV-2/pangolin/Guangxi/P1E/2017__EPI_ISL_410539 spike protein (1-1139)(I704C_T1069C) LumSynth construct
MFVFLFVLPLVSSQCVNLTTRTGIQPGYTNSSTRGVYYPDKVFRSSILHLTQDLFLPFFSNVTWFNTINYQGGFKKFDNPVLPFNDGVYFASTEKSNIIRGWIFGTTLDARTQSLLIVNNATNVVIKVCEFQFCTDPFLGVYYHNNNKTWVENEFRVYSSANNCTFEYISQPFLMDLEGKQGNFKNLREFVFKNVDGYFKIYSKHTPIDLVRDLPRGFAALEPLVDLPIGINITRFQTLLALHRSYLTPGKLESGWTTGAAAYYVGYLQQRTFLLSYNQNGTITDAVDCSLDPLSETKCTLKSLTVEKGIYQTSNFRVQPTISIVRFPNITNLCPFGEVFNASKFASVYAWNRKRISNCVADYSVLYNSTSFSTFKCYGVSPTKLNDLCFTNVYADSFVVKGDEVRQIAPGQTGVIADYNYKLPDDFTGCVIAWNSVKQDALTGGNYLYRLFRKSKLKPFERDISTEIYQAGSTPCNGQVGLNCYYPLERYGFHPTTGVNYQPFRVVVLSFELLNGPATVCGPKLSTTLVKDKCVNFNFNGLTGTGVLTTSKKQFLPFQQFGRDISDTTDAVRDPQTLEILDITPCSFGGVSVITPGTNTSNQVAVLYQDVNCTEVPMAIHAEQLTPAWRVYSAGANVFQTRAGCLVGAEHVNNSYECDIPVGAGICASYHSMSSLRSVNQRSIIAYTMSLGAENSVAYSNNSCAIPTNFTISVTTEILPVSMTKTSVDCTMYICGDSIECSNLLLQYGSFCTQLNRALTGIAVEQDKNTQEVFAQVKQIYKTPPIKDFGGFNFSQILPDPSKPSKRSFIEDLLFNKVTLADAGFIKQYGDCLGDIAARDLICAQKFNGLTVLPPLLTDEMIAQYTSALLAGTITSGWTFGAGAALQIPFAMQMAYRFNGIGVTQNVLYENQKLIANQFNSAIGKIQDSLSSTASALGKLQDVVNQNAQALNTLVKQLSSNFGAISSVLNDILSRLDKVEAEVQIDRLITGRLQSLQTYVTQQLIRAAEIRASANLAATKMSECVLGQSKRVDFCGKGYHLMSFPQSAPHGVVFLHVTYVPAQEKNFTCAPAICHEGKAHFPREGVFVSNGTHWFITQRNFYEPQIITTDNTFVSGSCDVVIGIVNNTVYDPLQPELDSGGGSGGGQIYEGKLTAEGLRFGIVASRFNHALVDRLVEGAIDAIVRHGGREEDITLVRVPGSWEIPVAAGELARKEDIDAVIAIGVLIRGATPHFDYIASEVSKGLADLSLELRKPITFGVITADTLEQAIERAGTKHGNKGWEAALSAIEMANLFKSLR

SEQ ID NO: 8046 - protein, 1307 aa, Artificial Sequence
  SARS-CoV-2/Wuhan/WIV05/2019__EPI_ISL_402128 spike protein (1-1147)(I714C_Y1110C) LumSynth construct
MFVFLVLLPLVSSQCVNLTTRTQLPPAYTNSFTRGVYYPDKVFRSSVLHSTQDLFLPFFSNVTWFHAIHVSGTNGTKRFDNPVLPFNDGVYFASTEKSNIIRGWIFGTTLDSKTQSLLIVNNATNVVIKVCEFQFCNDPFLGVYYHKNNKSWMESEFRVYSSANNCTFEYVSQPFLMDLEGKQGNFKNLREFVFKNIDGYFKIYSKHTPINLVRDLPQGFSALEPLVDLPIGINITRFQTLLALHRSYLTPGDSSSGWTAGAAAYYVGYLQPRTFLLKYNENGTITDAVDCALDPLSETKCTLKSFTVEKGIYQTSNFRVQPTESIVRFPNITNLCPFGEVFNATRFASVYAWNRKRISNCVADYSVLYNSASFSTFKCYGVSPTKLNDLCFTNVYADSFVIRGDEVRQIAPGQTGKIADYNYKLPDDFTGCVIAWNSNNLDSKVGGNYNYLYRLFRKSNLKPFERDISTEIYQAGSTPCNGVEGFNCYFPLQSYGFQPTNGVGYQPYRVVVLSFELLHAPATVCGPKKSTNLVKNKCVNFNFNGLTGTGVLTESNKKFLPFQQFGRDIADTTDAVRDPQTLEILDITPCSFGGVSVITPGTNTSNQVAVLYQDVNCTEVPVAIHADQLTPTWRVYSTGSNVFQTRAGCLIGAEHVNNSYECDIPIGAGICASYQTQTNSPRRARSVASQSIIAYTMSLGAENSVAYSNNSIACPTNFTISVTTEILPVSMTKTSVDCTMYICGDSTECSNLLLQYGSFCTQLNRALTGIAVEQDKNTQEVFAQVKQIYKTPPIKDFGGFNFSQILPDPSKPSKRSFIEDLLFNKVTLADAGFIKQYGDCLGDIAARDLICAQKFNGLTVLPPLLTDEMIAQYTSALLAGTITSGWTFGAGAALQIPFAMQMAYRFNGIGVTQNVLYENQKLIANQFNSAIGKIQDSLSSTASALGKLQDVVNQNAQALNTLVKQLSSNFGAISSVLNDILSRLDKVEAEVQIDRLITGRLQSLQTYVTQQLIRAAEIRASANLAATKMSECVLGQSKRVDFCGKGYHLMSFPQSAPHGVVFLHVTYVPAQEKNFTTAPAICHDGKAHFPREGVFVSNGTHWFVTQRNFCEPQIITTDNTFVSGNCDVVIGIVNNTVYDPLQPELDSGGGSGGGQIYEGKLTAEGLRFGIVASRFNHALVDRLVEGAIDAIVRHGGREEDITLVRVPGSWEIPVAAGELARKEDIDAVIAIGVLIRGATPHFDYIASEVSKGLADLSLELRKPITFGVITADTLEQAIERAGTKHGNKGWEAALSAIEMANLFKSLR

SEQ ID NO: 8047 - protein, 1303 aa, Artificial Sequence
  SARS-CoV-2/bat/Yunnan/RaTG13/2013__EPI_ISL_402131 spike protein (1-1143)(I710C_Y1106C) LumSynth construct
MFVFLVLLPLVSSQCVNLTTRTQLPPAYTNSSTRGVYYPDKVFRSSVLHLTQDLFLPFFSNVTWFHAIHVSGTNGIKRFDNPVLPFNDGVYFASTEKSNIIRGWIFGTTLDSKTQSLLIVNNATNVVIKVCEFQFCNDPFLGVYYHKNNKSWMESEFRVYSSANNCTFEYVSQPFLMDLEGKQGNFKNLREFVFKNIDGYFKIYSKHTPINLVRDLPPGFSALEPLVDLPIGINITRFQTLLALHRSYLTPGDSSSGWTAGAAAYYVGYLQPRTFLLKYNENGTITDAVDCALDPLSETKCTLKSFTVEKGIYQTSNFRVQPTDSIVRFPNITNLCPFGEVFNATTFASVYAWNRKRISNCVADYSVLYNSTSFSTFKCYGVSPTKLNDLCFTNVYADSFVITGDEVRQIAPGQTGKIADYNYKLPDDFTGCVIAWNSKHIDAKEGGNFNYLYRLFRKANLKPFERDISTEIYQAGSKPCNGQTGLNCYYPLYRYGFYPTDGVGHQPYRVVVLSFELLNAPATVCGPKKSTNLVKNKCVNFNFNGLTGTGVLTESNKKFLPFQQFGRDIADTTDAVRDPQTLEILDITPCSFGGVSVITPGTNASNQVAVLYQDVNCTEVPVAIHADQLTPTWRVYSTGSNVFQTRAGCLIGAEHVNNSYECDIPIGAGICASYQTQTNSRSVASQSIIAYTMSLGAENSVAYSNNSIACPTNFTISVTTEILPVSMTKTSVDCTMYICGDSTECSNLLLQYGSFCTQLNRALTGIAVEQDKNTQEVFAQVKQIYKTPPIKDFGGFNFSQILPDPSKPSKRSFIEDLLFNKVTLADAGFIKQYGDCLGDIAARDLICAQKFNGLTVLPPLLTDEMIAQYTSALLAGTITSGWTFGAGAALQIPFAMQMAYRFNGIGVTQNVLYENQKLIANQFNSAIGKIQDSLSSTASALGKLQDVVNQNAQALNTLVKQLSSNFGAISSVLNDILSRLDKVEAEVQIDRLITGRLQSLQTYVTQQLIRAAEIRASANLAATKMSECVLGQSKRVDFCGKGYHLMSFPQSAPHGVVFLHVTYVPAQEKNFTTAPAICHDGKAHFPREGVFVSNGTHWFVTQRNFCEPQIITTDNTFVSGSCDVVIGIVNNTVYDPLQPELDSGGGSGGGQIYEGKLTAEGLRFGIVASRFNHALVDRLVEGAIDAIVRHGGREEDITLVRVPGSWEIPVAAGELARKEDIDAVIAIGVLIRGATPHFDYIASEVSKGLADLSLELRKPITFGVITADTLEQAIERAGTKHGNKGWEAALSAIEMANLFKSLR

SEQ ID NO: 8048 - protein, 1307 aa, Artificial Sequence
  SARS-CoV-2/Wuhan/HBCDC-HB-01/2019__EPI_ISL_402132 spike protein (1-1147)(I714C_Y1110C) LumSynth construct
MFVFLVLLPLVSSQCVNLTTRTQLPPAYTNSITRGVYYPDKVFRSSVLHSTQDLFLPFFSNVTWFHAIHVSGTNGTKRFDNPVLPFNDGVYFASTEKSNIIRGWIFGTTLDSKTQSLLIVNNATNVVIKVCEFQFCNDPFLGVYYHKNNKSWMESEFRVYSSANNCTFEYVSQPFLMDLEGKQGNFKNLREFVFKNIDGYFKIYSKHTPINLVRDLPQGFSALEPLVDLPIGINITRFQTLLALHRSYLTPGDSSSGWTAGAAAYYVGYLQPRTFLLKYNENGTITDAVDCALDPLSETKCTLKSFTVEKGIYQTSNFRVQPTESIVRFPNITNLCPFGEVFNATRFASVYAWNRKRISNCVADYSVLYNSASFSTFKCYGVSPTKLNDLCFTNVYADSFVIRGDEVRQIAPGQTGKIADYNYKLPDDFTGCVIAWNSNNLDSKVGGNYNYLYRLFRKSNLKPFERDISTEIYQAGSTPCNGVEGFNCYFPLQSYGFQPTNGVGYQPYRVVVLSFELLHAPATVCGPKKSTNLVKNKCVNFNFNGLTGTGVLTESNKKFLPFQQFGRDIADTTDAVRDPQTLEILDITPCSFGGVSVITPGTNTSNQVAVLYQDVNCTEVPVAIHADQLTPTWRVYSTGSNVFQTRAGCLIGAEHVNNSYECDIPIGAGICASYQTQTNSPRRARSVASQSIIAYTMSLGAENSVAYSNNSIACPTNFTISVTTEILPVSMTKTSVDCTMYICGDSTECSNLLLQYGSFCTQLNRALTGIAVEQDKNTQEVFAQVKQIYKTPPIKDFGGFNFSQILPDPSKPSKRSFIEDLLFNKVTLADAGFIKQYGDCLGDIAARDLICAQKFNGLTVLPPLLTDEMIAQYTSALLAGTITSGWTFGAGAALQIPFAMQMAYRFNGIGVTQNVLYENQKLIANQFNSAIGKIQDSLSSTASALGKLQDVVNQNAQALNTLVKQLSSNFGAISSVLNDILSRLDKVEAEVQIDRLITGRLQSLQTYVTQQLIRAAEIRASANLAATKMSECVLGQSKRVDFCGKGYHLMSFPQSAPHGVVFLHVTYVPAQEKNFTTAPAICHDGKAHFPREGVFVSNGTHWFVTQRNFCEPQIITTDNTFVSGNCDVVIGIVNNTVYDPLQPELDSGGGSGGGQIYEGKLTAEGLRFGIVASRFNHALVDRLVEGAIDAIVRHGGREEDITLVRVPGSWEIPVAAGELARKEDIDAVIAIGVLIRGATPHFDYIASEVSKGLADLSLELRKPITFGVITADTLEQAIERAGTKHGNKGWEAALSAIEMANLFKSLR

SEQ ID NO: 8049 - protein, 1307 aa, Artificial Sequence
  SARS-CoV-2/Guangdong/20SF028/2020__EPI_ISL_403936 spike protein (1-1147)(I714C_Y1110C) LumSynth construct
MFVFLVLLPLVSSQCVNLTTRTQLPPAYTNSFTRGVYYPDKVFRSSVLYSTQDLFLPFFSNVTWFHAIHVSGTNGTKRFDNPVLPFNDGVYFASTEKSNIIRGWIFGTTLDSKTQSLLIVNNATNVVIKVCEFQFCNDPFLGVYYHKNNKSWMESEFRVYSSANNCTFEYVSQPFLMDLEGKQGNFKNLREFVFKNIDGYFKIYSKHTPINLVRDLPQGFSALEPLVDLPIGINITRFQTLLALHRSYLTPGDSSSGWTAGAAAYYVGYLQPRTFLLKYNENGTITDAVDCALDPLSETKCTLKSFTVEKGIYQTSNFRVQPTESIVRFPNITNLCPFGEVFNATRFASVYAWNRKRISNCVADYSVLYNSASFSTFKCYGVSPTKLNDLCFTNVYADSFVIRGDEVRQIAPGQTGKIADYNYKLPDDFTGCVIAWNSNNLDSKVGGNYNYLYRLFRKSNLKPFERDISTEIYQAGSTPCNGVEGFNCYFPLQSYGFQPTNGVGYQPYRVVVLSFELLHAPATVCGPKKSTNLVKNKCVNFNFNGLTGTGVLTESNKKFLPFQQFGRDIADTTDAVRDPQTLEILDITPCSFGGVSVITPGTNTSNQVAVLYQDVNCTEVPVAIHADQLTPTWRVYSTGSNVFQTRAGCLIGAEHVNNSYECDIPIGAGICASYQTQTNSPRRARSVASQSIIAYTMSLGAENSVAYSNNSIACPTNFTISVTTEILPVSMTKTSVDCTMYICGDSTECSNLLLQYGSFCTQLNRALTGIAVEQDKNTQEVFAQVKQIYKTPPIKDFGGFNFSQILPDPSKPSKRSFIEDLLFNKVTLADAGFIKQYGDCLGDIAARDLICAQKFNGLTVLPPLLTDEMIAQYTSALLAGTITSGWTFGAGAALQIPFAMQMAYRFNGIGVTQNVLYENQKLIANQFNSAIGKIQDSLSSTASALGKLQDVVNQNAQALNTLVKQLSSNFGAISSVLNDILSRLDKVEAEVQIDRLITGRLQSLQTYVTQQLIRAAEIRASANLAATKMSECVLGQSKRVDFCGKGYHLMSFPQSAPHGVVFLHVTYVPAQEKNFTTAPAICHDGKAHFPREGVFVSNGTHWFVTQRNFCEPQIITTDNTFVSGNCDVVIGIVNNTVYDPLQPELDSGGGSGGGQIYEGKLTAEGLRFGIVASRFNHALVDRLVEGAIDAIVRHGGREEDITLVRVPGSWEIPVAAGELARKEDIDAVIAIGVLIRGATPHFDYIASEVSKGLADLSLELRKPITFGVITADTLEQAIERAGTKHGNKGWEAALSAIEMANLFKSLR

SEQ ID NO: 8050 - protein, 1307 aa, Artificial Sequence
  SARS-CoV-2/Shenzhen/SZTH-001/2020__EPI_ISL_406592 spike protein (1-1147)(I714C_Y1110C) LumSynth construct
MFVFLVLLPLVSSQCVNLTTRTQLPPAYTNSFTRGVYYPDKVFRSSVLHSTQDLFLPFFSNVTWFHAIHVSGTNGTKRFDNPVLPFNDGVYFASTEKSNIIRGWIFGTTLDSKTQSLLIVNNATNVVIKVCEFQFCNDPFLGVYYHKNNKSWMESEFRVYSSANNCTFEYVSQPFLMDLEGKQGNFKNLREFVFKNIDGYFKIYSKHTPINLVRDLPQGFSALEPLVDLPIGINITRFQTLLALHRSYLTPGDSSSGWTAGAAAYYVGYLQPRTFLLKYNENGTITDAVDCALDPLSETKCTLKSFTVEKGIYQTSNFRVQPTESIVRFPNITNLCPFGEVFNATRFASVYAWNRKRISNCVADYSVLYNSASFSTFKCYGVSPTKLNDLCFTNVYADSFVIRGDEVRQIAPGQTGKIADYNYKLPDDFTGCVIAWNSNNLDSKVGGNYNYLYRLFRKSNLKPFERDISTEIYQAGSTPCNGVEGFNCYFPLQSYGFQPTNGVGYQPYRVVVLSFELLHAPATVCGPKKSTNLVKNKCVNFNFNGLTGTGVLTESNKKFLPFQQFGRDIADTTDAVRDPQTLEILDITPCSFGGVSVITPGTNTSNQVAVLYQDVNCTEVPVAIHADQLTPTWRVYSTGSNVFQTRAGCLIGAEHVNNSYECDIPIGAGICASYQTQTNSPRRARSVASQSIIAYTMSLGAENSVAYSNNSIACPTNFTISVTTEILPVSMTKTSVDCTMYICGDSTECSNLLLQYGSFCTQLNRALTGIAVEQDKNTQEVFAQVKQIYKTPPIKDFGGFNFSQILPDPSKPSKRSFIEDLLFNKVTLADAGFIKQYGDCLGDIAARDLICAQKFNGLTVLPPLLTDEMIAQYTSALLAGTITSGWTFGAGAALQIPFAMQMAYRFNGIGVTQNVLYENQKLIANQFNSAIGKIQDSLSSTASALGKLQDVVNQNAQALNTLVKQLSSNFGAISSVLNDILSRLDKVEAEVQIDRLITGRLQSLQTYVTQQLIRAAEIRASANLAATKMSECVLGQSKRVDFCGKGYHLMSFPQSAPHGVVFLHVTYVPAQEKNFTTAPAICHDGKAHFPREGVFVSNGTHWFVTQRNFCEPQIITTDNTFVSGNCDVLIGIVNNTVYDPLQPELDSGGGSGGGQIYEGKLTAEGLRFGIVASRFNHALVDRLVEGAIDAIVRHGGREEDITLVRVPGSWEIPVAAGELARKEDIDAVIAIGVLIRGATPHFDYIASEVSKGLADLSLELRKPITFGVITADTLEQAIERAGTKHGNKGWEAALSAIEMANLFKSLR

SEQ ID NO: 8051 - protein, 1307 aa, Artificial Sequence
  SARS-CoV-2/Shenzhen/SZTH-004/2020__EPI_ISL_406595 spike protein (1-1147)(I714C_Y1110C) LumSynth construct
MFVFLVLLPLVSSQCVNLTTRTQLPPAYTNSFTRGVYYPDKVFRSSVLHSTQDLFLPFFSNVTWFHAIHVSGTNGTKRFDNPVLPFNDGVYFASTEKSNIIRGWIFGTTLDSKTQSLLIVNNATNVVIKVCEFQFCNDPFLGVYYHKNNKSWMESEFRVYSSANNCTFEYVSQPFLMDLEGKQGNFKNLREFVFKNIDGYFKIYSKHTPINLVRDLPQGFSALEPLVDLPIGINITRFQTLLALHRSYLTPGDSSSGWTAGAAAYYVGYLQPRTFLLKYNENGTITDAVDCALDPLSETKCTLKSFTVEKGIYQTSNFRVQPTESIVRFPNITNLCPFGEVFNATRFASVYAWDRKRISNCVAYYSVLYNSASFSTFKCYGVSPTKLNDLCFTNVYADSFVIRGDEVRQIAPGQTGKIADYNYKLPDDFTGCVIAWNSNNLDSKVGGNYNYLYRLFRKSNLKPFERDISTEIYQAGSTPCNGVEGFNCYFPLQSYGFQPTNGVGYQPYRVVVLSFELLHAPATVCGPKKSTNLVKNKCVNFNFNGLTGTGVLTESNKKFLPFQQFGRDIADTTDAVRDPQTLEILDITPCSFGGVSVITPGTNTSNQVAVLYQDVNCTEVPVAIHADQLTPTWRVYSTGSNVFQTRAGCLIGAEHVNNSYECDIPIGAGICASYQTQTNSPRRARSVASQSIIAYTMSLGAENSVAYSNNSIACPTNFTISVTTEILPVSMTKTSVDCTMYICGDSTECSNLLLQYGSFCTQLNRALTGIAVEQDKNTQEVFAQVKQIYKTPPIKDFGGFNFSQILPDPSKPSKRSFIEDLLFNKVTLADAGFIKQYGDCLGDIAARDLICAQKFNGLTVLPPLLTDEMIAQYTSALLAGTITSGWTFGAGAALQIPFAMQMAYRFNGIGVTQNVLYENQKLIANQFNSAIGKIQDSLSSTASALGKLQDVVNQNAQALNTLVKQLSSNFGAISSVLNDILSRLDKVEAEVQIDRLITGRLQSLQTYVTQQLIRAAEIRASANLAATKMSECVLGQSKRVDFCGKGYHLMSFPQSAPHGVVFLHVTYVPAQEKNFTTAPAICHDGKAHFPREGVFVSNGTHWFVTQRNFCEPQIITTDNTFVSGNCDVVIGIVNNTVYDPLQPELDSGGGSGGGQIYEGKLTAEGLRFGIVASRFNHALVDRLVEGAIDAIVRHGGREEDITLVRVPGSWEIPVAAGELARKEDIDAVIAIGVLIRGATPHFDYIASEVSKGLADLSLELRKPITFGVITADTLEQAIERAGTKHGNKGWEAALSAIEMANLFKSLR

SEQ ID NO: 8052 - protein, 1307 aa, Artificial Sequence
  SARS-CoV-2/France/IDF0372/2020__EPI_ISL_406596 spike protein (1-1147)(I714C_Y1110C) LumSynth construct
MFVFLVLLPLVSSQCVNLTTRTQLPPAYTNSFTRGVYYPDKVFRSSVLHSTQDLFLPFFSNVTWFHAIHVSGTNGTKRFDNPVLPFNDGVYFASTEKSNIIRGWIFGTTLDSKTQSLLIVNNATNVVIKVCEFQFCNDPFLGVYYHKNNKSWMESEFRVYSSANNCTFEYVSQPFLMDLEGKQGNFKNLREFVFKNIDGYFKIYSKHTPINLVRDLPQGFSALEPLVDLPIGINITRFQTLLALHRSYLTPGDSSSGWTAGAAAYYVGYLQPRTFLLKYNENGTITDAVDCALDPLSETKCTLKSFTVEKGIYQTSNFRVQPTESIVRFPNITNLCPFGEVFNATRFASVYAWNRKRISNCVADYSFLYNSASFSTFKCYGVSPTKLNDLCFTNVYADSFVIRGDEVRQIAPGQTGKIADYNYKLPDDFTGCVIAWNSNNLDSKVGGNYNYLYRLFRKSNLKPFERDISTEIYQAGSTPCNGVEGFNCYFPLQSYGFQPTNGVGYQPYRVVVLSFELLHAPATVCGPKKSTNLVKNKCVNFNFNGLTGTGVLTESNKKFLPFQQFGRDIADTTDAVRDPQTLEILDITPCSFGGVSVITPGTNTSNQVAVLYQDVNCTEVPVAIHADQLTPTWRVYSTGSNVFQTRAGCLIGAEHVNNSYECDIPIGAGICASYQTQTNSPRRARSVASQSIIAYTMSLGAENSVAYSNNSIACPTNFTISVTTEILPVSMTKTSVDCTMYICGDSTECSNLLLQYGSFCTQLNRALTGIAVEQDKNTQEVFAQVKQIYKTPPIKDFGGFNFSQILPDPSKPSKRSFIEDLLFNKVTLADAGFIKQYGDCLGDIAARDLICAQKFNGLTVLPPLLTDEMIAQYTSALLAGTITSGWTFGAGAALQIPFAMQMAYRFNGIGVTQNVLYENQKLIANQFNSAIGKIQDSLSSTASALGKLQDVVNQNAQALNTLVKQLSSNFGAISSVLNDILSRLDKVEAEVQIDRLITGRLQSLQTYVTQQLIRAAEIRASANLAATKMSECVLGQSKRVDFCGKGYHLMSFPQSAPHGVVFLHVTYVPAQEKNFTTAPAICHDGKAHFPREGVFVSNGTHWFVTQRNFCEPQIITTDNTFVSGNCDVVIGIVNNTVYDPLQPELDSGGGSGGGQIYEGKLTAEGLRFGIVASRFNHALVDRLVEGAIDAIVRHGGREEDITLVRVPGSWEIPVAAGELARKEDIDAVIAIGVLIRGATPHFDYIASEVSKGLADLSLELRKPITFGVITADTLEQAIERAGTKHGNKGWEAALSAIEMANLFKSLR

SEQ ID NO: 8053 - protein, 1307 aa, Artificial Sequence
  SARS-CoV-2/Australia/VIC01/2020__EPI_ISL_406844 spike protein (1-1147)(I714C_Y1110C) LumSynth construct
MFVFLVLLPLVSSQCVNLTTRTQLPPAYTNSFTRGVYYPDKVFRSSVLHSTQDLFLPFFSNVTWFHAIHVSGTNGTKRFDNPVLPFNDGVYFASTEKSNIIRGWIFGTTLDSKTQSLLIVNNATNVVIKVCEFQFCNDPFLGVYYHKNNKSWMESEFRVYSSANNCTFEYVSQPFLMDLEGKQGNFKNLREFVFKNIDGYFKIYSKHTPINLVRDLPQGFSALEPLVDLPIGINITRFQTLLALHRRYLTPGDSSSGWTAGAAAYYVGYLQPRTFLLKYNENGTITDAVDCALDPLSETKCTLKSFTVEKGIYQTSNFRVQPTESIVRFPNITNLCPFGEVFNATRFASVYAWNRKRISNCVADYSVLYNSASFSTFKCYGVSPTKLNDLCFTNVYADSFVIRGDEVRQIAPGQTGKIADYNYKLPDDFTGCVIAWNSNNLDSKVGGNYNYLYRLFRKSNLKPFERDISTEIYQAGSTPCNGVEGFNCYFPLQSYGFQPTNGVGYQPYRVVVLSFELLHAPATVCGPKKSTNLVKNKCVNFNFNGLTGTGVLTESNKKFLPFQQFGRDIADTTDAVRDPQTLEILDITPCSFGGVSVITPGTNTSNQVAVLYQDVNCTEVPVAIHADQLTPTWRVYSTGSNVFQTRAGCLIGAEHVNNSYECDIPIGAGICASYQTQTNSPRRARSVASQSIIAYTMSLGAENSVAYSNNSIACPTNFTISVTTEILPVSMTKTSVDCTMYICGDSTECSNLLLQYGSFCTQLNRALTGIAVEQDKNTQEVFAQVKQIYKTPPIKDFGGFNFSQILPDPSKPSKRSFIEDLLFNKVTLADAGFIKQYGDCLGDIAARDLICAQKFNGLTVLPPLLTDEMIAQYTSALLAGTITSGWTFGAGAALQIPFAMQMAYRFNGIGVTQNVLYENQKLIANQFNSAIGKIQDSLSSTASALGKLQDVVNQNAQALNTLVKQLSSNFGAISSVLNDILSRLDKVEAEVQIDRLITGRLQSLQTYVTQQLIRAAEIRASANLAATKMSECVLGQSKRVDFCGKGYHLMSFPQSAPHGVVFLHVTYVPAQEKNFTTAPAICHDGKAHFPREGVFVSNGTHWFVTQRNFCEPQIITTDNTFVSGNCDVVIGIVNNTVYDPLQPELDSGGGSGGGQIYEGKLTAEGLRFGIVASRFNHALVDRLVEGAIDAIVRHGGREEDITLVRVPGSWEIPVAAGELARKEDIDAVIAIGVLIRGATPHFDYIASEVSKGLADLSLELRKPITFGVITADTLEQAIERAGTKHGNKGWEAALSAIEMANLFKSLR

SEQ ID NO: 8054 - protein, 1307 aa, Artificial Sequence
  SARS-CoV-2/Germany/BavPat1/2020__EPI_ISL_406862 spike protein (1-1147)(I714C_Y1110C) LumSynth construct
MFVFLVLLPLVSSQCVNLTTRTQLPPAYTNSFTRGVYYPDKVFRSSVLHSTQDLFLPFFSNVTWFHAIHVSGTNGTKRFDNPVLPFNDGVYFASTEKSNIIRGWIFGTTLDSKTQSLLIVNNATNVVIKVCEFQFCNDPFLGVYYHKNNKSWMESEFRVYSSANNCTFEYVSQPFLMDLEGKQGNFKNLREFVFKNIDGYFKIYSKHTPINLVRDLPQGFSALEPLVDLPIGINITRFQTLLALHRSYLTPGDSSSGWTAGAAAYYVGYLQPRTFLLKYNENGTITDAVDCALDPLSETKCTLKSFTVEKGIYQTSNFRVQPTESIVRFPNITNLCPFGEVFNATRFASVYAWNRKRISNCVADYSVLYNSASFSTFKCYGVSPTKLNDLCFTNVYADSFVIRGDEVRQIAPGQTGKIADYNYKLPDDFTGCVIAWNSNNLDSKVGGNYNYLYRLFRKSNLKPFERDISTEIYQAGSTPCNGVEGFNCYFPLQSYGFQPTNGVGYQPYRVVVLSFELLHAPATVCGPKKSTNLVKNKCVNFNFNGLTGTGVLTESNKKFLPFQQFGRDIADTTDAVRDPQTLEILDITPCSFGGVSVITPGTNTSNQVAVLYQGVNCTEVPVAIHADQLTPTWRVYSTGSNVFQTRAGCLIGAEHVNNSYECDIPIGAGICASYQTQTNSPRRARSVASQSIIAYTMSLGAENSVAYSNNSIACPTNFTISVTTEILPVSMTKTSVDCTMYICGDSTECSNLLLQYGSFCTQLNRALTGIAVEQDKNTQEVFAQVKQIYKTPPIKDFGGFNFSQILPDPSKPSKRSFIEDLLFNKVTLADAGFIKQYGDCLGDIAARDLICAQKFNGLTVLPPLLTDEMIAQYTSALLAGTITSGWTFGAGAALQIPFAMQMAYRFNGIGVTQNVLYENQKLIANQFNSAIGKIQDSLSSTASALGKLQDVVNQNAQALNTLVKQLSSNFGAISSVLNDILSRLDKVEAEVQIDRLITGRLQSLQTYVTQQLIRAAEIRASANLAATKMSECVLGQSKRVDFCGKGYHLMSFPQSAPHGVVFLHVTYVPAQEKNFTTAPAICHDGKAHFPREGVFVSNGTHWFVTQRNFCEPQIITTDNTFVSGNCDVVIGIVNNTVYDPLQPELDSGGGSGGGQIYEGKLTAEGLRFGIVASRFNHALVDRLVEGAIDAIVRHGGREEDITLVRVPGSWEIPVAAGELARKEDIDAVIAIGVLIRGATPHFDYIASEVSKGLADLSLELRKPITFGVITADTLEQAIERAGTKHGNKGWEAALSAIEMANLFKSLR

SEQ ID NO: 8055 - protein, 1307 aa, Artificial Sequence
  SARS-CoV-2/Wuhan/HBCDC-HB-02/2020__EPI_ISL_412978 spike protein (1-1147)(I714C_Y1110C) LumSynth construct
MFVFLVLLPLVSSQCVNLTTRTQLPPAYTNSFTRGVYYPDKVFRSSVLHSTQDLFLPFFSNVTWFHAIHVSGTNGTKRFDNPVLPFNDGVYFASTEKSNIIRGWIFGTTLDSKTQSLLIVNNATNVVIKVCEFQFCNDPFLGVYYHKNNKSWMESEFRVYSSANNCTFEYVSQPFLMDLEGKQGNFKNLREFVFKNIDGYFKIYSKHTPINLVRDLPQGFSALEPLVDLPIGINITRFQTLLALHRSYLTPGDSSSGWTAGAAAYYVGYLQPRTFLLKYNENGTITDAVDCALDPLSETKCTLKSFTVEKGIYQTSNFRVQPTESIVRFPNITNLCPFGEVFNATRFASVYAWNRKRISNCVADYSVLYNSASFSTFKCYGVSPTKLNDLCFTNVYADSFVIRGDEVRQIAPGQTGKIADYNYKLPDDFTGCVIAWNSNNLDSKVGGNYNYLYRLFRKSNLKPFERDISTEIYQAGSTPCNGVEGFNCYFPLQSYGFQPTNGVGYQPYRVVVLSFELLHAPATVCGPKKSTNLVKNKCVNFNFNGLTGTGVLTESNKKFLPFQQFGRDIADTTDAVRDPQTLEILDITPCSFGGVSVITPGTNTSNQVAVLYQDVNCTEVPVAIHADQLTPTWRVYSTGSNVFQTRAGCLIGAEHVNNSYECDIPIGAGICASYQTQTNSPRRARSVASQSIIAYTMSLGAENSVAYSNNSIACPTNFTISVTTEILPVSMTKTSVDCTMYICGDSTECSNFLLQYGSFCTQLNRALTGIAVEQDKNTQEVFAQVKQIYKTPPIKDFGGFNFSQILPDPSKPSKRSFIEDLLFNKVTLADAGFIKQYGDCLGDIAARDLICAQKFNGLTVLPPLLTDEMIAQYTSALLAGTITSGWTFGAGAALQIPFAMQMAYRFNGIGVTQNVLYENQKLIANQFNSAIGKIQDSLSSTASALGKLQDVVNQNAQALNTLVKQLSSNFGAISSVLNDILSRLDKVEAEVQIDRLITGRLQSLQTYVTQQLIRAAEIRASANLAATKMSECVLGQSKRVDFCGKGYHLMSFPQSAPHGVVFLHVTYVPAQEKNFTTAPAICHDGKAHFPREGVFVSNGTHWFVTQRNFCEPQIITTDNTFVSGNCDVVIGIVNNTVYDPLQPELDSGGGSGGGQIYEGKLTAEGLRFGIVASRFNHALVDRLVEGAIDAIVRHGGREEDITLVRVPGSWEIPVAAGELARKEDIDAVIAIGVLIRGATPHFDYIASEVSKGLADLSLELRKPITFGVITADTLEQAIERAGTKHGNKGWEAALSAIEMANLFKSLR

SEQ ID NO: 8056 - protein, 1307 aa, Artificial Sequence
  SARS-CoV-2/Australia/QLD02/2020__EPI_ISL_407896 spike protein (1-1147)(I714C_Y1110C) LumSynth construct
MFVFLVLLPLVSSQCVNLTTRTQLPPAYTNSFTRGVYYPDKVFRSSVLHSTQDLFLPFFSNVTWFHAIHVSGTNGTKRFDNPVLPFNDGVYFASTEKSNIIRGWIFGTTLDSKTQSLLIVNNATNVVIKVCEFQFCNDPFLGVYYHKNNKSWMESEFRVYSSANNCTFEYVSQPFLMDLEGKQGNFKNLREFVFKNIDGYFKIYSKHTPINLVRDLPQGFSALEPLVDLPIGINITRFQTLLALHRSYLTPGDSSSGWTAGAAAYYVGYLQPRTFLLKYNENGTITDAVDCALDPLSETKCTLKSFTVEKGIYQTSNFRVQPTESIVRFPNITNLCPFGEVFNATRFASVYAWNRKRISNCVADYSVLYNSASFSTFKCYGVSPTKLNDLCFTNVYADSFVIRGDEVRQIAPGQTGKIADYNYKLPDDFTGCVIAWNSNNLDSKVGGNYNYLYRLFRKSNLKPFERDISTEIYQAGSTPCNGVEGFNCYFPLQSYGFQPTNGVGYQPYRVVVLSFELLHAPATVCGPKKSTNLVKNKCVNFNFNGLTGTGVLTESNKKFLPFQQFGRDIADTTDAVRDPQTLEILDITPCSFGGVSVITPGTNTSNQVAVLYQDVNCTEVPVAIHADQLTPTWRVYSTGSNVFQTRAGCLIGAEHVNNSYECDIPIGAGICASYQTQTNSPRRARSVASQSIIAYTMSLGAENSVAYSNNSIACPTNFTISVTTEILPVSMTKTSVDCTMYICGDSTECSNLLLQYGSFCTQLNRALTGIAVEQDKNTQEVFAQVKQIYKTPPIKDFGGFNFSQILPDPSKPSKRSFIEDLLFNKVTLADAGFIKQYGDCLGDIAARDLICAQKFNGLTVLPPLLTDEMIAQYTSALLAGTITSGWTFGAGAALQIPFAMQMAYRFNGIGVTQNVLYENQKLIANQFNSAIGKIQDSLSSTASALGKLQDVVNQNAQALNTLVKQLSSNFGAISSVLNDILSRLDKVEAEVQIDRLITGRLQSLQTYVTQQLIRAAEIRASANLAATKMSECVLGQSKRVDFCGKGYHLMSFPQSAPHGVVFLHVTYVPAQEKNFTTAPAICHDGKAHFPREGVFVSNGTHWFVTQRNFCEPQIITTDNTFVSGNCDVVIGIVNNTVYDPLQLELDSGGGSGGGQIYEGKLTAEGLRFGIVASRFNHALVDRLVEGAIDAIVRHGGREEDITLVRVPGSWEIPVAAGELARKEDIDAVIAIGVLIRGATPHFDYIASEVSKGLADLSLELRKPITFGVITADTLEQAIERAGTKHGNKGWEAALSAIEMANLFKSLR

SEQ ID NO: 8057 - protein, 1307 aa, Artificial Sequence
  SARS-CoV-2/India/1-31/2020__EPI_ISL_413523 spike protein (1-1147)(I714C_Y1110C) LumSynth construct
MFVFLVLLPLVSSQCVNLTTRTQLPPAYTNSFTRGVYYPDKVFRSSVLHSTQDLFLPFFSNVTWFHAIHVSGTNGTKRFDNPVLPFNDGVYFASTEKSNIIRGWIFGTTLDSKTQSLLIVNNATNVVIKVCEFQFCNDPFLGVYYHKNNKSWMESEFRVYSSANNCTFEYVSQPFLMDLEGKQGNFKNLREFVFKNIDGYFKIYSKHTPINLVRDLPQGFSALEPLVDLPIGINITRFQTLLALHRSYLTPGDSSSGWTAGAAAYYVGYLQPRTFLLKYNENGTITDAVDCALDPLSETKCTLKSFTVEKGIYQTSNFRVQPTESIVRFPNITNLCPFGEVFNATRFASVYAWNRKRISNCVADYSVLYNSASFSTFKCYGVSPTKLNDLCFTNVYADSFVIRGDEVRQIAPGQTGKIADYNYKLPDDFTGCVIAWNSNNLDSKVGGNYNYLYRLFRKSNLKPFERDISTEIYQAGSTPCNGVEGFNCYFPLQSYGFQPTNGVGYQPYRVVVLSFELLHAPATVCGPKKSTNLVKNKCVNFNFNGLTGTGVLTESNKKFLPFQQFGRDIADTTDAVRDPQTLEILDITPCSFGGVSVITPGTNTSNQVAVLYQDVNCTEVPVAIHADQLTPTWRVYSTGSNVFQTRAGCLIGAEHVNNSYECDIPIGAGICASYQTQTNSPRRARSVASQSIIAYTMSLGAENSVAYSNNSIACPTNFTISVTTEILPVSMTKTSVDCTMYICGDSTECSNLLLQYGSFCTQLNRALTGIAVEQDKNTQEVFAQVKQIYKTPPIKDFGGFNFSQILPDPSKPSKRSFIEDLLFNKVTLADAGFIKQYGDCLGDIAARDLICAQKFNGLTVLPPLLTDEMIAQYTSALLAGTITSGWTFGAGAALQIPFAMQMAYRFNGIGVTQNVLYENQKLIANQFNSVIGKIQDSLSSTASALGKLQDVVNQNAQALNTLVKQLSSNFGAISSVLNDILSRLDKVEAEVQIDRLITGRLQSLQTYVTQQLIRAAEIRASANLAATKMSECVLGQSKRVDFCGKGYHLMSFPQSAPHGVVFLHVTYVPAQEKNFTTAPAICHDGKAHFPREGVFVSNGTHWFVTQRNFCEPQIITTDNTFVSGNCDVVIGIVNNTVYDPLQPELDSGGGSGGGQIYEGKLTAEGLRFGIVASRFNHALVDRLVEGAIDAIVRHGGREEDITLVRVPGSWEIPVAAGELARKEDIDAVIAIGVLIRGATPHFDYIASEVSKGLADLSLELRKPITFGVITADTLEQAIERAGTKHGNKGWEAALSAIEMANLFKSLR

SEQ ID NO: 8058 - protein, 1307 aa, Artificial Sequence
  SARS-CoV-2/Guangdong/GD2020087-P0008/2020__EPI_ISL_413863 spike protein (1-1147)(I714C_Y1110C) LumSynth construct
MFVFLVLLPLVSSQCVNLTTRTQLPPAYTNSFTRGVYYPDKVFRSSVLHSTQDLFLPFFSNVTWFHAIHVSGTNGTKRFDNPVLPFNDGVYFASTEKSNIIRGWIFGTTLDSKTQSLLIVNNATNVVIKVCEFQFCNDPFLGVYYHKNNKSWMESEFRVYSSANNCTFEYVSQPFLMDLEGKQGNFKNLREFVFKNIDGYFKIYSKHTPINLVRDLPQGFSALEPLVDLPIGINITRFQTLLALHRSYLTPGDSSSGWTAGAAAYYVGYLQPRTFLLKYNENGTITDAVDCALDPLSETKCTLKSFTVEKGIYQTSNFRVQPTESIVRFPNITNLCPFGEVFNATRFASVYAWNRKRISNCVADYSVLYNSASFSTFKCYGVSPTKLNDLCFTNVYADSFVIRGDEVREIAPGQTGKIADYNYKLPDDFTGCVIAWNSNNLDSKVGGNYNYLYRLFRKSNLKPFERDISTEIYQAGSTPCNGVEGFNCYFPLQSYGFQPTNGVGYQPYRVVVLSFELLHAPATVCGPKKSTNLVKNKCVNFNFNGLTGTGVLTESNKKFLPFQQFGRDIADTTDAVRDPQTLEILDITPCSFGGVSVITPGTNTSNQVAVLYQDVNCTEVPVAIHADQLTPTWRVYSTGSNVFQTRAGCLIGAEHVNNSYECDIPIGAGICASYQTQTNSPRRARSVASQSIIAYTMSLGAENSVAYSNNSIACPTNFTISVTTEILPVSMTKTSVDCTMYICGDSTECSNLLLQYGSFCTQLNRALTGIAVEQDKNTQEVFAQVKQIYKTPPIKDFGGFNFSQILPDPSKPSKRSFIEDLLFNKVTLADAGFIKQYGDCLGDIAARDLICAQKFNGLTVLPPLLTDEMIAQYTSALLAGTITSGWTFGAGAALQIPFAMQMAYRFNGIGVTQNVLYENQKLIANQFNSAIGKIQDSLSSTASALGKLQDVVNQNAQALNTLVKQLSSNFGAISSVLNDILSRLDKVEAEVQIDRLITGRLQSLQTYVTQQLIRAAEIRASANLAATKMSECVLGQSKRVDFCGKGYHLMSFPQSAPHGVVFLHVTYVPAQEKNFTTAPAICHDGKAHFPREGVFVSNGTHWFVTQRNFCEPQIITTDNTFVSGNCDVVIGIVNNTVYDPLQPELDSGGGSGGGQIYEGKLTAEGLRFGIVASRFNHALVDRLVEGAIDAIVRHGGREEDITLVRVPGSWEIPVAAGELARKEDIDAVIAIGVLIRGATPHFDYIASEVSKGLADLSLELRKPITFGVITADTLEQAIERAGTKHGNKGWEAALSAIEMANLFKSLR

SEQ ID NO: 8059 - protein, 1307 aa, Artificial Sequence
  SARS-CoV-2/Sweden/01/2020__EPI_ISL_411951 spike protein (1-1147)(I714C_Y1110C) LumSynth construct
MFVFLVLLPLVSSQCVNLTTRTQLPPAYTNSFTRGVYYPDKVFRSSVLHSTQDLFLPFFSNVTWFHAIHVSGTNGTKRFDNPVLPFNDGVYFASTEKSNIIRGWIFGTTLDSKTQSLLIVNNATNVVIKVCEFQFCNDPFLGVYYHKNNKSWMESEFRVYSSANNCTFEYVSQPFLMDLEGKQGNFKNLREFVFKNIDGYFKIYSKHTPINLVRDLPQGFSALEPLVDLPIGINITRFQTLLALHRSYLTPGDSSSGWTAGAAAYYVGYLQPRTFLLKYNENGTITDAVDCALDPLSETKCTLKSFTVEKGIYQTSNFRVQPTESIVRFPNITNLCPFGEVFNATRFASVYAWNRKRISNCVADYSVLYNSASFSTFKCYGVSPTKLNDLCFTNVYADSFVIRGDEVRQIAPGQTGKIADYNYKLPDDFTGCVIAWNSNNLDSKVGGNYNYLYRLFRKSNLKPFERDISTEIYQAGSTPCNGVEGFNCYFPLQSYGFQPTNGVGYQPYRVVVLSFELLHAPATVCGPKKSTNLVKNKCVNFNFNGLTGTGVLTESNKKFLPFQQFGRDIADTTDAVRDPQTLEILDITPCSFGGVSVITPGTNTSNQVAVLYQDVNCTEVPVAIHADQLTPTWRVYSTGSNVFQTRAGCLIGAEHVNNSYECDIPIGAGICASYQTQTNSPRRARSVASQSIIAYTMSLGAENSVAYSNNSIACPTNFTISVTTEILPVSMTKTSVDCTMYICGDSTECSNLLLQYGSFCTQLNRALTGIAVEQDKNTQEVFAQVKQIYKTPPIKDCGGFNFSQILPDPSKPSKRSFIEDLLFNKVTLADAGFIKQYGDCLGDIAARDLICAQKFNGLTVLPPLLTDEMIAQYTSALLAGTITSGWTFGAGAALQIPFAMQMAYRFNGIGVTQNVLYENQKLIANQFNSAIGKIQDSLSSTASALGKLQDVVNQNAQALNTLVKQLSSNFGAISSVLNDILSRLDKVEAEVQIDRLITGRLQSLQTYVTQQLIRAAEIRASANLAATKMSECVLGQSKRVDFCGKGYHLMSFPQSAPHGVVFLHVTYVPAQEKNFTTAPAICHDGKAHFPREGVFVSNGTHWFVTQRNFCEPQIITTDNTFVSGNCDVVIGIVNNTVYDPLQPELDSGGGSGGGQIYEGKLTAEGLRFGIVASRFNHALVDRLVEGAIDAIVRHGGREEDITLVRVPGSWEIPVAAGELARKEDIDAVIAIGVLIRGATPHFDYIASEVSKGLADLSLELRKPITFGVITADTLEQAIERAGTKHGNKGWEAALSAIEMANLFKSLR

SEQ ID NO: 8060 - protein, 1307 aa, Artificial Sequence
  SARS-CoV-2/Tianmen/HBCDC-HB-07/2020__EPI_ISL_412983 spike protein (1-1147)(I714C_Y1110C) LumSynth construct
MFVFLVLLPLVSSQCVNLTTRTQLPPAYTNSFTRGVYYPDKVFRSSVLHSTQDLFLPFFSNVTWFHAIHVSGTNGTKRFDNPVLPFNDGVYFASTEKSNIIRGWIFGTTLDSKTQSLLIVNNATNVVIKVCEFQFCNDPFLGVYYHKNNKSWMESEFRVYSSANNCTFEYVSQPFLMDLEGKQGNFKNLREFVFKNIDGYFKIYSKHTPINLVRDLPQGFSALEPLVDLPIGINITRFQTLLALHRSYLTPGDSSSGWTAGAAAYYVGYLQPRTFLLKYNENGTITDAVDCALDPLSETKCTLKSFTVEKGIYQTSNFRVQPTESIVRFPNITNLCPFGEVFNATRFASVYAWNRKRISNCVADYSVLYNSASFSTFKCYGVSPTKLNDLCFTNVYADSFVIRGDEVRQIAPGQTGKIADYNYKLPDDFTGCVIAWNSNNLDSKVGGNYNYLYRLFRKSNLKPFERDISTEIYQAGSTPCNGVEGFNCYFPLQSYGFQPTNGVGYQPYRVVVLSFELLHAPATVCGPKKSTNLVKNKCVNFNFNGLTGTGVLTESNKKFLPFQQFGRDIADTTDAVRDPQTLEILDITPCSFGGVSVITPGTNTSNQVAVLYQDLNCTEVPVAIHADQLTPTWRVYSTGSNVFQTRAGCLIGAEHVNNSYECDIPIGAGICASYQTQTNSPRRARSVASQSIIAYTMSLGAENSVAYSNNSIACPTNFTISVTTEILPVSMTKTSVDCTMYICGDSTECSNLLLQYGSFCTQLNRALTGIAVEQDKNTQEVFAQVKQIYKTPPIKDFGGFNFSQILPDPSKPSKRSFIEDLLFNKVTLADAGFIKQYGDCLGDIAARDLICAQKFNGLTVLPPLLTDEMIAQYTSALLAGTITSGWTFGAGAALQIPFAMQMAYRFNGIGVTQNVLYENQKLIANQFNSAIGKIQDSLSSTASALGKLQDVVNQNAQALNTLVKQLSSNFGAISSVLNDILSRLDKVEAEVQIDRLITGRLQSLQTYVTQQLIRAAEIRASANLAATKMSECVLGQSKRVDFCGKGYHLMSFPQSAPHGVVFLHVTYVPAQEKNFTTAPAICHDGKAHFPREGVFVSNGTHWFVTQRNFCEPQIITTDNTFVSGNCDVVIGIVNNTVYDPLQPELDSGGGSGGGQIYEGKLTAEGLRFGIVASRFNHALVDRLVEGAIDAIVRHGGREEDITLVRVPGSWEIPVAAGELARKEDIDAVIAIGVLIRGATPHFDYIASEVSKGLADLSLELRKPITFGVITADTLEQAIERAGTKHGNKGWEAALSAIEMANLFKSLR

SEQ ID NO: 8061 - protein, 1307 aa, Artificial Sequence
  SARS-CoV-2/Hong Kong/case42_VM20002493/2020__EPI_ISL_414527 spike protein (1-1147)(I714C_Y1110C) LumSynth construct
MFVFLVLLPLVSSQCVNLTTRTQLPPAYTNSFTRGVYYPDKVFRSSVLHSTQDLFLPFFSNVTWFHAIHVSGTNGTKRFDNPVLPFNDGVYFASTEKSNIIRGWIFGTTLDSKTQSLLIVNNATNVVIKVCEFQFCNDPFLGVYYHKNNKSWMESEFRVYSSANNCTFEYVSQPFLMDLEGKQGNFKNLREFVFKNIDGYFKIYSKHTPINLVRDLPQGFSALEPLVDLPIGINITRFQTLLALHRSYLTPGDSSSGWTAGAAAYYVGYLQPRTFLLKYNENGTITDAVDCALDPLSETKCTLKSFTVEKGIYQTSNFRVQPTESIVRFPNITNLCPFGEVFNATRFASVYAWNRKRISNCVADYSVLYNSASFSTFKCYGVSPTKLNDLCFTNVYADSFVIRGDEVRQIAPGQTGKIADYNYKLPDDFTGCVIAWNSNNLDSKVGGNYNYLYRLFRKSNLKPFERDISTEIYQAGSTPCNGVEGFNCYFPLQSYGFQPTNGVGYQPYRVVVLSFELLHAPATVCGPKKSTNLVKNKCVNFNFNGLTGTGVLTESNKKFLPFQQFGRDIADTTDAVRDPQTLEILDITPCSFGGVSVITPGTNTSNQVAVLYQDVNCTEVPVAIHADQLTPTWRVYSTGSNVFQTRAGCLIGAEHVNNSYECDIPIGAGICASYQTQTNSPRRARSVASQSIIAYTMSLGAENSVAYSNNSIACPTNFAISVTTEILPVSMTKTSVDCTMYICGDSTECSNLLLQYGSFCTQLNRALTGIAVEQDKNTQEVFAQVKQIYKTPPIKDFGGFNFSQILPDPSKPSKRSFIEDLLFNKVTLADAGFIKQYGDCLGDIAARDLICAQKFNGLTVLPPLLTDEMIAQYTSALLAGTITSGWTFGAGAALQIPFAMQMAYRFNGIGVTQNVLYENQKLIANQFNSAIGKIQDSLSSTASALGKLQDVVNQNAQALNTLVKQLSSNFGAISSVLNDILSRLDKVEAEVQIDRLITGRLQSLQTYVTQQLIRAAEIRASANLAATKMSECVLGQSKRVDFCGKGYHLMSFPQSAPHGVVFLHVTYVPAQEKNFTTAPAICHDGKAHFPREGVFVSNGTHWFVTQRNFCEPQIITTDNTFVSGNCDVVIGIVNNTVYDPLQPELDSGGGSGGGQIYEGKLTAEGLRFGIVASRFNHALVDRLVEGAIDAIVRHGGREEDITLVRVPGSWEIPVAAGELARKEDIDAVIAIGVLIRGATPHFDYIASEVSKGLADLSLELRKPITFGVITADTLEQAIERAGTKHGNKGWEAALSAIEMANLFKSLR

SEQ ID NO: 8062 - protein, 1307 aa, Artificial Sequence
  SARS-CoV-2/USA/CruiseA-23/2020__EPI_ISL_414482 spike protein (1-1147)(I714C_Y1110C) LumSynth construct
MFVFLVLLPLVSSQCVNLTTRTQLPPAYTNSFTRGVYYPDKVFRSSVLHSTQDLFLPFFSNVTWFHAIHVSGTNGTKRFDNPVLPFNDGVYFASTEKSNIIRGWIFGTTLDSKTQSLLIVNNATNVVIKVCEFQFCNDPFLGVYYHKNNKSWMESEFRVYSSANNCTFEYVSQPFLMDLEVKQGNFKNLREFVFKNIDGYFKIYSKHTPINLVRDLPQGFSALEPLVDLPIGINITRFQTLLALHRSYLTPGDSSSGWTAGAAAYYVGYLQPRTFLLKYNENGTITDAVDCALDPLSETKCTLKSFTVEKGIYQTSNFRVQPTESIVRFPNITNLCPFGEVFNATRFASVYAWNRKRISNCVADYSVLYNSASFSTFKCYGVSPTKLNDLCFTNVYADSFVIRGDEVRQIAPGQTGKIADYNYKLPDDFTGCVIAWNSNNLDSKVGGNYNYLYRLFRKSNLKPFERDISTEIYQAGSTPCNGVEGFNCYFPLQSYGFQPTNGVGYQPYRVVVLSFELLHAPATVCGPKKSTNLVKNKCVNFNFNGLTGTGVLTESNKKFLPFQQFGRDIADTTDAVRDPQTLEILDITPCSFGGVSVITPGTNTSNQVAVLYQDVNCTEVPVAIHADQLTPTWRVYSTGSNVFQTRAGCLIGAEHVNNSYECDIPIGAGICASYQTQTNSPRRARSVASQSIIAYTMSLGAENSVAYSNNSIACPTNFTISVTTEILPVSMTKTSVDCTMYICGDSTECSNLLLQYGSFCTQLNRALTGIAVEQDKNTQEVFAQVKQIYKTPPIKDFGGFNFSQILPDPSKPSKRSFIEDLLFNKVTLADAGFIKQYGDCLGDIAARDLICAQKFNGLTVLPPLLTDEMIAQYTSALLAGTITSGWTFGAGAALQIPFAMQMAYRFNGIGVTQNVLYENQKLIANQFNSAIGKIQDSLSSTASALGKLQDVVNQNAQALNTLVKQLSSNFGAISSVLNDILSRLDKVEAEVQIDRLITGRLQSLQTYVTQQLIRAAEIRASANLAATKMSECVLGQSKRVDFCGKGYHLMSFPQSAPHGVVFLHVTYVPAQEKNFTTAPAICHDGKAHFPREGVFVSNGTHWFVTQRNFCEPQIITTDNTFVSGNCDVVIGIVNNTVYDPLQPELDSGGGSGGGQIYEGKLTAEGLRFGIVASRFNHALVDRLVEGAIDAIVRHGGREEDITLVRVPGSWEIPVAAGELARKEDIDAVIAIGVLIRGATPHFDYIASEVSKGLADLSLELRKPITFGVITADTLEQAIERAGTKHGNKGWEAALSAIEMANLFKSLR

SEQ ID NO: 8063 - protein, 1307 aa, Artificial Sequence
  SARS-CoV-2/Hong Kong/case85_VM20002868/2020__EPI_ISL_414519 spike protein (1-1147)(I714C_Y1110C) LumSynth construct
MFVFLVLVPLVSSQCVNLTTRTQLPPAYTNSFTRGVYYPDKVFRSSVLHSTQDLFLPFFSNVTWFHAIHVSGTNGTKRFDNPVLPFNDGVYFASTEKSNIIRGWIFGTTLDSKTQSLLIVNNATNVVIKVCEFQFCNDPFLGVYYHKNNKSWMESEFRVYSSANNCTFEYVSQPFLMDLEGKQGNFKNLREFVFKNIDGYFKIYSKHTPINLVRDLPQGFSALEPLVDLPIGINITRFQTLLALHRSYLTPGDSSSGWTAGAAAYYVGYLQPRTFLLKYNENGTITDAVDCALDPLSETKCTLKSFTVEKGIYQTSNFRVQPTESIVRFPNITNLCPFGEVFNATRFASVYAWNRKRISNCVADYSVLYNSASFSTFKCYGVSPTKLNDLCFTNVYADSFVIRGDEVRQIAPGQTGKIADYNYKLPDDFTGCVIAWNSNNLDSKVGGNYNYLYRLFRKSNLKPFERDISTEIYQAGSTPCNGVEGFNCYFPLQSYGFQPTNGVGYQPYRVVVLSFELLHAPATVCGPKKSTNLVKNKCVNFNFNGLTGTGVLTESNKKFLPFQQFGRDIADTTDAVRDPQTLEILDITPCSFGGVSVITPGTNTSNQVAVLYQDVNCTEVPVAIHADQLTPTWRVYSTGSNVFQTRAGCLIGAEHVNNSYECDIPIGAGICASYQTQTNSPRRARSVASQSIIAYTMSLGAENSVAYSNNSIACPTNFTISVTTEILPVSMTKTSVDCTMYICGDSTECSNLLLQYGSFCTQLNRALTGIAVEQDKNTQEVFAQVKQIYKTPPIKDFGGFNFSQILPDPSKPSKRSFIEDLLFNKVTLADAGFIKQYGDCLGDIAARDLICAQKFNGLTVLPPLLTDEMIAQYTSALLAGTITSGWTFGAGAALQIPFAMQMAYRFNGIGVTQNVLYENQKLIANQFNSAIGKIQDSLSSTASALGKLQDVVNQNAQALNTLVKQLSSNFGAISSVLNDILSRLDKVEAEVQIDRLITGRLQSLQTYVTQQLIRAAEIRASANLAATKMSECVLGQSKRVDFCGKGYHLMSFPQSAPHGVVFLHVTYVPAQEKNFTTAPAICHDGKAHFPREGVFVSNGTHWFVTQRNFCEPQIITTDNTFVSGNCDVVIGIVNNTVYDPLQPELDSGGGSGGGQIYEGKLTAEGLRFGIVASRFNHALVDRLVEGAIDAIVRHGGREEDITLVRVPGSWEIPVAAGELARKEDIDAVIAIGVLIRGATPHFDYIASEVSKGLADLSLELRKPITFGVITADTLEQAIERAGTKHGNKGWEAALSAIEMANLFKSLR

SEQ ID NO: 8064 - protein, 1307 aa, Artificial Sequence; identical to SEQ ID NO: 8054
  SARS-CoV-2/England/200990660/2020__EPI_ISL_414523 spike protein (1-1147)(I714C_Y1110C) LumSynth construct

SEQ ID NO: 8065 - protein, 1307 aa, Artificial Sequence
  SARS-CoV-2/Australia/NSW09/2020__EPI_ISL_413595 spike protein (1-1147)(I714C_Y1110C) LumSynth construct
MFVFLVLLPLVSSQCVNLTTRTQLPPAYTNSFTRGVYYPDKVFRSSVLHSTQDLFLPFFSNVTWFHAIHVSGTNGTKRFDNPVLPFNDGVYFASTEKSNIIRGWIFGTTLDSKTQSLLIVNNATNVVIKVCEFQFCNDPFLGVYYHKNNKSWMESEFRVYSSANNCTFEYVSQPFLMDLEGKQGNFKNLREFVFKNIDGYFKIYSKHTPINLVRDLPQGFSALEPLVDLPIGINITRFQTLLALHRSYLTPGDSSSGWTAGAAAYYVGYLQPRTFLLKYNENGTITDAVDCALDPLSETKCTLKSFTVEKGIYQTSNFRVQPTESIVRFPNITNLCPFGEVFNATRFASVYAWNRKRISNCVADYSVLYNSASFSTFKCYGVSPTKLNDLCFTNVYADSFVIRGDEVRQIAPGQTGKIADYNYKLPDDFTGCVIAWNSNNLDSKVGGNYNYLYRLFRKSNLKPFERDISTEIYQAGSTPCNGVEGFNCYFPLQSYGFQPTNGVGYQPYRVVVLSFELLHAPATVCGPKKSTNLVKNKCVNFNFNGLTGTGVLTESNKKFLPFQQFGRDIADTTDAVRDPQTLEILDITPCSFGGVSVITPGTNTSNQVAVLYQDVNCTEVPVAIHADQLTPTWRVYSTGSNVFQTRAGCLIGAEHVNNSYECDIPIGAGICASYQTQTNSPRRARSVASQSIIAYTMSLGAENSVAYSNNSIACPTNFTISVTTEILPVSMTKTSVDCTMYICGDSTECSNLLLQYGSFCTQLNRALTGIAVEQDKNTQEVFAQVKQIYKTPPIKDFGGFNFSQILPDPSKPSKRSFIEDLLFNKVTLADAGFIKQYGDCLGDIAARDLICAQKFNGLTVLPPLLTDEMIAQYTSALLAGTITSGWTFGAGAALQIPFAMQMAYRFNGIGVTQNVLYENQKLIANQFNSAIGKIQDSLSFTASALGKLQDVVNQNAQALNTLVKQLSSNFGAISSVLNDILSRLDKVEAEVQIDRLITGRLQSLQTYVTQQLIRAAEIRASANLAATKMSECVLGQSKRVDFCGKGYHLMSFPQSAPHGVVFLHVTYVPAQEKNFTTAPAICHDGKAHFPREGVFVSNGTHWFVTQRNFCEPQIITTDNTFVSGNCDVVIGIVNNTVYDPLQPELDSGGGSGGGQIYEGKLTAEGLRFGIVASRFNHALVDRLVEGAIDAIVRHGGREEDITLVRVPGSWEIPVAAGELARKEDIDAVIAIGVLIRGATPHFDYIASEVSKGLADLSLELRKPITFGVITADTLEQAIERAGTKHGNKGWEAALSAIEMANLFKSLR

SEQ ID NO: 8066 - protein, 1307 aa, Artificial Sequence; identical to SEQ ID NO: 8046
  SARS-CoV-2/Australia/NSW10/2020__EPI_ISL_413596 spike protein (1-1147)(I714C_Y1110C) LumSynth construct

SEQ ID NO: 8067 - protein, 1307 aa, Artificial Sequence
  SARS-CoV-2/Switzerland/1000477797/2020__EPI_ISL_413023 spike protein (1-1147)(I714C_Y1110C) LumSynth construct
MFVFLVLLPLVSSQCVNLTTRTQLPPAYTNSFTRGVYYPDKVFRSSVLHSTQDLFLPFFSNVTWFHAIHVSGTNGTKRFDNPVLPFNDGVYFASTEKSNIIRGWIFGTTLDSKTQSLLIVNNATNVVIKVCEFQFCNDPFLGVYYHKNNKSWMESEFRVYSSANNCTFEYVSQPFLMDLEGKQGNFKNLREFVFKNIDGYFNIYSKHTPINLVRDLPQGFSALEPLVDLPIGINITRFQTLLALHRSYLTPGDSSSGWTAGAAAYYVGYLQPRTFLLKYNENGTITDAVDCALDPLSETKCTLKSFTVEKGIYQTSNFRVQPTESIVRFPNITNLCPFGEVFNATRFASVYAWNRKRISNCVADYSVLYNSASFSTFKCYGVSPTKLNDLCFTNVYADSFVIRGDEVRQIAPGQTGKIADYNYKLPDDFTGCVIAWNSNNLDSKVGGNYNYLYRLFRKSNLKPFERDISTEIYQAGSTPCNGVEGFNCYFPLQSYGFQPTNGVGYQPYRVVVLSFELLHAPATVCGPKKSTNLVKNKCVNFNFNGLTGTGVLTESNKKFLPFQQFGRDIADTTDAVRDPQTLEILDITPCSFGGVSVITPGTNTSNQVAVLYQGVNCTEVPVAIHADQLTPTWRVYSTGSNVFQTRAGCLIGAEHVNNSYECDIPIGAGICASYQTQTNSPRRARSVASQSIIAYTMSLGAENSVAYSNNSIACPTNFTISVTTEILPVSMTKTSVDCTMYICGDSTECSNLLLQYGSFCTQLNRALTGIAVEQDKNTQEVFAQVKQIYKTPPIKDFGGFNFSQILPDPSKPSKRSFIEDLLFNKVTLADAGFIKQYGDCLGDIAARDLICAQKFNGLTVLPPLLTDEMIAQYTSALLAGTITSGWTFGAGAALQIPFAMQMAYRFNGIGVTQNVLYENQKLIANQFNSAIGKIQDSLSSTASALGKLQDVVNQNAQALNTLVKQLSSNFGAISSVLNDILSRLDKVEAEVQIDRLITGRLQSLQTYVTQQLIRAAEIRASANLAATKMSECVLGQSKRVDFCGKGYHLMSFPQSAPHGVVFLHVTYVPAQEKNFTTAPAICHDGKAHFPREGVFVSNGTHWFVTQRNFCEPQIITTDNTFVSGNCDVVIGIVNNTVYDPLQPELDSGGGSGGGQIYEGKLTAEGLRFGIVASRFNHALVDRLVEGAIDAIVRHGGREEDITLVRVPGSWEIPVAAGELARKEDIDAVIAIGVLIRGATPHFDYIASEVSKGLADLSLELRKPITFGVITADTLEQAIERAGTKHGNKGWEAALSAIEMANLFKSLR

SEQ ID NO: 8068 - protein, 1307 aa, Artificial Sequence
  SARS-CoV-2/Belgium/BA-02291/2020__EPI_ISL_415159 spike protein (1-1147)(I714C_Y1110C) LumSynth construct
MFVFLVLLPLVSSQCVNLTTRTQLPPAYTNSFTRGVYYPDKVFRSSVLHSTQDLFLPFFSNVTWFHAIHVSGTNGTKRFDNPVLPFNDGVYFASTEKSNIIRGWIFGTTLDSKTQSLLIVNNATNVVIKVCEFQFCNDPFLGVYYHKNNKSWMESEFRVYSSANNCTFEYVSQPFLMDLEGKQGNFKNLREFVFKNIDGYFKIYSKHTPINLVRDLPQGFSALEPLVDLPIGINITRFQTLLALHRSYLTPGDSSSGWTAGAAAYYVGYLQPRTFLLKYNENGTITDAVDCALDPLSETKCTLKSFTVEKGIYQTSNFRVQPTESIVRFPNITNLCPFGEVFNATRFASVYAWNRKRISNCVADYSVLYNSASFSTFKCYGVSPTKLNDLCFTNVYADSFVIRGDEVRQIAPGQTGKIADYNYKLPDDFTGCVIAWNSNNLDSKVGGNYNYLYRLFRRSNLKPFERDISTEIYQAGSTPCNGVEGFNCYFPLQSYGFQPTNGVGYQPYRVVVLSFELLPAPATVCGPKKSTNLVKNKCVNFNFNGLTGTGVLTESNKKFLPFQQFGRDIADTTDAVRDPQTLEILDITPCSFGGVSVITPGTNTSNQVAVLYQGVNCTEVPVAIHADQLTPTWRVYSTGSNVFQTRAGCLIGAEHVNNSYECDIPIGAGICASYQTQTNSPRRARSVASQSIIAYTMSLGAENSVAYSNNSIACPTNFTISVTTEILPVSMTKTSVDCTMYICGDSTECSNLLLQYGSFCTQLNRALTGIAVEQDKNTQEVFAQVKQIYKTPPIKDFGGFNFSQILPDPSKPSKRSFIEDLLFNKVTLADAGFIKQYGDCLGDIAARDLICAQKFNGLTVLPPLLTDEMIAQYTSALLAGTITSGWTFGAGAALQIPFAMQMAYRFNGIGVTQNVLYENQKLIANQFNSAIGKIQDSLSSAAPALGKLQDVVNQNAQALNTLVKQLSSNFGAISSVLNDILSRLDKVEAEVQIDRLITGRLQSLQTYVTQQLIRAAEIRASANLAATKMSECVLGQSKRVDFCGKGYHLMSFPQSAPHGVVFLHVTYVPAQEKNFTTAPAICHDGKAHFPREGVFVSNGTHWFVTQRNFCEPQIITTDNTFVSGNCDVVIGIVNNTVYDPLQPELDSGGGSGGGQIYEGKLTAEGLRFGIVASRFNHALVDRLVEGAIDAIVRHGGREEDITLVRVPGSWEIPVAAGELARKEDIDAVIAIGVLIRGATPHFDYIASEVSKGLADLSLELRKPITFGVITADTLEQAIERAGTKHGNKGWEAALSAIEMANLFKSLR

SEQ ID NO: 8069 - protein, 1307 aa, Artificial Sequence
  SARS-CoV-2/USA/WA8-UW5/2020__EPI_ISL_413486 spike protein (1-1147)(I714C_Y1110C) LumSynth construct
MFVFLVLLPLVSSQCVNLTTRTQLPPAYTNSFTRGVYYPDKVFRSSVLHSTQDLFLPFFSNVTWFHAIHVSGTNGTKRFDNPVLPFNDGVYFASTEKSNIIRGWIFGTTLDSKTQSLLIVNNATNVVIKVCEFQFCNDPFLGVYYHKNNKSWMESEFRVYSSANNCTFEYVSQPFLMDLEGKQGNFKNLREFVFKNIDGYFKIYSKHTPINLVRDLPQGFSALEPLVDLPIGINITRFQTLLALHRSYLTPGDSSSGWTAGAAAYYVGYLQPRTFLLKYNENGTITDAVDCALDPLSETKCTLKSFTVEKGIYQTSNFRVQPTESIVRFPNITNLCPFGEVFNATRFASVYAWNRKRISNCVADYSVLYNSASFSTFKCYGVSPTKLNDLCFTNVYADSFVIRGDEVRQIAPGQTGKIADYNYKLPDDFTGCVIAWNSNNLDSKVGGNYNYLYRLFRKSNLKPFERDISTEIYQAGSTPCNGVEGFNCYFPLQSYGFQPTNGVGYQPYRVVVLSFELLHAPATVCGPKKSTNLVKNKCVNFNFNGLTGTGVLTESNKKFLPFQQFGRDIADTTDAVRDPQTLEILDITPCSFGGVSVITPGTNTSNQVAVLYQDVNCTEVPVAIHADQLTPTWRVYSTGSNVFQTRAGCLIGAEYVNNSYECDIPIGAGICASYQTQTNSPRRARSVASQSIIAYTMSLGAENSVAYSNNSIACPTNFTISVTTEILPVSMTKTSVDCTMYICGDSTECSNLLLQYGSFCTQLNRALTGIAVEQDKNTQEVFAQVKQIYKTPPIKDFGGFNFSQILPDPSKPSKRSFIEDLLFNKVTLADAGFIKQYGDCLGDIAARDLICAQKFNGLTVLPPLLTDEMIAQYTSALLAGTITSGWTFGAGAALQIPFAMQMAYRFNGIGVTQNVLYENQKLIANQFNSAIGKIQDSLSSTASALGKLQDVVNQNAQALNTLVKQLSSNFGAISSVLNDILSRLDKVEAEVQIDRLITGRLQSLQTYVTQQLIRAAEIRASANLAATKMSECVLGQSKRVDFCGKGYHLMSFPQSAPHGVVFLHVTYVPAQEKNFTTAPAICHDGKAHFPREGVFVSNGTHWFVTQRNFCEPQIITTDNTFVSGNCDVVIGIVNNTVYDPLQPELDSGGGSGGGQIYEGKLTAEGLRFGIVASRFNHALVDRLVEGAIDAIVRHGGREEDITLVRVPGSWEIPVAAGELARKEDIDAVIAIGVLIRGATPHFDYIASEVSKGLADLSLELRKPITFGVITADTLEQAIERAGTKHGNKGWEAALSAIEMANLFKSLR

SEQ ID NO: 8070 - protein, 1307 aa, Artificial Sequence
  SARS-CoV-2/England/20102000506/2020__EPI_ISL_415147 spike protein (1-1147)(I714C_Y1110C) LumSynth construct
MFVFLVLLPLVSSQCVNLTTRTQLPPAYTNSFTRGVYYPDKVFRSSVLHSTQDLFLPFFSNVTWFHAIHVSGTNGTKRFDNPVLPFNDGVYFASTEKSNIIRGWIFGTTLDSKTQSLLIVNNATNVVIKVCEFQFCNDPFLGVYYHKNNKSWMESEFRVYSSANNCTFEYVSQPFLMDLEGKQGNFKNLREFVFKNIDGYFKIYSKHTPINLVRDLPQGFSALEPLVDLPIGINITRFQTLLALHRSYLTPGDSSSGWTAGAAAYYVGYLQPRTFLLKYNENGTITDAVDCALDPLSETKCTLKSFTVEKGIYQTSNFRVQPTESIVRFPNITNLCPFGEVFNATRFASVYAWNRKRISNCVADYSVLYNSASFSTFKCYGVSPTKLNDLCFTNVYADSFVIRGDEVRQIAPGQTGKIADYNYKLPDDFTGCVIAWNSNNLDSKVGGNYNYLYRLFRKSNLKPFERDISTEIYQAGSTPCNGVEGFNCYFPLQSYGFQPTNGVGYQPYRVVVLSFELLHAPATVCGPKKSTNLVKNKCVNFNFNGLTGTGVLTESNKKFLPFQQFGRDIADTTDAVRDPQTLEILDITPCSFGGVSVITPGTNTSNQVAVLYQGVNCTEVPVAIHADQLTPTWRVYSTGSNVFQTRAGCLIGAEHVNNSYECDIPIGAGICASYQTQTNSPRRARSVASQSIIAYTMSLGAENSVAYSNNSIACPTNFTISVTTEILPVSMTKTSVDCTMYICGDSTECSNLLLQYGSFCTQLNRALTGIAVEQDKNTQEVFAQVKQIYKTPPIKDFGGFNFSQILPDPSKPSKRSFIEDLLFNKVTLADAGFIKQYGYCLGDIAARDLICAQKFNGLTVLPPLLTDEMIAQYTSALLAGTITSGWTFGAGAALQIPFAMQMAYRFNGIGVTQNVLYENQKLIANQFNSAIGKIQDSLSSTASALGKLQDVVNQNAQALNTLVKQLSSNFGAISSVLNDILSRLDKVEAEVQIDRLITGRLQSLQTYVTQQLIRAAEIRASANLAATKMSECVLGQSKRVDFCGKGYHLMSFPQSAPHGVVFLHVTYVPAQEKNFTTAPAICHDGKAHFPREGVFVSNGTHWFVTQRNFCEPQIITTDNTFVSGNCDVVIGIVNNTVYDPLQPELDSGGGSGGGQIYEGKLTAEGLRFGIVASRFNHALVDRLVEGAIDAIVRHGGREEDITLVRVPGSWEIPVAAGELARKEDIDAVIAIGVLIRGATPHFDYIASEVSKGLADLSLELRKPITFGVITADTLEQAIERAGTKHGNKGWEAALSAIEMANLFKSLR

SEQ ID NO: 8071 - protein, 1307 aa, Artificial Sequence
  SARS-CoV-2/Belgium/VAG-03013/2020__EPI_ISL_415155 spike protein (1-1147)(I714C_Y1110C) LumSynth construct
MFVFLVLLPLVSSQCVNLTTRTQLPPAYTNSFTRGVYYPDKVFRSSVLHSTQDLFLPFFSNVTWFHAIHVSGTNGTKRFDNPVLPFNDGVYFASTEKSNIIRGWIFGTTLDSKTQSLLIVNNATNVVIKVCEFQFCNDPFLGVYYHKNNKSWMESEFRVYSSANNCTFEYVSQPFLMDLEGKQGNFKNLREFVFKNIDGYFKIYSKHTPINLVRDLPQGFSALEPLVDLPIGINITRFQTLLALHRSYLTPGDSSSGWTAGAAAYYVGYLQPRTFLLKYNENGTITDAVDCALDPLSETKCTLKSFTVEKGIYQTSNFRVQPTESIVRFPNITNLCPFGEVFNATRFASVYAWNRKRISNCVADYSVLYNSASFSTFKCYGVSPTKLNDLCFTNVYADSFVIRGDEVRQIAPGQTGKIADYNYKLPDDFTGCVIAWNSNNLDSKVGGNYNYLYRLFRKSNLKPFERDISTEIYQAGSTPCNGVEGFNCYFPLQSYGFQPTNGVGYQPYRVVVLSFELLHAPATVCGPKKSTNLVKNKCVNFNFNGLTGTGVLTESNKKFLPFQQFGRDIADTTDAVRDPQTLEILDITPCSFGGVSVITPGTNTSNQVAVLYQGVNCTEVPVAIHADQLTPTWRVYSTGSNVFQTRAGCLIGAEHVNNSYECDIPIGAGICASYQTQTNSPRRARSVASQSIIAYTMSLGAENSVAYSNNSIACPTNFTISVTTEILPVSMTKTSVDCTMYICGDSTECSNLLLQYGSFCTQLNRALTGIAVEQDKNTQEVFAQVKQIYKTPPIKDFGGFNFSQILPDPSKPSKRSFIEDLLFNKVTLADAGFIKQYGDCLGDIAARDLICAQKFNGLTVLPPLLTDEMIAQYTSALLAGTITSGWTFGAGAALQIPFAMQMAYRFNGIGVTQNVLYENQKLIANQFNSAIGKIQDSLSSTATALGKLQDVVNQNAQALNTLVKQLSSNFGAISSVLNDILSRLDKVEAEVQIDRLITGRLQSLQTYVTQQLIRAAEIRASANLAATKMSECVLGQSKRVDFCGKGYHLMSFPQSAPHGVVFLHVTYVPAQEKNFTTAPAICHDGKAHFPREGVFVSNGTHWFVTQRNFCEPQIITTDNTFVSGNCDVVIGIVNNTVYDPLQPELDSGGGSGGGQIYEGKLTAEGLRFGIVASRFNHALVDRLVEGAIDAIVRHGGREEDITLVRVPGSWEIPVAAGELARKEDIDAVIAIGVLIRGATPHFDYIASEVSKGLADLSLELRKPITFGVITADTLEQAIERAGTKHGNKGWEAALSAIEMANLFKSLR

SEQ ID NO: 8072 - protein, 1307 aa, Artificial Sequence
  SARS-CoV-2/Belgium/BC-03016/2020__EPI_ISL_415157 spike protein (1-1147)(I714C_Y1110C) LumSynth construct
MFVFLVLLPLVSSQCVNLTTRTQLPPAYTNSFTRGVYYPDKVFRSSVLHSTQDLFLPFFSNVTWFHAIHVSGTNGTKRFDNPVLPFNDGVYFASTEKSNIIRGWIFGTTLDSKTQSLLIVNNATNVVIKVCEFQFCNDPFLGVYYHKNNKSWMESEFRVYSSANNCTFEYVSQPFLMDLEGKQGNFKNLREFVFKNIDGYFKIYSKHTPINLVRDLPQGFSALEPLVDLPIGINITRFQTLLALHRSYLTPGDSSSGWTAGAAAYYVGYLQPRTFLLKYNENGTITDAVDCALDPLSETKCTLKSFTVEKGIYQTSNFRVQPTESIVRFPNITNLCPFGEVFNATRFASVYAWNRKRISNCVADYSVLYNSASFSTFKCYGVSPTKLNDLCFTNVYADSFVIRGDEVRQIAPGQTGKIADYNYKLPDDFTGCVIAWNSNNLDSKVGGNYNYLYRLFRKSNLKPFERDISTEIYQAGSTPCNGVEGFNCYFPLQSYGFQPTNGVGYQPYRVVVLSFELLHAPATVCGPKKSTNLVKNKCVNFNFNGLTGTGVLTESNKKFLPFQQFGRDIADTTDAVRDPQTLEILDITPCSFGGVSVITPGTNTSNQVAVLYQGVNCTEVPVAIHADQLTPTWRVYSTGSNVFQTRAGCLIGAEHVNNSYECDIPIGAGICASYQTQTNSPRRARSVASQSIIAYTMSLGAENSVAYSNNSIACPTNFTISVTTEILPVSMTKTSVDCTMYICGDSTECSNLLLQYGSFCTQLNRALTGIAVEQDKNTQEVFAQVKQIYKTPPIKDFGGFNFSQILPDPSKPSKRSFIEDLLFNKVTLADAGFIKQYGDCLGDIAARDLICAQKFNGLTVLPPLLTDEMIAQYTSALLAGTITSGWTFGAGAALQIPFAMQMAYRFNGIGVTQNVLYENQKLIANQFNSAIGKIQDSLSSTAPALGKLQDVVNQNAQALNTLVKQLSSNFGAISSVLNDILSRLDKVEAEVQIDRLITGRLQSLQTYVTQQLIRAAEIRASANLAATKMSECVLGQSKRVDFCGKGYHLMSFPQSAPHGVVFLHVTYVPAQEKNFTTAPAICHDGKAHFPREGVFVSNGTHWFVTQRNFCEPQIITTDNTFVSGNCDVVIGIVNNTVYDPLQPELDSGGGSGGGQIYEGKLTAEGLRFGIVASRFNHALVDRLVEGAIDAIVRHGGREEDITLVRVPGSWEIPVAAGELARKEDIDAVIAIGVLIRGATPHFDYIASEVSKGLADLSLELRKPITFGVITADTLEQAIERAGTKHGNKGWEAALSAIEMANLFKSLR

SEQ ID NO: 8073 - protein, 1307 aa, Artificial Sequence
  SARS-CoV-2/Germany/BavPat3/2020__EPI_ISL_414521 spike protein (1-1147)(I714C_Y1110C) LumSynth construct
MFVFLVLLPLVSSQCVNLTTRTQLPPAYTNSFTRGVYYPDKVFRSSVLHSTQDLFLPFFSNVTWFHAIHVSGTNGTKRFDNPVLPFNDGVYFASTEKSNIIRGWIFGTTLDSKTQSLLIVNNATNVVIKVCEFQFCNDPFLGVYYHKNNKSWMESEFRVYSSANNCTFEYVSQPFLMDLEGKQGNFKNLREFVFKNIDGYFKIYSKHTPINLVRDLPQGFSALEPLVDLPIGINITRFQTLLALHRSYLTPGDSSSGWTAGAAAYYVGYLQPRTFLLKYNENGTITDAVDCALDPLSETKCTLKSFTVEKGIYQTSNFRVQPTESIVRFPNITNLCPFGEVFNATRFASVYAWNRKRISNCVADYSVLYNSASFSTFKCYGVSPTKLNDLCFTNVYADSFVIRGDEVRQIAPGQTGKIADYNYKLPDDFTGCVIAWNSNNLDSKVGGNYNYLYRLFRKSNLKPFERDISTEIYQAGSTPCNGVEGFNCYFPLQSYGFQPTNGVGYQPYRVVVLSFELLHAPATVCGPKKSTNLVKNKCVNFNFNGLTGTGVLTESNKKFLPFQQFGRDIADTTDAVRDPQTLEILDITPCSFGGVSVITPGTNTSNQVAVLYQDVNCTEVPVAIHADQLTPTWRVYSTGSNVFQTRAGCLIGAEHVNNSYECDIPIGAGICASYQTQTNSPRRARSVASQSIIAYTMSLGAENSVAYSNNSIACPTNFTISVTTEILPVSMTKTSVDCTMYICGDSTECSNLLLQYGSFCTQLNRALTGIAVEQDKNTQQVFAQVKQIYKTPPIKDFGGFNFSQILPDPSKPSKRSFIEDLLFNKVTLADAGFIKQYGDCLGDIAARDLICAQKFNGLTVLPPLLTDEMIAQYTSALLAGTITSGWTFGAGAALQIPFAMQMAYRFNGIGVTQNVLYENQKLIANQFNSAIGKIQDSLSSTASALGKLQDVVNQNAQALNTLVKQLSSNFGAISSVLNDILSRLDKVEAEVQIDRLITGRLQSLQTYVTQQLIRAAEIRASANLAATKMSECVLGQSKRVDFCGKGYHLMSFPQSAPHGVVFLHVTYVPAQEKNFTTAPAICHDGKAHFPREGVFVSNGTHWFVTQRNFCEPQIITTDNTFVSGNCDVVIGIVNNTVYDPLQPELDSGGGSGGGQIYEGKLTAEGLRFGIVASRFNHALVDRLVEGAIDAIVRHGGREEDITLVRVPGSWEIPVAAGELARKEDIDAVIAIGVLIRGATPHFDYIASEVSKGLADLSLELRKPITFGVITADTLEQAIERAGTKHGNKGWEAALSAIEMANLFKSLR

SEQ ID NO: 8074 - protein, 1307 aa, Artificial Sequence
  SARS-CoV-2/France/HF1805/2020__EPI_ISL_414628 spike protein (1-1147)(I714C_Y1110C) LumSynth construct
MFVFLVLLPLVSSQCVNLTTRTQLPPAYTNSFTRGVYYPDKVFRSSVLHSTQDLFLPFFSNVTWFHAIHVSGTNGTKRFDNPVLPFNDGVYFASTEKSNIIRGWIFGTTLDSKTQSLLIVNNATNVVIKVCEFQFCNDPFLGVYYHKNNKSWMESEFRVYSSANNCTFEYVSQPFLMDLEGKQGNFKNLREFVFKNIDGYFKIYSKHTPINLVRDLPQGFSALEPLVDLPIGINITRFQTLLALHRSYLTPGDSSSGWTAGAAAYYVGYLQPRTFLLKYNENGTITDAVDCALDPLSETKCTLKSFTVEKGIYQTSNFRVQPTESIVRFPNITNLCPFGEVFNATRFASVYAWNRKRISNCVADYSVLYNSASFSTFKCYGVSPTKLNDLCFTNVYADSFVIRGDEVRQIAPGQTGKIADYNYKLPDDFTGCVIAWNSNNLDSKVGGNYNYLYRLFRKSNLKPFERDISTEIYQAGSTPCNGVEGFNCYFPLQSYGFQPTNGVGYQPYRVVVLSFELLHAPATVCGPKKSTNLVKNKCVNFNFNGLTGTGVLTESNKKFLPFQQFGRDIADTTDAVRDPQTLEILDITPCSFGGVSVITPGTNTSNQVAVLYQGVNCTEVPVAIHADQLTPTWRVYSTGSNVFQTRAGCLIGAEHVNNSYECDIPIGAGICASYQTQTNSPRRARSVASQSIIAYTMSLGAENSVAYSNNSIACPTNFTISVTTEILPVSMTKTSVDCTMYICGDSTECSNLLLQYGSFCTQLNRALTGIAVEQDKNTQEVFAQVKQIYKTPPIKDFGGFNFSQILPDPSKPSKRSFIEDLLFNKVTLADAGFIKQYGDCLGDIAARDLICAQKFNGLTVLPPLLTDEMIAQYTSALLAGTITSGWTFGAGAALQIPFAMQMAYRFNGIGVTQNVLYENQKLIANQFNSAIGKIQDSLSSTASALGKLQDVVNQNAQALNTLVKQLSSNFGAISSVLNDILSRLDKVEAEVQIDRLITGRLQSLQTYVTQQLIRAAEIRASANLAATKMSECVLGQSKRVDFCGKGYHLMSFPQSAPHGVVFLHVTYVPAQEKNFTTAPAICHDGKAHFPREGVFVSNGTHWFVTQRNFCEPQIITTDNTFVSGNCDVVIGVVNNTVYDPLQPELDSGGGSGGGQIYEGKLTAEGLRFGIVASRFNHALVDRLVEGAIDAIVRHGGREEDITLVRVPGSWEIPVAAGELARKEDIDAVIAIGVLIRGATPHFDYIASEVSKGLADLSLELRKPITFGVITADTLEQAIERAGTKHGNKGWEAALSAIEMANLFKSLR

SEQ ID NO: 8075 - protein, 1307 aa, Artificial Sequence
  SARS-CoV-2/Netherlands/ZuidHolland_9/2020__EPI_ISL_414445 spike protein (1-1147)(I714C_Y1110C) LumSynth construct
MFVFLVLLPLVSSQCVNLTTRTQLPPAYTNSFTRGVYYPDKVFRSSVLHSTQDLFLPFFSNVTWFHAIHVSGTNGTKRFDNPVLPFNDGVYFASTEKSNIIRGWIFGTTLDSKTQSLLIVNNATNVVIKVCEFQFCNDPFLGVYYHKNNKSWMESEFRVYSSANNCTFEYVSQPFLMDLEGKQGNFKNLREFVFKNIDGYFKIYSKHTPINLVRDLPQGFSALEPLVDLPIGINITRFQTLLALHRSYLTPGDSSSGWTAGAAAYYVGYLQPRTFLLKYNENGTITDAVDCALDPLSETKCTLKSFTVEKGIYQTSNFRVQPTESIVRFPNITNLCPFGEVFNATRFASVYAWNRKRISNCVADYSVLYNSASFSTFKCYGVSPTKLNDLCFTNVYADSFVIRGDEVRQIAPGQTGKIADYNYKLPDDFTGCVIAWNSNNLDSKVGGNYNYLYRLFRKSNLKPFERDISTEIYQAGSTPCNGVEGFNCYFPLQSYGFQPTNGVGYQPYRVVVLSFELLHAPATVCGPKKSTNLVKNKCVNFNFNGLTGTGVLTESNKKFLPFQQFGRDIADTTDAVRDPQTLEILDITPCSFGGVSVITPGTNTSNQVAVLYQGVNCTEVPVAIHADQLTPTWRVYSTGSNVFQTRAGCLIGAEHVNNSYECDIPIGAGICASYQTQTNSPRRARSVASQSIIAYTMSLGAENSVAYSNNSIACPTNFTISVTTEILPVSMTKTSVDCTMYICGDSTECSNLLLQYGSFCTQLNRALTGIAVEQDKNTQEVFAQVKQIYKTPPIKDFGGFNFSQILPDPSKPSKRSFIEDLLFNKVTLADAGFIKQYGDCLGDIAARDLICVQKFNGLTVLPPLLTDEMIAQYTSALLAGTITSGWTFGAGAALQIPFAMQMAYRFNGIGVTQNVLYENQKLIANQFNSAIGKIQDSLSSTASALGKLQDVVNQNAQALNTLVKQLSSNFGAISSVLNDILSRLDKVEAEVQIDRLITGRLQSLQTYVTQQLIRAAEIRASANLAATKMSECVLGQSKRVDFCGKGYHLMSFPQSAPHGVVFLHVTYVPAQEKNFTTAPAICHDGKAHFPREGVFVSNGTHWFVTQRNFCEPQIITTDNTFVSGNCDVVIGIVNNTVYDPLQPELDSGGGSGGGQIYEGKLTAEGLRFGIVASRFNHALVDRLVEGAIDAIVRHGGREEDITLVRVPGSWEIPVAAGELARKEDIDAVIAIGVLIRGATPHFDYIASEVSKGLADLSLELRKPITFGVITADTLEQAIERAGTKHGNKGWEAALSAIEMANLFKSLR

SEQ ID NO: 8076 - protein, 1307 aa, Artificial Sequence
  SARS-CoV-2/Finland/FIN03032020A/2020__EPI_ISL_413602 spike protein (1-1147)(I714C_Y1110C) LumSynth construct
MFVFLVLLPLVSSQCVNLTTRTQLPPAYTNSFTRGVYYPDKVFRSSVLHSTQDLFLPFFSNVTWFHAIHVSGTNGTKRFDNPVLPFNDGVYFASTEKSNIIRGWIFGTTLDSKTQSLLIVNNATNVVIKVCEFQFCNDPFLGVYYHKNNKSWMESEFRVYSSANNCTFEYVSQPFLMDLEGKQGNFKNLREFVFKNIDGYFKIYSKHTPINLVRDLPQGFSALEPLVDLPIGINITRFQTLLALHRSYLTPGDSSSGWTAGAAAYYVGYLQPRTFLLKYNENGTITDAVDCALDPLSETKCTLKSFTVEKGIYQTSNFRVQPTESIVRFPNITNLCPFGEVFNATRFASVYAWNRKRISNCVADYSVLYNSASFSTFKCYGVSPTKLNDLCFTNVYADSFVIRGDEVRQIAPGQTGKIADYNYKLPDDFTGCVISWNSNNLDSKVGGNYNYLYRLFRKSNLKPFERDISTEIYQAGSTPCNGVEGFNCYFPLQSYGFQPTNGVGYQPYRVVVLSFELLHAPATVCGPKKSTNLVKNKCVNFNFNGLTGTGVLTESNKKFLPFQQFGRDIADTTDAVRDPQTLEILDITPCSFGGVSVITPGTNTSNQVAVLYQGVNCTEVPVAIHADQLTPTWRVYSTGSNVFQTRAGCLIGAEHVNNSYECDIPIGAGICASYQTQTNSPRRARSVASQSIIAYTMSLGAENSVAYSNNSIACPTNFTISVTTEILPVSMTKTSVDCTMYICGDSTECSNLLLQYGSFCTQLNRALTGIAVEQDKNTQEVFAQVKQIYKTPPIKDFGGFNFSQILPDPSKPSKRSFIEDLLFNKVTLADAGFIKQYGDCLGDIAARDLICAQKFNGLTVLPPLLTDEMIAQYTSALLAGTITSGWTFGAGAALQIPFAMQMAYRFNGIGVTQNVLYENQKLIANQFNSAIGKIQDSLSSTASALGKLQDVVNQNAQALNTLVKQLSSNFGAISSVLNDILSRLDKVEAEVQIDRLITGRLQSLQTYVTQQLIRAAEIRASANLAATKMSECVLGQSKRVDFCGKGYHLMSFPQSAPHGVVFLHVTYVPAQEKNFTTAPAICHDGKAHFPREGVFVSNGTHWFVTQRNFCEPQIITTDNTFVSGNCDVVIGIVNNTVYDPLQPELDSGGGSGGGQIYEGKLTAEGLRFGIVASRFNHALVDRLVEGAIDAIVRHGGREEDITLVRVPGSWEIPVAAGELARKEDIDAVIAIGVLIRGATPHFDYIASEVSKGLADLSLELRKPITFGVITADTLEQAIERAGTKHGNKGWEAALSAIEMANLFKSLR

SEQ ID NO: 8077 - protein, 1307 aa, Artificial Sequence
  SARS-CoV-2/France/GE1977/2020__EPI_ISL_414632 spike protein (1-1147)(I714C_Y1110C) LumSynth construct
MFVFLVLLPLVSSQCVNLTTRTQLPPAYTNSFTRGVYYPDKVFRSSVLHSTQDLFLPFFSNVTWFHAIHVSGTNGTKRFDNPVLPFNDGVYFASTEKSNIIRGWIFGTTLDSKTQSLLIVNNATNVVIKVCEFQFCNDPFLGVYYHKNNKSWMESEFRVYSSANNCTFEYVSQPFLMDLEGKQGNFKNLREFVFKNIDGYFKIYSKHTPINLVRDLPQGFSALEPLVDLPIGINITRFQTLLALHRSYLTPGDSSSGWTAGAAAYYVGYLQPRTFLLKYNENGTITDAVDCALDPLSETKCTLKSFTVEKGIYQTSNFRVQPTESIVRFPNITNLCPFGEVFNATRFASVYAWNRKRISNCVADYSVLYNSASFSTFKCYGVSPTKLNDLCFTNVYADSFVIRGDEVRQIAPGQTGKIADYNYKLPDDFTGCVIAWNSNNLDSKVGGNYNYLYRLFRKSNLKPFERDISTEIYQAGSTPCNGVEGFNCYFPLQSYGFQPTNGVGYQPYRVVVLSFELLHAPATVCGPKKSTNLVKNKCVNFNFNGLTGTGVLTESNKKFLPFQQFGRDIADTTDAVRDPQTLEILDITPCSFGGVSVITPGTNTSNQVAVLYQGVNCTEVPVAIHADQLTPTWRVYSTGSNVFQTRAGCLIGAEHVNNSYECDIPIGAGICASYQTQTNSPRRARSVASQSIIAYTMSLGAENSVAYSNNSIACPTNFTISVTTEILPVSMTKTSVDCTMYICGDSTECSNLLLQYGSFCTQLNRALTGIAVEQDKNTQEVFAQVKQIYKTPPIKDFGGFNFSQILPDPSKPSKRSFIEDLLFNKVTLADAGFIKQYGDCLGDIAARDLICAQKFNGLTVLPPLLTDEMIAQYTSALLAGTITSGWTFGAGAALQIPFAMQMAYRFNGIGVTQNVLYENQKLIANQFNSAIGKIQDSLFSTASALGKLQDVVNQNAQALNTLVKQLSSNFGAISSVLNDILSRLDKVEAEVQIDRLITGRLQSLQTYVTQQLIRAAEIRASANLAATKMSECVLGQSKRVDFCGKGYHLMSFPQSAPHGVVFLHVTYVPAQEKNFTTAPAICHDGKAHFPREGVFVSNGTHWFVTQRNFCEPQIITTDNTFVSGNCDVVIGIVNNTVYDPLQPELDSGGGSGGGQIYEGKLTAEGLRFGIVASRFNHALVDRLVEGAIDAIVRHGGREEDITLVRVPGSWEIPVAAGELARKEDIDAVIAIGVLIRGATPHFDYIASEVSKGLADLSLELRKPITFGVITADTLEQAIERAGTKHGNKGWEAALSAIEMANLFKSLR

SEQ ID NO: 8078 - protein, 1307 aa, Artificial Sequence
  SARS-CoV-2/Finland/FIN-313/2020__EPI_ISL_414641 spike protein (1-1147)(I714C_Y1110C) LumSynth construct
MFVFLVLLPLVSSQCVNLTTRTQLPPAYTNSFTRGVYYPDKVFRSSVLHSTQDLFLPFFSNVTWFHAIHVSGTNGTKRFDNPVLPFNDGVYFASTEKSNIIRGWIFGTTLDSKTQSLLIVNNATNVVIKVCEFQFCNDPFLGVYYHKNNKSWMESEFRVYSSANNCTFEYVSQPFLMDLEGKQGNFKNLREFVFKNIDGYFKIYSKHTPINLVRDLPQGFSALEPLVDLPIGINITRFKTLLALHRSYLTPGDSSSGWTAGAAAYYVGYLQPRTFLLKYNENGTITDAVDCALDPLSETKCTLKSFTVEKGIYQTSNFRVQPTESIVRFPNITNLCPFGEVFNATRFASVYAWNRKRISNCVADYSVLYNSASFSTFKCYGVSPTKLNDLCFTNVYADSFVIRGDEVRQIAPGQTGKIADYNYKLPDDFTGCVIAWNSNNLDSKVGGNYNYLYRLFRKSNLKPFERDISTEIYQAGSTPCNGVEGFNCYFPLQSYGFQPTNGVGYQPYRVVVLSFELLHAPATVCGPKKSTNLVKNKCVNFNFNGLTGTGVLTESNKKFLPFQQFGRDIADTTDAVRDPQTLEILDITPCSFGGVSVITPGTNTSNQVAVLYQGVNCTEVPVAIHADQLTPTWRVYSTGSNVFQTRAGCLIGAEHVNNSYECDIPIGAGICASYQTQTNSPRRARSVASQSIIAYTMSLGAENSVAYSNNSIACPTNFTISVTTEILPVSMTKTSVDCTMYICGDSTECSNLLLQYGSFCTQLNRALTGIAVEQDKNTQEVFAQVKQIYKTPPIKDFGGFNFSQILPDPSKPSKRSFIEDLLFNKVTLADAGFIKQYGDCLGDIAARDLICAQKFNGLTVLPPLLTDEMIAQYTSALLAGTITSGWTFGAGAALQIPFAMQMAYRFNGIGVTQNVLYENQKLIANQFNSAIGKIQDSLSSTASALGKLQDVVNQNAQALNTLVKQLSSNFGAISSVLNDILSRLDKVEAEVQIDRLITGRLQSLQTYVTQQLIRAAEIRASANLAATKMSECVLGQSKRVDFCGKGYHLMSFPQSAPHGVVFLHVTYVPAQEKNFTTAPAICHDGKAHFPREGVFVSNGTHWFVTQRNFCEPQIITTDNTFVSGNCDVVIGIVNNTVYDPLQPELDSGGGSGGGQIYEGKLTAEGLRFGIVASRFNHALVDRLVEGAIDAIVRHGGREEDITLVRVPGSWEIPVAAGELARKEDIDAVIAIGVLIRGATPHFDYIASEVSKGLADLSLELRKPITFGVITADTLEQAIERAGTKHGNKGWEAALSAIEMANLFKSLR

SEQ ID NO: 8079 - protein, 1307 aa, Artificial Sequence
  SARS-CoV-2/Netherlands/ZuidHolland_2/2020__EPI_ISL_414556 spike protein (1-1147)(I714C_Y1110C) LumSynth construct
MFVFLVLLPLVSSQCVNLTTRTQLPPAYTNSFTRGVYYPDKVFRSSVLHSTQDLFLPFFSNVTWFHAIHVSGTNGTKRFDNPVLPFNDGVYFASTEKSNIIRGWIFGTTLDSKTQSLLIVNNATNVVIKVCEFQFCNDPFLGVYYHKNNKSWMESEFRVYSSANNCTFEYVSQPFLMDLEGKQGNFKNLREFVFKNIDGYFKIYSKHTPINLVRDLPQGFSALEPLVDLPIGINITRFQTLLALHRSYLTPGDSSSGWTAGAAAYYVGYLQPRTFLLKYNENGTITDAVDCALDPLSETKCTLKSFTVEKGIYQTSNFRVQPTESIVRFPNITNLCPFGEVFNATRFASVYAWNRKRISNCVADYSVLYNSASFSTFKCYGVSPTKLNDLCFTNVYADSFVIRGDEVRQIAPGQTGKIADYNYKLPDDFTGCVIAWNSNNLDSKVGGNYNYLYRLFRKSNLKPFERDISTEIYQAGSTPCNGVEGFNCYFPLQSYGFQPTNGVGYQPYRVVVLSFELLHAPATVCGPKKSTNLVKNKCVNFNFNGLTGTGVLTESNKKFLPFQQFGRDIADTTDAVRDPQTLEILDITPCSFGGVSVITPGTNTSNQVAVLYQGVNCTEVPVAIHADQLTPTWRVYSTGSNVFQTRAGCLIGAEHVNNSYECDIPIGAGICASYQTQTNSPRRARSVASQSIIAYTMSLGAENSVAYSNNSIACPTNFTISVTTEILPVSMTKTSVDCTMYICGDSTECSNLLLQYGSFCTQLNRALTGIALEQDKNTQEVFAQVKQIYKTPPIKDFGGFNFSQILPDPSKPSKRSFIEDLLFNKVTLADAGFIKQYGDCLGDIAARDLICAQKFNGLTVLPPLLTDEMIAQYTSALLAGTITSGWTFGAGAALQIPFAMQMAYRFNGIGVTQNVLYENQKLIANQFNSAIGKIQDSLSSTASALGKLQDVVNQNAQALNTLVKQLSSNFGAISSVLNDILSRLDKVEAEVQIDRLITGRLQSLQTYVTQQLIRAAEIRASANLAATKMSECVLGQSKRVDFCGKGYHLMSFPQSAPHGVVFLHVTYVPAQEKNFTTAPAICHDGKAHFPREGVFVSNGTHWFVTQRNFCEPQIITTDNTFVSGNCDVVIGIVNNTVYDPLQPELDSGGGSGGGQIYEGKLTAEGLRFGIVASRFNHALVDRLVEGAIDAIVRHGGREEDITLVRVPGSWEIPVAAGELARKEDIDAVIAIGVLIRGATPHFDYIASEVSKGLADLSLELRKPITFGVITADTLEQAIERAGTKHGNKGWEAALSAIEMANLFKSLR

SEQ ID NO: 8080 - protein, 1307 aa, Artificial Sequence
  SARS-CoV-2/USA/WA-UW31/2020__EPI_ISL_414618 spike protein (1-1147)(I714C_Y1110C) LumSynth construct
MFVFLVLLPLVSSQCVNLTTRTQLPPAYTNSFTRGVYYPDKVFRSSVLHSTQDLFLPFFSNVTWFHAIHVSGTNGTKRFDNPVLPFNDGVYFASTEKSNIIRGWIFGTTLDSKTQSLLIVNNATNVVIKVCEFQFCNDPFLGVYYHKNNKSWMESEFRVYSSANNCTFEYVSQPFLMDLEGKQGNFKNLREFVFKNIDGYFKIYSKHTPINLVRDLPQGFSALEPLVDLPIGINITRFQTLLALHRSYLTPGDSSSGWTAGAAAYYVGYLQPRTFLLKYNENGTITDAVDCALDPLSETKCTLKSFTVEKGIYQTSNFRVQPTESIVRFPNITNLCPFGEVFNATRFASVYAWNRKRISNCVADYSVLYNSASFSTFKCYGVSPTKLNDLCFTNVYADSFVIRGDEVRQIAPGQTGKIADYNYKLPDDFTGCVIAWNSNNLDSKVGGNYNYLYRLFRKSNLKPFERDISTEIYQAGSTPCNGAEGFNCYFPLQSYGFQPTNGVGYQPYRVVVLSFELLHAPATVCGPKKSTNLVKNKCVNFNFNGLTGTGVLTESNKKFLPFQQFGRDIADTTDAVRDPQTLEILDITPCSFGGVSVITPGTNTSNQVAVLYQDVNCTEVPVAIHADQLTPTWRVYSTGSNVFQTRAGCLIGAEHVNNSYECDIPIGAGICASYQTQTNSPRRARSVASQSIIAYTMSLGAENSVAYSNNSIACPTNFTISVTTEILPVSMTKTSVDCTMYICGDSTECSNLLLQYGSFCTQLNRALTGIAVEQDKNTQEVFAQVKQIYKTPPIKDFGGFNFSQILPDPSKPSKRSFIEDLLFNKVTLADAGFIKQYGDCLGDIAARDLICAQKFNGLTVLPPLLTDEMIAQYTSALLAGTITSGWTFGAGAALQIPFAMQMAYRFNGIGVTQNVLYENQKLIANQFNSAIGKIQDSLSSTASALGKLQDVVNQNAQALNTLVKQLSSNFGAISSVLNDILSRLDKVEAEVQIDRLITGRLQSLQTYVTQQLIRAAEIRASANLAATKMSECVLGQSKRVDFCGKGYHLMSFPQSAPHGVVFLHVTYVPAQEKNFTTAPAICHDGKAHFPREGVFVSNGTHWFVTQRNFCEPQIITTDNTFVSGNCDVVIGIVNNTVYDPLQPELDSGGGSGGGQIYEGKLTAEGLRFGIVASRFNHALVDRLVEGAIDAIVRHGGREEDITLVRVPGSWEIPVAAGELARKEDIDAVIAIGVLIRGATPHFDYIASEVSKGLADLSLELRKPITFGVITADTLEQAIERAGTKHGNKGWEAALSAIEMANLFKSLR

SEQ ID NO: 8081 - protein, 1307 aa, Artificial Sequence
  SARS-CoV-2/South Korea/SNU01/2020__EPI_ISL_411929 spike protein (1-1147)(I714C_Y1110C) LumSynth construct
MFVFLVLLPLVSSQCVNLTTRTQLPPAYTNSFTRGVYYPDKVFRSSVLHSTQDLFLPFFSNVTWFHAIHVSGTNGTKRFDNPVLPFNDGVYFASTEKSNIIRGWIFGTTLDSKTQSLLIVNNATNVVIKVCEFQFCNDPFLGVYYHKNNKSWMESEFRVYSSANNCTFEYVSQPFLMDLEGKQGNFKNLREFVFKNIDGYFKIYSKHTPINLVRDLPQGFWALEPLVDLPIGINITRFQTLLALHRSYLTPGDSSSGWTAGAAAYYVGYLQPRTFLLKYNENGTITDAVDCALDPLSETKCTLKSFTVEKGIYQTSNFRVQPTESIVRFPNITNLCPFGEVFNATRFASVYAWNRKRISNCVADYSVLYNSASFSTFKCYGVSPTKLNDLCFTNVYADSFVIRGDEVRQIAPGQTGKIADYNYKLPDDFTGCVIAWNSNNLDSKVGGNYNYLYRLFRKSNLKPFERDISTEIYQAGSTPCNGVEGFNCYFPLQSYGFQPTNGVGYQPYRVVVLSFELLHAPATVCGPKKSTNLVKNKCVNFNFNGLTGTGVLTESNKKFLPFQQFGRDIADTTDAVRDPQTLEILDITPCSFGGVSVITPGTNTSNQVAVLYQDVNCTEVPVAIHADQLTPTWRVYSTGSNVFQTRAGCLIGAEHVNNSYECDIPIGAGICASYQTQTNSPRRARSVASQSIIAYTMSLGAENSVAYSNNSIACPTNFTISVTTEILPVSMTKTSVDCTMYICGDSTECSNLLLQYGSFCTQLNRALTGIAVEQDKNTQEVFAQVKQIYKTPPIKDFGGFNFSQILPDPSKPSKRSFIEDLLFNKVTLADAGFIKQYGDCLGDIAARDLICAQKFNGLTVLPPLLTDEMIAQYTSALLAGTITSGWTFGAGAALQIPFAMQMAYRFNGIGVTQNVLYENQKLIANQFNSAIGKIQDSLSSTASALGKLQDVVNQNAQALNTLVKQLSSNFGAISSVLNDILSRLDKVEAEVQIDRLITGRLQSLQTYVTQQLIRAAEIRASANLAATKMSECVLGQSKRVDFCGKGYHLMSFPQSAPHGVVFLHVTYVPAQEKNFTTAPAICHDGKAHFPREGVFVSNGTHWFVTQRNFCEPQIITTDNTFVSGNCDVVIGIVNNTVYDPLQPELDSGGGSGGGQIYEGKLTAEGLRFGIVASRFNHALVDRLVEGAIDAIVRHGGREEDITLVRVPGSWEIPVAAGELARKEDIDAVIAIGVLIRGATPHFDYIASEVSKGLADLSLELRKPITFGVITADTLEQAIERAGTKHGNKGWEAALSAIEMANLFKSLR

SEQ ID NO: 8082 - protein, 1307 aa, Artificial Sequence
  SARS-CoV-2/China/WF0004/2020__EPI_ISL_413694 spike protein (1-1147)(I714C_Y1110C) LumSynth construct
MFVFLVLLPLVSSQCVNLTTRTQLPPAYTNSFTRGVYYPDKVFRSSVLHSTQDLFLPFFSNVTWFHAIHVSGTNGTKRFDNPVLPFNDGVYFASTEKSNIIRGWIFGTTLDSKTQSLLIVNNATNVVIKVCEFQFCNDPFLGVYYHKNNKSWTESEFRVYSSANNCTFEYVSQPFLMDLEGKQGNFKNLREFVFKNIDGYFKIYSKHTPINLVRDLPQGFSALEPLVDLPIGINITRFQTLLALHRSYLTPGDSSSGWTAGAAAYYVGYLQPRTFLLKYNENGTITDAVDCALDPLSETKCTLKSFTVEKGIYQTSNFRVQPTESIVRFPNITNLCPFGEVFNATRFASVYAWNRKRISNCVADYSVLYNSASFSTFKCYGVSPTKLNDLCFTNVYADSFVIRGDEVRQIAPGQTGKIADYNYKLPDDFTGCVIAWNSNNLDSKVGGNYNYLYRLFRKSNLKPFERDISTEIYQAGSTPCNGVEGFNCYFPLQSYGFQPTNGVGYQPYRVVVLSFELLHAPATVCGPKKSTNLVKNKCVNFNFNGLTGTGVLTESNKKFLPFQQFGRDIADTTDAVRDPQTLEILDITPCSFGGVSVITPGTNTSNQVAVLYQDVNCTEVPVAIHADQLTPTWRVYSTGSNVFQTRAGCLIGAEHVNNSYECDIPIGAGICASYQTQTNSPRRARSVASQSIIAYTMSLGAENSVAYSNNSIACPTNFTISVTTEILPVSMTKTSVDCTMYICGDSTECSNLLLQYGSFCTQLNRALTGIAVEQDKNTQEVFAQVKQIYKTPPIKDFGGFNFSQILPDPSKPSKRSFIEDLLFNKVTLADAGFIKQYGDCLGDIAARDLICAQKFNGLTVLPPLLTDEMIAQYTSALLAGTITSGWTFGAGAALQIPFAMQMAYRFNGIGVTQNVLYENQKLIANQFNSAIGKIQDSLSSTASALGKLQDVVNQNAQALNTLVKQLSSNFGAISSVLNDILSRLDKVEAEVQIDRLITGRLQSLQTYVTQQLIRAAEIRASANLAATKMSECVLGQSKRFDFCGKGYHLMSFPQSAPHGVVFLHVTYVPAQEKNFTTAPAICHDGKAHFPREGVFVSNGTHWFVTQRNFCEPQIITTDNTFVSGNCDVVIGIVNNTVYDPLQPELDSGGGSGGGQIYEGKLTAEGLRFGIVASRFNHALVDRLVEGAIDAIVRHGGREEDITLVRVPGSWEIPVAAGELARKEDIDAVIAIGVLIRGATPHFDYIASEVSKGLADLSLELRKPITFGVITADTLEQAIERAGTKHGNKGWEAALSAIEMANLFKSLR

SEQ ID NO: 8083 - protein, 1307 aa, Artificial Sequence
  SARS-CoV-2/China/WF0028/2020__EPI_ISL_413791 spike protein (1-1147)(I714C_Y1110C) LumSynth construct
MFVFLVLLPLVSSQCVNLTTRTQLPPAYTNSFTRGVYYPDKVFRSSVLHSTQDLFLPFFSNVTWFHAIHVSGTNGTKRFDNPVLPFNDGVYFASTEKSNIIRGWIFGTTLDSKTQSLLIVNNATNVVIKVCEFQFCNDPFLGVYYHKNNKSWMESEFRVYSSANNCTFEYVSQPFLMDLEGKQGNFKNLREFVFKNIDGYFKIYSKHTPINLVRDLPQGFSALEPLVDLPIGINITRFQTLLALHRSYLTPGDSSSGWTAGAAAYYVGYLQPRTFLLKYNENGTITDAVDCALDPLSETKCTLKSFTVEKGIYQTSNFRVQPTESIVRFPNITNLCPFGEVFNATRFASVYAWNRKRISNCVADYSVLYNSASFSTFKCYGVSPTKLNDLCFTNVYADSFVIRGDEVRQIAPGQTGKIADYNYKLPDDFTGCVIAWNSNNLDSKVGGNYNYLYRLFRKSNLKPFERDISTEIYQAGSTPCNGVEGFNCYFPLQSYGFQPTNGVGYQPYRVVVLSFELLHAPATVCGPKKSTNLVKNKCVNFNFNGLTGTGVLTESNKKFLPFQQFGRDIADTTDAVRDPQTLEILDITPCSFGGVSVITPGTNTSNQVAVLYQDVNCTEVPVAIHADQLTPTWRVYSTGSNVFQTRAGCLIGAEHVNNSYECDIPIGAGICASYQTQTNSPRRARSVASQSIIAYTMSLGAENSVAYSNNSIACPTNFTISVTTEILPVSMTKTSVDCTMYICGDSTECSNLLLQYGSFCTQLNRALTGIAVEQDKNTQEVFAQVKQIYKTPPIKDFGGFNFSQILPDPSKPSKRSFIEDLLFNKVTLADAGFIKQYGDCLGDIAARDLICAQKFNGLTVLPPLLTDEMIAQYTSALLAGTITSGWTFGAGAALQIPFAMQMAYRFNGIGVTQNVLYENQKLIANQFNSAIGKIQDSLSSTASALGKLQDVVNQNAQALNTLVKQLSSNFGAISSVLNDILSRLDKVEAEVQIDRLITGRLQSLQTYVTQQLIRAAEIRASANLAATKMSECVLGQSKRVDFCGKGYHLMSFPQSAPHGVVFLHVTYVPAQEKNFTTAPAICHDGKAHFPREGVFVSNGTHWFVTQRNFCEPQIITTDNTFVSGNCDVVIGIVNNTVYDPLQPELESGGGSGGGQIYEGKLTAEGLRFGIVASRFNHALVDRLVEGAIDAIVRHGGREEDITLVRVPGSWEIPVAAGELARKEDIDAVIAIGVLIRGATPHFDYIASEVSKGLADLSLELRKPITFGVITADTLEQAIERAGTKHGNKGWEAALSAIEMANLFKSLR

SEQ ID NO: 8084 - protein, 1307 aa, Artificial Sequence
  SARS-CoV-2/2019-nCoV/USA-CruiseA-18/2020__MT159716.1 spike protein (1-1147)(I714C_Y1110C) LumSynth construct
MFVFLVLLPLVSSQCVNLTTRTQLPPAYTNSFTRGVYYPDKVFRSSVLHSTQDLFLPFFSNVTWFHAIHVSGTNGTKRFDNPVLPFNDGVYFASTEKSNIIRGWIFGTTLDSKTQSLLIVNNATNVVIKVCEFQFCNDPFLGVYYHKNNKSWMESELRVYSSANNCTFEYVSQPFLMDLEGKQGNFKNLREFVFKNIDGYFKIYSKHTPINLVRDLPQGFSALEPLVDLPIGINITRFQTLLALHRSYLTPGDSSSGWTAGAAAYYVGYLQPRTFLLKYNENGTITDAVDCALDPLSETKCTLKSFTVEKGIYQTSNFRVQPTESIVRFPNITNLCPFGEVFNATRFASVYAWNRKRISNCVADYSVLYNSASFSTFKCYGVSPTKLNDLCFTNVYADSFVIRGDEVRQIAPGQTGKIADYNYKLPDDFTGCVIAWNSNNLDSKVGGNYNYLYRLFRKSNLKPFERDISTEIYQAGSTPCNGVEGFNCYFPLQSYGFQPTNGVGYQPYRVVVLSFELLHAPATVCGPKKSTNLVKNKCVNFNFNGLTGTGVLTESNKKFLPFQQFGRDIADTTDAVRDPQTLEILDITPCSFGGVSVITPGTNTSNQVAVLYQDVNCTEVPVAIHADQLTPTWRVYSTGSNVFQTRAGCLIGAEHVNNSYECDIPIGAGICASYQTQTNSPRRARSVASQSIIAYTMSLGAENSVAYSNNSIACPTNFTISVTTEILPVSMTKTSVDCTMYICGDSTECSNLLLQYGSFCTQLNRALTGIAVEQDKNTQEVFAQVKQIYKTPPIKDFGGFNFSQILPDPSKPSKRSFIEDLLFNKVTLADAGFIKQYGDCLGDIAARDLICAQKFNGLTVLPPLLTDEMIAQYTSALLAGTITSGWTFGAGAALQIPFAMQMAYRFNGIGVTQNVLYENQKLIANQFNSAIGKIQDSLSSTASALGKLQDVVNQNAQALNTLVKQLSSNFGAISSVLNDILSRLDKVEAEVQIDRLITGRLQSLQTYVTQQLIRAAEIRASANLAATKMSECVLGQSKRVDFCGKGYHLMSFPQSAPHGVVFLHVTYVPAQEKNFTTAPAICHDGKAHFPREGVFVSNGTHWFVTQRNFCEPQIITTDNTFVSGNCDVVIGIVNNTVYDPLQPELDSGGGSGGGQIYEGKLTAEGLRFGIVASRFNHALVDRLVEGAIDAIVRHGGREEDITLVRVPGSWEIPVAAGELARKEDIDAVIAIGVLIRGATPHFDYIASEVSKGLADLSLELRKPITFGVITADTLEQAIERAGTKHGNKGWEAALSAIEMANLFKSLR

SEQ ID NO: 8085 - protein, 1307 aa, Artificial Sequence
  SARS-CoV-2/SARS-CoV-2/Yunnan-01/human/2020/CHN__MT049951.1 spike protein (1-1147)(I714C_Y1110C) LumSynth construct
MFVFLVLLPLVSSQCVNLTTRTQLPPANTNSFTRGVYYPDKVFRSSVLHSTQDLFLPFFSNVTWFHAIHVSGTNGTKRFDNPVLPFNDGVYFASTEKSNIIRGWIFGTTLDSKTQSLLIVNNATNVVIKVCEFQFCNDPFLGVYYHKNNKSWMESEFRVYSSANNCTFEYVSQPFLMDLEGKQGNFKNLREFVFKNIDGYFKIYSKHTPINLVRDLPQGFSALEPLVDLPIGINITRFQTLLALHRSYLTPGDSSSGWTAGAAAYYVGYLQPRTFLLKYNENGTITDAVDCALDPLSETKCTLKSFTVEKGIYQTSNFRVQPTESIVRFPNITNLCPFGEVFNATRFASVYAWNRKRISNCVADYSVLYNSASFSTFKCYGVSPTKLNDLCFTNVYADSFVIRGDEVRQIAPGQTGKIADYNYKLPDDFTGCVIAWNSNNLDSKVGGNYNYLYRLFRKSNLKPFERDISTEIYQAGSTPCNGVEGFNCYFPLQSYGFQPTNGVGYQPYRVVVLSFELLHAPATVCGPKKSTNLVKNKCVNFNFNGLTGTGVLTESNKKFLPFQQFGRDIADTTDAVRDPQTLEILDITPCSFGGVSVITPGTNTSNQVAVLYQDVNCTEVPVAIHADQLTPTWRVYSTGSNVFQTRAGCLIGAEHVNNSYECDIPIGAGICASYQTQTNSPRRARSVASQSIIAYTMSLGAENSVAYSNNSIACPTNFTISVTTEILPVSMTKTSVDCTMYICGDSTECSNLLLQYGSFCTQLNRALTGIAVEQDKNTQEVFAQVKQIYKTPPIKDFGGFNFSQILPDPSKPSKRSFIEDLLFNKVTLADAGFIKQYGDCLGDIAARDLICAQKFNGLTVLPPLLTDEMIAQYTSALLAGTITSGWTFGAGAALQIPFAMQMAYRFNGIGVTQNVLYENQKLIANQFNSAIGKIQDSLSSTASALGKLQDVVNQNAQALNTLVKQLSSNFGAISSVLNDILSRLDKVEAEVQIDRLITGRLQSLQTYVTQQLIRAAEIRASANLAATKMSECVLGQSKRVDFCGKGYHLMSFPQSAPHGVVFLHVTYVPAQEKNFTTAPAICHDGKAHFPREGVFVSNGTHWFVTQRNFCEPQIITTDNTFVSGNCDVVIGIVNNTVYDPLQPELDSGGGSGGGQIYEGKLTAEGLRFGIVASRFNHALVDRLVEGAIDAIVRHGGREEDITLVRVPGSWEIPVAAGELARKEDIDAVIAIGVLIRGATPHFDYIASEVSKGLADLSLELRKPITFGVITADTLEQAIERAGTKHGNKGWEAALSAIEMANLFKSLR

SEQ ID NO: 8086 - protein, 1307 aa, Artificial Sequence
  SARS-CoV-2/USA/WA-UW292/2020__EPI_ISL_418077 spike protein (1-1147)(I714C_Y1110C) LumSynth construct
MFVFLVLLPLVSSQCVNLTTRTQLPPAYTNSFTRGVYYPDKVFRSSVLHSTQDLFLPFFSNVTWFHAIHVSGTNGTKRFDNPVLPFNDGVYFASTEKSNIIRGWIFGTTLDSKTQSLLIVNNATNVVIKVCEFQFCNDPFLGVYYHKNNKSWMESEFRVYSSANNCTFEYVSQPFLMDLEGKQGNFKNLREFVFKNIDGYFKIYSKHTPINLVRDLPQGFSALEPLVDLPIGINITRFQTLLALHRSYLTPGDSSSGWTAGAAAYYVGYLQPRTFLLKYNENGTITDAVDCALDPLSETKCTLKSFTVEKGIYQTSNFRVQPTESIVRFPNITNLCPFGEVFNATRFASVYAWNRKRISNCVADYSVLYNSASFSTFKCYGVSPTKLNDLCFTNVYADSFVIRGDEVRQIAPGQTGKIADYNYKLPDDFTGCVIAWNSNNLDSKVGGNYNYLYRLFRKSNLKPFERDISTEIYQASSTPCNGVEGFNCYFPLQSYGFQPTNGVGYQPYRVVVLSFELLHAPATVCGPKKSTNLVKNKCVNFNFNGLTGTGVLTESNKKFLPFQQFGRDIADTTDAVRDPQTLEILDITPCSFGGVSVITPGTNTSNQVAVLYQDVNCTEVPVAIHADQLTPTWRVYSTGSNVFQTRAGCLIGAEHVNNSYECDIPIGAGICASYQTQTNSPRRARSVASQSIIAYTMSLGAENSVAYSNNSIACPTNFTISVTTEILPVSMTKTSVDCTMYICGDSTECSNLLLQYGSFCTQLNRALTGIAVEQDKNTQEVFAQVKQIYKTPPIKDFGGFNFSQILPDPSKPSKRSFIEDLLFNKVTLADAGFIKQYGDCLGDIAARDLICAQKFNGLTVLPPLLTDEMIAQYTSALLAGTITSGWTFGAGAALQIPFAMQMAYRFNGIGVTQNVLYENQKLIANQFNSAIGKIQDSLSSTASALGKLQDVVNQNAQALNTLVKQLSSNFGAISSVLNDILSRLDKVEAEVQIDRLITGRLQSLQTYVTQQLIRAAEIRASANLAATKMSECVLGQSKRVDFCGKGYHLMSFPQSAPHGVVFLHVTYVPAQEKNFTTAPAICHDGKAHFPREGVFVSNGTHWFVTQRNFCEPQIITTDNTFVSGNCDVVIGIVNNTVYDPLQPELDSGGGSGGGQIYEGKLTAEGLRFGIVASRFNHALVDRLVEGAIDAIVRHGGREEDITLVRVPGSWEIPVAAGELARKEDIDAVIAIGVLIRGATPHFDYIASEVSKGLADLSLELRKPITFGVITADTLEQAIERAGTKHGNKGWEAALSAIEMANLFKSLR

SEQ ID NO: 8087 - protein, 1307 aa, Artificial Sequence
  SARS-CoV-2/Iceland/192/2020__EPI_ISL_417819 spike protein (1-1147)(I714C_Y1110C) LumSynth construct
MFVFFVLLPLVSSQCVNLTTRTQLPPAYTNSFTRGVYYPDKVFRSSVLHSTQDLFLPFFSNVTWFHAIHVSGTNGTKRFDNPVLPFNDGVYFASTEKSNIIRGWIFGTTLDSKTQSLLIVNNATNVVIKVCEFQFCNDPFLGVYYHKNNKSWMESEFRVYSSANNCTFEYVSQPFLMDLEGKQGNFKNLREFVFKNIDGYFKIYSKHTPINLVRDLPQGFSALEPLVDLPIGINITRFQTLLALHRSYLTPGDSSSGWTAGAAAYYVGYLQPRTFLLKYNENGTITDAVDCALDPLSETKCTLKSFTVEKGIYQTSNFRVQPTESIVRFPNITNLCPFGEVFNATRFASVYAWNRKRISNCVADYSVLYNSASFSTFKCYGVSPTKLNDLCFTNVYADSFVIRGDEVRQIAPGQTGKIADYNYKLPDDFTGCVIAWNSNNLDSKVGGNYNYLYRLFRKSNLKPFERDISTEIYQAGSTPCNGVEGFNCYFPLQSYGFQPTNGVGYQPYRVVVLSFELLHAPATVCGPKKSTNLVKNKCVNFNFNGLTGTGVLTESNKKFLPFQQFGRDIADTTDAVRDPQTLEILDITPCSFGGVSVITPGTNTSNQVAVLYQGVNCTEVPVAIHADQLTPTWRVYSTGSNVFQTRAGCLIGAEHVNNSYECDIPIGAGICASYQTQTNSPRRARSVASQSIIAYTMSLGAENSVAYSNNSIACPTNFTISVTTEILPVSMTKTSVDCTMYICGDSTECSNLLLQYGSFCTQLNRALTGIAVEQDKNTQEVFAQVKQIYKTPPIKDFGGFNFSQILPDPSKPSKRSFIEDLLFNKVTLADAGFIKQYGDCLGDIAARDLICAQKFNGLTVLPPLLTDEMIAQYTSALLAGTITSGWTFGAGAALQIPFAMQMAYRFNGIGVTQNVLYENQKLIANQFNSAIGKIQDSLSSTASALGKLQDVVNQNAQALNTLVKQLSSNFGAISSVLNDILSRLDKVEAEVQIDRLITGRLQSLQTYVTQQLIRAAEIRASANLAATKMSECVLGQSKRVDFCGKGYHLMSFPQSAPHGVVFLHVTYVPAQEKNFTTAPAICHDGKAHFPREGVFVSNGTHWFVTQRNFCEPQIITTDNTFVSGNCDVVIGIVNNTVYDPLQPELDSGGGSGGGQIYEGKLTAEGLRFGIVASRFNHALVDRLVEGAIDAIVRHGGREEDITLVRVPGSWEIPVAAGELARKEDIDAVIAIGVLIRGATPHFDYIASEVSKGLADLSLELRKPITFGVITADTLEQAIERAGTKHGNKGWEAALSAIEMANLFKSLR

SEQ ID NO: 8088 - protein, 1307 aa, Artificial Sequence
  SARS-CoV-2/Belgium/ULG-6939/2020__EPI_ISL_417020 spike protein (1-1147)(I714C_Y1110C) LumSynth construct
MFVFLVLLPLVSSQCVNLTTRTQLPPAYTNSFTRGVYYPDKVFRSSVLHSTQDLFLPFFSNVTWFHAIHVSGTNGTKRFDNPVLPFNDGVYFASTEKSNIIRGWIFGTTLDSKTQSLLIVNNATNVVIKVCEFQFCNDPFLGVYYHKNNKSWMESEFRVYSSANNCTFEYVSQPFLMDLEGKQGNFKNLREFVFKNIDGYFKIYSKHTPINLVRDLPQGFSALEPLVDLPIGINITRFQTLLALHRSYLTPGDSSSGWTAGAAAYYVGYLQPRTFLLKYNENGTITDAVDCALDPLSETKCTLKSFTVEKGIYQTSNFRVQPTESIVRFPNITNLCPFGEVFNATRFASVYAWNRKRISNCVADYSVLYNSASFSTFKCYGVSPTKLNDLCFTNVYADSFVIRGDEVRQIAPGQTGKIADYNYKLPDDFTGCVIAWNSNNLDSKVGGNYNYLYRLFRKSNLKPFERDISTEIYQAGSTPCNGVEGFNCYFPLQSYGFQPTNGVGYQPYRVVVLSFELLHAPATVCGPKKSTNLVKNKCVNFNFNGLTGTGVLTESNKKFLPFQQFGRDIADTTDAVRDPQTLEILDITPCSFGGVSVITPGTNTSNQVAVLYQGVNCTEVPVAIHADQLTPTWRVYSTGSNVFQTRAGCLIGAEHVNNSYECDIPIGAGICASYQTQTNSPRRARSVASQSIIAYTMSLGAENSVVYSNNSIACPTNFTISVTTEILPVSMTKTSVDCTMYICGDSTECSNLLLQYGSFCTQLNRALTGIAVEQDKNTQEVFAQVKQIYKTPPIKDFGGFNFSQILPDPSKPSKRSFIEDLLFNKVTLADAGFIKQYGDCLGDIAARDLICAQKFNGLTVLPPLLTDEMIAQYTSALLAGTITSGWTFGAGAALQIPFAMQMAYRFNGIGVTQNVLYENQKLIANQFNSAIGKIQDSLSSTASALGKLQDVVNQNAQALNTLVKQLSSNFGAISSVLNDILSRLDKVEAEVQIDRLITGRLQSLQTYVTQQLIRAAEIRASANLAATKMSECVLGQSKRVDFCGKGYHLMSFPQSAPHGVVFLHVTYVPAQEKNFTTAPAICHDGKAHFPREGVFVSNGTHWFVTQRNFCEPQIITTDNTFVSGNCDVVIGIVNNTVYDPLQPELDSGGGSGGGQIYEGKLTAEGLRFGIVASRFNHALVDRLVEGAIDAIVRHGGREEDITLVRVPGSWEIPVAAGELARKEDIDAVIAIGVLIRGATPHFDYIASEVSKGLADLSLELRKPITFGVITADTLEQAIERAGTKHGNKGWEAALSAIEMANLFKSLR

SEQ ID NO: 8089 - protein, 1307 aa, Artificial Sequence
  SARS-CoV-2/France/HF2496/2020__EPI_ISL_418231 spike protein (1-1147)(I714C_Y1110C) LumSynth construct
MFVFLVLLPLVSSQCVNLTTRTQLPPAYTNSFTRGVYYPDKVFRSSVLHSTQDLFLPFFSNVTWFHAIHVSGTNGTKRFDNPVLPFNDGVYFASTEKSNIIRGWIFGTTLDSKTQSLLIVNNATNVVIKVCEFQFCNDPFLGVYYHKNNKSWMESEFRVYSSANNCTFEYVSQPFLMDLEGKQGNFKNLREFVFKNIDGYFKIYSKHTPINLVRDLPQGFSALEPLVDLPIGINITRFQTLLALHRSYLTPGDSSSGWTAGAAAYYVGYLQPRTFLLKYNENGTITDAVDCALDPLSETKCTLKSFTVEKGIYQTSNFRVQPTESIVRFPNITNLCPFGEVFNATRFASVYAWNRKRISNCVADYSVLYNSASFSTFKCYGVSPTKLNDLCFTNVYADSFVIRGDEVRQIAPGQTGKIADYNYKLPDDFTGCVIAWNSNNLDSKVGGNYNYLYRLFRKSNLKPFERDISTEIYQAGSTPCNGVEGFNCYFPLQSYGFQPTNGVGYQPYRVVVLSFELLHAPATVCGPKKSTNLVKNKCVNFNFNGLTGTGVLTESNKKFLPFQQFGRDIADTTDAVRDPQTLEILDITPCSFGGVSVITPGTNTSNQVAVLYQGVNCTEVPVAIHADQLTPTWRVYSTGSNVFQTRAGCLIGAEHVNNSYECDIPIGAGICASYQTQTNSPRRARSVASQSIIAYTMSLGAENSVAYSNNSIACPTNFTISVTTEILPVSMTKTSVDCTMYICGDSTECSNLLLQYGSFCTQLNRALTGIAVEQDKNTQEVFAQVKQIYKTPPIKDFGGFNFSQILPDPSKPSKRSFIEDLLFNKVTLADAGFIKQYGDCLGDIVARDLICAQKFNGLTVLPPLLTDEMIAQYTSALLAGTITSGWTFGAGAALQIPFAMQMAYRFNGIGVTQNVLYENQKLIANQFNSAIGKIQDSLSSTASALGKLQDVVNQNAQALNTLVKQLSSNFGAISSVLNDILSRLDKVEAEVQIDRLITGRLQSLQTYVTQQLIRAAEIRASANLAATKMSECVLGQSKRVDFCGKGYHLMSFPQSAPHGVVFLHVTYVPAQEKNFTTAPAICHDGKAHFPREGVFVSNGTHWFVTQRNFCEPQIITTDNTFVSGNCDVVIGIVNNTVYDPLQPELDSGGGSGGGQIYEGKLTAEGLRFGIVASRFNHALVDRLVEGAIDAIVRHGGREEDITLVRVPGSWEIPVAAGELARKEDIDAVIAIGVLIRGATPHFDYIASEVSKGLADLSLELRKPITFGVITADTLEQAIERAGTKHGNKGWEAALSAIEMANLFKSLR

SEQ ID NO: 8090 - protein, 1307 aa, Artificial Sequence
  SARS-CoV-2/USA/WA-UW291/2020__EPI_ISL_418076 spike protein (1-1147)(I714C_Y1110C) LumSynth construct
MFVFLVLLPLVSSQCVNLTTRTQLPPAYTNSFTRGVYYPDKVFRSSVLHSTQDLFLPFFSNVTWFHAIHVSGTNGTKRFDNPVLPFNDGVYFASTEKSNIIRGWIFGTTLDSKTQSLLIVNNATNVVIKVCEFQFCNDPFLGVYYHKNNKSWMESEFRVYSSANNCTFEYVSQPFLMDLEGKQGNFKNLREFVFKNIDGYFKIYSKHTPINLVRDLPQGFSALEPLVDLPIGINITRFQTLLALHRSYLTPGDSSSGWTAGAAAYYVGYLQPRTFLLKYNENGTITDAVDCALDPLSETKCTLKSFTVEKGIYQTSNFRVQPTESIVRFPNITNLCPFGEVFNATRFASVYAWNRKRISNCVADYSVLYNSASFSTFKCYGVSPTKLNDLCFTNVYADSFVIRGDEVRQIAPGQTGKIADYNYKLPDDFTGCVIAWNSNNLDSKVGGNYNYLYRLFRKSNLKPFERDISTEIYQAGSTPCNGVEGFNCYFPLQSYGFQPTNGVGYQPYRVVVLSFELLHAPATVCGPKKSTNLVKNKCVNFNFNGLTGTGVLTESNKKFLPFQQFGRDIADTTDAVRDPQTLEILDITPCSFGGVSVITPGTNTSNQVAVLYQGVNCTEVPVAIHADQLTPTWRVYSTGSNVFQTRAGCLIGAEHVNNSYECDIPIGAGICASYQTQTNSPRRARSVASQSIIAYTMSLGAENSVAYSNNSIACPTNFTISVTTEILPVSMTKTSVDCTMYICGDSTECSNLLLQYGSFCTQLNRALTGIAVEQDKNTQEVFAQVKQIYKTPPIKDFGGFNFSQILPDPSKPSKRSFIEDLLFNKVTLADAGFIKQYGDCLGDIAARDLICAQKFNGLTVLPPLLTDEMIAQYTSALLAGTITSGWTFGAGAALQIPFAMQMAYRFNGIGVTQNVLYENQKLIANQFNSAIGKIQYSLSSTASALGKLQDVVNQNAQALNTLVKQLSSNFGAISSVLNDILSRLDKVEAEVQIDRLITGRLQSLQTYVTQQLIRAAEIRASANLAATKMSECVLGQSKRVDFCGKGYHLMSFPQSAPHGVVFLHVTYVPAQEKNFTTAPAICHDGKAHFPREGVFVSNGTHWFVTQRNFCEPQIITTDNTFVSGNCDVVIGIVNNTVYDPLQPELDSGGGSGGGQIYEGKLTAEGLRFGIVASRFNHALVDRLVEGAIDAIVRHGGREEDITLVRVPGSWEIPVAAGELARKEDIDAVIAIGVLIRGATPHFDYIASEVSKGLADLSLELRKPITFGVITADTLEQAIERAGTKHGNKGWEAALSAIEMANLFKSLR

SEQ ID NO: 8091 - protein, 1307 aa, Artificial Sequence; identical to SEQ ID NO: 8054
  SARS-CoV-2/Portugal/PT0034/2020__EPI_ISL_418019 spike protein (1-1147)(I714C_Y1110C) LumSynth construct

SEQ ID NO: 8092 - protein, 1307 aa, Artificial Sequence; identical to SEQ ID NO: 8046
  SARS-CoV-2/Iceland/202/2020__EPI_ISL_417750 spike protein (1-1147)(I714C_Y1110C) LumSynth construct

SEQ ID NO: 8093 - protein, 1307 aa, Artificial Sequence
  SARS-CoV-2/USA/WA-UW261/2020__EPI_ISL_418046 spike protein (1-1147)(I714C_Y1110C) LumSynth construct
MFVFLVLLPLVSSQCVNLTTRTQLPPAYTNSFTRGVYYPDKVFRSSVLHSTQDLFLPFFSNVTWFHAIHVSGTNGTKRFDNPVLPFNDGVYFASTEKSNIIRGWIFGTTLDSKTQSLLIVNNATNVVIKVCEFQFCNDPFLGVYYHKNNKSWMESEFRVYSSANNCTFEYVSQPFLMDLEGKQGNFKNLREFVFKNIDGYFKIYSKHTPINLVRDLPQGFSALEPLVDLPIGINITRFQTLLALHRSYLTPGDSSSGWTAGAAAYYVGYLQPRTFLLKYNENGTITDAVDCALDPLSETKCTLKSFTVEKGIYQTSNFRVQPTESIVRFPNITNLCPFGEVFNATRFTSVYAWNRKRISNCVADYSVLYNSASFSTFKCYGVSPTKLNDLCFTNVYADSFVIRGDEVRQIAPGQTGKIADYNYKLPDDFTGCVIAWNSNNLDSKVGGNYNYLYRLFRKSNLKPFERDISTEIYQAGSTPCNGVEGFNCYFPLQSYGFQPTNGVGYQPYRVVVLSFELLHAPATVCGPKKSTNLVKNKCVNFNFNGLTGTGVLTESNKKFLPFQQFGRDIADTTDAVRDPQTLEILDITPCSFGGVSVITPGTNTSNQVAVLYQDVNCTEVPVAIHADQLTPTWRVYSTGSNVFQTRAGCLIGAEHVNNSYECDIPIGAGICASYQTQTNSPRRARSVASQSIIAYTMSLGAENSVAYSNNSIACPTNFTISVTTEILPVSMTKTSVDCTMYICGDSTECSNLLLQYGSFCTQLNRALTGIAVEQDKNTQEVFAQVKQIYKTPPIKDFGGFNFSQILPDPSKPSKRSFIEDLLFNKVTLADAGFIKQYGDCLGDIAARDLICAQKFNGLTVLPPLLTDEMIAQYTSALLAGTITSGWTFGAGAALQIPFAMQMAYRFNGIGVTQNVLYENQKLIANQFNSAIGKIQDSLSSTASALGKLQDVVNQNAQALNTLVKQLSSNFGAISSVLNDILSRLDKVEAEVQIDRLITGRLQSLQTYVTQQLIRAAEIRASANLAATKMSECVLGQSKRVDFCGKGYHLMSFPQSAPHGVVFLHVTYVPAQEKNFTTAPAICHDGKAHFPREGVFVSNGTHWFVTQRNFCEPQIITTDNTFVSGNCDVVIGIVNNTVYDPLQPELDSGGGSGGGQIYEGKLTAEGLRFGIVASRFNHALVDRLVEGAIDAIVRHGGREEDITLVRVPGSWEIPVAAGELARKEDIDAVIAIGVLIRGATPHFDYIASEVSKGLADLSLELRKPITFGVITADTLEQAIERAGTKHGNKGWEAALSAIEMANLFKSLR

SEQ ID NO: 8094 - protein, 1307 aa, Artificial Sequence
  SARS-CoV-2/Portugal/PT0035/2020__EPI_ISL_418020 spike protein (1-1147)(I714C_Y1110C) LumSynth construct
MFVFLVLLPLVSSQCVNLTTRTQLPPAYTNSFTRGVYYPDKVFRSSVLHSTQDLFLPFFSNVTWFHAIHVSGTNGTKRFDNPVLPFNDGVYFASTEKSNIIRGWIFGTTLDSKTQSLLIVNNATNVVIKVCEFQFCNDPFLGVYYHKNNKSWMESEFRVYSSANNCTFEYVSQPFLMDLEGKQGNFKNLREFVFKNIDGYFKIYSKHTPINLVRDLPQGFSALEPLVDLPIGINITRFQTLLALHRSYLTPGDSSSGWTAGAAAYYVGYLQPRTFLLKYNENGTITDAVDCALDPLSETKCTLKSFTVEKGIYQTSNFRVQPTESIVRFPNITNLCPFGEVFNATRFASVYAWNRKRISNCVADYSVLYNSASFSTFKCYGVSPTKLNDLCFTNVYADSFVIRGDEVRQIAPGQTGKIADYNYKLPDDFTGCVIAWNSNNLDSKVGGNYNYLYRLFRKSNLKPFERDISTEIYQAGSTPCNGVEGFNCYFPLQSYGFQPTNGVGYQPYRVVVLSFELLHAPATVCGPKKSTNLVKNKCVNFNFNGLTGTGVLTESNKKFLPFQQFGRDIADTTDAVRDPQTLEILDITPCSFGGVSVITPGTNTSNQVAVLYQDVNCTEVPVAIHADQLTPTWRVYSTGSNVFQTRAGCLIGAEHVNNSYECDIPIGAGICASYQTQTNSPRRARSVASQSIIAYTMSLGAENSVAYSNNSIACPTNFTISVTTEILPVSMTKTSVDCTMYICGDSTECSNLLLQYGSFCTQLNRALTGIAVEQDKNTQEVFAQVKQIYKTPPIKDFGGFNFSQILPDPSKPSKRSFIEDLLFNKVTLADAGFIKQYGDCLGDISARDLICAQKFNGLTVLPPLLTDEMIAQYTSALLAGTITSGWTFGAGAALQIPFAMQMAYRFNGIGVTQNVLYENQKLIANQFNSAIGKIQDSLSSTASALGKLQDVVNQNAQALNTLVKQLSSNFGAISSVLNDILSRLDKVEAEVQIDRLITGRLQSLQTYVTQQLIRAAEIRASANLAATKMSECVLGQSKRVDFCGKGYHLMSFPQSAPHGVVFLHVTYVPAQEKNFTTAPAICHDGKAHFPREGVFVSNGTHWFVTQRNFCEPQIITTDNTFVSGNCDVVIGIVNNTVYDPLQPELDSGGGSGGGQIYEGKLTAEGLRFGIVASRFNHALVDRLVEGAIDAIVRHGGREEDITLVRVPGSWEIPVAAGELARKEDIDAVIAIGVLIRGATPHFDYIASEVSKGLADLSLELRKPITFGVITADTLEQAIERAGTKHGNKGWEAALSAIEMANLFKSLR

SEQ ID NO: 8095 - protein, 1307 aa, Artificial Sequence
  SARS-CoV-2/USA/NY-NYUMC7/2020__EPI_ISL_418192 spike protein (1-1147)(I714C_Y1110C) LumSynth construct
MFVFLVLLPLVSSQCVNLTTRTQLPPAYTNSFTRGVYYPDKVFRSSVLHSTQDLFLPFFSNVTWFHAIHVSGTNGTKRFDNPVLPFNDGVYFASTEKSNIIRGWIFGTTLDSKTQSLLIVNNATNVVIKVCEFQFCNDPFLGVYHHKNNKSWMESEFRVYSSANNCTFEYVSQPFLMDLEGKQGNFKNLREFVFKNIDGYFKIYSKHTPINLVRDLPQGFSALEPLVDLPIGINITRFQTLLALHRSYLTPGDSSSGWTAGAAAYYVGYLQPRTFLLKYNENGTITDAVDCALDPLSETKCTLKSFTVEKGIYQTSNFRVQPTESIVRFPNITNLCPFGEVFNATRFASVYAWNRKRISNCVADYSVLYNSASFSTFKCYGVSPTKLNDLCFTNVYADSFVIRGDEVRQIAPGQTGKIADYNYKLPDDFTGCVIAWNSNNLDSKVGGNYNYLYRLFRKSNLKPFERDISTEIYQAGSTPCNGVEGFNCYFPLQSYGFQPTNGVGYQPYRVVVLSFELLHAPATVCGPKKSTNLVKNKCVNFNFNGLTGTGVLTESNKKFLPFQQFGRDIADTTDAVRDPQTLEILDITPCSFGGVSVITPGTNTSNQVAVLYQGVNCTEVPVAIHADQLTPTWRVYSTGSNVFQTRAGCLIGAEHVNNSYECDIPIGAGICASYQTQTNSPRRARSVASQSIIAYTMSLGAENSVAYSNNSIACPTNFTISVTTEILPVSMTKTSVDCTMYICGDSTECSNLLLQYGSFCTQLNRALTGIAVEQDKNTQEVFAQVKQIYKTPPIKDFGGFNFSQILPDPSKPSKRSFIEDLLFNKVTLADAGFIKQYGDCLGDIAARDLICAQKFNGLTVLPPLLTDEMIAQYTSALLAGTITSGWTFGAGAALQIPFAMQMAYRFNGIGVTQNVLYENQKLIANQFNSAIGKIQDSLSSTASALGKLQDVVNQNAQALNTLVKQLSSNFGAISSVLNDILSRLDKVEAEVQIDRLITGRLQSLQTYVTQQLIRAAEIRASANLAATKMSECVLGQSKRVDFCGKGYHLMSFPQSAPHGVVFLHVTYVPAQEKNFTTAPAICHDGKAHFPREGVFVSNGTHWFVTQRNFCEPQIITTDNTFVSGNCDVVIGIVNNTVYDPLQPELDSGGGSGGGQIYEGKLTAEGLRFGIVASRFNHALVDRLVEGAIDAIVRHGGREEDITLVRVPGSWEIPVAAGELARKEDIDAVIAIGVLIRGATPHFDYIASEVSKGLADLSLELRKPITFGVITADTLEQAIERAGTKHGNKGWEAALSAIEMANLFKSLR

SEQ ID NO: 8096 - protein, 1307 aa, Artificial Sequence
  SARS-CoV-2/Iceland/189/2020__EPI_ISL_417709 spike protein (1-1147)(I714C_Y1110C) LumSynth construct
MFVFLVLLPLVSSQCVNLTTRTQLPPAYTNSFTRGVYYPDKVFRSSVLHSTQDLFLPFFSNVTWFHAIHVSGTNGTKRFDNPVLPFNDGVYFASTEKSNIIRGWIFGTTLDSKTQSLLIVNNATNVVIKVCEFQFCNDPFLGVYYHKNNKSWMESEFRVYSSANNCTFEYVSQPFLMDLEGKQGNFKNLREFVFKNIDGYFKIYSKHTPINLVRDLPQGFSALEPLVDLPIGINITRFQTLLALHRSYLTPGDSSSGWTAGAAAYYVGYLQPRTFLLKYNENGTITDAVDCALDPLSETKCTLKSFTVEKGIYQTSNFRVQPTESIVRFPNITNLCPFGEVFNATRFASVYAWNRKRISNCVADYSVLYNSASFSTFKCYGVSPTKLNDLCFTNVYADSFVIRGDEVRQIAPGQTGKIADYNYKLPDDFTGCVIAWNSNNLDSKVGGNYNYLYRLFRKSNLKPFERDISTEIYQAGSTPCNGVEGFNCYFPLQSYGFQPTNGVGYQPYRVVVLSFELLHAPATVCGPKKSTNLVKNKCVNFNFNGLTGTGVLTESNKKFLPFQQFGRDIADTTDAVRDPQTLEILDITPCSFGGVSVITPGTNTSNQVAVLYQGVNCTEVPVAIHADQLTPTWRVYSTGSNVFQTRAGCLIGAEHVNNSYECDIPIGAGICASYQTQTNSPRRARSVASQSIIAYTMSLGAENSVAYSNNSIACPTNFTISVTTEILPVSMTKTSVDCTMYICGDSTECSNLLLQYGSFCTQLNRALTGIAVEQDKNTQEVFAQVKQIYKTPPIKDFGGFNFSQILPDPSKPSKRSFIEDLLFNKVTLADAGFTKQYGDCLGDIAARDLICAQKFNGLTVLPPLLTDEMIAQYTSALLAGTITSGWTFGAGAALQIPFAMQMAYRFNGIGVTQNVLYENQKLIANQFNSAIGKIQDSLSSTASALGKLQDVVNQNAQALNTLVKQLSSNFGAISSVLNDILSRLDKVEAEVQIDRLITGRLQSLQTYVTQQLIRAAEIRASANLAATKMSECVLGQSKRVDFCGKGYHLMSFPQSAPHGVVFLHVTYVPAQEKNFTTAPAICHDGKAHFPREGVFVSNGTHWFVTQRNFCEPQIITTDNTFVSGNCDVVIGIVNNTVYDPLQPELDSGGGSGGGQIYEGKLTAEGLRFGIVASRFNHALVDRLVEGAIDAIVRHGGREEDITLVRVPGSWEIPVAAGELARKEDIDAVIAIGVLIRGATPHFDYIASEVSKGLADLSLELRKPITFGVITADTLEQAIERAGTKHGNKGWEAALSAIEMANLFKSLR

SEQ ID NO: 8097 - protein, 1307 aa, Artificial Sequence
  SARS-CoV-2/Australia/NSW56/2020__EPI_ISL_417408 spike protein (1-1147)(I714C_Y1110C) LumSynth construct
MFVFLVLLPLVSSQCVNLTTRTQLPPAYTNSFTRGVYYPDKVFRSSVLHSTQDLFLPFFSNVTWFHAIHVSGTNGTKRFDNPVLPFNDGVYFASTEKSNIIRGWIFGTTLDSKTQSLLIVNNATNVVIKVCEFQFCNDPFLGVYYHKNNKSWMESEFRVYSSANNCTFEYVSQPFLMDLEGKQGNFKNLREFVFKNIDGYFKIYSKHTPINLVRDLPQGFSALEPLVDLPIGINITRFQTLLALHRSYLTPGDSSSGWTAGAAAYYVGYLQPRTFLLKYNENGTITDAVDCALDPLSETKCTLKSFTVEKGIYQTSNFRVQPTESIVRFPNITNLCPFGEVFNATRFASVYAWNRKRISNCVADYSVLYNSASFSTFKCYGVSPTKLNDLCFTNVYADSFVIRGDEVRQIAPGQTGKIADYNYKLPDDFTGCVIAWNSNNLDSKVGGNYNYLYRLFRKSNLKPFERDISTEIYQAGSTPCNGVEGFNCYFPLQSYGFQPTNGVGYQPYRVVVLSFELLHAPATVCGPKKSTNLVKNKCVNFNFNGLTGTGVLTESNKKFLPFQQFGRDIADTTDAVRDPQTLEILDITPCSFGGVSVITPGTNTSNQVAVLYQDVNCTEVPVAIHADQLTPTWRVYSTGSNVFQTRAGCLIGAEHVNNSYECDIPIGAGICASYQTQTNSPRRARSVASQSIIAYTMSLGAENSVAYSNNSIACPTNFTISVTTEILPVSMTKTSVDCTMYICGDSTECSNLLLQYGSFCTQLNRALTGIAVEQDKNTQEVFAQVKQIYKTPPIKDFGGFNFSQILPDSSKPSKRSFIEDLLFNKVTLADAGFIKQYGDCLGDIAARDLICAQKFNGLTVLPPLLTDEMIAQYTSALLAGTITSGWTFGAGAALQIPFAMQMAYRFNGIGVTQNVLYENQKLIANQFNSAIGKIQDSLSSTASALGKLQDVVNQNAQALNTLVKQLSSNFGAISSVLNDILSRLDKVEAEVQIDRLITGRLQSLQTYVTQQLIRAAEIRASANLAATKMSECVLGQSKRVDFCGKGYHLMSFPQSAPHGVVFLHVTYVPAQEKNFTTAPAICHDGKAHFPREGVFVSNGTHWFVTQRNFCEPQIITTDNTFVSGNCDVVIGIVNNTVYDPLQPELDSGGGSGGGQIYEGKLTAEGLRFGIVASRFNHALVDRLVEGAIDAIVRHGGREEDITLVRVPGSWEIPVAAGELARKEDIDAVIAIGVLIRGATPHFDYIASEVSKGLADLSLELRKPITFGVITADTLEQAIERAGTKHGNKGWEAALSAIEMANLFKSLR

SEQ ID NO: 8098 - protein, 1307 aa, Artificial Sequence
  SARS-CoV-2/Iceland/280/2020__EPI_ISL_417608 spike protein (1-1147)(I714C_Y1110C) LumSynth construct
MFVFLVLLPLVSSQCVNLTTRTQLPPAYTNSFTRGVYYPDKVFRSSVLHSTQDLFLPFFSNVTWFHAIHVSGTNGTKRFDNPVLPFNDGVYFASTEKSNIIRGWIFGTTLDSKTQSLLIVNNATNVVIKVCEFQFCNDPFLGVYYHKNNKSWMESEFRVYSSANNCTFEYVSQPFLMDLEGKQGNFKNLREFVFKNIDGYFKIYSKHTPINLVRDLPQGFSALEPLVDLPIGINITRFQTLLALHRSYLTPGDSSSGWTAGAAAYYVGYLQPRTFLLKYNENGTITDAVDCALDPLSETKCTLKSFTVEKGIYQTSNFRVQPTESIVRFPNITNLCPFGEVFNATRFASVYAWNRKRISNCVADYSVLYNSASFSTFKCYGVSPTKLNDLCFTNVYADSFVIRGDEVRQIAPGQTGKIADYNYKLPDDFTGCVIAWNSNNLDSKVGGNYNYLYRLFRKSNLKPFERDISTEIYQAGSTPCNGVEGFNCYFPLQSYGFQPTNGVGYQPYRVVVLSFELLHAPATVCGPKKSTNLVKNKCVNFNFNGLTGTGVLTESNKKFLPFQQFGRDIADTTDAVRDPQTLEILDITPCSFGGVSVITPGTNTSNQVAVLYQGVNCTEVPVAIHADQLTPTWRVYSTGSNVFQTRAGCLIGAEHVNNSYECDIPIGAGICASYHTQTNSPRRARSVASQSIIAYTMSLGAENSVAYSNNSIACPTNFTISVTTEILPVSMTKTSVDCTMYICGDSTECSNLLLQYGSFCTQLNRALTGIAVEQDKNTQEVFAQVKQIYKTPPIKDFGGFNFSQILPDPSKPSKRSFIEDLLFNKVTLADAGFIKQYGDCLGDIAARDLICAQKFNGLTVLPPLLTDEMIAQYTSALLAGTITSGWTFGAGAALQIPFAMQMAYRFNGIGVTQNVLYENQKLIANQFNSAIGKIQDSLSSTASALGKLQDVVNQNAQALNTLVKQLSSNFGAISSVLNDILSRLDKVEAEVQIDRLITGRLQSLQTYVTQQLIRAAEIRASANLAATKMSECVLGQSKRVDFCGKGYHLMSFPQSAPHGVVFLHVTYVPAQEKNFTTAPAICHDGKAHFPREGVFVSNGTHWFVTQRNFCEPQIITTDNTFVSGNCDVVIGIVNNTVYDPLQPELDSGGGSGGGQIYEGKLTAEGLRFGIVASRFNHALVDRLVEGAIDAIVRHGGREEDITLVRVPGSWEIPVAAGELARKEDIDAVIAIGVLIRGATPHFDYIASEVSKGLADLSLELRKPITFGVITADTLEQAIERAGTKHGNKGWEAALSAIEMANLFKSLR

SEQ ID NO: 8099 - protein, 1307 aa, Artificial Sequence; identical to SEQ ID NO: 8054
  SARS-CoV-2/Iceland/247/2020__EPI_ISL_417575 spike protein (1-1147)(I714C_Y1110C) LumSynth construct

SEQ ID NO: 8100 - protein, 1307 aa, Artificial Sequence
  SARS-CoV-2/Iceland/238/2020__EPI_ISL_417566 spike protein (1-1147)(I714C_Y1110C) LumSynth construct
MFVFLVLLPLVSSQCVNLTTRTQLPPAYTNSFTRGVYYPDKVFRSSVLHSTQDLFLPFFSNVTWFHAIHVSGTNGTKRFDNPVLPFNDGVYFASTEKSNIIRGWIFGTTLDSKTQSLLIVNNATNVVIKVCEFQFCNDPFLGVYYHKNNKSWMESEFRVYSSANNCTFEYVSQPFLMDLEGKQGNFKNLREFVFKNIDGYFKIYSKHTPINLVRDLPQGFSALEPLVDLPIGINITRFQTLLALHRSYLTPGDSSSGWTAGAAAYYVGYLQPRTFLLKYNENGTITDAVDCALDPLSETKCTLKSFTVEKGIYQTSNFRVQPTESIVRFPNITNLCPFGEVFNATRFASVYAWNRKRISNCVADYSVLYNSASFSTFKCYGVSPTKLNDLCFTNVYADSFVIRGDEVRQIAPGQTGKIADYNYKLPDDFTGCVIAWNSNNLDSKVGGNYNYLYRLFRKSNLKPFERDISTEIYQAGSTPCNGVEGFNCYFPLQSYGFQPTNGVGYQPYRVVVLSFELLHAPATVCGPKKSTNLVKNKCVNFNFNGLTGTGVLTESNKKFLPFQQFGRDIADTTDAVRDPQTLEILDITPCSFGGVSVITPGTNTSNQVAVLYQGVNCTEVPVAIHADQLTPTWRVYSTGSNVFQTRAGCLIGAEHVNNSYECDIPIGAGICASYQTQTNSPRRARSVASQSIIAYTMSLGAENSVAYSNNSIACPTNFTISVTTEILPVSMTKTSVDCTMYICGDSTECSNLLLQYGSFCTQLNRALTGIAVEQDKNTQEVFAQVKQIYKTPPIKDFGGFNFSQILPDPSKPSKRSFIEDLLFNKVTLADVGFIKQYGDCLGDIAARDLICAQKFNGLTVLPPLLTDEMIAQYTSALLAGTITSGWTFGAGAALQIPFAMQMAYRFNGIGVTQNVLYENQKLIANQFNSAIGKIQDSLSSTASALGKLQDVVNQNAQALNTLVKQLSSNFGAISSVLNDILSRLDKVEAEVQIDRLITGRLQSLQTYVTQQLIRAAEIRASANLAATKMSECVLGQSKRVDFCGKGYHLMSFPQSAPHGVVFLHVTYVPAQEKNFTTAPAICHDGKAHFPREGVFVSNGTHWFVTQRNFCEPQIITTDNTFVSGNCDVVIGIVNNTVYDPLQPELDSGGGSGGGQIYEGKLTAEGLRFGIVASRFNHALVDRLVEGAIDAIVRHGGREEDITLVRVPGSWEIPVAAGELARKEDIDAVIAIGVLIRGATPHFDYIASEVSKGLADLSLELRKPITFGVITADTLEQAIERAGTKHGNKGWEAALSAIEMANLFKSLR

SEQ ID NO: 8101 - protein, 1307 aa, Artificial Sequence
  SARS-CoV-2/Greece/16/2020__EPI_ISL_418265 spike protein (1-1147)(I714C_Y1110C) LumSynth construct
MFVFLVLLPLVSSQCVNLTTRTQLPPAYTNSFTRGVYYPDKVFRSSVLHSTQDLFLPFFSNVTWFHAIHVSGTNGTKRFDNPVLPFNDGVYFASTEKSNIIRGWIFGTTLDSKTQSLLIVNNATNVVIKVCEFQFCNDPFLGVYYHKNNKSWMESEFRVYSSANNCTFEYVSQPFLMDLEGKQGNFKNLREFVFKNVDGYFKIYSKHTPINLVRDLPQGFSALEPLVDLPIGINITRFQTLLALHRSYLTPGDSSSGWTAGAAAYYVGYLQPRTFLLKYNENGTITDAVDCALDPLSETKCTLKSFTVEKGIYQTSNFRVQPTESIVRFPNITNLCPFGEVFNATRFASVYAWNRKRISNCVADYSVLYNSASFSTFKCYGVSPTKLNDLCFTNVYADSFVIRGDEVRQIAPGQTGKIADYNYKLPDDFTGCVIAWNSNNLDSKVGGNYNYLYRLFRKSNLKPFERDISTEIYQAGSTPCNGVEGFNCYFPLQSYGFQPTNGVGYQPYRVVVLSFELLHAPATVCGPKKSTNLVKNKCVNFNFNGLTGTGVLTESNKKFLPFQQFGRDIADTTDAVRDPQTLEILDITPCSFGGVSVITPGTNTSNQVAVLYQDVNCTEVPVAIHADQLTPTWRVYSTGSNVFQTRAGCLIGAEHVNNSYECDIPIGAGICASYQTQTNSPRRARSVASQSIIAYTMSLGAENSVAYSNNSIACPTNFTISVTTEILPVSMTKTSVDCTMYICGDSTECSNLLLQYGSFCTQLNRALTGIAVEQDKNTQEVFAQVKQIYKTPPIKDFGGFNFSQILPDPSKPSKRSFIEDLLFNKVTLADAGFIKQYGDCLGDIAARDLICAQKFNGLTVLPPLLTDEMIAQYTSALLAGTITSGWTFGAGAALQIPFAMQMAYRFNGIGVTQNVLYENQKLIANQFNSAIGKIQDSLSSTASALGKLQDVVNQNAQALNTLVKQLSSNFGAISSVLNDILSRLDKVEAEVQIDRLITGRLQSLQTYVTQQLIRAAEIRASANLAATKMSECVLGQSKRVDFCGKGYHLMSFPQSAPHGVVFLHVTYVPAQEKNFTTAPAICHDGKAHFPREGVFVSNGTHWFVTQRNFCEPQIITTDNTFVSGNCDVVIGIVNNTVYDPLQPELDSGGGSGGGQIYEGKLTAEGLRFGIVASRFNHALVDRLVEGAIDAIVRHGGREEDITLVRVPGSWEIPVAAGELARKEDIDAVIAIGVLIRGATPHFDYIASEVSKGLADLSLELRKPITFGVITADTLEQAIERAGTKHGNKGWEAALSAIEMANLFKSLR

SEQ ID NO: 8102 - protein, 1307 aa, Artificial Sequence
  SARS-CoV-2/Iceland/319/2020__EPI_ISL_417648 spike protein (1-1147)(I714C_Y1110C) LumSynth construct
MFVFLVLLPLVSSQCVNLTTRTQLPPAYTNSFTRGVYYPDKVFRSSVLHSTQDLFLPFFSNVTWFHAIHVSGTNGTKRFDNPVLPFNDGVYFASTEKSNIIRGWIFGTTLDSKTQSLLIVNNATNVVIKVCEFQFCNDPFLGVYYHKNNKSWMESEFRVYSSANNCTFEYVSQPFLIDLEGKQGNFKNLREFVFKNIDGYFKIYSKHTPINLVRDLPQGFSALEPLVDLPIGINITRFQTLLALHRSYLTPGDSSSGWTAGAAAYYVGYLQPRTFLLKYNENGTITDAVDCALDPLSETKCTLKSFTVEKGIYQTSNFRVQPTESIVRFPNITNLCPFGEVFNATRFASVYAWNRKRISNCVADYSVLYNSASFSTFKCYGVSPTKLNDLCFTNVYADSFVIRGDEVRQIAPGQTGKIADYNYKLPDDFTGCVIAWNSNNLDSKVGGNYNYLYRLFRKSNLKPFERDISTEIYQAGSTPCNGVEGFNCYFPLQSYGFQPTNGVGYQPYRVVVLSFELLHAPATVCGPKKSTNLVKNKCVNFNFNGLTGTGVLTESNKKFLPFQQFGRDIADTTDAVRDPQTLEILDITPCSFGGVSVITPGTNTSNQVAVLYQGVNCTEVPVAIHADQLTPTWRVYSTGSNVFQTRAGCLIGAEHVNNSYECDIPIGAGICASYQTQTNSPRRARSVASQSIIAYTMSLGAENSVAYSNNSIACPTNFTISVTTEILPVSMTKTSVDCTMYICGDSTECSNLLLQYGSFCTQLNRALTGIAVEQDKNTQEVFAQVKQIYKTPPIKDFGGFNFSQILPDPSKPSKRSFIEDLLFNKVTLADAGFIKQYGDCLGDIAARDLICAQKFNGLTVLPPLLTDEMIAQYTSALLAGTITSGWTFGAGAALQIPFAMQMAYRFNGIGVTQNVLYENQKLIANQFNSAIGKIQDSLSSTASALGKLQDVVNQNAQALNTLVKQLSSNFGAISSVLNDILSRLDKVEAEVQIDRLITGRLQSLQTYVTQQLIRAAEIRASANLAATKMSECVLGQSKRVDFCGKGYHLMSFPQSAPHGVVFLHVTYVPAQEKNFTTAPAICHDGKAHFPREGVFVSNGTHWFVTQRNFCEPQIITTDNTFVSGNCDVVIGIVNNTVYDPLQPELDSGGGSGGGQIYEGKLTAEGLRFGIVASRFNHALVDRLVEGAIDAIVRHGGREEDITLVRVPGSWEIPVAAGELARKEDIDAVIAIGVLIRGATPHFDYIASEVSKGLADLSLELRKPITFGVITADTLEQAIERAGTKHGNKGWEAALSAIEMANLFKSLR

SEQ ID NO: 8103 - protein, 1307 aa, Artificial Sequence
  SARS-CoV-2/Congo/94/2020__EPI_ISL_417947 spike protein (1-1147)(I714C_Y1110C) LumSynth construct
MFVFLVLLPLVSSQCVNLTTRTQLPPAYTNSFTRGVYYPDKVFRSSVLHSTQDLFLPFFSNVTWFHAIHVSGTNGTKRFDNPVLPFNDGVYFASTEKSNIIRGWIFGTTLDSKTQSLLIVNNATNVVIKVCEFQFCNDPFLGVYYHKNNKSWMESEFRVYSSANNCTFEYVSQPFLMDLEGKQGNFKNLREFVFKNIDGYFKIYSKHTPINLVRDLPQGFSALEPLVDLPIGINITRFQTLLALHRSYLTPGDSSSGWTAGAAAYYVGYLQPRTFLLKYNENGTITDAVDCALDPLSETKCTLKSFTVEKGIYQTSNFRVQPTESIVRFPNITNLCPFGEVFNATRFASVYAWNRKRISNCVADYSVLYNSASFSTFKCYGVSPTKLNDLCFTNVYADSFVIRGDEVRQIAPGQTGKIADYNYKLPDDFTGCVIAWNSNNLDSKVGGNYNYLYRLFRKSNLKPFERDISTEIYQAGSTPCNGVEGFNCYFPLQSYGFQPTNGVGYQPYRVVVLSFELLHAPATVCGPKKSTNLVKNKCVNFNFNGLTGTGVLTESNKKFLPFQQFGRDIADTTDAVRDPQTLEILDITPCSFGGVSVITPGTNTSNQVAVLYQGVNCTEVPVAIHADQLTPTWRVYSTGSNVFQTRAGCLIGAEHVNNSYECDIPIGAGICASYQTQTNSPRRARSVASQSIIAYTMSLGAENSVAYSNNSIACPTNFTISVTTEILPVSMTKTSVDCTMYICGDSTECSNLLLQYGSFCTQLNRALTGIAVEQDKNTQEVFAQVKQIYKTPPIKDFGGFNFSQILPDPSKPSKRSFIEDILFNKVTLADAGFIKQYGDCLGDIAARDLICAQKFNGLTVLPPLLTDEMIAQYTSALLAGTITSGWTFGAGAALQIPFAMQMAYRFNGIGVTQNVLYENQKLIANQFNSAIGKIQDSLSSTASALGKLQDVVNQNAQALNTLVKQLSSNFGAISSVLNDILSRLDKVEAEVQIDRLITGRLQSLQTYVTQQLIRAAEIRASANLAATKMSECVLGQSKRVDFCGKGYHLMSFPQSAPHGVVFLHVTYVPAQEKNFTTAPAICHDGKAHFPREGVFVSNGTHWFVTQRNFCEPQIITTDNTFVSGNCDVVIGIVNNTVYDPLQPELDSGGGSGGGQIYEGKLTAEGLRFGIVASRFNHALVDRLVEGAIDAIVRHGGREEDITLVRVPGSWEIPVAAGELARKEDIDAVIAIGVLIRGATPHFDYIASEVSKGLADLSLELRKPITFGVITADTLEQAIERAGTKHGNKGWEAALSAIEMANLFKSLR

SEQ ID NO: 8104 - protein, 1307 aa, Artificial Sequence
  SARS-CoV-2/Congo/158/2020__EPI_ISL_417950 spike protein (1-1147)(I714C_Y1110C) LumSynth construct
MFVFLVLLPLVSSQCVNLTTRTQLPPAYTNSFTRGVYYPDKVFRSSVLHSTQDLFLPFFSNVTWFHAIHVSGTNGTKRFDNPVLPFNDGVYFASTEKSNIIRGWIFGTTLDSKTQSLLIVNNATNVVIKVCEFQFCNDPFLGVYYHKNNKSWMESEFRVYSSANNCTFEYVSQPFLMDLEGKQGNFKNLREFVFKNIDGYFKIYSKHTPINLVRDLPQGFSALEPLVDLPIGINITRFQTLLALHRSYLTPGDSSSGWTAGAAAYYVGYLQPRTFLLKYNENGTITDAVDCALDPLSETKCTLKSFTVEKGIYQTSNFRVQPTESIVRFPNITNLCPFGEVFNATRFASVYAWNRKRISNCVADYSVLYNSASFSTFKCYGVSPTKLNDLCFTNVYADSFVIRGDEVRQIAPGQTGKIADYNYKLPDDFTGCVIAWNSNNLDSKVGGNYNYLYRLFRKSNLKPFERDISTEIYQAGSTPCNGVEGFNCYFPLQSYGFQPTNGVGYQPYRVVVLSFELLHAPATVCGPKKSTNLVKNKCVNFNFNGLTGTGVLTESNKKFLPFQQFGRDIADTTDAVRDPQTLEILDITPCSFGGVSVITPGTNTSNQVAVLYQDVNCTEVPVAIHADQLTPTWRVYSTGSNVFQTRAGCLIGAEHVNNSYECDIPIGAGICASYQTQTNSPRRARSVASQSIIAYTMSLGAENSVAYSNNSIACPTNFTISVTTEILPVSMTKTSVDCTMYICGDSTECSNLLLQYGSFCTQLNRALTGIAVEQDKNTQEVFAQVKQIYKTPPIKDFGGFNFSQILPDPSKPSKRSFIEDLLFNKVTLADAGFIKQYGDCLGDIAARDLICAQKFNGLTVLPPLLTDEMIAQYTSALLAGTITSGWTFGAGAALQIPFAMQMAYRFNGIGVTQNVLYENQKLIANQFNSAIGKIQDSLSSTASALGKLQDVVNQNAQALNTLVKQLSSNFGAISSVLNDILSRLDKVEAEVQIDRLITGRLQSLQTYVTQQLIRAAEIRASANLAATKMSECVLGQSKRVDFCGKGYHLMSFPQSAPHGVVFLHVTYVPAQEKNFTTAPAICHDGKAHFPREGVFVSNGTHWFVTQRNFCEPQIITTDNTFLSGNCDVVIGIVNNTVYDPLQPELDSGGGSGGGQIYEGKLTAEGLRFGIVASRFNHALVDRLVEGAIDAIVRHGGREEDITLVRVPGSWEIPVAAGELARKEDIDAVIAIGVLIRGATPHFDYIASEVSKGLADLSLELRKPITFGVITADTLEQAIERAGTKHGNKGWEAALSAIEMANLFKSLR

SEQ ID NO: 8105 - protein, 1307 aa, Artificial Sequence
  SARS-CoV-2/USA/UT-00034/2020__EPI_ISL_417977 spike protein (1-1147)(I714C_Y1110C) LumSynth construct
MFVFLVLLPLVSSQCVNLTTRTQLPPAYTNSFTRGVYYPDKVFRSSVLHSTQDLFLPFFSNVTWFHAIHVSGTNGTKRFDNPVLPFNDGVYFASTEKSNIIRGWIFGTTLDSKTQSLLIVNNATNVVIKVCEFQFCNDPFLGVYYYKNNKSWMESEFRVYSSANNCTFEYVSQPFLMDLEGKQGNFKNLREFVFKNIDGYFKIYSKHTPINLVRDLPQGFSALEPLVDLPIGINITRFQTLLALHRSYLTPGDSSSGWTAGAAAYYVGYLQPRTFLLKYNENGTITDAVDCALDPLSETKCTLKSFTVEKGIYQTSNFRVQPTESIVRFPNITNLCPFGEVFNATRFASVYAWNRKRISNCVADYSVLYNSASFSTFKCYGVSPTKLNDLCFTNVYADSFVIRGDEVRQIAPGQTGKIADYNYKLPDDFTGCVIAWNSNNLDSKVGGNYNYLYRLFRKSNLKPFERDISTEIYQAGSTPCNGVEGFNCYFPLQSYGFQPTNGVGYQPYRVVVLSFELLHAPATVCGPKKSTNLVKNKCVNFNFNGLTGTGVLTESNKKFLPFQQFGRDIADTTDAVRDPQTLEILDITPCSFGGVSVITPGTNTSNQVAVLYQGVNCTEVPVAIHADQLTPTWRVYSTGSNVFQTRAGCLIGAEHVNNSYECDIPIGAGICASYQTQTNSPRRARSVASQSIIAYTMSLGAENSVAYSNNSIACPTNFTISVTTEILPVSMTKTSVDCTMYICGDSTECSNLLLQYGSFCTQLNRALTGIAVEQDKNTQEVFAQVKQIYKTPPIKDFGGFNFSQILPDPSKPSKRSFIEDLLFNKVTLADAGFIKQYGDCLGDIAARDLICAQKFNGLTVLPPLLTDEMIAQYTSALLAGTITSGWTFGAGAALQIPFAMQMAYRFNGIGVTQNVLYENQKLIANQFNSAIGKIQDSLSSTASALGKLQDVVNQNAQALNTLVKQLSSNFGAISSVLNDILSRLDKVEAEVQIDRLITGRLQSLQTYVTQQLIRAAEIRASANLAATKMSECVLGQSKRVDFCGKGYHLMSFPQSAPHGVVFLHVTYVPAQEKNFTTAPAICHDGKAHFPREGVFVSNGTHWFVTQRNFCEPQIITTDNTFVSGNCDVVIGIVNNTVYDPLQPELDSGGGSGGGQIYEGKLTAEGLRFGIVASRFNHALVDRLVEGAIDAIVRHGGREEDITLVRVPGSWEIPVAAGELARKEDIDAVIAIGVLIRGATPHFDYIASEVSKGLADLSLELRKPITFGVITADTLEQAIERAGTKHGNKGWEAALSAIEMANLFKSLR

SEQ ID NO: 8106 - protein, 1307 aa, Artificial Sequence
  SARS-CoV-2/USA/UT-00033/2020__EPI_ISL_417976 spike protein (1-1147)(I714C_Y1110C) LumSynth construct
MFVFLVLLPLVSSQCVNLTTRTQLPPAYTNSFTRGVYYPDKVFRSSVLHSTQDLFLPFFSNVTWFHAIHVSGTNGTKRFDNPVLPFNDGVYFASTEKSNIIRGWIFGTTLDSKTQSLLIVNNATNVVIKVCEFQFCNDPFLGVYYHKNNKSWMESEFRVYSSANNCTFEYVSQPFLMDLEGKQGNFKNLREFVFKNIDGYFKIYSKHTPINLVRDLPQGFSALEPLVDLPIGINITRFQTLLALHRSYLTPGDSSSGLTAGAAAYYVGYLQPRTFLLKYNENGTITDAVDCALDPLSETKCTLKSFTVEKGIYQTSNFRVQPTESIVRFPNITNLCPFGEVFNATRFASVYAWNRKRISNCVADYSVLYNSASFSTFKCYGVSPTKLNDLCFTNVYADSFVIRGDEVRQIAPGQTGKIADYNYKLPDDFTGCVIAWNSNNLDSKVGGNYNYLYRLFRKSNLKPFERDISTEIYQAGSTPCNGVEGFNCYFPLQSYGFQPTNGVGYQPYRVVVLSFELLHAPATVCGPKKSTNLVKNKCVNFNFNGLTGTGVLTESNKKFLPFQQFGRDIADTTDAVRDPQTLEILDITPCSFGGVSVITPGTNTSNQVAVLYQGVNCTEVPVAIHADQLTPTWRVYSTGSNVFQTRAGCLIGAEHVNNSYECDIPIGAGICASYQTQTNSPRRARSVASQSIIAYTMSLGAENSVAYSNNSIACPTNFTISVTTEILPVSMTKTSVDCTMYICGDSTECSNLLLQYGSFCTQLNRALTGIAVEQDKNTQEVFAQVKQIYKTPPIKDFGGFNFSQILPDPSKPSKRSFIEDLLFNKVTLADAGFIKQYGDCLGDIAARDLICAQKFNGLTVLPPLLTDEMIAQYTSALLAGTITSGWTFGAGAALQIPFAMQMAYRFNGIGVTQNVLYENQKLIANQFNSAIGKIQDSLSSTASALGKLQDVVNQNAQALNTLVKQLSSNFGAISSVLNDILSRLDKVEAEVQIDRLITGRLQSLQTYVTQQLIRAAEIRASANLAATKMSECVLGQSKRVDFCGKGYHLMSFPQSAPHGVVFLHVTYVPAQEKNFTTAPAICHDGKAHFPREGVFVSNGTHWFVTQRNFCEPQIITTDNTFVSGNCDVVIGIVNNTVYDPLQPELDSGGGSGGGQIYEGKLTAEGLRFGIVASRFNHALVDRLVEGAIDAIVRHGGREEDITLVRVPGSWEIPVAAGELARKEDIDAVIAIGVLIRGATPHFDYIASEVSKGLADLSLELRKPITFGVITADTLEQAIERAGTKHGNKGWEAALSAIEMANLFKSLR

SEQ ID NO: 8107 - protein, 1307 aa, Artificial Sequence
  SARS-CoV-2/USA/WI-13/2020__EPI_ISL_417516 spike protein (1-1147)(I714C_Y1110C) LumSynth construct
MFVFLVLLPLVSSQCVNLTTRTQLPPAYTNSFTRGVYYPDKVFRSSVLHSTQDLFLPFFSNVTWFHAIHVSGTNGTKRFDNPVLPFNDGVYFASTEKSNIIRGWIFGTTLDSKTQSLLIVNNATNVVIKVCEFQFCNDPFLGVYYHKNNKSWMESEFRVYSSANNCTFEYVSQPFLMDLEGKQGNFKNLREFVFKNIDGYFKIYSKHTPINLVRDLPQGFSALEPLVDLPIGINITRFQTLLALHRSYLTPGDSSSGWTAGAAAYYVGYLQPRTFLLKYNENGTITDAVDCALDPLSETKCTLKSFTVEKGIYQTSNFRVLPTESIVRFPNITNLCPFGEVFNATRFASVYAWNRKRISNCVADYSVLYNSASFSTFKCYGVSPTKLNDLCFTNVYADSFVIRGDEVRQIAPGQTGKIADYNYKLPDDFTGCVIAWNSNNLDSKVGGNYNYLYRLFRKSNLKPFERDISTEIYQAGSTPCNGVEGFNCYFPLQSYGFQPTNGVGYQPYRVVVLSFELLHAPATVCGPKKSTNLVKNKCVNFNFNGLTGTGVLTESNKKFLPFQQFGRDIADTTDAVRDPQTLEILDITPCSFGGVSVITPGTNTSNQVAVLYQGVNCTEVPVAIHADQLTPTWRVYSTGSNVFQTRAGCLIGAEHVNNSYECDIPIGAGICASYQTQTNSPRRARSVASQSIIAYTMSLGAENSVAYSNNSIACPTNFTISVTTEILPVSMTKTSVDCTMYICGDSTECSNLLLQYGSFCTQLNRALTGIAVEQDKNTQEVFAQVKQIYKTPPIKDFGGFNFSQILPDPSKPSKRSFIEDLLFNKVTLADAGFIKQYGDCLGDIAARDLICAQKFNGLTVLPPLLTDEMIAQYTSALLAGTITSGWTFGAGAALQIPFAMQMAYRFNGIGVTQNVLYENQKLIANQFNSAIGKIQDSLSSTASALGKLQDVVNQNAQALNTLVKQLSSNFGAISSVLNDILSRLDKVEAEVQIDRLITGRLQSLQTYVTQQLIRAAEIRASANLAATKMSECVLGQSKRVDFCGKGYHLMSFPQSAPHGVVFLHVTYVPAQEKNFTTAPAICHDGKAHFPREGVFVSNGTHWFVTQRNFCEPQIITTDNTFVSGNCDVVIGIVNNTVYDPLQPELDSGGGSGGGQIYEGKLTAEGLRFGIVASRFNHALVDRLVEGAIDAIVRHGGREEDITLVRVPGSWEIPVAAGELARKEDIDAVIAIGVLIRGATPHFDYIASEVSKGLADLSLELRKPITFGVITADTLEQAIERAGTKHGNKGWEAALSAIEMANLFKSLR

SEQ ID NO: 8108 - protein, 1306 aa, Artificial Sequence
  SARS-CoV-2/India/1-27/2020__EPI_ISL_413522 spike protein (1-1146)(I713C_Y1109C) LumSynth construct
MFVFLVLLPLVSSQCVNLTTRTQLPPAYTNSFTRGVYYPDKVFRSSVLHSTQDLFLPFFSNVTWFHAIHVSGTNGTKRFDNPVLPFNDGVYFASTEKSNIIRGWIFGTTLDSKTQSLLIVNNATNVVIKVCEFQFCNDPFLGVYHKNNKSWMESEFRVYSSANNCTFEYVSQPFLMDLEGKQGNFKNLREFVFKNIDGYFKIYSKHTPINLVRDLPQGFSALEPLVDLPIGINITRFQTLLALHRSYLTPGDSSSGWTAGAAAYYVGYLQPRTFLLKYNENGTITDAVDCALDPLSETKCTLKSFTVEKGIYQTSNFRVQPTESIVRFPNITNLCPFGEVFNATRFASVYAWNRKRISNCVADYSVLYNSASFSTFKCYGVSPTKLNDLCFTNVYADSFVIRGDEVIQIAPGQTGKIADYNYKLPDDFTGCVIAWNSNNLDSKVGGNYNYLYRLFRKSNLKPFERDISTEIYQAGSTPCNGVEGFNCYFPLQSYGFQPTNGVGYQPYRVVVLSFELLHAPATVCGPKKSTNLVKNKCVNFNFNGLTGTGVLTESNKKFLPFQQFGRDIADTTDAVRDPQTLEILDITPCSFGGVSVITPGTNTSNQVAVLYQDVNCTEVPVAIHADQLTPTWRVYSTGSNVFQTRAGCLIGAEHVNNSYECDIPIGAGICASYQTQTNSPRRARSVASQSIIAYTMSLGAENSVAYSNNSIACPTNFTISVTTEILPVSMTKTSVDCTMYICGDSTECSNLLLQYGSFCTQLNRALTGIAVEQDKNTQEVFAQVKQIYKTPPIKDFGGFNFSQILPDPSKPSKRSFIEDLLFNKVTLADAGFIKQYGDCLGDIAARDLICAQKFNGLTVLPPLLTDEMIAQYTSALLAGTITSGWTFGAGAALQIPFAMQMAYRFNGIGVTQNVLYENQKLIANQFNSAIGKIQDSLSSTASALGKLQDVVNQNAQALNTLVKQLSSNFGAISSVLNDILSRLDKVEAEVQIDRLITGRLQSLQTYVTQQLIRAAEIRASANLAATKMSECVLGQSKRVDFCGKGYHLMSFPQSAPHGVVFLHVTYVPAQEKNFTTAPAICHDGKAHFPREGVFVSNGTHWFVTQRNFCEPQIITTDNTFVSGNCDVVIGIVNNTVYDPLQPELDSGGGSGGGQIYEGKLTAEGLRFGIVASRFNHALVDRLVEGAIDAIVRHGGREEDITLVRVPGSWEIPVAAGELARKEDIDAVIAIGVLIRGATPHFDYIASEVSKGLADLSLELRKPITFGVITADTLEQAIERAGTKHGNKGWEAALSAIEMANLFKSLR

SEQ ID NO: 8109 - protein, 1301 aa, Artificial Sequence
  SARS-CoV-2/pangolin/Guangxi/P4L/2017__EPI_ISL_410538 spike protein (1-1141)(I708C_Y1104C) LumSynth construct
MFVFLFVLPLVSSQCVNLTTRTGIPPGYTNSSTRGVYYPDKVFRSSILHLTQDLFLPFFSNVTWFNTINYQGGFKKFDNPVLPFNDGVYFASTEKSNIIRGWIFGTTLDARTQSLLIVNNATNVVIKVCEFQFCTDPFLGVYYHNNNKTWVENEFRVYSSANNCTFEYISQPFLMDLEGKQGNFKNLREFVFKNVDGYFKIYSKHTPIDLVRDLPRGFAALEPLVDLPIGINITRFQTLLALHRSYLTPGNLESGWTTGAAAYYVGYLQQRTFLLSYNQNGTITDAVDCSLDPLSETKCTLKSLTVEKGIYQTSNFRVQPTISIVRFPNITNLCPFGEVFNASKFASVYAWNRKRISNCVADYSVLYNSTSFSTFKCYGVSPTKLNDLCFTNVYADSFVVKGDEVRQIAPGQTGVIADYNYKLPDDFTGCVIAWNSVKQDALTGGNYGYLYRLFRKSKLKPFERDISTEIYQAGSTPCNGQVGLNCYYPLERYGFHPTTGVNYQPFRVVVLSFELLNGPATVCGPKLSTTLVKDKCVNFNFNGLTGTGVLTTSKKQFLPFQQFGRDISDTTDAVRDPQTLEILDITPCSFGGVSVITPGTNTSNQVAVLYQDVNCTEVPMAIHAEQLTPAWRVYSAGANVFQTRAGCLVGAEHVNNSYECDIPVGAGICASYHSMSSLRSVNQRSIIAYTMSLGAENSVAYSNNSIACPTNFTISVTTEILPVSMTKTSVDCTMYICGDSIECSNLLLQYGSFCTQLNRALTGIAVEQDKNTQEVFAQVKQIYKTPPIKDFGGFNFSQILPDPSKPSKRSFIEDLLFNKVTLADAGFIKQYGDCLGDIAARDLICAQKFNGLTVLPPLLTDEMIAQYTSALLAGTITSGWTFGAGAALQIPFAMQMAYRFNGIGVTQNVLYENQKLIANQFNSAIGKIQDSLSSTASALGKLQDVVNQNAQALNTLVKQLSSNFGAISSVLNDILSRLDKVEAEVQIDRLITGRLQSLQTYVTQQLIRAAEIRASANLAATKMSECVLGQSKRVDFCGKGYHLMSFPQSAPHGVVFLHVTYVPAQEKNFTTAPAICHEGKAHFPREGVFVSNGTHWFITQRNFCEPQIITTDNTFVSGSCDVVIGIVNNTVYDPLQPELDSGGGSGGGQIYEGKLTAEGLRFGIVASRFNHALVDRLVEGAIDAIVRHGGREEDITLVRVPGSWEIPVAAGELARKEDIDAVIAIGVLIRGATPHFDYIASEVSKGLADLSLELRKPITFGVITADTLEQAIERAGTKHGNKGWEAALSAIEMANLFKSLR

SEQ ID NO: 8110 - protein, 1301 aa, Artificial Sequence
  SARS-CoV-2/pangolin/Guangxi/P5L/2017__EPI_ISL_410540 spike protein (1-1141)(I708C_Y1104C) LumSynth construct
MFVFLFVLPLVSSQCVNLTTRTGIPPGYTNSSTRGVYYPDKVFRSSILHLTQDLFLPFFSNVTWFNTINYQGGFKKFDNPVLPFNDGVYFASTEKSNIIRGWIFGTTLDARTQSLLIVNNATNVVIKVCEFQFCTDPFLGVYYHNNNKTWVENEFRVYSSANNCTFEYISQPFLMDLEGKQGNFKNLREFVFKNVDGYFKIYSKHTPIDLVRDLPRGFAALEPLVDLPIGINITRFQTLLALHRSYLTPGKLESGWTTGAAAYYVGYLQQRTFLLSYNQNGTITDAVDCSLDPLSETKCTLKSLTVEKGIYQTSNFRVQPTISIVRFPNITNLCPFGEVFNASKFASVYAWNRKRISNCVADYSVLYNSTSFSTFKCYGVSPTKLNDLCFTNVYADSFVVKGDEVRQIAPGQTGVIADYNYKLPDDFTGCVIAWNSVKQDALTGGNYGYLYRLFRKSKLKPFERDISTEIYQAGSTPCNGQVGLNCYYPLERYGFHPTTGVNYQPFRVVVLSFELLNGPATVCGPKLSTTLVKDKCVNFNFNGLTGTGVLTTSKKQFLPFQQFGRDISDTTDAVRDPQTLEILDITPCSFGGVSVITPGTNTSNQVAVLYQDVNCTEVPMAIHAEQLTPAWRVYSAGANVFQTRAGCLVGAEHVNNSYECDIPVGAGICASYHSMSSFRSVNQRSIIAYTMSLGAENSVAYSNNSIACPTNFTISVTTEILPVSMTKTSVDCTMYICGDSIECSNLLLQYGSFCTQLNRALTGIAVEQDKNTQEVFAQVKQIYKTPPIKDFGGFNFSQILPDPSKPSKRSFIEDLLFNKVTLADAGFIKQYGDCLGDIAARDLICAQKFNGLTVLPPLLTDEMIAQYTSALLAGTITSGWTFGAGAALQIPFAMQMAYRFNGIGVTQNVLYENQKLIANQFNSAIGKIQDSLSSTASALGKLQDVVNQNAQALNTLVKQLSSNFGAISSVLNDILSRLDKVEAEVQIDRLITGRLQSLQTYVTQQLIRAAEIRASANLAATKMSECVLGQSKRVDFCGKGYHLMSFPQSAPHGVVFLHVTYVPAQEKNFTTAPAICHEGKAHFPREGVFVSNGTHWFITQRNFCEPQIITTDNTFVSGSCDVVIGIVNNTVYDPLQPELDSGGGSGGGQIYEGKLTAEGLRFGIVASRFNHALVDRLVEGAIDAIVRHGGREEDITLVRVPGSWEIPVAAGELARKEDIDAVIAIGVLIRGATPHFDYIASEVSKGLADLSLELRKPITFGVITADTLEQAIERAGTKHGNKGWEAALSAIEMANLFKSLR

SEQ ID NO: 8111 - protein, 1301 aa, Artificial Sequence
  SARS-CoV-2/pangolin/Guangxi/P5E/2017__EPI_ISL_410541 spike protein (1-1141)(I708C_Y1104C) LumSynth construct
MFVFLFVLPLVSSQCVNLTTRTGIPPGYTNSSTRGVYYPDKVFRSSILHLTQDLFLPFFSNVTWFNTITYQGGSKKFDNPVLPFNDGVYFASTEKSNIIRGWIFGTTLDARTQSLLIVNNATNVVIKVCEFQFCTDPFLGVYYHNNNKTWVENEFRVYSSANNCTFEYISQPFLMDLEGKQGNFKNLREFVFKNVDGYFKIYSKHTPIDLVRDLPRGFAALEPLVDLPIGINITRFQTLLALHRSYLTPGKLESGWTTGAAAYYVGYLQQRTFLLSYNQNGTITDAVDCSLDPLSETKCTLKSLTVEKGIYQTSNFRVQPTISIVRFPNITNLCPFGEVFNASKFASVYAWNRKRISNCVADYSVLYNSTSFSTFKCYGVSPTKLNDLCFTNVYADSFVVKGDEVRQIAPGQTGVIADYNYKLPDDFTGCVIAWNSVKQDALTGDNYGYLYRLFRKSKLKPFERDISTEIYQAGSTPCNGQVGLNCYYPLERYGFHPTTGVNYQPFRVVVLSFELLNGPATVCGPKLSTTLVKDKCVNFNFNGLTGTGVLTTSKKQFLPFQQFGRDISDTTDAVRDPQTLEILDITPCSFGGVSVITPGTNTSNQVAVLYQDVNCTEVPMAIHAEQLTPAWRVYSAGANVFQTRAGCLVGAEHVNNSYECDIPVGAGICASYHSMSSFRSVNQRSIIAYTMSLGAENSVAYSNNSIACPTNFTISVTTEILPVSMTKTSVDCTMYICGDSIECSNLLLQYGSFCTQLNRALTGIAVEQDKNTQEVFAQVKQIYKTPPIKDFGGFNFSQILPDPSKPSKRSFIEDLLFNKVTLADAGFIKQYGDCLGDIAARDLICAQKFNGLTVLPPLLTDEMIAQYTSALLAGTITSGWTFGAGAALQIPFAMQMAYRFNGIGVTQNVLYENQKLIANQFNSAIGKIQDSLSSTASALGKLQDVVNQNAQALNTLVKQLSSNFGAISSVLNDILSRLDKVEAEVQIDRLITGRLQSLQTYVTQQLIRAAEIRASANLAATKMSECVLGQSKRVDFCGKGYHLMSFPQSAPHGVVFLHVTYVPAQEKNFTTAPAICHEGKAHFPREGVFVSNGTHWFITQRNFCEPQIITTDNTFVSGSCDVVIGIVNNTVYDPLQPELDSGGGSGGGQIYEGKLTAEGLRFGIVASRFNHALVDRLVEGAIDAIVRHGGREEDITLVRVPGSWEIPVAAGELARKEDIDAVIAIGVLIRGATPHFDYIASEVSKGLADLSLELRKPITFGVITADTLEQAIERAGTKHGNKGWEAALSAIEMANLFKSLR

SEQ ID NO: 8112 - protein, 1299 aa, Artificial Sequence
  SARS-CoV-2/pangolin/Guangxi/P1E/2017__EPI_ISL_410539 spike protein (1-1139)(I706C_Y1102C) LumSynth construct
MFVFLFVLPLVSSQCVNLTTRTGIQPGYTNSSTRGVYYPDKVFRSSILHLTQDLFLPFFSNVTWFNTINYQGGFKKFDNPVLPFNDGVYFASTEKSNIIRGWIFGTTLDARTQSLLIVNNATNVVIKVCEFQFCTDPFLGVYYHNNNKTWVENEFRVYSSANNCTFEYISQPFLMDLEGKQGNFKNLREFVFKNVDGYFKIYSKHTPIDLVRDLPRGFAALEPLVDLPIGINITRFQTLLALHRSYLTPGKLESGWTTGAAAYYVGYLQQRTFLLSYNQNGTITDAVDCSLDPLSETKCTLKSLTVEKGIYQTSNFRVQPTISIVRFPNITNLCPFGEVFNASKFASVYAWNRKRISNCVADYSVLYNSTSFSTFKCYGVSPTKLNDLCFTNVYADSFVVKGDEVRQIAPGQTGVIADYNYKLPDDFTGCVIAWNSVKQDALTGGNYLYRLFRKSKLKPFERDISTEIYQAGSTPCNGQVGLNCYYPLERYGFHPTTGVNYQPFRVVVLSFELLNGPATVCGPKLSTTLVKDKCVNFNFNGLTGTGVLTTSKKQFLPFQQFGRDISDTTDAVRDPQTLEILDITPCSFGGVSVITPGTNTSNQVAVLYQDVNCTEVPMAIHAEQLTPAWRVYSAGANVFQTRAGCLVGAEHVNNSYECDIPVGAGICASYHSMSSLRSVNQRSIIAYTMSLGAENSVAYSNNSIACPTNFTISVTTEILPVSMTKTSVDCTMYICGDSIECSNLLLQYGSFCTQLNRALTGIAVEQDKNTQEVFAQVKQIYKTPPIKDFGGFNFSQILPDPSKPSKRSFIEDLLFNKVTLADAGFIKQYGDCLGDIAARDLICAQKFNGLTVLPPLLTDEMIAQYTSALLAGTITSGWTFGAGAALQIPFAMQMAYRFNGIGVTQNVLYENQKLIANQFNSAIGKIQDSLSSTASALGKLQDVVNQNAQALNTLVKQLSSNFGAISSVLNDILSRLDKVEAEVQIDRLITGRLQSLQTYVTQQLIRAAEIRASANLAATKMSECVLGQSKRVDFCGKGYHLMSFPQSAPHGVVFLHVTYVPAQEKNFTTAPAICHEGKAHFPREGVFVSNGTHWFITQRNFCEPQIITTDNTFVSGSCDVVIGIVNNTVYDPLQPELDSGGGSGGGQIYEGKLTAEGLRFGIVASRFNHALVDRLVEGAIDAIVRHGGREEDITLVRVPGSWEIPVAAGELARKEDIDAVIAIGVLIRGATPHFDYIASEVSKGLADLSLELRKPITFGVITADTLEQAIERAGTKHGNKGWEAALSAIEMANLFKSLR

SEQ ID NO: 8113 - protein, 1307 aa, Artificial Sequence
  SARS-CoV-2/Wuhan/WIV05/2019__EPI_ISL_402128 spike protein (1-1147)(P715C_P1069C) LumSynth construct
MFVFLVLLPLVSSQCVNLTTRTQLPPAYTNSFTRGVYYPDKVFRSSVLHSTQDLFLPFFSNVTWFHAIHVSGTNGTKRFDNPVLPFNDGVYFASTEKSNIIRGWIFGTTLDSKTQSLLIVNNATNVVIKVCEFQFCNDPFLGVYYHKNNKSWMESEFRVYSSANNCTFEYVSQPFLMDLEGKQGNFKNLREFVFKNIDGYFKIYSKHTPINLVRDLPQGFSALEPLVDLPIGINITRFQTLLALHRSYLTPGDSSSGWTAGAAAYYVGYLQPRTFLLKYNENGTITDAVDCALDPLSETKCTLKSFTVEKGIYQTSNFRVQPTESIVRFPNITNLCPFGEVFNATRFASVYAWNRKRISNCVADYSVLYNSASFSTFKCYGVSPTKLNDLCFTNVYADSFVIRGDEVRQIAPGQTGKIADYNYKLPDDFTGCVIAWNSNNLDSKVGGNYNYLYRLFRKSNLKPFERDISTEIYQAGSTPCNGVEGFNCYFPLQSYGFQPTNGVGYQPYRVVVLSFELLHAPATVCGPKKSTNLVKNKCVNFNFNGLTGTGVLTESNKKFLPFQQFGRDIADTTDAVRDPQTLEILDITPCSFGGVSVITPGTNTSNQVAVLYQDVNCTEVPVAIHADQLTPTWRVYSTGSNVFQTRAGCLIGAEHVNNSYECDIPIGAGICASYQTQTNSPRRARSVASQSIIAYTMSLGAENSVAYSNNSIAICTNFTISVTTEILPVSMTKTSVDCTMYICGDSTECSNLLLQYGSFCTQLNRALTGIAVEQDKNTQEVFAQVKQIYKTPPIKDFGGFNFSQILPDPSKPSKRSFIEDLLFNKVTLADAGFIKQYGDCLGDIAARDLICAQKFNGLTVLPPLLTDEMIAQYTSALLAGTITSGWTFGAGAALQIPFAMQMAYRFNGIGVTQNVLYENQKLIANQFNSAIGKIQDSLSSTASALGKLQDVVNQNAQALNTLVKQLSSNFGAISSVLNDILSRLDKVEAEVQIDRLITGRLQSLQTYVTQQLIRAAEIRASANLAATKMSECVLGQSKRVDFCGKGYHLMSFPQSAPHGVVFLHVTYVCAQEKNFTTAPAICHDGKAHFPREGVFVSNGTHWFVTQRNFYEPQIITTDNTFVSGNCDVVIGIVNNTVYDPLQPELDSGGGSGGGQIYEGKLTAEGLRFGIVASRFNHALVDRLVEGAIDAIVRHGGREEDITLVRVPGSWEIPVAAGELARKEDIDAVIAIGVLIRGATPHFDYIASEVSKGLADLSLELRKPITFGVITADTLEQAIERAGTKHGNKGWEAALSAIEMANLFKSLR

SEQ ID NO: 8114 - protein, 1303 aa, Artificial Sequence
  SARS-CoV-2/bat/Yunnan/RaTG13/2013__EPI_ISL_402131 spike protein (1-1143)(P711C_P1065C) LumSynth construct
MFVFLVLLPLVSSQCVNLTTRTQLPPAYTNSSTRGVYYPDKVFRSSVLHLTQDLFLPFFSNVTWFHAIHVSGTNGIKRFDNPVLPFNDGVYFASTEKSNIIRGWIFGTTLDSKTQSLLIVNNATNVVIKVCEFQFCNDPFLGVYYHKNNKSWMESEFRVYSSANNCTFEYVSQPFLMDLEGKQGNFKNLREFVFKNIDGYFKIYSKHTPINLVRDLPPGFSALEPLVDLPIGINITRFQTLLALHRSYLTPGDSSSGWTAGAAAYYVGYLQPRTFLLKYNENGTITDAVDCALDPLSETKCTLKSFTVEKGIYQTSNFRVQPTDSIVRFPNITNLCPFGEVFNATTFASVYAWNRKRISNCVADYSVLYNSTSFSTFKCYGVSPTKLNDLCFTNVYADSFVITGDEVRQIAPGQTGKIADYNYKLPDDFTGCVIAWNSKHIDAKEGGNFNYLYRLFRKANLKPFERDISTEIYQAGSKPCNGQTGLNCYYPLYRYGFYPTDGVGHQPYRVVVLSFELLNAPATVCGPKKSTNLVKNKCVNFNFNGLTGTGVLTESNKKFLPFQQFGRDIADTTDAVRDPQTLEILDITPCSFGGVSVITPGTNASNQVAVLYQDVNCTEVPVAIHADQLTPTWRVYSTGSNVFQTRAGCLIGAEHVNNSYECDIPIGAGICASYQTQTNSRSVASQSIIAYTMSLGAENSVAYSNNSIAICTNFTISVTTEILPVSMTKTSVDCTMYICGDSTECSNLLLQYGSFCTQLNRALTGIAVEQDKNTQEVFAQVKQIYKTPPIKDFGGFNFSQILPDPSKPSKRSFIEDLLFNKVTLADAGFIKQYGDCLGDIAARDLICAQKFNGLTVLPPLLTDEMIAQYTSALLAGTITSGWTFGAGAALQIPFAMQMAYRFNGIGVTQNVLYENQKLIANQFNSAIGKIQDSLSSTASALGKLQDVVNQNAQALNTLVKQLSSNFGAISSVLNDILSRLDKVEAEVQIDRLITGRLQSLQTYVTQQLIRAAEIRASANLAATKMSECVLGQSKRVDFCGKGYHLMSFPQSAPHGVVFLHVTYVCAQEKNFTTAPAICHDGKAHFPREGVFVSNGTHWFVTQRNFYEPQIITTDNTFVSGSCDVVIGIVNNTVYDPLQPELDSGGGSGGGQIYEGKLTAEGLRFGIVASRFNHALVDRLVEGAIDAIVRHGGREEDITLVRVPGSWEIPVAAGELARKEDIDAVIAIGVLIRGATPHFDYIASEVSKGLADLSLELRKPITFGVITADTLEQAIERAGTKHGNKGWEAALSAIEMANLFKSLR

SEQ ID NO: 8115 - protein, 1307 aa, Artificial Sequence
  SARS-CoV-2/Wuhan/HBCDC-HB-01/2019__EPI_ISL_402132 spike protein (1-1147)(P715C_P1069C) LumSynth construct
MFVFLVLLPLVSSQCVNLTTRTQLPPAYTNSITRGVYYPDKVFRSSVLHSTQDLFLPFFSNVTWFHAIHVSGTNGTKRFDNPVLPFNDGVYFASTEKSNIIRGWIFGTTLDSKTQSLLIVNNATNVVIKVCEFQFCNDPFLGVYYHKNNKSWMESEFRVYSSANNCTFEYVSQPFLMDLEGKQGNFKNLREFVFKNIDGYFKIYSKHTPINLVRDLPQGFSALEPLVDLPIGINITRFQTLLALHRSYLTPGDSSSGWTAGAAAYYVGYLQPRTFLLKYNENGTITDAVDCALDPLSETKCTLKSFTVEKGIYQTSNFRVQPTESIVRFPNITNLCPFGEVFNATRFASVYAWNRKRISNCVADYSVLYNSASFSTFKCYGVSPTKLNDLCFTNVYADSFVIRGDEVRQIAPGQTGKIADYNYKLPDDFTGCVIAWNSNNLDSKVGGNYNYLYRLFRKSNLKPFERDISTEIYQAGSTPCNGVEGFNCYFPLQSYGFQPTNGVGYQPYRVVVLSFELLHAPATVCGPKKSTNLVKNKCVNFNFNGLTGTGVLTESNKKFLPFQQFGRDIADTTDAVRDPQTLEILDITPCSFGGVSVITPGTNTSNQVAVLYQDVNCTEVPVAIHADQLTPTWRVYSTGSNVFQTRAGCLIGAEHVNNSYECDIPIGAGICASYQTQTNSPRRARSVASQSIIAYTMSLGAENSVAYSNNSIAICTNFTISVTTEILPVSMTKTSVDCTMYICGDSTECSNLLLQYGSFCTQLNRALTGIAVEQDKNTQEVFAQVKQIYKTPPIKDFGGFNFSQILPDPSKPSKRSFIEDLLFNKVTLADAGFIKQYGDCLGDIAARDLICAQKFNGLTVLPPLLTDEMIAQYTSALLAGTITSGWTFGAGAALQIPFAMQMAYRFNGIGVTQNVLYENQKLIANQFNSAIGKIQDSLSSTASALGKLQDVVNQNAQALNTLVKQLSSNFGAISSVLNDILSRLDKVEAEVQIDRLITGRLQSLQTYVTQQLIRAAEIRASANLAATKMSECVLGQSKRVDFCGKGYHLMSFPQSAPHGVVFLHVTYVCAQEKNFTTAPAICHDGKAHFPREGVFVSNGTHWFVTQRNFYEPQIITTDNTFVSGNCDVVIGIVNNTVYDPLQPELDSGGGSGGGQIYEGKLTAEGLRFGIVASRFNHALVDRLVEGAIDAIVRHGGREEDITLVRVPGSWEIPVAAGELARKEDIDAVIAIGVLIRGATPHFDYIASEVSKGLADLSLELRKPITFGVITADTLEQAIERAGTKHGNKGWEAALSAIEMANLFKSLR

SEQ ID NO: 8116 - protein, 1307 aa, Artificial Sequence
  SARS-CoV-2/Guangdong/20SF028/2020__EPI_ISL_403936 spike protein (1-1147)(P715C_P1069C) LumSynth construct
MFVFLVLLPLVSSQCVNLTTRTQLPPAYTNSFTRGVYYPDKVFRSSVLYSTQDLFLPFFSNVTWFHAIHVSGTNGTKRFDNPVLPFNDGVYFASTEKSNIIRGWIFGTTLDSKTQSLLIVNNATNVVIKVCEFQFCNDPFLGVYYHKNNKSWMESEFRVYSSANNCTFEYVSQPFLMDLEGKQGNFKNLREFVFKNIDGYFKIYSKHTPINLVRDLPQGFSALEPLVDLPIGINITRFQTLLALHRSYLTPGDSSSGWTAGAAAYYVGYLQPRTFLLKYNENGTITDAVDCALDPLSETKCTLKSFTVEKGIYQTSNFRVQPTESIVRFPNITNLCPFGEVFNATRFASVYAWNRKRISNCVADYSVLYNSASFSTFKCYGVSPTKLNDLCFTNVYADSFVIRGDEVRQIAPGQTGKIADYNYKLPDDFTGCVIAWNSNNLDSKVGGNYNYLYRLFRKSNLKPFERDISTEIYQAGSTPCNGVEGFNCYFPLQSYGFQPTNGVGYQPYRVVVLSFELLHAPATVCGPKKSTNLVKNKCVNFNFNGLTGTGVLTESNKKFLPFQQFGRDIADTTDAVRDPQTLEILDITPCSFGGVSVITPGTNTSNQVAVLYQDVNCTEVPVAIHADQLTPTWRVYSTGSNVFQTRAGCLIGAEHVNNSYECDIPIGAGICASYQTQTNSPRRARSVASQSIIAYTMSLGAENSVAYSNNSIAICTNFTISVTTEILPVSMTKTSVDCTMYICGDSTECSNLLLQYGSFCTQLNRALTGIAVEQDKNTQEVFAQVKQIYKTPPIKDFGGFNFSQILPDPSKPSKRSFIEDLLFNKVTLADAGFIKQYGDCLGDIAARDLICAQKFNGLTVLPPLLTDEMIAQYTSALLAGTITSGWTFGAGAALQIPFAMQMAYRFNGIGVTQNVLYENQKLIANQFNSAIGKIQDSLSSTASALGKLQDVVNQNAQALNTLVKQLSSNFGAISSVLNDILSRLDKVEAEVQIDRLITGRLQSLQTYVTQQLIRAAEIRASANLAATKMSECVLGQSKRVDFCGKGYHLMSFPQSAPHGVVFLHVTYVCAQEKNFTTAPAICHDGKAHFPREGVFVSNGTHWFVTQRNFYEPQIITTDNTFVSGNCDVVIGIVNNTVYDPLQPELDSGGGSGGGQIYEGKLTAEGLRFGIVASRFNHALVDRLVEGAIDAIVRHGGREEDITLVRVPGSWEIPVAAGELARKEDIDAVIAIGVLIRGATPHFDYIASEVSKGLADLSLELRKPITFGVITADTLEQAIERAGTKHGNKGWEAALSAIEMANLFKSLR

SEQ ID NO: 8117 - protein, 1307 aa, Artificial Sequence
  SARS-CoV-2/Shenzhen/SZTH-001/2020__EPI_ISL_406592 spike protein (1-1147)(P715C_P1069C) LumSynth construct
MFVFLVLLPLVSSQCVNLTTRTQLPPAYTNSFTRGVYYPDKVFRSSVLHSTQDLFLPFFSNVTWFHAIHVSGTNGTKRFDNPVLPFNDGVYFASTEKSNIIRGWIFGTTLDSKTQSLLIVNNATNVVIKVCEFQFCNDPFLGVYYHKNNKSWMESEFRVYSSANNCTFEYVSQPFLMDLEGKQGNFKNLREFVFKNIDGYFKIYSKHTPINLVRDLPQGFSALEPLVDLPIGINITRFQTLLALHRSYLTPGDSSSGWTAGAAAYYVGYLQPRTFLLKYNENGTITDAVDCALDPLSETKCTLKSFTVEKGIYQTSNFRVQPTESIVRFPNITNLCPFGEVFNATRFASVYAWNRKRISNCVADYSVLYNSASFSTFKCYGVSPTKLNDLCFTNVYADSFVIRGDEVRQIAPGQTGKIADYNYKLPDDFTGCVIAWNSNNLDSKVGGNYNYLYRLFRKSNLKPFERDISTEIYQAGSTPCNGVEGFNCYFPLQSYGFQPTNGVGYQPYRVVVLSFELLHAPATVCGPKKSTNLVKNKCVNFNFNGLTGTGVLTESNKKFLPFQQFGRDIADTTDAVRDPQTLEILDITPCSFGGVSVITPGTNTSNQVAVLYQDVNCTEVPVAIHADQLTPTWRVYSTGSNVFQTRAGCLIGAEHVNNSYECDIPIGAGICASYQTQTNSPRRARSVASQSIIAYTMSLGAENSVAYSNNSIAICTNFTISVTTEILPVSMTKTSVDCTMYICGDSTECSNLLLQYGSFCTQLNRALTGIAVEQDKNTQEVFAQVKQIYKTPPIKDFGGFNFSQILPDPSKPSKRSFIEDLLFNKVTLADAGFIKQYGDCLGDIAARDLICAQKFNGLTVLPPLLTDEMIAQYTSALLAGTITSGWTFGAGAALQIPFAMQMAYRFNGIGVTQNVLYENQKLIANQFNSAIGKIQDSLSSTASALGKLQDVVNQNAQALNTLVKQLSSNFGAISSVLNDILSRLDKVEAEVQIDRLITGRLQSLQTYVTQQLIRAAEIRASANLAATKMSECVLGQSKRVDFCGKGYHLMSFPQSAPHGVVFLHVTYVCAQEKNFTTAPAICHDGKAHFPREGVFVSNGTHWFVTQRNFYEPQIITTDNTFVSGNCDVLIGIVNNTVYDPLQPELDSGGGSGGGQIYEGKLTAEGLRFGIVASRFNHALVDRLVEGAIDAIVRHGGREEDITLVRVPGSWEIPVAAGELARKEDIDAVIAIGVLIRGATPHFDYIASEVSKGLADLSLELRKPITFGVITADTLEQAIERAGTKHGNKGWEAALSAIEMANLFKSLR

SEQ ID NO: 8118 - protein, 1307 aa, Artificial Sequence
  SARS-CoV-2/Shenzhen/SZTH-004/2020__EPI_ISL_406595 spike protein (1-1147)(P715C_P1069C) LumSynth construct
MFVFLVLLPLVSSQCVNLTTRTQLPPAYTNSFTRGVYYPDKVFRSSVLHSTQDLFLPFFSNVTWFHAIHVSGTNGTKRFDNPVLPFNDGVYFASTEKSNIIRGWIFGTTLDSKTQSLLIVNNATNVVIKVCEFQFCNDPFLGVYYHKNNKSWMESEFRVYSSANNCTFEYVSQPFLMDLEGKQGNFKNLREFVFKNIDGYFKIYSKHTPINLVRDLPQGFSALEPLVDLPIGINITRFQTLLALHRSYLTPGDSSSGWTAGAAAYYVGYLQPRTFLLKYNENGTITDAVDCALDPLSETKCTLKSFTVEKGIYQTSNFRVQPTESIVRFPNITNLCPFGEVFNATRFASVYAWDRKRISNCVAYYSVLYNSASFSTFKCYGVSPTKLNDLCFTNVYADSFVIRGDEVRQIAPGQTGKIADYNYKLPDDFTGCVIAWNSNNLDSKVGGNYNYLYRLFRKSNLKPFERDISTEIYQAGSTPCNGVEGFNCYFPLQSYGFQPTNGVGYQPYRVVVLSFELLHAPATVCGPKKSTNLVKNKCVNFNFNGLTGTGVLTESNKKFLPFQQFGRDIADTTDAVRDPQTLEILDITPCSFGGVSVITPGTNTSNQVAVLYQDVNCTEVPVAIHADQLTPTWRVYSTGSNVFQTRAGCLIGAEHVNNSYECDIPIGAGICASYQTQTNSPRRARSVASQSIIAYTMSLGAENSVAYSNNSIAICTNFTISVTTEILPVSMTKTSVDCTMYICGDSTECSNLLLQYGSFCTQLNRALTGIAVEQDKNTQEVFAQVKQIYKTPPIKDFGGFNFSQILPDPSKPSKRSFIEDLLFNKVTLADAGFIKQYGDCLGDIAARDLICAQKFNGLTVLPPLLTDEMIAQYTSALLAGTITSGWTFGAGAALQIPFAMQMAYRFNGIGVTQNVLYENQKLIANQFNSAIGKIQDSLSSTASALGKLQDVVNQNAQALNTLVKQLSSNFGAISSVLNDILSRLDKVEAEVQIDRLITGRLQSLQTYVTQQLIRAAEIRASANLAATKMSECVLGQSKRVDFCGKGYHLMSFPQSAPHGVVFLHVTYVCAQEKNFTTAPAICHDGKAHFPREGVFVSNGTHWFVTQRNFYEPQIITTDNTFVSGNCDVVIGIVNNTVYDPLQPELDSGGGSGGGQIYEGKLTAEGLRFGIVASRFNHALVDRLVEGAIDAIVRHGGREEDITLVRVPGSWEIPVAAGELARKEDIDAVIAIGVLIRGATPHFDYIASEVSKGLADLSLELRKPITFGVITADTLEQAIERAGTKHGNKGWEAALSAIEMANLFKSLR

SEQ ID NO: 8119 - protein, 1307 aa, Artificial Sequence
  SARS-CoV-2/France/IDF0372/2020__EPI_ISL_406596 spike protein (1-1147)(P715C_P1069C) LumSynth construct
MFVFLVLLPLVSSQCVNLTTRTQLPPAYTNSFTRGVYYPDKVFRSSVLHSTQDLFLPFFSNVTWFHAIHVSGTNGTKRFDNPVLPFNDGVYFASTEKSNIIRGWIFGTTLDSKTQSLLIVNNATNVVIKVCEFQFCNDPFLGVYYHKNNKSWMESEFRVYSSANNCTFEYVSQPFLMDLEGKQGNFKNLREFVFKNIDGYFKIYSKHTPINLVRDLPQGFSALEPLVDLPIGINITRFQTLLALHRSYLTPGDSSSGWTAGAAAYYVGYLQPRTFLLKYNENGTITDAVDCALDPLSETKCTLKSFTVEKGIYQTSNFRVQPTESIVRFPNITNLCPFGEVFNATRFASVYAWNRKRISNCVADYSFLYNSASFSTFKCYGVSPTKLNDLCFTNVYADSFVIRGDEVRQIAPGQTGKIADYNYKLPDDFTGCVIAWNSNNLDSKVGGNYNYLYRLFRKSNLKPFERDISTEIYQAGSTPCNGVEGFNCYFPLQSYGFQPTNGVGYQPYRVVVLSFELLHAPATVCGPKKSTNLVKNKCVNFNFNGLTGTGVLTESNKKFLPFQQFGRDIADTTDAVRDPQTLEILDITPCSFGGVSVITPGTNTSNQVAVLYQDVNCTEVPVAIHADQLTPTWRVYSTGSNVFQTRAGCLIGAEHVNNSYECDIPIGAGICASYQTQTNSPRRARSVASQSIIAYTMSLGAENSVAYSNNSIAICTNFTISVTTEILPVSMTKTSVDCTMYICGDSTECSNLLLQYGSFCTQLNRALTGIAVEQDKNTQEVFAQVKQIYKTPPIKDFGGFNFSQILPDPSKPSKRSFIEDLLFNKVTLADAGFIKQYGDCLGDIAARDLICAQKFNGLTVLPPLLTDEMIAQYTSALLAGTITSGWTFGAGAALQIPFAMQMAYRFNGIGVTQNVLYENQKLIANQFNSAIGKIQDSLSSTASALGKLQDVVNQNAQALNTLVKQLSSNFGAISSVLNDILSRLDKVEAEVQIDRLITGRLQSLQTYVTQQLIRAAEIRASANLAATKMSECVLGQSKRVDFCGKGYHLMSFPQSAPHGVVFLHVTYVCAQEKNFTTAPAICHDGKAHFPREGVFVSNGTHWFVTQRNFYEPQIITTDNTFVSGNCDVVIGIVNNTVYDPLQPELDSGGGSGGGQIYEGKLTAEGLRFGIVASRFNHALVDRLVEGAIDAIVRHGGREEDITLVRVPGSWEIPVAAGELARKEDIDAVIAIGVLIRGATPHFDYIASEVSKGLADLSLELRKPITFGVITADTLEQAIERAGTKHGNKGWEAALSAIEMANLFKSLR

SEQ ID NO: 8120 - protein, 1307 aa, Artificial Sequence
  SARS-CoV-2/Australia/VIC01/2020__EPI_ISL_406844 spike protein (1-1147)(P715C_P1069C) LumSynth construct
MFVFLVLLPLVSSQCVNLTTRTQLPPAYTNSFTRGVYYPDKVFRSSVLHSTQDLFLPFFSNVTWFHAIHVSGTNGTKRFDNPVLPFNDGVYFASTEKSNIIRGWIFGTTLDSKTQSLLIVNNATNVVIKVCEFQFCNDPFLGVYYHKNNKSWMESEFRVYSSANNCTFEYVSQPFLMDLEGKQGNFKNLREFVFKNIDGYFKIYSKHTPINLVRDLPQGFSALEPLVDLPIGINITRFQTLLALHRRYLTPGDSSSGWTAGAAAYYVGYLQPRTFLLKYNENGTITDAVDCALDPLSETKCTLKSFTVEKGIYQTSNFRVQPTESIVRFPNITNLCPFGEVFNATRFASVYAWNRKRISNCVADYSVLYNSASFSTFKCYGVSPTKLNDLCFTNVYADSFVIRGDEVRQIAPGQTGKIADYNYKLPDDFTGCVIAWNSNNLDSKVGGNYNYLYRLFRKSNLKPFERDISTEIYQAGSTPCNGVEGFNCYFPLQSYGFQPTNGVGYQPYRVVVLSFELLHAPATVCGPKKSTNLVKNKCVNFNFNGLTGTGVLTESNKKFLPFQQFGRDIADTTDAVRDPQTLEILDITPCSFGGVSVITPGTNTSNQVAVLYQDVNCTEVPVAIHADQLTPTWRVYSTGSNVFQTRAGCLIGAEHVNNSYECDIPIGAGICASYQTQTNSPRRARSVASQSIIAYTMSLGAENSVAYSNNSIAICTNFTISVTTEILPVSMTKTSVDCTMYICGDSTECSNLLLQYGSFCTQLNRALTGIAVEQDKNTQEVFAQVKQIYKTPPIKDFGGFNFSQILPDPSKPSKRSFIEDLLFNKVTLADAGFIKQYGDCLGDIAARDLICAQKFNGLTVLPPLLTDEMIAQYTSALLAGTITSGWTFGAGAALQIPFAMQMAYRFNGIGVTQNVLYENQKLIANQFNSAIGKIQDSLSSTASALGKLQDVVNQNAQALNTLVKQLSSNFGAISSVLNDILSRLDKVEAEVQIDRLITGRLQSLQTYVTQQLIRAAEIRASANLAATKMSECVLGQSKRVDFCGKGYHLMSFPQSAPHGVVFLHVTYVCAQEKNFTTAPAICHDGKAHFPREGVFVSNGTHWFVTQRNFYEPQIITTDNTFVSGNCDVVIGIVNNTVYDPLQPELDSGGGSGGGQIYEGKLTAEGLRFGIVASRFNHALVDRLVEGAIDAIVRHGGREEDITLVRVPGSWEIPVAAGELARKEDIDAVIAIGVLIRGATPHFDYIASEVSKGLADLSLELRKPITFGVITADTLEQAIERAGTKHGNKGWEAALSAIEMANLFKSLR

SEQ ID NO: 8121 - protein, 1307 aa, Artificial Sequence
  SARS-CoV-2/Germany/BavPat1/2020__EPI_ISL_406862 spike protein (1-1147)(P715C_P1069C) LumSynth construct
MFVFLVLLPLVSSQCVNLTTRTQLPPAYTNSFTRGVYYPDKVFRSSVLHSTQDLFLPFFSNVTWFHAIHVSGTNGTKRFDNPVLPFNDGVYFASTEKSNIIRGWIFGTTLDSKTQSLLIVNNATNVVIKVCEFQFCNDPFLGVYYHKNNKSWMESEFRVYSSANNCTFEYVSQPFLMDLEGKQGNFKNLREFVFKNIDGYFKIYSKHTPINLVRDLPQGFSALEPLVDLPIGINITRFQTLLALHRSYLTPGDSSSGWTAGAAAYYVGYLQPRTFLLKYNENGTITDAVDCALDPLSETKCTLKSFTVEKGIYQTSNFRVQPTESIVRFPNITNLCPFGEVFNATRFASVYAWNRKRISNCVADYSVLYNSASFSTFKCYGVSPTKLNDLCFTNVYADSFVIRGDEVRQIAPGQTGKIADYNYKLPDDFTGCVIAWNSNNLDSKVGGNYNYLYRLFRKSNLKPFERDISTEIYQAGSTPCNGVEGFNCYFPLQSYGFQPTNGVGYQPYRVVVLSFELLHAPATVCGPKKSTNLVKNKCVNFNFNGLTGTGVLTESNKKFLPFQQFGRDIADTTDAVRDPQTLEILDITPCSFGGVSVITPGTNTSNQVAVLYQGVNCTEVPVAIHADQLTPTWRVYSTGSNVFQTRAGCLIGAEHVNNSYECDIPIGAGICASYQTQTNSPRRARSVASQSIIAYTMSLGAENSVAYSNNSIAICTNFTISVTTEILPVSMTKTSVDCTMYICGDSTECSNLLLQYGSFCTQLNRALTGIAVEQDKNTQEVFAQVKQIYKTPPIKDFGGFNFSQILPDPSKPSKRSFIEDLLFNKVTLADAGFIKQYGDCLGDIAARDLICAQKFNGLTVLPPLLTDEMIAQYTSALLAGTITSGWTFGAGAALQIPFAMQMAYRFNGIGVTQNVLYENQKLIANQFNSAIGKIQDSLSSTASALGKLQDVVNQNAQALNTLVKQLSSNFGAISSVLNDILSRLDKVEAEVQIDRLITGRLQSLQTYVTQQLIRAAEIRASANLAATKMSECVLGQSKRVDFCGKGYHLMSFPQSAPHGVVFLHVTYVCAQEKNFTTAPAICHDGKAHFPREGVFVSNGTHWFVTQRNFYEPQIITTDNTFVSGNCDVVIGIVNNTVYDPLQPELDSGGGSGGGQIYEGKLTAEGLRFGIVASRFNHALVDRLVEGAIDAIVRHGGREEDITLVRVPGSWEIPVAAGELARKEDIDAVIAIGVLIRGATPHFDYIASEVSKGLADLSLELRKPITFGVITADTLEQAIERAGTKHGNKGWEAALSAIEMANLFKSLR

SEQ ID NO: 8122 - protein, 1307 aa, Artificial Sequence
  SARS-CoV-2/Wuhan/HBCDC-HB-02/2020__EPI_ISL_412978 spike protein (1-1147)(P715C_P1069C) LumSynth construct
MFVFLVLLPLVSSQCVNLTTRTQLPPAYTNSFTRGVYYPDKVFRSSVLHSTQDLFLPFFSNVTWFHAIHVSGTNGTKRFDNPVLPFNDGVYFASTEKSNIIRGWIFGTTLDSKTQSLLIVNNATNVVIKVCEFQFCNDPFLGVYYHKNNKSWMESEFRVYSSANNCTFEYVSQPFLMDLEGKQGNFKNLREFVFKNIDGYFKIYSKHTPINLVRDLPQGFSALEPLVDLPIGINITRFQTLLALHRSYLTPGDSSSGWTAGAAAYYVGYLQPRTFLLKYNENGTITDAVDCALDPLSETKCTLKSFTVEKGIYQTSNFRVQPTESIVRFPNITNLCPFGEVFNATRFASVYAWNRKRISNCVADYSVLYNSASFSTFKCYGVSPTKLNDLCFTNVYADSFVIRGDEVRQIAPGQTGKIADYNYKLPDDFTGCVIAWNSNNLDSKVGGNYNYLYRLFRKSNLKPFERDISTEIYQAGSTPCNGVEGFNCYFPLQSYGFQPTNGVGYQPYRVVVLSFELLHAPATVCGPKKSTNLVKNKCVNFNFNGLTGTGVLTESNKKFLPFQQFGRDIADTTDAVRDPQTLEILDITPCSFGGVSVITPGTNTSNQVAVLYQDVNCTEVPVAIHADQLTPTWRVYSTGSNVFQTRAGCLIGAEHVNNSYECDIPIGAGICASYQTQTNSPRRARSVASQSIIAYTMSLGAENSVAYSNNSIAICTNFTISVTTEILPVSMTKTSVDCTMYICGDSTECSNFLLQYGSFCTQLNRALTGIAVEQDKNTQEVFAQVKQIYKTPPIKDFGGFNFSQILPDPSKPSKRSFIEDLLFNKVTLADAGFIKQYGDCLGDIAARDLICAQKFNGLTVLPPLLTDEMIAQYTSALLAGTITSGWTFGAGAALQIPFAMQMAYRFNGIGVTQNVLYENQKLIANQFNSAIGKIQDSLSSTASALGKLQDVVNQNAQALNTLVKQLSSNFGAISSVLNDILSRLDKVEAEVQIDRLITGRLQSLQTYVTQQLIRAAEIRASANLAATKMSECVLGQSKRVDFCGKGYHLMSFPQSAPHGVVFLHVTYVCAQEKNFTTAPAICHDGKAHFPREGVFVSNGTHWFVTQRNFYEPQIITTDNTFVSGNCDVVIGIVNNTVYDPLQPELDSGGGSGGGQIYEGKLTAEGLRFGIVASRFNHALVDRLVEGAIDAIVRHGGREEDITLVRVPGSWEIPVAAGELARKEDIDAVIAIGVLIRGATPHFDYIASEVSKGLADLSLELRKPITFGVITADTLEQAIERAGTKHGNKGWEAALSAIEMANLFKSLR

SEQ ID NO: 8123 - protein, 1307 aa, Artificial Sequence
  SARS-CoV-2/Australia/QLD02/2020__EPI_ISL_407896 spike protein (1-1147)(P715C_P1069C) LumSynth construct
MFVFLVLLPLVSSQCVNLTTRTQLPPAYTNSFTRGVYYPDKVFRSSVLHSTQDLFLPFFSNVTWFHAIHVSGTNGTKRFDNPVLPFNDGVYFASTEKSNIIRGWIFGTTLDSKTQSLLIVNNATNVVIKVCEFQFCNDPFLGVYYHKNNKSWMESEFRVYSSANNCTFEYVSQPFLMDLEGKQGNFKNLREFVFKNIDGYFKIYSKHTPINLVRDLPQGFSALEPLVDLPIGINITRFQTLLALHRSYLTPGDSSSGWTAGAAAYYVGYLQPRTFLLKYNENGTITDAVDCALDPLSETKCTLKSFTVEKGIYQTSNFRVQPTESIVRFPNITNLCPFGEVFNATRFASVYAWNRKRISNCVADYSVLYNSASFSTFKCYGVSPTKLNDLCFTNVYADSFVIRGDEVRQIAPGQTGKIADYNYKLPDDFTGCVIAWNSNNLDSKVGGNYNYLYRLFRKSNLKPFERDISTEIYQAGSTPCNGVEGFNCYFPLQSYGFQPTNGVGYQPYRVVVLSFELLHAPATVCGPKKSTNLVKNKCVNFNFNGLTGTGVLTESNKKFLPFQQFGRDIADTTDAVRDPQTLEILDITPCSFGGVSVITPGTNTSNQVAVLYQDVNCTEVPVAIHADQLTPTWRVYSTGSNVFQTRAGCLIGAEHVNNSYECDIPIGAGICASYQTQTNSPRRARSVASQSIIAYTMSLGAENSVAYSNNSIAICTNFTISVTTEILPVSMTKTSVDCTMYICGDSTECSNLLLQYGSFCTQLNRALTGIAVEQDKNTQEVFAQVKQIYKTPPIKDFGGFNFSQILPDPSKPSKRSFIEDLLFNKVTLADAGFIKQYGDCLGDIAARDLICAQKFNGLTVLPPLLTDEMIAQYTSALLAGTITSGWTFGAGAALQIPFAMQMAYRFNGIGVTQNVLYENQKLIANQFNSAIGKIQDSLSSTASALGKLQDVVNQNAQALNTLVKQLSSNFGAISSVLNDILSRLDKVEAEVQIDRLITGRLQSLQTYVTQQLIRAAEIRASANLAATKMSECVLGQSKRVDFCGKGYHLMSFPQSAPHGVVFLHVTYVCAQEKNFTTAPAICHDGKAHFPREGVFVSNGTHWFVTQRNFYEPQIITTDNTFVSGNCDVVIGIVNNTVYDPLQLELDSGGGSGGGQIYEGKLTAEGLRFGIVASRFNHALVDRLVEGAIDAIVRHGGREEDITLVRVPGSWEIPVAAGELARKEDIDAVIAIGVLIRGATPHFDYIASEVSKGLADLSLELRKPITFGVITADTLEQAIERAGTKHGNKGWEAALSAIEMANLFKSLR

SEQ ID NO: 8124 - protein, 1307 aa, Artificial Sequence
  SARS-CoV-2/India/1-31/2020__EPI_ISL_413523 spike protein (1-1147)(P715C_P1069C) LumSynth construct
MFVFLVLLPLVSSQCVNLTTRTQLPPAYTNSFTRGVYYPDKVFRSSVLHSTQDLFLPFFSNVTWFHAIHVSGTNGTKRFDNPVLPFNDGVYFASTEKSNIIRGWIFGTTLDSKTQSLLIVNNATNVVIKVCEFQFCNDPFLGVYYHKNNKSWMESEFRVYSSANNCTFEYVSQPFLMDLEGKQGNFKNLREFVFKNIDGYFKIYSKHTPINLVRDLPQGFSALEPLVDLPIGINITRFQTLLALHRSYLTPGDSSSGWTAGAAAYYVGYLQPRTFLLKYNENGTITDAVDCALDPLSETKCTLKSFTVEKGIYQTSNFRVQPTESIVRFPNITNLCPFGEVFNATRFASVYAWNRKRISNCVADYSVLYNSASFSTFKCYGVSPTKLNDLCFTNVYADSFVIRGDEVRQIAPGQTGKIADYNYKLPDDFTGCVIAWNSNNLDSKVGGNYNYLYRLFRKSNLKPFERDISTEIYQAGSTPCNGVEGFNCYFPLQSYGFQPTNGVGYQPYRVVVLSFELLHAPATVCGPKKSTNLVKNKCVNFNFNGLTGTGVLTESNKKFLPFQQFGRDIADTTDAVRDPQTLEILDITPCSFGGVSVITPGTNTSNQVAVLYQDVNCTEVPVAIHADQLTPTWRVYSTGSNVFQTRAGCLIGAEHVNNSYECDIPIGAGICASYQTQTNSPRRARSVASQSIIAYTMSLGAENSVAYSNNSIAICTNFTISVTTEILPVSMTKTSVDCTMYICGDSTECSNLLLQYGSFCTQLNRALTGIAVEQDKNTQEVFAQVKQIYKTPPIKDFGGFNFSQILPDPSKPSKRSFIEDLLFNKVTLADAGFIKQYGDCLGDIAARDLICAQKFNGLTVLPPLLTDEMIAQYTSALLAGTITSGWTFGAGAALQIPFAMQMAYRFNGIGVTQNVLYENQKLIANQFNSVIGKIQDSLSSTASALGKLQDVVNQNAQALNTLVKQLSSNFGAISSVLNDILSRLDKVEAEVQIDRLITGRLQSLQTYVTQQLIRAAEIRASANLAATKMSECVLGQSKRVDFCGKGYHLMSFPQSAPHGVVFLHVTYVCAQEKNFTTAPAICHDGKAHFPREGVFVSNGTHWFVTQRNFYEPQIITTDNTFVSGNCDVVIGIVNNTVYDPLQPELDSGGGSGGGQIYEGKLTAEGLRFGIVASRFNHALVDRLVEGAIDAIVRHGGREEDITLVRVPGSWEIPVAAGELARKEDIDAVIAIGVLIRGATPHFDYIASEVSKGLADLSLELRKPITFGVITADTLEQAIERAGTKHGNKGWEAALSAIEMANLFKSLR

SEQ ID NO: 8125 - protein, 1307 aa, Artificial Sequence
  SARS-CoV-2/Guangdong/GD2020087-P0008/2020__EPI_ISL_413863 spike protein (1-1147)(P715C_P1069C) LumSynth construct
MFVFLVLLPLVSSQCVNLTTRTQLPPAYTNSFTRGVYYPDKVFRSSVLHSTQDLFLPFFSNVTWFHAIHVSGTNGTKRFDNPVLPFNDGVYFASTEKSNIIRGWIFGTTLDSKTQSLLIVNNATNVVIKVCEFQFCNDPFLGVYYHKNNKSWMESEFRVYSSANNCTFEYVSQPFLMDLEGKQGNFKNLREFVFKNIDGYFKIYSKHTPINLVRDLPQGFSALEPLVDLPIGINITRFQTLLALHRSYLTPGDSSSGWTAGAAAYYVGYLQPRTFLLKYNENGTITDAVDCALDPLSETKCTLKSFTVEKGIYQTSNFRVQPTESIVRFPNITNLCPFGEVFNATRFASVYAWNRKRISNCVADYSVLYNSASFSTFKCYGVSPTKLNDLCFTNVYADSFVIRGDEVREIAPGQTGKIADYNYKLPDDFTGCVIAWNSNNLDSKVGGNYNYLYRLFRKSNLKPFERDISTEIYQAGSTPCNGVEGFNCYFPLQSYGFQPTNGVGYQPYRVVVLSFELLHAPATVCGPKKSTNLVKNKCVNFNFNGLTGTGVLTESNKKFLPFQQFGRDIADTTDAVRDPQTLEILDITPCSFGGVSVITPGTNTSNQVAVLYQDVNCTEVPVAIHADQLTPTWRVYSTGSNVFQTRAGCLIGAEHVNNSYECDIPIGAGICASYQTQTNSPRRARSVASQSIIAYTMSLGAENSVAYSNNSIAICTNFTISVTTEILPVSMTKTSVDCTMYICGDSTECSNLLLQYGSFCTQLNRALTGIAVEQDKNTQEVFAQVKQIYKTPPIKDFGGFNFSQILPDPSKPSKRSFIEDLLFNKVTLADAGFIKQYGDCLGDIAARDLICAQKFNGLTVLPPLLTDEMIAQYTSALLAGTITSGWTFGAGAALQIPFAMQMAYRFNGIGVTQNVLYENQKLIANQFNSAIGKIQDSLSSTASALGKLQDVVNQNAQALNTLVKQLSSNFGAISSVLNDILSRLDKVEAEVQIDRLITGRLQSLQTYVTQQLIRAAEIRASANLAATKMSECVLGQSKRVDFCGKGYHLMSFPQSAPHGVVFLHVTYVCAQEKNFTTAPAICHDGKAHFPREGVFVSNGTHWFVTQRNFYEPQIITTDNTFVSGNCDVVIGIVNNTVYDPLQPELDSGGGSGGGQIYEGKLTAEGLRFGIVASRFNHALVDRLVEGAIDAIVRHGGREEDITLVRVPGSWEIPVAAGELARKEDIDAVIAIGVLIRGATPHFDYIASEVSKGLADLSLELRKPITFGVITADTLEQAIERAGTKHGNKGWEAALSAIEMANLFKSLR

SEQ ID NO: 8126 - protein, 1307 aa, Artificial Sequence
  SARS-CoV-2/Sweden/01/2020__EPI_ISL_411951 spike protein (1-1147)(P715C_P1069C) LumSynth construct
MFVFLVLLPLVSSQCVNLTTRTQLPPAYTNSFTRGVYYPDKVFRSSVLHSTQDLFLPFFSNVTWFHAIHVSGTNGTKRFDNPVLPFNDGVYFASTEKSNIIRGWIFGTTLDSKTQSLLIVNNATNVVIKVCEFQFCNDPFLGVYYHKNNKSWMESEFRVYSSANNCTFEYVSQPFLMDLEGKQGNFKNLREFVFKNIDGYFKIYSKHTPINLVRDLPQGFSALEPLVDLPIGINITRFQTLLALHRSYLTPGDSSSGWTAGAAAYYVGYLQPRTFLLKYNENGTITDAVDCALDPLSETKCTLKSFTVEKGIYQTSNFRVQPTESIVRFPNITNLCPFGEVFNATRFASVYAWNRKRISNCVADYSVLYNSASFSTFKCYGVSPTKLNDLCFTNVYADSFVIRGDEVRQIAPGQTGKIADYNYKLPDDFTGCVIAWNSNNLDSKVGGNYNYLYRLFRKSNLKPFERDISTEIYQAGSTPCNGVEGFNCYFPLQSYGFQPTNGVGYQPYRVVVLSFELLHAPATVCGPKKSTNLVKNKCVNFNFNGLTGTGVLTESNKKFLPFQQFGRDIADTTDAVRDPQTLEILDITPCSFGGVSVITPGTNTSNQVAVLYQDVNCTEVPVAIHADQLTPTWRVYSTGSNVFQTRAGCLIGAEHVNNSYECDIPIGAGICASYQTQTNSPRRARSVASQSIIAYTMSLGAENSVAYSNNSIAICTNFTISVTTEILPVSMTKTSVDCTMYICGDSTECSNLLLQYGSFCTQLNRALTGIAVEQDKNTQEVFAQVKQIYKTPPIKDCGGFNFSQILPDPSKPSKRSFIEDLLFNKVTLADAGFIKQYGDCLGDIAARDLICAQKFNGLTVLPPLLTDEMIAQYTSALLAGTITSGWTFGAGAALQIPFAMQMAYRFNGIGVTQNVLYENQKLIANQFNSAIGKIQDSLSSTASALGKLQDVVNQNAQALNTLVKQLSSNFGAISSVLNDILSRLDKVEAEVQIDRLITGRLQSLQTYVTQQLIRAAEIRASANLAATKMSECVLGQSKRVDFCGKGYHLMSFPQSAPHGVVFLHVTYVCAQEKNFTTAPAICHDGKAHFPREGVFVSNGTHWFVTQRNFYEPQIITTDNTFVSGNCDVVIGIVNNTVYDPLQPELDSGGGSGGGQIYEGKLTAEGLRFGIVASRFNHALVDRLVEGAIDAIVRHGGREEDITLVRVPGSWEIPVAAGELARKEDIDAVIAIGVLIRGATPHFDYIASEVSKGLADLSLELRKPITFGVITADTLEQAIERAGTKHGNKGWEAALSAIEMANLFKSLR

SEQ ID NO: 8127 - protein, 1307 aa, Artificial Sequence
  SARS-CoV-2/Tianmen/HBCDC-HB-07/2020__EPI_ISL_412983 spike protein (1-1147)(P715C_P1069C) LumSynth construct
MFVFLVLLPLVSSQCVNLTTRTQLPPAYTNSFTRGVYYPDKVFRSSVLHSTQDLFLPFFSNVTWFHAIHVSGTNGTKRFDNPVLPFNDGVYFASTEKSNIIRGWIFGTTLDSKTQSLLIVNNATNVVIKVCEFQFCNDPFLGVYYHKNNKSWMESEFRVYSSANNCTFEYVSQPFLMDLEGKQGNFKNLREFVFKNIDGYFKIYSKHTPINLVRDLPQGFSALEPLVDLPIGINITRFQTLLALHRSYLTPGDSSSGWTAGAAAYYVGYLQPRTFLLKYNENGTITDAVDCALDPLSETKCTLKSFTVEKGIYQTSNFRVQPTESIVRFPNITNLCPFGEVFNATRFASVYAWNRKRISNCVADYSVLYNSASFSTFKCYGVSPTKLNDLCFTNVYADSFVIRGDEVRQIAPGQTGKIADYNYKLPDDFTGCVIAWNSNNLDSKVGGNYNYLYRLFRKSNLKPFERDISTEIYQAGSTPCNGVEGFNCYFPLQSYGFQPTNGVGYQPYRVVVLSFELLHAPATVCGPKKSTNLVKNKCVNFNFNGLTGTGVLTESNKKFLPFQQFGRDIADTTDAVRDPQTLEILDITPCSFGGVSVITPGTNTSNQVAVLYQDLNCTEVPVAIHADQLTPTWRVYSTGSNVFQTRAGCLIGAEHVNNSYECDIPIGAGICASYQTQTNSPRRARSVASQSIIAYTMSLGAENSVAYSNNSIAICTNFTISVTTEILPVSMTKTSVDCTMYICGDSTECSNLLLQYGSFCTQLNRALTGIAVEQDKNTQEVFAQVKQIYKTPPIKDFGGFNFSQILPDPSKPSKRSFIEDLLFNKVTLADAGFIKQYGDCLGDIAARDLICAQKFNGLTVLPPLLTDEMIAQYTSALLAGTITSGWTFGAGAALQIPFAMQMAYRFNGIGVTQNVLYENQKLIANQFNSAIGKIQDSLSSTASALGKLQDVVNQNAQALNTLVKQLSSNFGAISSVLNDILSRLDKVEAEVQIDRLITGRLQSLQTYVTQQLIRAAEIRASANLAATKMSECVLGQSKRVDFCGKGYHLMSFPQSAPHGVVFLHVTYVCAQEKNFTTAPAICHDGKAHFPREGVFVSNGTHWFVTQRNFYEPQIITTDNTFVSGNCDVVIGIVNNTVYDPLQPELDSGGGSGGGQIYEGKLTAEGLRFGIVASRFNHALVDRLVEGAIDAIVRHGGREEDITLVRVPGSWEIPVAAGELARKEDIDAVIAIGVLIRGATPHFDYIASEVSKGLADLSLELRKPITFGVITADTLEQAIERAGTKHGNKGWEAALSAIEMANLFKSLR

SEQ ID NO: 8128 - protein, 1307 aa, Artificial Sequence
  SARS-CoV-2/Hong Kong/case42_VM20002493/2020__EPI_ISL_414527 spike protein (1-1147)(P715C_P1069C) LumSynth construct
MFVFLVLLPLVSSQCVNLTTRTQLPPAYTNSFTRGVYYPDKVFRSSVLHSTQDLFLPFFSNVTWFHAIHVSGTNGTKRFDNPVLPFNDGVYFASTEKSNIIRGWIFGTTLDSKTQSLLIVNNATNVVIKVCEFQFCNDPFLGVYYHKNNKSWMESEFRVYSSANNCTFEYVSQPFLMDLEGKQGNFKNLREFVFKNIDGYFKIYSKHTPINLVRDLPQGFSALEPLVDLPIGINITRFQTLLALHRSYLTPGDSSSGWTAGAAAYYVGYLQPRTFLLKYNENGTITDAVDCALDPLSETKCTLKSFTVEKGIYQTSNFRVQPTESIVRFPNITNLCPFGEVFNATRFASVYAWNRKRISNCVADYSVLYNSASFSTFKCYGVSPTKLNDLCFTNVYADSFVIRGDEVRQIAPGQTGKIADYNYKLPDDFTGCVIAWNSNNLDSKVGGNYNYLYRLFRKSNLKPFERDISTEIYQAGSTPCNGVEGFNCYFPLQSYGFQPTNGVGYQPYRVVVLSFELLHAPATVCGPKKSTNLVKNKCVNFNFNGLTGTGVLTESNKKFLPFQQFGRDIADTTDAVRDPQTLEILDITPCSFGGVSVITPGTNTSNQVAVLYQDVNCTEVPVAIHADQLTPTWRVYSTGSNVFQTRAGCLIGAEHVNNSYECDIPIGAGICASYQTQTNSPRRARSVASQSIIAYTMSLGAENSVAYSNNSIAICTNFAISVTTEILPVSMTKTSVDCTMYICGDSTECSNLLLQYGSFCTQLNRALTGIAVEQDKNTQEVFAQVKQIYKTPPIKDFGGFNFSQILPDPSKPSKRSFIEDLLFNKVTLADAGFIKQYGDCLGDIAARDLICAQKFNGLTVLPPLLTDEMIAQYTSALLAGTITSGWTFGAGAALQIPFAMQMAYRFNGIGVTQNVLYENQKLIANQFNSAIGKIQDSLSSTASALGKLQDVVNQNAQALNTLVKQLSSNFGAISSVLNDILSRLDKVEAEVQIDRLITGRLQSLQTYVTQQLIRAAEIRASANLAATKMSECVLGQSKRVDFCGKGYHLMSFPQSAPHGVVFLHVTYVCAQEKNFTTAPAICHDGKAHFPREGVFVSNGTHWFVTQRNFYEPQIITTDNTFVSGNCDVVIGIVNNTVYDPLQPELDSGGGSGGGQIYEGKLTAEGLRFGIVASRFNHALVDRLVEGAIDAIVRHGGREEDITLVRVPGSWEIPVAAGELARKEDIDAVIAIGVLIRGATPHFDYIASEVSKGLADLSLELRKPITFGVITADTLEQAIERAGTKHGNKGWEAALSAIEMANLFKSLR

SEQ ID NO: 8129 - protein, 1307 aa, Artificial Sequence
  SARS-CoV-2/USA/CruiseA-23/2020__EPI_ISL_414482 spike protein (1-1147)(P715C_P1069C) LumSynth construct
MFVFLVLLPLVSSQCVNLTTRTQLPPAYTNSFTRGVYYPDKVFRSSVLHSTQDLFLPFFSNVTWFHAIHVSGTNGTKRFDNPVLPFNDGVYFASTEKSNIIRGWIFGTTLDSKTQSLLIVNNATNVVIKVCEFQFCNDPFLGVYYHKNNKSWMESEFRVYSSANNCTFEYVSQPFLMDLEVKQGNFKNLREFVFKNIDGYFKIYSKHTPINLVRDLPQGFSALEPLVDLPIGINITRFQTLLALHRSYLTPGDSSSGWTAGAAAYYVGYLQPRTFLLKYNENGTITDAVDCALDPLSETKCTLKSFTVEKGIYQTSNFRVQPTESIVRFPNITNLCPFGEVFNATRFASVYAWNRKRISNCVADYSVLYNSASFSTFKCYGVSPTKLNDLCFTNVYADSFVIRGDEVRQIAPGQTGKIADYNYKLPDDFTGCVIAWNSNNLDSKVGGNYNYLYRLFRKSNLKPFERDISTEIYQAGSTPCNGVEGFNCYFPLQSYGFQPTNGVGYQPYRVVVLSFELLHAPATVCGPKKSTNLVKNKCVNFNFNGLTGTGVLTESNKKFLPFQQFGRDIADTTDAVRDPQTLEILDITPCSFGGVSVITPGTNTSNQVAVLYQDVNCTEVPVAIHADQLTPTWRVYSTGSNVFQTRAGCLIGAEHVNNSYECDIPIGAGICASYQTQTNSPRRARSVASQSIIAYTMSLGAENSVAYSNNSIAICTNFTISVTTEILPVSMTKTSVDCTMYICGDSTECSNLLLQYGSFCTQLNRALTGIAVEQDKNTQEVFAQVKQIYKTPPIKDFGGFNFSQILPDPSKPSKRSFIEDLLFNKVTLADAGFIKQYGDCLGDIAARDLICAQKFNGLTVLPPLLTDEMIAQYTSALLAGTITSGWTFGAGAALQIPFAMQMAYRFNGIGVTQNVLYENQKLIANQFNSAIGKIQDSLSSTASALGKLQDVVNQNAQALNTLVKQLSSNFGAISSVLNDILSRLDKVEAEVQIDRLITGRLQSLQTYVTQQLIRAAEIRASANLAATKMSECVLGQSKRVDFCGKGYHLMSFPQSAPHGVVFLHVTYVCAQEKNFTTAPAICHDGKAHFPREGVFVSNGTHWFVTQRNFYEPQIITTDNTFVSGNCDVVIGIVNNTVYDPLQPELDSGGGSGGGQIYEGKLTAEGLRFGIVASRFNHALVDRLVEGAIDAIVRHGGREEDITLVRVPGSWEIPVAAGELARKEDIDAVIAIGVLIRGATPHFDYIASEVSKGLADLSLELRKPITFGVITADTLEQAIERAGTKHGNKGWEAALSAIEMANLFKSLR

SEQ ID NO: 8130 - protein, 1307 aa, Artificial Sequence
  SARS-CoV-2/Hong Kong/case85_VM20002868/2020__EPI_ISL_414519 spike protein (1-1147)(P715C_P1069C) LumSynth construct
MFVFLVLVPLVSSQCVNLTTRTQLPPAYTNSFTRGVYYPDKVFRSSVLHSTQDLFLPFFSNVTWFHAIHVSGTNGTKRFDNPVLPFNDGVYFASTEKSNIIRGWIFGTTLDSKTQSLLIVNNATNVVIKVCEFQFCNDPFLGVYYHKNNKSWMESEFRVYSSANNCTFEYVSQPFLMDLEGKQGNFKNLREFVFKNIDGYFKIYSKHTPINLVRDLPQGFSALEPLVDLPIGINITRFQTLLALHRSYLTPGDSSSGWTAGAAAYYVGYLQPRTFLLKYNENGTITDAVDCALDPLSETKCTLKSFTVEKGIYQTSNFRVQPTESIVRFPNITNLCPFGEVFNATRFASVYAWNRKRISNCVADYSVLYNSASFSTFKCYGVSPTKLNDLCFTNVYADSFVIRGDEVRQIAPGQTGKIADYNYKLPDDFTGCVIAWNSNNLDSKVGGNYNYLYRLFRKSNLKPFERDISTEIYQAGSTPCNGVEGFNCYFPLQSYGFQPTNGVGYQPYRVVVLSFELLHAPATVCGPKKSTNLVKNKCVNFNFNGLTGTGVLTESNKKFLPFQQFGRDIADTTDAVRDPQTLEILDITPCSFGGVSVITPGTNTSNQVAVLYQDVNCTEVPVAIHADQLTPTWRVYSTGSNVFQTRAGCLIGAEHVNNSYECDIPIGAGICASYQTQTNSPRRARSVASQSIIAYTMSLGAENSVAYSNNSIAICTNFTISVTTEILPVSMTKTSVDCTMYICGDSTECSNLLLQYGSFCTQLNRALTGIAVEQDKNTQEVFAQVKQIYKTPPIKDFGGFNFSQILPDPSKPSKRSFIEDLLFNKVTLADAGFIKQYGDCLGDIAARDLICAQKFNGLTVLPPLLTDEMIAQYTSALLAGTITSGWTFGAGAALQIPFAMQMAYRFNGIGVTQNVLYENQKLIANQFNSAIGKIQDSLSSTASALGKLQDVVNQNAQALNTLVKQLSSNFGAISSVLNDILSRLDKVEAEVQIDRLITGRLQSLQTYVTQQLIRAAEIRASANLAATKMSECVLGQSKRVDFCGKGYHLMSFPQSAPHGVVFLHVTYVCAQEKNFTTAPAICHDGKAHFPREGVFVSNGTHWFVTQRNFYEPQIITTDNTFVSGNCDVVIGIVNNTVYDPLQPELDSGGGSGGGQIYEGKLTAEGLRFGIVASRFNHALVDRLVEGAIDAIVRHGGREEDITLVRVPGSWEIPVAAGELARKEDIDAVIAIGVLIRGATPHFDYIASEVSKGLADLSLELRKPITFGVITADTLEQAIERAGTKHGNKGWEAALSAIEMANLFKSLR

SEQ ID NO: 8131 - protein, 1307 aa, Artificial Sequence; identical to SEQ ID NO: 8121
  SARS-CoV-2/England/200990660/2020__EPI_ISL_414523 spike protein (1-1147)(P715C_P1069C) LumSynth construct

SEQ ID NO: 8132 - protein, 1307 aa, Artificial Sequence
  SARS-CoV-2/Australia/NSW09/2020__EPI_ISL_413595 spike protein (1-1147)(P715C_P1069C) LumSynth construct
MFVFLVLLPLVSSQCVNLTTRTQLPPAYTNSFTRGVYYPDKVFRSSVLHSTQDLFLPFFSNVTWFHAIHVSGTNGTKRFDNPVLPFNDGVYFASTEKSNIIRGWIFGTTLDSKTQSLLIVNNATNVVIKVCEFQFCNDPFLGVYYHKNNKSWMESEFRVYSSANNCTFEYVSQPFLMDLEGKQGNFKNLREFVFKNIDGYFKIYSKHTPINLVRDLPQGFSALEPLVDLPIGINITRFQTLLALHRSYLTPGDSSSGWTAGAAAYYVGYLQPRTFLLKYNENGTITDAVDCALDPLSETKCTLKSFTVEKGIYQTSNFRVQPTESIVRFPNITNLCPFGEVFNATRFASVYAWNRKRISNCVADYSVLYNSASFSTFKCYGVSPTKLNDLCFTNVYADSFVIRGDEVRQIAPGQTGKIADYNYKLPDDFTGCVIAWNSNNLDSKVGGNYNYLYRLFRKSNLKPFERDISTEIYQAGSTPCNGVEGFNCYFPLQSYGFQPTNGVGYQPYRVVVLSFELLHAPATVCGPKKSTNLVKNKCVNFNFNGLTGTGVLTESNKKFLPFQQFGRDIADTTDAVRDPQTLEILDITPCSFGGVSVITPGTNTSNQVAVLYQDVNCTEVPVAIHADQLTPTWRVYSTGSNVFQTRAGCLIGAEHVNNSYECDIPIGAGICASYQTQTNSPRRARSVASQSIIAYTMSLGAENSVAYSNNSIAICTNFTISVTTEILPVSMTKTSVDCTMYICGDSTECSNLLLQYGSFCTQLNRALTGIAVEQDKNTQEVFAQVKQIYKTPPIKDFGGFNFSQILPDPSKPSKRSFIEDLLFNKVTLADAGFIKQYGDCLGDIAARDLICAQKFNGLTVLPPLLTDEMIAQYTSALLAGTITSGWTFGAGAALQIPFAMQMAYRFNGIGVTQNVLYENQKLIANQFNSAIGKIQDSLSFTASALGKLQDVVNQNAQALNTLVKQLSSNFGAISSVLNDILSRLDKVEAEVQIDRLITGRLQSLQTYVTQQLIRAAEIRASANLAATKMSECVLGQSKRVDFCGKGYHLMSFPQSAPHGVVFLHVTYVCAQEKNFTTAPAICHDGKAHFPREGVFVSNGTHWFVTQRNFYEPQIITTDNTFVSGNCDVVIGIVNNTVYDPLQPELDSGGGSGGGQIYEGKLTAEGLRFGIVASRFNHALVDRLVEGAIDAIVRHGGREEDITLVRVPGSWEIPVAAGELARKEDIDAVIAIGVLIRGATPHFDYIASEVSKGLADLSLELRKPITFGVITADTLEQAIERAGTKHGNKGWEAALSAIEMANLFKSLR

SEQ ID NO: 8133 - protein, 1307 aa, Artificial Sequence; identical to SEQ ID NO: 8113
  SARS-CoV-2/Australia/NSW10/2020__EPI_ISL_413596 spike protein (1-1147)(P715C_P1069C) LumSynth construct

SEQ ID NO: 8134 - protein, 1307 aa, Artificial Sequence
  SARS-CoV-2/Switzerland/1000477797/2020__EPI_ISL_413023 spike protein (1-1147)(P715C_P1069C) LumSynth construct
MFVFLVLLPLVSSQCVNLTTRTQLPPAYTNSFTRGVYYPDKVFRSSVLHSTQDLFLPFFSNVTWFHAIHVSGTNGTKRFDNPVLPFNDGVYFASTEKSNIIRGWIFGTTLDSKTQSLLIVNNATNVVIKVCEFQFCNDPFLGVYYHKNNKSWMESEFRVYSSANNCTFEYVSQPFLMDLEGKQGNFKNLREFVFKNIDGYFNIYSKHTPINLVRDLPQGFSALEPLVDLPIGINITRFQTLLALHRSYLTPGDSSSGWTAGAAAYYVGYLQPRTFLLKYNENGTITDAVDCALDPLSETKCTLKSFTVEKGIYQTSNFRVQPTESIVRFPNITNLCPFGEVFNATRFASVYAWNRKRISNCVADYSVLYNSASFSTFKCYGVSPTKLNDLCFTNVYADSFVIRGDEVRQIAPGQTGKIADYNYKLPDDFTGCVIAWNSNNLDSKVGGNYNYLYRLFRKSNLKPFERDISTEIYQAGSTPCNGVEGFNCYFPLQSYGFQPTNGVGYQPYRVVVLSFELLHAPATVCGPKKSTNLVKNKCVNFNFNGLTGTGVLTESNKKFLPFQQFGRDIADTTDAVRDPQTLEILDITPCSFGGVSVITPGTNTSNQVAVLYQGVNCTEVPVAIHADQLTPTWRVYSTGSNVFQTRAGCLIGAEHVNNSYECDIPIGAGICASYQTQTNSPRRARSVASQSIIAYTMSLGAENSVAYSNNSIAICTNFTISVTTEILPVSMTKTSVDCTMYICGDSTECSNLLLQYGSFCTQLNRALTGIAVEQDKNTQEVFAQVKQIYKTPPIKDFGGFNFSQILPDPSKPSKRSFIEDLLFNKVTLADAGFIKQYGDCLGDIAARDLICAQKFNGLTVLPPLLTDEMIAQYTSALLAGTITSGWTFGAGAALQIPFAMQMAYRFNGIGVTQNVLYENQKLIANQFNSAIGKIQDSLSSTASALGKLQDVVNQNAQALNTLVKQLSSNFGAISSVLNDILSRLDKVEAEVQIDRLITGRLQSLQTYVTQQLIRAAEIRASANLAATKMSECVLGQSKRVDFCGKGYHLMSFPQSAPHGVVFLHVTYVCAQEKNFTTAPAICHDGKAHFPREGVFVSNGTHWFVTQRNFYEPQIITTDNTFVSGNCDVVIGIVNNTVYDPLQPELDSGGGSGGGQIYEGKLTAEGLRFGIVASRFNHALVDRLVEGAIDAIVRHGGREEDITLVRVPGSWEIPVAAGELARKEDIDAVIAIGVLIRGATPHFDYIASEVSKGLADLSLELRKPITFGVITADTLEQAIERAGTKHGNKGWEAALSAIEMANLFKSLR

SEQ ID NO: 8135 - protein, 1307 aa, Artificial Sequence
  SARS-CoV-2/Belgium/BA-02291/2020__EPI_ISL_415159 spike protein (1-1147)(P715C_P1069C) LumSynth construct
MFVFLVLLPLVSSQCVNLTTRTQLPPAYTNSFTRGVYYPDKVFRSSVLHSTQDLFLPFFSNVTWFHAIHVSGTNGTKRFDNPVLPFNDGVYFASTEKSNIIRGWIFGTTLDSKTQSLLIVNNATNVVIKVCEFQFCNDPFLGVYYHKNNKSWMESEFRVYSSANNCTFEYVSQPFLMDLEGKQGNFKNLREFVFKNIDGYFKIYSKHTPINLVRDLPQGFSALEPLVDLPIGINITRFQTLLALHRSYLTPGDSSSGWTAGAAAYYVGYLQPRTFLLKYNENGTITDAVDCALDPLSETKCTLKSFTVEKGIYQTSNFRVQPTESIVRFPNITNLCPFGEVFNATRFASVYAWNRKRISNCVADYSVLYNSASFSTFKCYGVSPTKLNDLCFTNVYADSFVIRGDEVRQIAPGQTGKIADYNYKLPDDFTGCVIAWNSNNLDSKVGGNYNYLYRLFRRSNLKPFERDISTEIYQAGSTPCNGVEGFNCYFPLQSYGFQPTNGVGYQPYRVVVLSFELLPAPATVCGPKKSTNLVKNKCVNFNFNGLTGTGVLTESNKKFLPFQQFGRDIADTTDAVRDPQTLEILDITPCSFGGVSVITPGTNTSNQVAVLYQGVNCTEVPVAIHADQLTPTWRVYSTGSNVFQTRAGCLIGAEHVNNSYECDIPIGAGICASYQTQTNSPRRARSVASQSIIAYTMSLGAENSVAYSNNSIAICTNFTISVTTEILPVSMTKTSVDCTMYICGDSTECSNLLLQYGSFCTQLNRALTGIAVEQDKNTQEVFAQVKQIYKTPPIKDFGGFNFSQILPDPSKPSKRSFIEDLLFNKVTLADAGFIKQYGDCLGDIAARDLICAQKFNGLTVLPPLLTDEMIAQYTSALLAGTITSGWTFGAGAALQIPFAMQMAYRFNGIGVTQNVLYENQKLIANQFNSAIGKIQDSLSSAAPALGKLQDVVNQNAQALNTLVKQLSSNFGAISSVLNDILSRLDKVEAEVQIDRLITGRLQSLQTYVTQQLIRAAEIRASANLAATKMSECVLGQSKRVDFCGKGYHLMSFPQSAPHGVVFLHVTYVCAQEKNFTTAPAICHDGKAHFPREGVFVSNGTHWFVTQRNFYEPQIITTDNTFVSGNCDVVIGIVNNTVYDPLQPELDSGGGSGGGQIYEGKLTAEGLRFGIVASRFNHALVDRLVEGAIDAIVRHGGREEDITLVRVPGSWEIPVAAGELARKEDIDAVIAIGVLIRGATPHFDYIASEVSKGLADLSLELRKPITFGVITADTLEQAIERAGTKHGNKGWEAALSAIEMANLFKSLR

SEQ ID NO: 8136 - protein, 1307 aa, Artificial Sequence
  SARS-CoV-2/USA/WA8-UW5/2020__EPI_ISL_413486 spike protein (1-1147)(P715C_P1069C) LumSynth construct
MFVFLVLLPLVSSQCVNLTTRTQLPPAYTNSFTRGVYYPDKVFRSSVLHSTQDLFLPFFSNVTWFHAIHVSGTNGTKRFDNPVLPFNDGVYFASTEKSNIIRGWIFGTTLDSKTQSLLIVNNATNVVIKVCEFQFCNDPFLGVYYHKNNKSWMESEFRVYSSANNCTFEYVSQPFLMDLEGKQGNFKNLREFVFKNIDGYFKIYSKHTPINLVRDLPQGFSALEPLVDLPIGINITRFQTLLALHRSYLTPGDSSSGWTAGAAAYYVGYLQPRTFLLKYNENGTITDAVDCALDPLSETKCTLKSFTVEKGIYQTSNFRVQPTESIVRFPNITNLCPFGEVFNATRFASVYAWNRKRISNCVADYSVLYNSASFSTFKCYGVSPTKLNDLCFTNVYADSFVIRGDEVRQIAPGQTGKIADYNYKLPDDFTGCVIAWNSNNLDSKVGGNYNYLYRLFRKSNLKPFERDISTEIYQAGSTPCNGVEGFNCYFPLQSYGFQPTNGVGYQPYRVVVLSFELLHAPATVCGPKKSTNLVKNKCVNFNFNGLTGTGVLTESNKKFLPFQQFGRDIADTTDAVRDPQTLEILDITPCSFGGVSVITPGTNTSNQVAVLYQDVNCTEVPVAIHADQLTPTWRVYSTGSNVFQTRAGCLIGAEYVNNSYECDIPIGAGICASYQTQTNSPRRARSVASQSIIAYTMSLGAENSVAYSNNSIAICTNFTISVTTEILPVSMTKTSVDCTMYICGDSTECSNLLLQYGSFCTQLNRALTGIAVEQDKNTQEVFAQVKQIYKTPPIKDFGGFNFSQILPDPSKPSKRSFIEDLLFNKVTLADAGFIKQYGDCLGDIAARDLICAQKFNGLTVLPPLLTDEMIAQYTSALLAGTITSGWTFGAGAALQIPFAMQMAYRFNGIGVTQNVLYENQKLIANQFNSAIGKIQDSLSSTASALGKLQDVVNQNAQALNTLVKQLSSNFGAISSVLNDILSRLDKVEAEVQIDRLITGRLQSLQTYVTQQLIRAAEIRASANLAATKMSECVLGQSKRVDFCGKGYHLMSFPQSAPHGVVFLHVTYVCAQEKNFTTAPAICHDGKAHFPREGVFVSNGTHWFVTQRNFYEPQIITTDNTFVSGNCDVVIGIVNNTVYDPLQPELDSGGGSGGGQIYEGKLTAEGLRFGIVASRFNHALVDRLVEGAIDAIVRHGGREEDITLVRVPGSWEIPVAAGELARKEDIDAVIAIGVLIRGATPHFDYIASEVSKGLADLSLELRKPITFGVITADTLEQAIERAGTKHGNKGWEAALSAIEMANLFKSLR

SEQ ID NO: 8137 - protein, 1307 aa, Artificial Sequence
  SARS-CoV-2/England/20102000506/2020__EPI_ISL_415147 spike protein (1-1147)(P715C_P1069C) LumSynth construct
MFVFLVLLPLVSSQCVNLTTRTQLPPAYTNSFTRGVYYPDKVFRSSVLHSTQDLFLPFFSNVTWFHAIHVSGTNGTKRFDNPVLPFNDGVYFASTEKSNIIRGWIFGTTLDSKTQSLLIVNNATNVVIKVCEFQFCNDPFLGVYYHKNNKSWMESEFRVYSSANNCTFEYVSQPFLMDLEGKQGNFKNLREFVFKNIDGYFKIYSKHTPINLVRDLPQGFSALEPLVDLPIGINITRFQTLLALHRSYLTPGDSSSGWTAGAAAYYVGYLQPRTFLLKYNENGTITDAVDCALDPLSETKCTLKSFTVEKGIYQTSNFRVQPTESIVRFPNITNLCPFGEVFNATRFASVYAWNRKRISNCVADYSVLYNSASFSTFKCYGVSPTKLNDLCFTNVYADSFVIRGDEVRQIAPGQTGKIADYNYKLPDDFTGCVIAWNSNNLDSKVGGNYNYLYRLFRKSNLKPFERDISTEIYQAGSTPCNGVEGFNCYFPLQSYGFQPTNGVGYQPYRVVVLSFELLHAPATVCGPKKSTNLVKNKCVNFNFNGLTGTGVLTESNKKFLPFQQFGRDIADTTDAVRDPQTLEILDITPCSFGGVSVITPGTNTSNQVAVLYQGVNCTEVPVAIHADQLTPTWRVYSTGSNVFQTRAGCLIGAEHVNNSYECDIPIGAGICASYQTQTNSPRRARSVASQSIIAYTMSLGAENSVAYSNNSIAICTNFTISVTTEILPVSMTKTSVDCTMYICGDSTECSNLLLQYGSFCTQLNRALTGIAVEQDKNTQEVFAQVKQIYKTPPIKDFGGFNFSQILPDPSKPSKRSFIEDLLFNKVTLADAGFIKQYGYCLGDIAARDLICAQKFNGLTVLPPLLTDEMIAQYTSALLAGTITSGWTFGAGAALQIPFAMQMAYRFNGIGVTQNVLYENQKLIANQFNSAIGKIQDSLSSTASALGKLQDVVNQNAQALNTLVKQLSSNFGAISSVLNDILSRLDKVEAEVQIDRLITGRLQSLQTYVTQQLIRAAEIRASANLAATKMSECVLGQSKRVDFCGKGYHLMSFPQSAPHGVVFLHVTYVCAQEKNFTTAPAICHDGKAHFPREGVFVSNGTHWFVTQRNFYEPQIITTDNTFVSGNCDVVIGIVNNTVYDPLQPELDSGGGSGGGQIYEGKLTAEGLRFGIVASRFNHALVDRLVEGAIDAIVRHGGREEDITLVRVPGSWEIPVAAGELARKEDIDAVIAIGVLIRGATPHFDYIASEVSKGLADLSLELRKPITFGVITADTLEQAIERAGTKHGNKGWEAALSAIEMANLFKSLR

SEQ ID NO: 8138 - protein, 1307 aa, Artificial Sequence
  SARS-CoV-2/Belgium/VAG-03013/2020__EPI_ISL_415155 spike protein (1-1147)(P715C_P1069C) LumSynth construct
MFVFLVLLPLVSSQCVNLTTRTQLPPAYTNSFTRGVYYPDKVFRSSVLHSTQDLFLPFFSNVTWFHAIHVSGTNGTKRFDNPVLPFNDGVYFASTEKSNIIRGWIFGTTLDSKTQSLLIVNNATNVVIKVCEFQFCNDPFLGVYYHKNNKSWMESEFRVYSSANNCTFEYVSQPFLMDLEGKQGNFKNLREFVFKNIDGYFKIYSKHTPINLVRDLPQGFSALEPLVDLPIGINITRFQTLLALHRSYLTPGDSSSGWTAGAAAYYVGYLQPRTFLLKYNENGTITDAVDCALDPLSETKCTLKSFTVEKGIYQTSNFRVQPTESIVRFPNITNLCPFGEVFNATRFASVYAWNRKRISNCVADYSVLYNSASFSTFKCYGVSPTKLNDLCFTNVYADSFVIRGDEVRQIAPGQTGKIADYNYKLPDDFTGCVIAWNSNNLDSKVGGNYNYLYRLFRKSNLKPFERDISTEIYQAGSTPCNGVEGFNCYFPLQSYGFQPTNGVGYQPYRVVVLSFELLHAPATVCGPKKSTNLVKNKCVNFNFNGLTGTGVLTESNKKFLPFQQFGRDIADTTDAVRDPQTLEILDITPCSFGGVSVITPGTNTSNQVAVLYQGVNCTEVPVAIHADQLTPTWRVYSTGSNVFQTRAGCLIGAEHVNNSYECDIPIGAGICASYQTQTNSPRRARSVASQSIIAYTMSLGAENSVAYSNNSIAICTNFTISVTTEILPVSMTKTSVDCTMYICGDSTECSNLLLQYGSFCTQLNRALTGIAVEQDKNTQEVFAQVKQIYKTPPIKDFGGFNFSQILPDPSKPSKRSFIEDLLFNKVTLADAGFIKQYGDCLGDIAARDLICAQKFNGLTVLPPLLTDEMIAQYTSALLAGTITSGWTFGAGAALQIPFAMQMAYRFNGIGVTQNVLYENQKLIANQFNSAIGKIQDSLSSTATALGKLQDVVNQNAQALNTLVKQLSSNFGAISSVLNDILSRLDKVEAEVQIDRLITGRLQSLQTYVTQQLIRAAEIRASANLAATKMSECVLGQSKRVDFCGKGYHLMSFPQSAPHGVVFLHVTYVCAQEKNFTTAPAICHDGKAHFPREGVFVSNGTHWFVTQRNFYEPQIITTDNTFVSGNCDVVIGIVNNTVYDPLQPELDSGGGSGGGQIYEGKLTAEGLRFGIVASRFNHALVDRLVEGAIDAIVRHGGREEDITLVRVPGSWEIPVAAGELARKEDIDAVIAIGVLIRGATPHFDYIASEVSKGLADLSLELRKPITFGVITADTLEQAIERAGTKHGNKGWEAALSAIEMANLFKSLR

SEQ ID NO: 8139 - protein, 1307 aa, Artificial Sequence
  SARS-CoV-2/Belgium/BC-03016/2020__EPI_ISL_415157 spike protein (1-1147)(P715C_P1069C) LumSynth construct
MFVFLVLLPLVSSQCVNLTTRTQLPPAYTNSFTRGVYYPDKVFRSSVLHSTQDLFLPFFSNVTWFHAIHVSGTNGTKRFDNPVLPFNDGVYFASTEKSNIIRGWIFGTTLDSKTQSLLIVNNATNVVIKVCEFQFCNDPFLGVYYHKNNKSWMESEFRVYSSANNCTFEYVSQPFLMDLEGKQGNFKNLREFVFKNIDGYFKIYSKHTPINLVRDLPQGFSALEPLVDLPIGINITRFQTLLALHRSYLTPGDSSSGWTAGAAAYYVGYLQPRTFLLKYNENGTITDAVDCALDPLSETKCTLKSFTVEKGIYQTSNFRVQPTESIVRFPNITNLCPFGEVFNATRFASVYAWNRKRISNCVADYSVLYNSASFSTFKCYGVSPTKLNDLCFTNVYADSFVIRGDEVRQIAPGQTGKIADYNYKLPDDFTGCVIAWNSNNLDSKVGGNYNYLYRLFRKSNLKPFERDISTEIYQAGSTPCNGVEGFNCYFPLQSYGFQPTNGVGYQPYRVVVLSFELLHAPATVCGPKKSTNLVKNKCVNFNFNGLTGTGVLTESNKKFLPFQQFGRDIADTTDAVRDPQTLEILDITPCSFGGVSVITPGTNTSNQVAVLYQGVNCTEVPVAIHADQLTPTWRVYSTGSNVFQTRAGCLIGAEHVNNSYECDIPIGAGICASYQTQTNSPRRARSVASQSIIAYTMSLGAENSVAYSNNSIAICTNFTISVTTEILPVSMTKTSVDCTMYICGDSTECSNLLLQYGSFCTQLNRALTGIAVEQDKNTQEVFAQVKQIYKTPPIKDFGGFNFSQILPDPSKPSKRSFIEDLLFNKVTLADAGFIKQYGDCLGDIAARDLICAQKFNGLTVLPPLLTDEMIAQYTSALLAGTITSGWTFGAGAALQIPFAMQMAYRFNGIGVTQNVLYENQKLIANQFNSAIGKIQDSLSSTAPALGKLQDVVNQNAQALNTLVKQLSSNFGAISSVLNDILSRLDKVEAEVQIDRLITGRLQSLQTYVTQQLIRAAEIRASANLAATKMSECVLGQSKRVDFCGKGYHLMSFPQSAPHGVVFLHVTYVCAQEKNFTTAPAICHDGKAHFPREGVFVSNGTHWFVTQRNFYEPQIITTDNTFVSGNCDVVIGIVNNTVYDPLQPELDSGGGSGGGQIYEGKLTAEGLRFGIVASRFNHALVDRLVEGAIDAIVRHGGREEDITLVRVPGSWEIPVAAGELARKEDIDAVIAIGVLIRGATPHFDYIASEVSKGLADLSLELRKPITFGVITADTLEQAIERAGTKHGNKGWEAALSAIEMANLFKSLR

SEQ ID NO: 8140 - protein, 1307 aa, Artificial Sequence
  SARS-CoV-2/Germany/BavPat3/2020__EPI_ISL_414521 spike protein (1-1147)(P715C_P1069C) LumSynth construct
MFVFLVLLPLVSSQCVNLTTRTQLPPAYTNSFTRGVYYPDKVFRSSVLHSTQDLFLPFFSNVTWFHAIHVSGTNGTKRFDNPVLPFNDGVYFASTEKSNIIRGWIFGTTLDSKTQSLLIVNNATNVVIKVCEFQFCNDPFLGVYYHKNNKSWMESEFRVYSSANNCTFEYVSQPFLMDLEGKQGNFKNLREFVFKNIDGYFKIYSKHTPINLVRDLPQGFSALEPLVDLPIGINITRFQTLLALHRSYLTPGDSSSGWTAGAAAYYVGYLQPRTFLLKYNENGTITDAVDCALDPLSETKCTLKSFTVEKGIYQTSNFRVQPTESIVRFPNITNLCPFGEVFNATRFASVYAWNRKRISNCVADYSVLYNSASFSTFKCYGVSPTKLNDLCFTNVYADSFVIRGDEVRQIAPGQTGKIADYNYKLPDDFTGCVIAWNSNNLDSKVGGNYNYLYRLFRKSNLKPFERDISTEIYQAGSTPCNGVEGFNCYFPLQSYGFQPTNGVGYQPYRVVVLSFELLHAPATVCGPKKSTNLVKNKCVNFNFNGLTGTGVLTESNKKFLPFQQFGRDIADTTDAVRDPQTLEILDITPCSFGGVSVITPGTNTSNQVAVLYQDVNCTEVPVAIHADQLTPTWRVYSTGSNVFQTRAGCLIGAEHVNNSYECDIPIGAGICASYQTQTNSPRRARSVASQSIIAYTMSLGAENSVAYSNNSIAICTNFTISVTTEILPVSMTKTSVDCTMYICGDSTECSNLLLQYGSFCTQLNRALTGIAVEQDKNTQQVFAQVKQIYKTPPIKDFGGFNFSQILPDPSKPSKRSFIEDLLFNKVTLADAGFIKQYGDCLGDIAARDLICAQKFNGLTVLPPLLTDEMIAQYTSALLAGTITSGWTFGAGAALQIPFAMQMAYRFNGIGVTQNVLYENQKLIANQFNSAIGKIQDSLSSTASALGKLQDVVNQNAQALNTLVKQLSSNFGAISSVLNDILSRLDKVEAEVQIDRLITGRLQSLQTYVTQQLIRAAEIRASANLAATKMSECVLGQSKRVDFCGKGYHLMSFPQSAPHGVVFLHVTYVCAQEKNFTTAPAICHDGKAHFPREGVFVSNGTHWFVTQRNFYEPQIITTDNTFVSGNCDVVIGIVNNTVYDPLQPELDSGGGSGGGQIYEGKLTAEGLRFGIVASRFNHALVDRLVEGAIDAIVRHGGREEDITLVRVPGSWEIPVAAGELARKEDIDAVIAIGVLIRGATPHFDYIASEVSKGLADLSLELRKPITFGVITADTLEQAIERAGTKHGNKGWEAALSAIEMANLFKSLR

SEQ ID NO: 8141 - protein, 1307 aa, Artificial Sequence
  SARS-CoV-2/France/HF1805/2020__EPI_ISL_414628 spike protein (1-1147)(P715C_P1069C) LumSynth construct
MFVFLVLLPLVSSQCVNLTTRTQLPPAYTNSFTRGVYYPDKVFRSSVLHSTQDLFLPFFSNVTWFHAIHVSGTNGTKRFDNPVLPFNDGVYFASTEKSNIIRGWIFGTTLDSKTQSLLIVNNATNVVIKVCEFQFCNDPFLGVYYHKNNKSWMESEFRVYSSANNCTFEYVSQPFLMDLEGKQGNFKNLREFVFKNIDGYFKIYSKHTPINLVRDLPQGFSALEPLVDLPIGINITRFQTLLALHRSYLTPGDSSSGWTAGAAAYYVGYLQPRTFLLKYNENGTITDAVDCALDPLSETKCTLKSFTVEKGIYQTSNFRVQPTESIVRFPNITNLCPFGEVFNATRFASVYAWNRKRISNCVADYSVLYNSASFSTFKCYGVSPTKLNDLCFTNVYADSFVIRGDEVRQIAPGQTGKIADYNYKLPDDFTGCVIAWNSNNLDSKVGGNYNYLYRLFRKSNLKPFERDISTEIYQAGSTPCNGVEGFNCYFPLQSYGFQPTNGVGYQPYRVVVLSFELLHAPATVCGPKKSTNLVKNKCVNFNFNGLTGTGVLTESNKKFLPFQQFGRDIADTTDAVRDPQTLEILDITPCSFGGVSVITPGTNTSNQVAVLYQGVNCTEVPVAIHADQLTPTWRVYSTGSNVFQTRAGCLIGAEHVNNSYECDIPIGAGICASYQTQTNSPRRARSVASQSIIAYTMSLGAENSVAYSNNSIAICTNFTISVTTEILPVSMTKTSVDCTMYICGDSTECSNLLLQYGSFCTQLNRALTGIAVEQDKNTQEVFAQVKQIYKTPPIKDFGGFNFSQILPDPSKPSKRSFIEDLLFNKVTLADAGFIKQYGDCLGDIAARDLICAQKFNGLTVLPPLLTDEMIAQYTSALLAGTITSGWTFGAGAALQIPFAMQMAYRFNGIGVTQNVLYENQKLIANQFNSAIGKIQDSLSSTASALGKLQDVVNQNAQALNTLVKQLSSNFGAISSVLNDILSRLDKVEAEVQIDRLITGRLQSLQTYVTQQLIRAAEIRASANLAATKMSECVLGQSKRVDFCGKGYHLMSFPQSAPHGVVFLHVTYVCAQEKNFTTAPAICHDGKAHFPREGVFVSNGTHWFVTQRNFYEPQIITTDNTFVSGNCDVVIGVVNNTVYDPLQPELDSGGGSGGGQIYEGKLTAEGLRFGIVASRFNHALVDRLVEGAIDAIVRHGGREEDITLVRVPGSWEIPVAAGELARKEDIDAVIAIGVLIRGATPHFDYIASEVSKGLADLSLELRKPITFGVITADTLEQAIERAGTKHGNKGWEAALSAIEMANLFKSLR

SEQ ID NO: 8142 - protein, 1307 aa, Artificial Sequence
  SARS-CoV-2/Netherlands/ZuidHolland_9/2020__EPI_ISL_414445 spike protein (1-1147)(P715C_P1069C) LumSynth construct
MFVFLVLLPLVSSQCVNLTTRTQLPPAYTNSFTRGVYYPDKVFRSSVLHSTQDLFLPFFSNVTWFHAIHVSGTNGTKRFDNPVLPFNDGVYFASTEKSNIIRGWIFGTTLDSKTQSLLIVNNATNVVIKVCEFQFCNDPFLGVYYHKNNKSWMESEFRVYSSANNCTFEYVSQPFLMDLEGKQGNFKNLREFVFKNIDGYFKIYSKHTPINLVRDLPQGFSALEPLVDLPIGINITRFQTLLALHRSYLTPGDSSSGWTAGAAAYYVGYLQPRTFLLKYNENGTITDAVDCALDPLSETKCTLKSFTVEKGIYQTSNFRVQPTESIVRFPNITNLCPFGEVFNATRFASVYAWNRKRISNCVADYSVLYNSASFSTFKCYGVSPTKLNDLCFTNVYADSFVIRGDEVRQIAPGQTGKIADYNYKLPDDFTGCVIAWNSNNLDSKVGGNYNYLYRLFRKSNLKPFERDISTEIYQAGSTPCNGVEGFNCYFPLQSYGFQPTNGVGYQPYRVVVLSFELLHAPATVCGPKKSTNLVKNKCVNFNFNGLTGTGVLTESNKKFLPFQQFGRDIADTTDAVRDPQTLEILDITPCSFGGVSVITPGTNTSNQVAVLYQGVNCTEVPVAIHADQLTPTWRVYSTGSNVFQTRAGCLIGAEHVNNSYECDIPIGAGICASYQTQTNSPRRARSVASQSIIAYTMSLGAENSVAYSNNSIAICTNFTISVTTEILPVSMTKTSVDCTMYICGDSTECSNLLLQYGSFCTQLNRALTGIAVEQDKNTQEVFAQVKQIYKTPPIKDFGGFNFSQILPDPSKPSKRSFIEDLLFNKVTLADAGFIKQYGDCLGDIAARDLICVQKFNGLTVLPPLLTDEMIAQYTSALLAGTITSGWTFGAGAALQIPFAMQMAYRFNGIGVTQNVLYENQKLIANQFNSAIGKIQDSLSSTASALGKLQDVVNQNAQALNTLVKQLSSNFGAISSVLNDILSRLDKVEAEVQIDRLITGRLQSLQTYVTQQLIRAAEIRASANLAATKMSECVLGQSKRVDFCGKGYHLMSFPQSAPHGVVFLHVTYVCAQEKNFTTAPAICHDGKAHFPREGVFVSNGTHWFVTQRNFYEPQIITTDNTFVSGNCDVVIGIVNNTVYDPLQPELDSGGGSGGGQIYEGKLTAEGLRFGIVASRFNHALVDRLVEGAIDAIVRHGGREEDITLVRVPGSWEIPVAAGELARKEDIDAVIAIGVLIRGATPHFDYIASEVSKGLADLSLELRKPITFGVITADTLEQAIERAGTKHGNKGWEAALSAIEMANLFKSLR

SEQ ID NO: 8143 - protein, 1307 aa, Artificial Sequence
  SARS-CoV-2/Finland/FIN03032020A/2020__EPI_ISL_413602 spike protein (1-1147)(P715C_P1069C) LumSynth construct
MFVFLVLLPLVSSQCVNLTTRTQLPPAYTNSFTRGVYYPDKVFRSSVLHSTQDLFLPFFSNVTWFHAIHVSGTNGTKRFDNPVLPFNDGVYFASTEKSNIIRGWIFGTTLDSKTQSLLIVNNATNVVIKVCEFQFCNDPFLGVYYHKNNKSWMESEFRVYSSANNCTFEYVSQPFLMDLEGKQGNFKNLREFVFKNIDGYFKIYSKHTPINLVRDLPQGFSALEPLVDLPIGINITRFQTLLALHRSYLTPGDSSSGWTAGAAAYYVGYLQPRTFLLKYNENGTITDAVDCALDPLSETKCTLKSFTVEKGIYQTSNFRVQPTESIVRFPNITNLCPFGEVFNATRFASVYAWNRKRISNCVADYSVLYNSASFSTFKCYGVSPTKLNDLCFTNVYADSFVIRGDEVRQIAPGQTGKIADYNYKLPDDFTGCVISWNSNNLDSKVGGNYNYLYRLFRKSNLKPFERDISTEIYQAGSTPCNGVEGFNCYFPLQSYGFQPTNGVGYQPYRVVVLSFELLHAPATVCGPKKSTNLVKNKCVNFNFNGLTGTGVLTESNKKFLPFQQFGRDIADTTDAVRDPQTLEILDITPCSFGGVSVITPGTNTSNQVAVLYQGVNCTEVPVAIHADQLTPTWRVYSTGSNVFQTRAGCLIGAEHVNNSYECDIPIGAGICASYQTQTNSPRRARSVASQSIIAYTMSLGAENSVAYSNNSIAICTNFTISVTTEILPVSMTKTSVDCTMYICGDSTECSNLLLQYGSFCTQLNRALTGIAVEQDKNTQEVFAQVKQIYKTPPIKDFGGFNFSQILPDPSKPSKRSFIEDLLFNKVTLADAGFIKQYGDCLGDIAARDLICAQKFNGLTVLPPLLTDEMIAQYTSALLAGTITSGWTFGAGAALQIPFAMQMAYRFNGIGVTQNVLYENQKLIANQFNSAIGKIQDSLSSTASALGKLQDVVNQNAQALNTLVKQLSSNFGAISSVLNDILSRLDKVEAEVQIDRLITGRLQSLQTYVTQQLIRAAEIRASANLAATKMSECVLGQSKRVDFCGKGYHLMSFPQSAPHGVVFLHVTYVCAQEKNFTTAPAICHDGKAHFPREGVFVSNGTHWFVTQRNFYEPQIITTDNTFVSGNCDVVIGIVNNTVYDPLQPELDSGGGSGGGQIYEGKLTAEGLRFGIVASRFNHALVDRLVEGAIDAIVRHGGREEDITLVRVPGSWEIPVAAGELARKEDIDAVIAIGVLIRGATPHFDYIASEVSKGLADLSLELRKPITFGVITADTLEQAIERAGTKHGNKGWEAALSAIEMANLFKSLR

SEQ ID NO: 8144 - protein, 1307 aa, Artificial Sequence
  SARS-CoV-2/France/GE1977/2020__EPI_ISL_414632 spike protein (1-1147)(P715C_P1069C) LumSynth construct
MFVFLVLLPLVSSQCVNLTTRTQLPPAYTNSFTRGVYYPDKVFRSSVLHSTQDLFLPFFSNVTWFHAIHVSGTNGTKRFDNPVLPFNDGVYFASTEKSNIIRGWIFGTTLDSKTQSLLIVNNATNVVIKVCEFQFCNDPFLGVYYHKNNKSWMESEFRVYSSANNCTFEYVSQPFLMDLEGKQGNFKNLREFVFKNIDGYFKIYSKHTPINLVRDLPQGFSALEPLVDLPIGINITRFQTLLALHRSYLTPGDSSSGWTAGAAAYYVGYLQPRTFLLKYNENGTITDAVDCALDPLSETKCTLKSFTVEKGIYQTSNFRVQPTESIVRFPNITNLCPFGEVFNATRFASVYAWNRKRISNCVADYSVLYNSASFSTFKCYGVSPTKLNDLCFTNVYADSFVIRGDEVRQIAPGQTGKIADYNYKLPDDFTGCVIAWNSNNLDSKVGGNYNYLYRLFRKSNLKPFERDISTEIYQAGSTPCNGVEGFNCYFPLQSYGFQPTNGVGYQPYRVVVLSFELLHAPATVCGPKKSTNLVKNKCVNFNFNGLTGTGVLTESNKKFLPFQQFGRDIADTTDAVRDPQTLEILDITPCSFGGVSVITPGTNTSNQVAVLYQGVNCTEVPVAIHADQLTPTWRVYSTGSNVFQTRAGCLIGAEHVNNSYECDIPIGAGICASYQTQTNSPRRARSVASQSIIAYTMSLGAENSVAYSNNSIAICTNFTISVTTEILPVSMTKTSVDCTMYICGDSTECSNLLLQYGSFCTQLNRALTGIAVEQDKNTQEVFAQVKQIYKTPPIKDFGGFNFSQILPDPSKPSKRSFIEDLLFNKVTLADAGFIKQYGDCLGDIAARDLICAQKFNGLTVLPPLLTDEMIAQYTSALLAGTITSGWTFGAGAALQIPFAMQMAYRFNGIGVTQNVLYENQKLIANQFNSAIGKIQDSLFSTASALGKLQDVVNQNAQALNTLVKQLSSNFGAISSVLNDILSRLDKVEAEVQIDRLITGRLQSLQTYVTQQLIRAAEIRASANLAATKMSECVLGQSKRVDFCGKGYHLMSFPQSAPHGVVFLHVTYVCAQEKNFTTAPAICHDGKAHFPREGVFVSNGTHWFVTQRNFYEPQIITTDNTFVSGNCDVVIGIVNNTVYDPLQPELDSGGGSGGGQIYEGKLTAEGLRFGIVASRFNHALVDRLVEGAIDAIVRHGGREEDITLVRVPGSWEIPVAAGELARKEDIDAVIAIGVLIRGATPHFDYIASEVSKGLADLSLELRKPITFGVITADTLEQAIERAGTKHGNKGWEAALSAIEMANLFKSLR

SEQ ID NO: 8145 - protein, 1307 aa, Artificial Sequence
  SARS-CoV-2/Finland/FIN-313/2020__EPI_ISL_414641 spike protein (1-1147)(P715C_P1069C) LumSynth construct
MFVFLVLLPLVSSQCVNLTTRTQLPPAYTNSFTRGVYYPDKVFRSSVLHSTQDLFLPFFSNVTWFHAIHVSGTNGTKRFDNPVLPFNDGVYFASTEKSNIIRGWIFGTTLDSKTQSLLIVNNATNVVIKVCEFQFCNDPFLGVYYHKNNKSWMESEFRVYSSANNCTFEYVSQPFLMDLEGKQGNFKNLREFVFKNIDGYFKIYSKHTPINLVRDLPQGFSALEPLVDLPIGINITRFKTLLALHRSYLTPGDSSSGWTAGAAAYYVGYLQPRTFLLKYNENGTITDAVDCALDPLSETKCTLKSFTVEKGIYQTSNFRVQPTESIVRFPNITNLCPFGEVFNATRFASVYAWNRKRISNCVADYSVLYNSASFSTFKCYGVSPTKLNDLCFTNVYADSFVIRGDEVRQIAPGQTGKIADYNYKLPDDFTGCVIAWNSNNLDSKVGGNYNYLYRLFRKSNLKPFERDISTEIYQAGSTPCNGVEGFNCYFPLQSYGFQPTNGVGYQPYRVVVLSFELLHAPATVCGPKKSTNLVKNKCVNFNFNGLTGTGVLTESNKKFLPFQQFGRDIADTTDAVRDPQTLEILDITPCSFGGVSVITPGTNTSNQVAVLYQGVNCTEVPVAIHADQLTPTWRVYSTGSNVFQTRAGCLIGAEHVNNSYECDIPIGAGICASYQTQTNSPRRARSVASQSIIAYTMSLGAENSVAYSNNSIAICTNFTISVTTEILPVSMTKTSVDCTMYICGDSTECSNLLLQYGSFCTQLNRALTGIAVEQDKNTQEVFAQVKQIYKTPPIKDFGGFNFSQILPDPSKPSKRSFIEDLLFNKVTLADAGFIKQYGDCLGDIAARDLICAQKFNGLTVLPPLLTDEMIAQYTSALLAGTITSGWTFGAGAALQIPFAMQMAYRFNGIGVTQNVLYENQKLIANQFNSAIGKIQDSLSSTASALGKLQDVVNQNAQALNTLVKQLSSNFGAISSVLNDILSRLDKVEAEVQIDRLITGRLQSLQTYVTQQLIRAAEIRASANLAATKMSECVLGQSKRVDFCGKGYHLMSFPQSAPHGVVFLHVTYVCAQEKNFTTAPAICHDGKAHFPREGVFVSNGTHWFVTQRNFYEPQIITTDNTFVSGNCDVVIGIVNNTVYDPLQPELDSGGGSGGGQIYEGKLTAEGLRFGIVASRFNHALVDRLVEGAIDAIVRHGGREEDITLVRVPGSWEIPVAAGELARKEDIDAVIAIGVLIRGATPHFDYIASEVSKGLADLSLELRKPITFGVITADTLEQAIERAGTKHGNKGWEAALSAIEMANLFKSLR

SEQ ID NO: 8146 - protein, 1307 aa, Artificial Sequence
  SARS-CoV-2/Netherlands/ZuidHolland_2/2020__EPI_ISL_414556 spike protein (1-1147)(P715C_P1069C) LumSynth construct
MFVFLVLLPLVSSQCVNLTTRTQLPPAYTNSFTRGVYYPDKVFRSSVLHSTQDLFLPFFSNVTWFHAIHVSGTNGTKRFDNPVLPFNDGVYFASTEKSNIIRGWIFGTTLDSKTQSLLIVNNATNVVIKVCEFQFCNDPFLGVYYHKNNKSWMESEFRVYSSANNCTFEYVSQPFLMDLEGKQGNFKNLREFVFKNIDGYFKIYSKHTPINLVRDLPQGFSALEPLVDLPIGINITRFQTLLALHRSYLTPGDSSSGWTAGAAAYYVGYLQPRTFLLKYNENGTITDAVDCALDPLSETKCTLKSFTVEKGIYQTSNFRVQPTESIVRFPNITNLCPFGEVFNATRFASVYAWNRKRISNCVADYSVLYNSASFSTFKCYGVSPTKLNDLCFTNVYADSFVIRGDEVRQIAPGQTGKIADYNYKLPDDFTGCVIAWNSNNLDSKVGGNYNYLYRLFRKSNLKPFERDISTEIYQAGSTPCNGVEGFNCYFPLQSYGFQPTNGVGYQPYRVVVLSFELLHAPATVCGPKKSTNLVKNKCVNFNFNGLTGTGVLTESNKKFLPFQQFGRDIADTTDAVRDPQTLEILDITPCSFGGVSVITPGTNTSNQVAVLYQGVNCTEVPVAIHADQLTPTWRVYSTGSNVFQTRAGCLIGAEHVNNSYECDIPIGAGICASYQTQTNSPRRARSVASQSIIAYTMSLGAENSVAYSNNSIAICTNFTISVTTEILPVSMTKTSVDCTMYICGDSTECSNLLLQYGSFCTQLNRALTGIALEQDKNTQEVFAQVKQIYKTPPIKDFGGFNFSQILPDPSKPSKRSFIEDLLFNKVTLADAGFIKQYGDCLGDIAARDLICAQKFNGLTVLPPLLTDEMIAQYTSALLAGTITSGWTFGAGAALQIPFAMQMAYRFNGIGVTQNVLYENQKLIANQFNSAIGKIQDSLSSTASALGKLQDVVNQNAQALNTLVKQLSSNFGAISSVLNDILSRLDKVEAEVQIDRLITGRLQSLQTYVTQQLIRAAEIRASANLAATKMSECVLGQSKRVDFCGKGYHLMSFPQSAPHGVVFLHVTYVCAQEKNFTTAPAICHDGKAHFPREGVFVSNGTHWFVTQRNFYEPQIITTDNTFVSGNCDVVIGIVNNTVYDPLQPELDSGGGSGGGQIYEGKLTAEGLRFGIVASRFNHALVDRLVEGAIDAIVRHGGREEDITLVRVPGSWEIPVAAGELARKEDIDAVIAIGVLIRGATPHFDYIASEVSKGLADLSLELRKPITFGVITADTLEQAIERAGTKHGNKGWEAALSAIEMANLFKSLR

SEQ ID NO: 8147 - protein, 1307 aa, Artificial Sequence
  SARS-CoV-2/USA/WA-UW31/2020__EPI_ISL_414618 spike protein (1-1147)(P715C_P1069C) LumSynth construct
MFVFLVLLPLVSSQCVNLTTRTQLPPAYTNSFTRGVYYPDKVFRSSVLHSTQDLFLPFFSNVTWFHAIHVSGTNGTKRFDNPVLPFNDGVYFASTEKSNIIRGWIFGTTLDSKTQSLLIVNNATNVVIKVCEFQFCNDPFLGVYYHKNNKSWMESEFRVYSSANNCTFEYVSQPFLMDLEGKQGNFKNLREFVFKNIDGYFKIYSKHTPINLVRDLPQGFSALEPLVDLPIGINITRFQTLLALHRSYLTPGDSSSGWTAGAAAYYVGYLQPRTFLLKYNENGTITDAVDCALDPLSETKCTLKSFTVEKGIYQTSNFRVQPTESIVRFPNITNLCPFGEVFNATRFASVYAWNRKRISNCVADYSVLYNSASFSTFKCYGVSPTKLNDLCFTNVYADSFVIRGDEVRQIAPGQTGKIADYNYKLPDDFTGCVIAWNSNNLDSKVGGNYNYLYRLFRKSNLKPFERDISTEIYQAGSTPCNGAEGFNCYFPLQSYGFQPTNGVGYQPYRVVVLSFELLHAPATVCGPKKSTNLVKNKCVNFNFNGLTGTGVLTESNKKFLPFQQFGRDIADTTDAVRDPQTLEILDITPCSFGGVSVITPGTNTSNQVAVLYQDVNCTEVPVAIHADQLTPTWRVYSTGSNVFQTRAGCLIGAEHVNNSYECDIPIGAGICASYQTQTNSPRRARSVASQSIIAYTMSLGAENSVAYSNNSIAICTNFTISVTTEILPVSMTKTSVDCTMYICGDSTECSNLLLQYGSFCTQLNRALTGIAVEQDKNTQEVFAQVKQIYKTPPIKDFGGFNFSQILPDPSKPSKRSFIEDLLFNKVTLADAGFIKQYGDCLGDIAARDLICAQKFNGLTVLPPLLTDEMIAQYTSALLAGTITSGWTFGAGAALQIPFAMQMAYRFNGIGVTQNVLYENQKLIANQFNSAIGKIQDSLSSTASALGKLQDVVNQNAQALNTLVKQLSSNFGAISSVLNDILSRLDKVEAEVQIDRLITGRLQSLQTYVTQQLIRAAEIRASANLAATKMSECVLGQSKRVDFCGKGYHLMSFPQSAPHGVVFLHVTYVCAQEKNFTTAPAICHDGKAHFPREGVFVSNGTHWFVTQRNFYEPQIITTDNTFVSGNCDVVIGIVNNTVYDPLQPELDSGGGSGGGQIYEGKLTAEGLRFGIVASRFNHALVDRLVEGAIDAIVRHGGREEDITLVRVPGSWEIPVAAGELARKEDIDAVIAIGVLIRGATPHFDYIASEVSKGLADLSLELRKPITFGVITADTLEQAIERAGTKHGNKGWEAALSAIEMANLFKSLR

SEQ ID NO: 8148 - protein, 1307 aa, Artificial Sequence
  SARS-CoV-2/South Korea/SNU01/2020__EPI_ISL_411929 spike protein (1-1147)(P715C_P1069C) LumSynth construct
MFVFLVLLPLVSSQCVNLTTRTQLPPAYTNSFTRGVYYPDKVFRSSVLHSTQDLFLPFFSNVTWFHAIHVSGTNGTKRFDNPVLPFNDGVYFASTEKSNIIRGWIFGTTLDSKTQSLLIVNNATNVVIKVCEFQFCNDPFLGVYYHKNNKSWMESEFRVYSSANNCTFEYVSQPFLMDLEGKQGNFKNLREFVFKNIDGYFKIYSKHTPINLVRDLPQGFWALEPLVDLPIGINITRFQTLLALHRSYLTPGDSSSGWTAGAAAYYVGYLQPRTFLLKYNENGTITDAVDCALDPLSETKCTLKSFTVEKGIYQTSNFRVQPTESIVRFPNITNLCPFGEVFNATRFASVYAWNRKRISNCVADYSVLYNSASFSTFKCYGVSPTKLNDLCFTNVYADSFVIRGDEVRQIAPGQTGKIADYNYKLPDDFTGCVIAWNSNNLDSKVGGNYNYLYRLFRKSNLKPFERDISTEIYQAGSTPCNGVEGFNCYFPLQSYGFQPTNGVGYQPYRVVVLSFELLHAPATVCGPKKSTNLVKNKCVNFNFNGLTGTGVLTESNKKFLPFQQFGRDIADTTDAVRDPQTLEILDITPCSFGGVSVITPGTNTSNQVAVLYQDVNCTEVPVAIHADQLTPTWRVYSTGSNVFQTRAGCLIGAEHVNNSYECDIPIGAGICASYQTQTNSPRRARSVASQSIIAYTMSLGAENSVAYSNNSIAICTNFTISVTTEILPVSMTKTSVDCTMYICGDSTECSNLLLQYGSFCTQLNRALTGIAVEQDKNTQEVFAQVKQIYKTPPIKDFGGFNFSQILPDPSKPSKRSFIEDLLFNKVTLADAGFIKQYGDCLGDIAARDLICAQKFNGLTVLPPLLTDEMIAQYTSALLAGTITSGWTFGAGAALQIPFAMQMAYRFNGIGVTQNVLYENQKLIANQFNSAIGKIQDSLSSTASALGKLQDVVNQNAQALNTLVKQLSSNFGAISSVLNDILSRLDKVEAEVQIDRLITGRLQSLQTYVTQQLIRAAEIRASANLAATKMSECVLGQSKRVDFCGKGYHLMSFPQSAPHGVVFLHVTYVCAQEKNFTTAPAICHDGKAHFPREGVFVSNGTHWFVTQRNFYEPQIITTDNTFVSGNCDVVIGIVNNTVYDPLQPELDSGGGSGGGQIYEGKLTAEGLRFGIVASRFNHALVDRLVEGAIDAIVRHGGREEDITLVRVPGSWEIPVAAGELARKEDIDAVIAIGVLIRGATPHFDYIASEVSKGLADLSLELRKPITFGVITADTLEQAIERAGTKHGNKGWEAALSAIEMANLFKSLR

SEQ ID NO: 8149 - protein, 1307 aa, Artificial Sequence
  SARS-CoV-2/China/WF0004/2020__EPI_ISL_413694 spike protein (1-1147)(P715C_P1069C) LumSynth construct
MFVFLVLLPLVSSQCVNLTTRTQLPPAYTNSFTRGVYYPDKVFRSSVLHSTQDLFLPFFSNVTWFHAIHVSGTNGTKRFDNPVLPFNDGVYFASTEKSNIIRGWIFGTTLDSKTQSLLIVNNATNVVIKVCEFQFCNDPFLGVYYHKNNKSWTESEFRVYSSANNCTFEYVSQPFLMDLEGKQGNFKNLREFVFKNIDGYFKIYSKHTPINLVRDLPQGFSALEPLVDLPIGINITRFQTLLALHRSYLTPGDSSSGWTAGAAAYYVGYLQPRTFLLKYNENGTITDAVDCALDPLSETKCTLKSFTVEKGIYQTSNFRVQPTESIVRFPNITNLCPFGEVFNATRFASVYAWNRKRISNCVADYSVLYNSASFSTFKCYGVSPTKLNDLCFTNVYADSFVIRGDEVRQIAPGQTGKIADYNYKLPDDFTGCVIAWNSNNLDSKVGGNYNYLYRLFRKSNLKPFERDISTEIYQAGSTPCNGVEGFNCYFPLQSYGFQPTNGVGYQPYRVVVLSFELLHAPATVCGPKKSTNLVKNKCVNFNFNGLTGTGVLTESNKKFLPFQQFGRDIADTTDAVRDPQTLEILDITPCSFGGVSVITPGTNTSNQVAVLYQDVNCTEVPVAIHADQLTPTWRVYSTGSNVFQTRAGCLIGAEHVNNSYECDIPIGAGICASYQTQTNSPRRARSVASQSIIAYTMSLGAENSVAYSNNSIAICTNFTISVTTEILPVSMTKTSVDCTMYICGDSTECSNLLLQYGSFCTQLNRALTGIAVEQDKNTQEVFAQVKQIYKTPPIKDFGGFNFSQILPDPSKPSKRSFIEDLLFNKVTLADAGFIKQYGDCLGDIAARDLICAQKFNGLTVLPPLLTDEMIAQYTSALLAGTITSGWTFGAGAALQIPFAMQMAYRFNGIGVTQNVLYENQKLIANQFNSAIGKIQDSLSSTASALGKLQDVVNQNAQALNTLVKQLSSNFGAISSVLNDILSRLDKVEAEVQIDRLITGRLQSLQTYVTQQLIRAAEIRASANLAATKMSECVLGQSKRFDFCGKGYHLMSFPQSAPHGVVFLHVTYVCAQEKNFTTAPAICHDGKAHFPREGVFVSNGTHWFVTQRNFYEPQIITTDNTFVSGNCDVVIGIVNNTVYDPLQPELDSGGGSGGGQIYEGKLTAEGLRFGIVASRFNHALVDRLVEGAIDAIVRHGGREEDITLVRVPGSWEIPVAAGELARKEDIDAVIAIGVLIRGATPHFDYIASEVSKGLADLSLELRKPITFGVITADTLEQAIERAGTKHGNKGWEAALSAIEMANLFKSLR

SEQ ID NO: 8150 - protein, 1307 aa, Artificial Sequence
  SARS-CoV-2/China/WF0028/2020__EPI_ISL_413791 spike protein (1-1147)(P715C_P1069C) LumSynth construct
MFVFLVLLPLVSSQCVNLTTRTQLPPAYTNSFTRGVYYPDKVFRSSVLHSTQDLFLPFFSNVTWFHAIHVSGTNGTKRFDNPVLPFNDGVYFASTEKSNIIRGWIFGTTLDSKTQSLLIVNNATNVVIKVCEFQFCNDPFLGVYYHKNNKSWMESEFRVYSSANNCTFEYVSQPFLMDLEGKQGNFKNLREFVFKNIDGYFKIYSKHTPINLVRDLPQGFSALEPLVDLPIGINITRFQTLLALHRSYLTPGDSSSGWTAGAAAYYVGYLQPRTFLLKYNENGTITDAVDCALDPLSETKCTLKSFTVEKGIYQTSNFRVQPTESIVRFPNITNLCPFGEVFNATRFASVYAWNRKRISNCVADYSVLYNSASFSTFKCYGVSPTKLNDLCFTNVYADSFVIRGDEVRQIAPGQTGKIADYNYKLPDDFTGCVIAWNSNNLDSKVGGNYNYLYRLFRKSNLKPFERDISTEIYQAGSTPCNGVEGFNCYFPLQSYGFQPTNGVGYQPYRVVVLSFELLHAPATVCGPKKSTNLVKNKCVNFNFNGLTGTGVLTESNKKFLPFQQFGRDIADTTDAVRDPQTLEILDITPCSFGGVSVITPGTNTSNQVAVLYQDVNCTEVPVAIHADQLTPTWRVYSTGSNVFQTRAGCLIGAEHVNNSYECDIPIGAGICASYQTQTNSPRRARSVASQSIIAYTMSLGAENSVAYSNNSIAICTNFTISVTTEILPVSMTKTSVDCTMYICGDSTECSNLLLQYGSFCTQLNRALTGIAVEQDKNTQEVFAQVKQIYKTPPIKDFGGFNFSQILPDPSKPSKRSFIEDLLFNKVTLADAGFIKQYGDCLGDIAARDLICAQKFNGLTVLPPLLTDEMIAQYTSALLAGTITSGWTFGAGAALQIPFAMQMAYRFNGIGVTQNVLYENQKLIANQFNSAIGKIQDSLSSTASALGKLQDVVNQNAQALNTLVKQLSSNFGAISSVLNDILSRLDKVEAEVQIDRLITGRLQSLQTYVTQQLIRAAEIRASANLAATKMSECVLGQSKRVDFCGKGYHLMSFPQSAPHGVVFLHVTYVCAQEKNFTTAPAICHDGKAHFPREGVFVSNGTHWFVTQRNFYEPQIITTDNTFVSGNCDVVIGIVNNTVYDPLQPELESGGGSGGGQIYEGKLTAEGLRFGIVASRFNHALVDRLVEGAIDAIVRHGGREEDITLVRVPGSWEIPVAAGELARKEDIDAVIAIGVLIRGATPHFDYIASEVSKGLADLSLELRKPITFGVITADTLEQAIERAGTKHGNKGWEAALSAIEMANLFKSLR

SEQ ID NO: 8151 - protein, 1307 aa, Artificial Sequence
  SARS-CoV-2/2019-nCoV/USA-CruiseA-18/2020__MT159716.1 spike protein (1-1147)(P715C_P1069C) LumSynth construct
MFVFLVLLPLVSSQCVNLTTRTQLPPAYTNSFTRGVYYPDKVFRSSVLHSTQDLFLPFFSNVTWFHAIHVSGTNGTKRFDNPVLPFNDGVYFASTEKSNIIRGWIFGTTLDSKTQSLLIVNNATNVVIKVCEFQFCNDPFLGVYYHKNNKSWMESELRVYSSANNCTFEYVSQPFLMDLEGKQGNFKNLREFVFKNIDGYFKIYSKHTPINLVRDLPQGFSALEPLVDLPIGINITRFQTLLALHRSYLTPGDSSSGWTAGAAAYYVGYLQPRTFLLKYNENGTITDAVDCALDPLSETKCTLKSFTVEKGIYQTSNFRVQPTESIVRFPNITNLCPFGEVFNATRFASVYAWNRKRISNCVADYSVLYNSASFSTFKCYGVSPTKLNDLCFTNVYADSFVIRGDEVRQIAPGQTGKIADYNYKLPDDFTGCVIAWNSNNLDSKVGGNYNYLYRLFRKSNLKPFERDISTEIYQAGSTPCNGVEGFNCYFPLQSYGFQPTNGVGYQPYRVVVLSFELLHAPATVCGPKKSTNLVKNKCVNFNFNGLTGTGVLTESNKKFLPFQQFGRDIADTTDAVRDPQTLEILDITPCSFGGVSVITPGTNTSNQVAVLYQDVNCTEVPVAIHADQLTPTWRVYSTGSNVFQTRAGCLIGAEHVNNSYECDIPIGAGICASYQTQTNSPRRARSVASQSIIAYTMSLGAENSVAYSNNSIAICTNFTISVTTEILPVSMTKTSVDCTMYICGDSTECSNLLLQYGSFCTQLNRALTGIAVEQDKNTQEVFAQVKQIYKTPPIKDFGGFNFSQILPDPSKPSKRSFIEDLLFNKVTLADAGFIKQYGDCLGDIAARDLICAQKFNGLTVLPPLLTDEMIAQYTSALLAGTITSGWTFGAGAALQIPFAMQMAYRFNGIGVTQNVLYENQKLIANQFNSAIGKIQDSLSSTASALGKLQDVVNQNAQALNTLVKQLSSNFGAISSVLNDILSRLDKVEAEVQIDRLITGRLQSLQTYVTQQLIRAAEIRASANLAATKMSECVLGQSKRVDFCGKGYHLMSFPQSAPHGVVFLHVTYVCAQEKNFTTAPAICHDGKAHFPREGVFVSNGTHWFVTQRNFYEPQIITTDNTFVSGNCDVVIGIVNNTVYDPLQPELDSGGGSGGGQIYEGKLTAEGLRFGIVASRFNHALVDRLVEGAIDAIVRHGGREEDITLVRVPGSWEIPVAAGELARKEDIDAVIAIGVLIRGATPHFDYIASEVSKGLADLSLELRKPITFGVITADTLEQAIERAGTKHGNKGWEAALSAIEMANLFKSLR

SEQ ID NO: 8152 - protein, 1307 aa, Artificial Sequence
  SARS-CoV-2/SARS-CoV-2/Yunnan-01/human/2020/CHN__MT049951.1 spike protein (1-1147)(P715C_P1069C) LumSynth construct
MFVFLVLLPLVSSQCVNLTTRTQLPPANTNSFTRGVYYPDKVFRSSVLHSTQDLFLPFFSNVTWFHAIHVSGTNGTKRFDNPVLPFNDGVYFASTEKSNIIRGWIFGTTLDSKTQSLLIVNNATNVVIKVCEFQFCNDPFLGVYYHKNNKSWMESEFRVYSSANNCTFEYVSQPFLMDLEGKQGNFKNLREFVFKNIDGYFKIYSKHTPINLVRDLPQGFSALEPLVDLPIGINITRFQTLLALHRSYLTPGDSSSGWTAGAAAYYVGYLQPRTFLLKYNENGTITDAVDCALDPLSETKCTLKSFTVEKGIYQTSNFRVQPTESIVRFPNITNLCPFGEVFNATRFASVYAWNRKRISNCVADYSVLYNSASFSTFKCYGVSPTKLNDLCFTNVYADSFVIRGDEVRQIAPGQTGKIADYNYKLPDDFTGCVIAWNSNNLDSKVGGNYNYLYRLFRKSNLKPFERDISTEIYQAGSTPCNGVEGFNCYFPLQSYGFQPTNGVGYQPYRVVVLSFELLHAPATVCGPKKSTNLVKNKCVNFNFNGLTGTGVLTESNKKFLPFQQFGRDIADTTDAVRDPQTLEILDITPCSFGGVSVITPGTNTSNQVAVLYQDVNCTEVPVAIHADQLTPTWRVYSTGSNVFQTRAGCLIGAEHVNNSYECDIPIGAGICASYQTQTNSPRRARSVASQSIIAYTMSLGAENSVAYSNNSIAICTNFTISVTTEILPVSMTKTSVDCTMYICGDSTECSNLLLQYGSFCTQLNRALTGIAVEQDKNTQEVFAQVKQIYKTPPIKDFGGFNFSQILPDPSKPSKRSFIEDLLFNKVTLADAGFIKQYGDCLGDIAARDLICAQKFNGLTVLPPLLTDEMIAQYTSALLAGTITSGWTFGAGAALQIPFAMQMAYRFNGIGVTQNVLYENQKLIANQFNSAIGKIQDSLSSTASALGKLQDVVNQNAQALNTLVKQLSSNFGAISSVLNDILSRLDKVEAEVQIDRLITGRLQSLQTYVTQQLIRAAEIRASANLAATKMSECVLGQSKRVDFCGKGYHLMSFPQSAPHGVVFLHVTYVCAQEKNFTTAPAICHDGKAHFPREGVFVSNGTHWFVTQRNFYEPQIITTDNTFVSGNCDVVIGIVNNTVYDPLQPELDSGGGSGGGQIYEGKLTAEGLRFGIVASRFNHALVDRLVEGAIDAIVRHGGREEDITLVRVPGSWEIPVAAGELARKEDIDAVIAIGVLIRGATPHFDYIASEVSKGLADLSLELRKPITFGVITADTLEQAIERAGTKHGNKGWEAALSAIEMANLFKSLR

SEQ ID NO: 8153 - protein, 1307 aa, Artificial Sequence
  SARS-CoV-2/USA/WA-UW292/2020__EPI_ISL_418077 spike protein (1-1147)(P715C_P1069C) LumSynth construct
MFVFLVLLPLVSSQCVNLTTRTQLPPAYTNSFTRGVYYPDKVFRSSVLHSTQDLFLPFFSNVTWFHAIHVSGTNGTKRFDNPVLPFNDGVYFASTEKSNIIRGWIFGTTLDSKTQSLLIVNNATNVVIKVCEFQFCNDPFLGVYYHKNNKSWMESEFRVYSSANNCTFEYVSQPFLMDLEGKQGNFKNLREFVFKNIDGYFKIYSKHTPINLVRDLPQGFSALEPLVDLPIGINITRFQTLLALHRSYLTPGDSSSGWTAGAAAYYVGYLQPRTFLLKYNENGTITDAVDCALDPLSETKCTLKSFTVEKGIYQTSNFRVQPTESIVRFPNITNLCPFGEVFNATRFASVYAWNRKRISNCVADYSVLYNSASFSTFKCYGVSPTKLNDLCFTNVYADSFVIRGDEVRQIAPGQTGKIADYNYKLPDDFTGCVIAWNSNNLDSKVGGNYNYLYRLFRKSNLKPFERDISTEIYQASSTPCNGVEGFNCYFPLQSYGFQPTNGVGYQPYRVVVLSFELLHAPATVCGPKKSTNLVKNKCVNFNFNGLTGTGVLTESNKKFLPFQQFGRDIADTTDAVRDPQTLEILDITPCSFGGVSVITPGTNTSNQVAVLYQDVNCTEVPVAIHADQLTPTWRVYSTGSNVFQTRAGCLIGAEHVNNSYECDIPIGAGICASYQTQTNSPRRARSVASQSIIAYTMSLGAENSVAYSNNSIAICTNFTISVTTEILPVSMTKTSVDCTMYICGDSTECSNLLLQYGSFCTQLNRALTGIAVEQDKNTQEVFAQVKQIYKTPPIKDFGGFNFSQILPDPSKPSKRSFIEDLLFNKVTLADAGFIKQYGDCLGDIAARDLICAQKFNGLTVLPPLLTDEMIAQYTSALLAGTITSGWTFGAGAALQIPFAMQMAYRFNGIGVTQNVLYENQKLIANQFNSAIGKIQDSLSSTASALGKLQDVVNQNAQALNTLVKQLSSNFGAISSVLNDILSRLDKVEAEVQIDRLITGRLQSLQTYVTQQLIRAAEIRASANLAATKMSECVLGQSKRVDFCGKGYHLMSFPQSAPHGVVFLHVTYVCAQEKNFTTAPAICHDGKAHFPREGVFVSNGTHWFVTQRNFYEPQIITTDNTFVSGNCDVVIGIVNNTVYDPLQPELDSGGGSGGGQIYEGKLTAEGLRFGIVASRFNHALVDRLVEGAIDAIVRHGGREEDITLVRVPGSWEIPVAAGELARKEDIDAVIAIGVLIRGATPHFDYIASEVSKGLADLSLELRKPITFGVITADTLEQAIERAGTKHGNKGWEAALSAIEMANLFKSLR

SEQ ID NO: 8154 - protein, 1307 aa, Artificial Sequence
  SARS-CoV-2/Iceland/192/2020__EPI_ISL_417819 spike protein (1-1147)(P715C_P1069C) LumSynth construct
MFVFFVLLPLVSSQCVNLTTRTQLPPAYTNSFTRGVYYPDKVFRSSVLHSTQDLFLPFFSNVTWFHAIHVSGTNGTKRFDNPVLPFNDGVYFASTEKSNIIRGWIFGTTLDSKTQSLLIVNNATNVVIKVCEFQFCNDPFLGVYYHKNNKSWMESEFRVYSSANNCTFEYVSQPFLMDLEGKQGNFKNLREFVFKNIDGYFKIYSKHTPINLVRDLPQGFSALEPLVDLPIGINITRFQTLLALHRSYLTPGDSSSGWTAGAAAYYVGYLQPRTFLLKYNENGTITDAVDCALDPLSETKCTLKSFTVEKGIYQTSNFRVQPTESIVRFPNITNLCPFGEVFNATRFASVYAWNRKRISNCVADYSVLYNSASFSTFKCYGVSPTKLNDLCFTNVYADSFVIRGDEVRQIAPGQTGKIADYNYKLPDDFTGCVIAWNSNNLDSKVGGNYNYLYRLFRKSNLKPFERDISTEIYQAGSTPCNGVEGFNCYFPLQSYGFQPTNGVGYQPYRVVVLSFELLHAPATVCGPKKSTNLVKNKCVNFNFNGLTGTGVLTESNKKFLPFQQFGRDIADTTDAVRDPQTLEILDITPCSFGGVSVITPGTNTSNQVAVLYQGVNCTEVPVAIHADQLTPTWRVYSTGSNVFQTRAGCLIGAEHVNNSYECDIPIGAGICASYQTQTNSPRRARSVASQSIIAYTMSLGAENSVAYSNNSIAICTNFTISVTTEILPVSMTKTSVDCTMYICGDSTECSNLLLQYGSFCTQLNRALTGIAVEQDKNTQEVFAQVKQIYKTPPIKDFGGFNFSQILPDPSKPSKRSFIEDLLFNKVTLADAGFIKQYGDCLGDIAARDLICAQKFNGLTVLPPLLTDEMIAQYTSALLAGTITSGWTFGAGAALQIPFAMQMAYRFNGIGVTQNVLYENQKLIANQFNSAIGKIQDSLSSTASALGKLQDVVNQNAQALNTLVKQLSSNFGAISSVLNDILSRLDKVEAEVQIDRLITGRLQSLQTYVTQQLIRAAEIRASANLAATKMSECVLGQSKRVDFCGKGYHLMSFPQSAPHGVVFLHVTYVCAQEKNFTTAPAICHDGKAHFPREGVFVSNGTHWFVTQRNFYEPQIITTDNTFVSGNCDVVIGIVNNTVYDPLQPELDSGGGSGGGQIYEGKLTAEGLRFGIVASRFNHALVDRLVEGAIDAIVRHGGREEDITLVRVPGSWEIPVAAGELARKEDIDAVIAIGVLIRGATPHFDYIASEVSKGLADLSLELRKPITFGVITADTLEQAIERAGTKHGNKGWEAALSAIEMANLFKSLR

SEQ ID NO: 8155 - protein, 1307 aa, Artificial Sequence
  SARS-CoV-2/Belgium/ULG-6939/2020__EPI_ISL_417020 spike protein (1-1147)(P715C_P1069C) LumSynth construct
MFVFLVLLPLVSSQCVNLTTRTQLPPAYTNSFTRGVYYPDKVFRSSVLHSTQDLFLPFFSNVTWFHAIHVSGTNGTKRFDNPVLPFNDGVYFASTEKSNIIRGWIFGTTLDSKTQSLLIVNNATNVVIKVCEFQFCNDPFLGVYYHKNNKSWMESEFRVYSSANNCTFEYVSQPFLMDLEGKQGNFKNLREFVFKNIDGYFKIYSKHTPINLVRDLPQGFSALEPLVDLPIGINITRFQTLLALHRSYLTPGDSSSGWTAGAAAYYVGYLQPRTFLLKYNENGTITDAVDCALDPLSETKCTLKSFTVEKGIYQTSNFRVQPTESIVRFPNITNLCPFGEVFNATRFASVYAWNRKRISNCVADYSVLYNSASFSTFKCYGVSPTKLNDLCFTNVYADSFVIRGDEVRQIAPGQTGKIADYNYKLPDDFTGCVIAWNSNNLDSKVGGNYNYLYRLFRKSNLKPFERDISTEIYQAGSTPCNGVEGFNCYFPLQSYGFQPTNGVGYQPYRVVVLSFELLHAPATVCGPKKSTNLVKNKCVNFNFNGLTGTGVLTESNKKFLPFQQFGRDIADTTDAVRDPQTLEILDITPCSFGGVSVITPGTNTSNQVAVLYQGVNCTEVPVAIHADQLTPTWRVYSTGSNVFQTRAGCLIGAEHVNNSYECDIPIGAGICASYQTQTNSPRRARSVASQSIIAYTMSLGAENSVVYSNNSIAICTNFTISVTTEILPVSMTKTSVDCTMYICGDSTECSNLLLQYGSFCTQLNRALTGIAVEQDKNTQEVFAQVKQIYKTPPIKDFGGFNFSQILPDPSKPSKRSFIEDLLFNKVTLADAGFIKQYGDCLGDIAARDLICAQKFNGLTVLPPLLTDEMIAQYTSALLAGTITSGWTFGAGAALQIPFAMQMAYRFNGIGVTQNVLYENQKLIANQFNSAIGKIQDSLSSTASALGKLQDVVNQNAQALNTLVKQLSSNFGAISSVLNDILSRLDKVEAEVQIDRLITGRLQSLQTYVTQQLIRAAEIRASANLAATKMSECVLGQSKRVDFCGKGYHLMSFPQSAPHGVVFLHVTYVCAQEKNFTTAPAICHDGKAHFPREGVFVSNGTHWFVTQRNFYEPQIITTDNTFVSGNCDVVIGIVNNTVYDPLQPELDSGGGSGGGQIYEGKLTAEGLRFGIVASRFNHALVDRLVEGAIDAIVRHGGREEDITLVRVPGSWEIPVAAGELARKEDIDAVIAIGVLIRGATPHFDYIASEVSKGLADLSLELRKPITFGVITADTLEQAIERAGTKHGNKGWEAALSAIEMANLFKSLR

SEQ ID NO: 8156 - protein, 1307 aa, Artificial Sequence
  SARS-CoV-2/France/HF2496/2020__EPI_ISL_418231 spike protein (1-1147)(P715C_P1069C) LumSynth construct
MFVFLVLLPLVSSQCVNLTTRTQLPPAYTNSFTRGVYYPDKVFRSSVLHSTQDLFLPFFSNVTWFHAIHVSGTNGTKRFDNPVLPFNDGVYFASTEKSNIIRGWIFGTTLDSKTQSLLIVNNATNVVIKVCEFQFCNDPFLGVYYHKNNKSWMESEFRVYSSANNCTFEYVSQPFLMDLEGKQGNFKNLREFVFKNIDGYFKIYSKHTPINLVRDLPQGFSALEPLVDLPIGINITRFQTLLALHRSYLTPGDSSSGWTAGAAAYYVGYLQPRTFLLKYNENGTITDAVDCALDPLSETKCTLKSFTVEKGIYQTSNFRVQPTESIVRFPNITNLCPFGEVFNATRFASVYAWNRKRISNCVADYSVLYNSASFSTFKCYGVSPTKLNDLCFTNVYADSFVIRGDEVRQIAPGQTGKIADYNYKLPDDFTGCVIAWNSNNLDSKVGGNYNYLYRLFRKSNLKPFERDISTEIYQAGSTPCNGVEGFNCYFPLQSYGFQPTNGVGYQPYRVVVLSFELLHAPATVCGPKKSTNLVKNKCVNFNFNGLTGTGVLTESNKKFLPFQQFGRDIADTTDAVRDPQTLEILDITPCSFGGVSVITPGTNTSNQVAVLYQGVNCTEVPVAIHADQLTPTWRVYSTGSNVFQTRAGCLIGAEHVNNSYECDIPIGAGICASYQTQTNSPRRARSVASQSIIAYTMSLGAENSVAYSNNSIAICTNFTISVTTEILPVSMTKTSVDCTMYICGDSTECSNLLLQYGSFCTQLNRALTGIAVEQDKNTQEVFAQVKQIYKTPPIKDFGGFNFSQILPDPSKPSKRSFIEDLLFNKVTLADAGFIKQYGDCLGDIVARDLICAQKFNGLTVLPPLLTDEMIAQYTSALLAGTITSGWTFGAGAALQIPFAMQMAYRFNGIGVTQNVLYENQKLIANQFNSAIGKIQDSLSSTASALGKLQDVVNQNAQALNTLVKQLSSNFGAISSVLNDILSRLDKVEAEVQIDRLITGRLQSLQTYVTQQLIRAAEIRASANLAATKMSECVLGQSKRVDFCGKGYHLMSFPQSAPHGVVFLHVTYVCAQEKNFTTAPAICHDGKAHFPREGVFVSNGTHWFVTQRNFYEPQIITTDNTFVSGNCDVVIGIVNNTVYDPLQPELDSGGGSGGGQIYEGKLTAEGLRFGIVASRFNHALVDRLVEGAIDAIVRHGGREEDITLVRVPGSWEIPVAAGELARKEDIDAVIAIGVLIRGATPHFDYIASEVSKGLADLSLELRKPITFGVITADTLEQAIERAGTKHGNKGWEAALSAIEMANLFKSLR

SEQ ID NO: 8157 - protein, 1307 aa, Artificial Sequence
  SARS-CoV-2/USA/WA-UW291/2020__EPI_ISL_418076 spike protein (1-1147)(P715C_P1069C) LumSynth construct
MFVFLVLLPLVSSQCVNLTTRTQLPPAYTNSFTRGVYYPDKVFRSSVLHSTQDLFLPFFSNVTWFHAIHVSGTNGTKRFDNPVLPFNDGVYFASTEKSNIIRGWIFGTTLDSKTQSLLIVNNATNVVIKVCEFQFCNDPFLGVYYHKNNKSWMESEFRVYSSANNCTFEYVSQPFLMDLEGKQGNFKNLREFVFKNIDGYFKIYSKHTPINLVRDLPQGFSALEPLVDLPIGINITRFQTLLALHRSYLTPGDSSSGWTAGAAAYYVGYLQPRTFLLKYNENGTITDAVDCALDPLSETKCTLKSFTVEKGIYQTSNFRVQPTESIVRFPNITNLCPFGEVFNATRFASVYAWNRKRISNCVADYSVLYNSASFSTFKCYGVSPTKLNDLCFTNVYADSFVIRGDEVRQIAPGQTGKIADYNYKLPDDFTGCVIAWNSNNLDSKVGGNYNYLYRLFRKSNLKPFERDISTEIYQAGSTPCNGVEGFNCYFPLQSYGFQPTNGVGYQPYRVVVLSFELLHAPATVCGPKKSTNLVKNKCVNFNFNGLTGTGVLTESNKKFLPFQQFGRDIADTTDAVRDPQTLEILDITPCSFGGVSVITPGTNTSNQVAVLYQGVNCTEVPVAIHADQLTPTWRVYSTGSNVFQTRAGCLIGAEHVNNSYECDIPIGAGICASYQTQTNSPRRARSVASQSIIAYTMSLGAENSVAYSNNSIAICTNFTISVTTEILPVSMTKTSVDCTMYICGDSTECSNLLLQYGSFCTQLNRALTGIAVEQDKNTQEVFAQVKQIYKTPPIKDFGGFNFSQILPDPSKPSKRSFIEDLLFNKVTLADAGFIKQYGDCLGDIAARDLICAQKFNGLTVLPPLLTDEMIAQYTSALLAGTITSGWTFGAGAALQIPFAMQMAYRFNGIGVTQNVLYENQKLIANQFNSAIGKIQYSLSSTASALGKLQDVVNQNAQALNTLVKQLSSNFGAISSVLNDILSRLDKVEAEVQIDRLITGRLQSLQTYVTQQLIRAAEIRASANLAATKMSECVLGQSKRVDFCGKGYHLMSFPQSAPHGVVFLHVTYVCAQEKNFTTAPAICHDGKAHFPREGVFVSNGTHWFVTQRNFYEPQIITTDNTFVSGNCDVVIGIVNNTVYDPLQPELDSGGGSGGGQIYEGKLTAEGLRFGIVASRFNHALVDRLVEGAIDAIVRHGGREEDITLVRVPGSWEIPVAAGELARKEDIDAVIAIGVLIRGATPHFDYIASEVSKGLADLSLELRKPITFGVITADTLEQAIERAGTKHGNKGWEAALSAIEMANLFKSLR

SEQ ID NO: 8158 - protein, 1307 aa, Artificial Sequence; identical to SEQ ID NO: 8121
  SARS-CoV-2/Portugal/PT0034/2020__EPI_ISL_418019 spike protein (1-1147)(P715C_P1069C) LumSynth construct

SEQ ID NO: 8159 - protein, 1307 aa, Artificial Sequence; identical to SEQ ID NO: 8113
  SARS-CoV-2/Iceland/202/2020__EPI_ISL_417750 spike protein (1-1147)(P715C_P1069C) LumSynth construct

SEQ ID NO: 8160 - protein, 1307 aa, Artificial Sequence
  SARS-CoV-2/USA/WA-UW261/2020__EPI_ISL_418046 spike protein (1-1147)(P715C_P1069C) LumSynth construct
MFVFLVLLPLVSSQCVNLTTRTQLPPAYTNSFTRGVYYPDKVFRSSVLHSTQDLFLPFFSNVTWFHAIHVSGTNGTKRFDNPVLPFNDGVYFASTEKSNIIRGWIFGTTLDSKTQSLLIVNNATNVVIKVCEFQFCNDPFLGVYYHKNNKSWMESEFRVYSSANNCTFEYVSQPFLMDLEGKQGNFKNLREFVFKNIDGYFKIYSKHTPINLVRDLPQGFSALEPLVDLPIGINITRFQTLLALHRSYLTPGDSSSGWTAGAAAYYVGYLQPRTFLLKYNENGTITDAVDCALDPLSETKCTLKSFTVEKGIYQTSNFRVQPTESIVRFPNITNLCPFGEVFNATRFTSVYAWNRKRISNCVADYSVLYNSASFSTFKCYGVSPTKLNDLCFTNVYADSFVIRGDEVRQIAPGQTGKIADYNYKLPDDFTGCVIAWNSNNLDSKVGGNYNYLYRLFRKSNLKPFERDISTEIYQAGSTPCNGVEGFNCYFPLQSYGFQPTNGVGYQPYRVVVLSFELLHAPATVCGPKKSTNLVKNKCVNFNFNGLTGTGVLTESNKKFLPFQQFGRDIADTTDAVRDPQTLEILDITPCSFGGVSVITPGTNTSNQVAVLYQDVNCTEVPVAIHADQLTPTWRVYSTGSNVFQTRAGCLIGAEHVNNSYECDIPIGAGICASYQTQTNSPRRARSVASQSIIAYTMSLGAENSVAYSNNSIAICTNFTISVTTEILPVSMTKTSVDCTMYICGDSTECSNLLLQYGSFCTQLNRALTGIAVEQDKNTQEVFAQVKQIYKTPPIKDFGGFNFSQILPDPSKPSKRSFIEDLLFNKVTLADAGFIKQYGDCLGDIAARDLICAQKFNGLTVLPPLLTDEMIAQYTSALLAGTITSGWTFGAGAALQIPFAMQMAYRFNGIGVTQNVLYENQKLIANQFNSAIGKIQDSLSSTASALGKLQDVVNQNAQALNTLVKQLSSNFGAISSVLNDILSRLDKVEAEVQIDRLITGRLQSLQTYVTQQLIRAAEIRASANLAATKMSECVLGQSKRVDFCGKGYHLMSFPQSAPHGVVFLHVTYVCAQEKNFTTAPAICHDGKAHFPREGVFVSNGTHWFVTQRNFYEPQIITTDNTFVSGNCDVVIGIVNNTVYDPLQPELDSGGGSGGGQIYEGKLTAEGLRFGIVASRFNHALVDRLVEGAIDAIVRHGGREEDITLVRVPGSWEIPVAAGELARKEDIDAVIAIGVLIRGATPHFDYIASEVSKGLADLSLELRKPITFGVITADTLEQAIERAGTKHGNKGWEAALSAIEMANLFKSLR

SEQ ID NO: 8161 - protein, 1307 aa, Artificial Sequence
  SARS-CoV-2/Portugal/PT0035/2020__EPI_ISL_418020 spike protein (1-1147)(P715C_P1069C) LumSynth construct
MFVFLVLLPLVSSQCVNLTTRTQLPPAYTNSFTRGVYYPDKVFRSSVLHSTQDLFLPFFSNVTWFHAIHVSGTNGTKRFDNPVLPFNDGVYFASTEKSNIIRGWIFGTTLDSKTQSLLIVNNATNVVIKVCEFQFCNDPFLGVYYHKNNKSWMESEFRVYSSANNCTFEYVSQPFLMDLEGKQGNFKNLREFVFKNIDGYFKIYSKHTPINLVRDLPQGFSALEPLVDLPIGINITRFQTLLALHRSYLTPGDSSSGWTAGAAAYYVGYLQPRTFLLKYNENGTITDAVDCALDPLSETKCTLKSFTVEKGIYQTSNFRVQPTESIVRFPNITNLCPFGEVFNATRFASVYAWNRKRISNCVADYSVLYNSASFSTFKCYGVSPTKLNDLCFTNVYADSFVIRGDEVRQIAPGQTGKIADYNYKLPDDFTGCVIAWNSNNLDSKVGGNYNYLYRLFRKSNLKPFERDISTEIYQAGSTPCNGVEGFNCYFPLQSYGFQPTNGVGYQPYRVVVLSFELLHAPATVCGPKKSTNLVKNKCVNFNFNGLTGTGVLTESNKKFLPFQQFGRDIADTTDAVRDPQTLEILDITPCSFGGVSVITPGTNTSNQVAVLYQDVNCTEVPVAIHADQLTPTWRVYSTGSNVFQTRAGCLIGAEHVNNSYECDIPIGAGICASYQTQTNSPRRARSVASQSIIAYTMSLGAENSVAYSNNSIAICTNFTISVTTEILPVSMTKTSVDCTMYICGDSTECSNLLLQYGSFCTQLNRALTGIAVEQDKNTQEVFAQVKQIYKTPPIKDFGGFNFSQILPDPSKPSKRSFIEDLLFNKVTLADAGFIKQYGDCLGDISARDLICAQKFNGLTVLPPLLTDEMIAQYTSALLAGTITSGWTFGAGAALQIPFAMQMAYRFNGIGVTQNVLYENQKLIANQFNSAIGKIQDSLSSTASALGKLQDVVNQNAQALNTLVKQLSSNFGAISSVLNDILSRLDKVEAEVQIDRLITGRLQSLQTYVTQQLIRAAEIRASANLAATKMSECVLGQSKRVDFCGKGYHLMSFPQSAPHGVVFLHVTYVCAQEKNFTTAPAICHDGKAHFPREGVFVSNGTHWFVTQRNFYEPQIITTDNTFVSGNCDVVIGIVNNTVYDPLQPELDSGGGSGGGQIYEGKLTAEGLRFGIVASRFNHALVDRLVEGAIDAIVRHGGREEDITLVRVPGSWEIPVAAGELARKEDIDAVIAIGVLIRGATPHFDYIASEVSKGLADLSLELRKPITFGVITADTLEQAIERAGTKHGNKGWEAALSAIEMANLFKSLR

SEQ ID NO: 8162 - protein, 1307 aa, Artificial Sequence
  SARS-CoV-2/USA/NY-NYUMC7/2020__EPI_ISL_418192 spike protein (1-1147)(P715C_P1069C) LumSynth construct
MFVFLVLLPLVSSQCVNLTTRTQLPPAYTNSFTRGVYYPDKVFRSSVLHSTQDLFLPFFSNVTWFHAIHVSGTNGTKRFDNPVLPFNDGVYFASTEKSNIIRGWIFGTTLDSKTQSLLIVNNATNVVIKVCEFQFCNDPFLGVYHHKNNKSWMESEFRVYSSANNCTFEYVSQPFLMDLEGKQGNFKNLREFVFKNIDGYFKIYSKHTPINLVRDLPQGFSALEPLVDLPIGINITRFQTLLALHRSYLTPGDSSSGWTAGAAAYYVGYLQPRTFLLKYNENGTITDAVDCALDPLSETKCTLKSFTVEKGIYQTSNFRVQPTESIVRFPNITNLCPFGEVFNATRFASVYAWNRKRISNCVADYSVLYNSASFSTFKCYGVSPTKLNDLCFTNVYADSFVIRGDEVRQIAPGQTGKIADYNYKLPDDFTGCVIAWNSNNLDSKVGGNYNYLYRLFRKSNLKPFERDISTEIYQAGSTPCNGVEGFNCYFPLQSYGFQPTNGVGYQPYRVVVLSFELLHAPATVCGPKKSTNLVKNKCVNFNFNGLTGTGVLTESNKKFLPFQQFGRDIADTTDAVRDPQTLEILDITPCSFGGVSVITPGTNTSNQVAVLYQGVNCTEVPVAIHADQLTPTWRVYSTGSNVFQTRAGCLIGAEHVNNSYECDIPIGAGICASYQTQTNSPRRARSVASQSIIAYTMSLGAENSVAYSNNSIAICTNFTISVTTEILPVSMTKTSVDCTMYICGDSTECSNLLLQYGSFCTQLNRALTGIAVEQDKNTQEVFAQVKQIYKTPPIKDFGGFNFSQILPDPSKPSKRSFIEDLLFNKVTLADAGFIKQYGDCLGDIAARDLICAQKFNGLTVLPPLLTDEMIAQYTSALLAGTITSGWTFGAGAALQIPFAMQMAYRFNGIGVTQNVLYENQKLIANQFNSAIGKIQDSLSSTASALGKLQDVVNQNAQALNTLVKQLSSNFGAISSVLNDILSRLDKVEAEVQIDRLITGRLQSLQTYVTQQLIRAAEIRASANLAATKMSECVLGQSKRVDFCGKGYHLMSFPQSAPHGVVFLHVTYVCAQEKNFTTAPAICHDGKAHFPREGVFVSNGTHWFVTQRNFYEPQIITTDNTFVSGNCDVVIGIVNNTVYDPLQPELDSGGGSGGGQIYEGKLTAEGLRFGIVASRFNHALVDRLVEGAIDAIVRHGGREEDITLVRVPGSWEIPVAAGELARKEDIDAVIAIGVLIRGATPHFDYIASEVSKGLADLSLELRKPITFGVITADTLEQAIERAGTKHGNKGWEAALSAIEMANLFKSLR

SEQ ID NO: 8163 - protein, 1307 aa, Artificial Sequence
  SARS-CoV-2/Iceland/189/2020__EPI_ISL_417709 spike protein (1-1147)(P715C_P1069C) LumSynth construct
MFVFLVLLPLVSSQCVNLTTRTQLPPAYTNSFTRGVYYPDKVFRSSVLHSTQDLFLPFFSNVTWFHAIHVSGTNGTKRFDNPVLPFNDGVYFASTEKSNIIRGWIFGTTLDSKTQSLLIVNNATNVVIKVCEFQFCNDPFLGVYYHKNNKSWMESEFRVYSSANNCTFEYVSQPFLMDLEGKQGNFKNLREFVFKNIDGYFKIYSKHTPINLVRDLPQGFSALEPLVDLPIGINITRFQTLLALHRSYLTPGDSSSGWTAGAAAYYVGYLQPRTFLLKYNENGTITDAVDCALDPLSETKCTLKSFTVEKGIYQTSNFRVQPTESIVRFPNITNLCPFGEVFNATRFASVYAWNRKRISNCVADYSVLYNSASFSTFKCYGVSPTKLNDLCFTNVYADSFVIRGDEVRQIAPGQTGKIADYNYKLPDDFTGCVIAWNSNNLDSKVGGNYNYLYRLFRKSNLKPFERDISTEIYQAGSTPCNGVEGFNCYFPLQSYGFQPTNGVGYQPYRVVVLSFELLHAPATVCGPKKSTNLVKNKCVNFNFNGLTGTGVLTESNKKFLPFQQFGRDIADTTDAVRDPQTLEILDITPCSFGGVSVITPGTNTSNQVAVLYQGVNCTEVPVAIHADQLTPTWRVYSTGSNVFQTRAGCLIGAEHVNNSYECDIPIGAGICASYQTQTNSPRRARSVASQSIIAYTMSLGAENSVAYSNNSIAICTNFTISVTTEILPVSMTKTSVDCTMYICGDSTECSNLLLQYGSFCTQLNRALTGIAVEQDKNTQEVFAQVKQIYKTPPIKDFGGFNFSQILPDPSKPSKRSFIEDLLFNKVTLADAGFTKQYGDCLGDIAARDLICAQKFNGLTVLPPLLTDEMIAQYTSALLAGTITSGWTFGAGAALQIPFAMQMAYRFNGIGVTQNVLYENQKLIANQFNSAIGKIQDSLSSTASALGKLQDVVNQNAQALNTLVKQLSSNFGAISSVLNDILSRLDKVEAEVQIDRLITGRLQSLQTYVTQQLIRAAEIRASANLAATKMSECVLGQSKRVDFCGKGYHLMSFPQSAPHGVVFLHVTYVCAQEKNFTTAPAICHDGKAHFPREGVFVSNGTHWFVTQRNFYEPQIITTDNTFVSGNCDVVIGIVNNTVYDPLQPELDSGGGSGGGQIYEGKLTAEGLRFGIVASRFNHALVDRLVEGAIDAIVRHGGREEDITLVRVPGSWEIPVAAGELARKEDIDAVIAIGVLIRGATPHFDYIASEVSKGLADLSLELRKPITFGVITADTLEQAIERAGTKHGNKGWEAALSAIEMANLFKSLR

SEQ ID NO: 8164 - protein, 1307 aa, Artificial Sequence
  SARS-CoV-2/Australia/NSW56/2020__EPI_ISL_417408 spike protein (1-1147)(P715C_P1069C) LumSynth construct
MFVFLVLLPLVSSQCVNLTTRTQLPPAYTNSFTRGVYYPDKVFRSSVLHSTQDLFLPFFSNVTWFHAIHVSGTNGTKRFDNPVLPFNDGVYFASTEKSNIIRGWIFGTTLDSKTQSLLIVNNATNVVIKVCEFQFCNDPFLGVYYHKNNKSWMESEFRVYSSANNCTFEYVSQPFLMDLEGKQGNFKNLREFVFKNIDGYFKIYSKHTPINLVRDLPQGFSALEPLVDLPIGINITRFQTLLALHRSYLTPGDSSSGWTAGAAAYYVGYLQPRTFLLKYNENGTITDAVDCALDPLSETKCTLKSFTVEKGIYQTSNFRVQPTESIVRFPNITNLCPFGEVFNATRFASVYAWNRKRISNCVADYSVLYNSASFSTFKCYGVSPTKLNDLCFTNVYADSFVIRGDEVRQIAPGQTGKIADYNYKLPDDFTGCVIAWNSNNLDSKVGGNYNYLYRLFRKSNLKPFERDISTEIYQAGSTPCNGVEGFNCYFPLQSYGFQPTNGVGYQPYRVVVLSFELLHAPATVCGPKKSTNLVKNKCVNFNFNGLTGTGVLTESNKKFLPFQQFGRDIADTTDAVRDPQTLEILDITPCSFGGVSVITPGTNTSNQVAVLYQDVNCTEVPVAIHADQLTPTWRVYSTGSNVFQTRAGCLIGAEHVNNSYECDIPIGAGICASYQTQTNSPRRARSVASQSIIAYTMSLGAENSVAYSNNSIAICTNFTISVTTEILPVSMTKTSVDCTMYICGDSTECSNLLLQYGSFCTQLNRALTGIAVEQDKNTQEVFAQVKQIYKTPPIKDFGGFNFSQILPDSSKPSKRSFIEDLLFNKVTLADAGFIKQYGDCLGDIAARDLICAQKFNGLTVLPPLLTDEMIAQYTSALLAGTITSGWTFGAGAALQIPFAMQMAYRFNGIGVTQNVLYENQKLIANQFNSAIGKIQDSLSSTASALGKLQDVVNQNAQALNTLVKQLSSNFGAISSVLNDILSRLDKVEAEVQIDRLITGRLQSLQTYVTQQLIRAAEIRASANLAATKMSECVLGQSKRVDFCGKGYHLMSFPQSAPHGVVFLHVTYVCAQEKNFTTAPAICHDGKAHFPREGVFVSNGTHWFVTQRNFYEPQIITTDNTFVSGNCDVVIGIVNNTVYDPLQPELDSGGGSGGGQIYEGKLTAEGLRFGIVASRFNHALVDRLVEGAIDAIVRHGGREEDITLVRVPGSWEIPVAAGELARKEDIDAVIAIGVLIRGATPHFDYIASEVSKGLADLSLELRKPITFGVITADTLEQAIERAGTKHGNKGWEAALSAIEMANLFKSLR

SEQ ID NO: 8165 - protein, 1307 aa, Artificial Sequence
  SARS-CoV-2/Iceland/280/2020__EPI_ISL_417608 spike protein (1-1147)(P715C_P1069C) LumSynth construct
MFVFLVLLPLVSSQCVNLTTRTQLPPAYTNSFTRGVYYPDKVFRSSVLHSTQDLFLPFFSNVTWFHAIHVSGTNGTKRFDNPVLPFNDGVYFASTEKSNIIRGWIFGTTLDSKTQSLLIVNNATNVVIKVCEFQFCNDPFLGVYYHKNNKSWMESEFRVYSSANNCTFEYVSQPFLMDLEGKQGNFKNLREFVFKNIDGYFKIYSKHTPINLVRDLPQGFSALEPLVDLPIGINITRFQTLLALHRSYLTPGDSSSGWTAGAAAYYVGYLQPRTFLLKYNENGTITDAVDCALDPLSETKCTLKSFTVEKGIYQTSNFRVQPTESIVRFPNITNLCPFGEVFNATRFASVYAWNRKRISNCVADYSVLYNSASFSTFKCYGVSPTKLNDLCFTNVYADSFVIRGDEVRQIAPGQTGKIADYNYKLPDDFTGCVIAWNSNNLDSKVGGNYNYLYRLFRKSNLKPFERDISTEIYQAGSTPCNGVEGFNCYFPLQSYGFQPTNGVGYQPYRVVVLSFELLHAPATVCGPKKSTNLVKNKCVNFNFNGLTGTGVLTESNKKFLPFQQFGRDIADTTDAVRDPQTLEILDITPCSFGGVSVITPGTNTSNQVAVLYQGVNCTEVPVAIHADQLTPTWRVYSTGSNVFQTRAGCLIGAEHVNNSYECDIPIGAGICASYHTQTNSPRRARSVASQSIIAYTMSLGAENSVAYSNNSIAICTNFTISVTTEILPVSMTKTSVDCTMYICGDSTECSNLLLQYGSFCTQLNRALTGIAVEQDKNTQEVFAQVKQIYKTPPIKDFGGFNFSQILPDPSKPSKRSFIEDLLFNKVTLADAGFIKQYGDCLGDIAARDLICAQKFNGLTVLPPLLTDEMIAQYTSALLAGTITSGWTFGAGAALQIPFAMQMAYRFNGIGVTQNVLYENQKLIANQFNSAIGKIQDSLSSTASALGKLQDVVNQNAQALNTLVKQLSSNFGAISSVLNDILSRLDKVEAEVQIDRLITGRLQSLQTYVTQQLIRAAEIRASANLAATKMSECVLGQSKRVDFCGKGYHLMSFPQSAPHGVVFLHVTYVCAQEKNFTTAPAICHDGKAHFPREGVFVSNGTHWFVTQRNFYEPQIITTDNTFVSGNCDVVIGIVNNTVYDPLQPELDSGGGSGGGQIYEGKLTAEGLRFGIVASRFNHALVDRLVEGAIDAIVRHGGREEDITLVRVPGSWEIPVAAGELARKEDIDAVIAIGVLIRGATPHFDYIASEVSKGLADLSLELRKPITFGVITADTLEQAIERAGTKHGNKGWEAALSAIEMANLFKSLR

SEQ ID NO: 8166 - protein, 1307 aa, Artificial Sequence; identical to SEQ ID NO: 8121
  SARS-CoV-2/Iceland/247/2020__EPI_ISL_417575 spike protein (1-1147)(P715C_P1069C) LumSynth construct

SEQ ID NO: 8167 - protein, 1307 aa, Artificial Sequence
  SARS-CoV-2/Iceland/238/2020__EPI_ISL_417566 spike protein (1-1147)(P715C_P1069C) LumSynth construct
MFVFLVLLPLVSSQCVNLTTRTQLPPAYTNSFTRGVYYPDKVFRSSVLHSTQDLFLPFFSNVTWFHAIHVSGTNGTKRFDNPVLPFNDGVYFASTEKSNIIRGWIFGTTLDSKTQSLLIVNNATNVVIKVCEFQFCNDPFLGVYYHKNNKSWMESEFRVYSSANNCTFEYVSQPFLMDLEGKQGNFKNLREFVFKNIDGYFKIYSKHTPINLVRDLPQGFSALEPLVDLPIGINITRFQTLLALHRSYLTPGDSSSGWTAGAAAYYVGYLQPRTFLLKYNENGTITDAVDCALDPLSETKCTLKSFTVEKGIYQTSNFRVQPTESIVRFPNITNLCPFGEVFNATRFASVYAWNRKRISNCVADYSVLYNSASFSTFKCYGVSPTKLNDLCFTNVYADSFVIRGDEVRQIAPGQTGKIADYNYKLPDDFTGCVIAWNSNNLDSKVGGNYNYLYRLFRKSNLKPFERDISTEIYQAGSTPCNGVEGFNCYFPLQSYGFQPTNGVGYQPYRVVVLSFELLHAPATVCGPKKSTNLVKNKCVNFNFNGLTGTGVLTESNKKFLPFQQFGRDIADTTDAVRDPQTLEILDITPCSFGGVSVITPGTNTSNQVAVLYQGVNCTEVPVAIHADQLTPTWRVYSTGSNVFQTRAGCLIGAEHVNNSYECDIPIGAGICASYQTQTNSPRRARSVASQSIIAYTMSLGAENSVAYSNNSIAICTNFTISVTTEILPVSMTKTSVDCTMYICGDSTECSNLLLQYGSFCTQLNRALTGIAVEQDKNTQEVFAQVKQIYKTPPIKDFGGFNFSQILPDPSKPSKRSFIEDLLFNKVTLADVGFIKQYGDCLGDIAARDLICAQKFNGLTVLPPLLTDEMIAQYTSALLAGTITSGWTFGAGAALQIPFAMQMAYRFNGIGVTQNVLYENQKLIANQFNSAIGKIQDSLSSTASALGKLQDVVNQNAQALNTLVKQLSSNFGAISSVLNDILSRLDKVEAEVQIDRLITGRLQSLQTYVTQQLIRAAEIRASANLAATKMSECVLGQSKRVDFCGKGYHLMSFPQSAPHGVVFLHVTYVCAQEKNFTTAPAICHDGKAHFPREGVFVSNGTHWFVTQRNFYEPQIITTDNTFVSGNCDVVIGIVNNTVYDPLQPELDSGGGSGGGQIYEGKLTAEGLRFGIVASRFNHALVDRLVEGAIDAIVRHGGREEDITLVRVPGSWEIPVAAGELARKEDIDAVIAIGVLIRGATPHFDYIASEVSKGLADLSLELRKPITFGVITADTLEQAIERAGTKHGNKGWEAALSAIEMANLFKSLR

SEQ ID NO: 8168 - protein, 1307 aa, Artificial Sequence
  SARS-CoV-2/Greece/16/2020__EPI_ISL_418265 spike protein (1-1147)(P715C_P1069C) LumSynth construct
MFVFLVLLPLVSSQCVNLTTRTQLPPAYTNSFTRGVYYPDKVFRSSVLHSTQDLFLPFFSNVTWFHAIHVSGTNGTKRFDNPVLPFNDGVYFASTEKSNIIRGWIFGTTLDSKTQSLLIVNNATNVVIKVCEFQFCNDPFLGVYYHKNNKSWMESEFRVYSSANNCTFEYVSQPFLMDLEGKQGNFKNLREFVFKNVDGYFKIYSKHTPINLVRDLPQGFSALEPLVDLPIGINITRFQTLLALHRSYLTPGDSSSGWTAGAAAYYVGYLQPRTFLLKYNENGTITDAVDCALDPLSETKCTLKSFTVEKGIYQTSNFRVQPTESIVRFPNITNLCPFGEVFNATRFASVYAWNRKRISNCVADYSVLYNSASFSTFKCYGVSPTKLNDLCFTNVYADSFVIRGDEVRQIAPGQTGKIADYNYKLPDDFTGCVIAWNSNNLDSKVGGNYNYLYRLFRKSNLKPFERDISTEIYQAGSTPCNGVEGFNCYFPLQSYGFQPTNGVGYQPYRVVVLSFELLHAPATVCGPKKSTNLVKNKCVNFNFNGLTGTGVLTESNKKFLPFQQFGRDIADTTDAVRDPQTLEILDITPCSFGGVSVITPGTNTSNQVAVLYQDVNCTEVPVAIHADQLTPTWRVYSTGSNVFQTRAGCLIGAEHVNNSYECDIPIGAGICASYQTQTNSPRRARSVASQSIIAYTMSLGAENSVAYSNNSIAICTNFTISVTTEILPVSMTKTSVDCTMYICGDSTECSNLLLQYGSFCTQLNRALTGIAVEQDKNTQEVFAQVKQIYKTPPIKDFGGFNFSQILPDPSKPSKRSFIEDLLFNKVTLADAGFIKQYGDCLGDIAARDLICAQKFNGLTVLPPLLTDEMIAQYTSALLAGTITSGWTFGAGAALQIPFAMQMAYRFNGIGVTQNVLYENQKLIANQFNSAIGKIQDSLSSTASALGKLQDVVNQNAQALNTLVKQLSSNFGAISSVLNDILSRLDKVEAEVQIDRLITGRLQSLQTYVTQQLIRAAEIRASANLAATKMSECVLGQSKRVDFCGKGYHLMSFPQSAPHGVVFLHVTYVCAQEKNFTTAPAICHDGKAHFPREGVFVSNGTHWFVTQRNFYEPQIITTDNTFVSGNCDVVIGIVNNTVYDPLQPELDSGGGSGGGQIYEGKLTAEGLRFGIVASRFNHALVDRLVEGAIDAIVRHGGREEDITLVRVPGSWEIPVAAGELARKEDIDAVIAIGVLIRGATPHFDYIASEVSKGLADLSLELRKPITFGVITADTLEQAIERAGTKHGNKGWEAALSAIEMANLFKSLR

SEQ ID NO: 8169 - protein, 1307 aa, Artificial Sequence
  SARS-CoV-2/Iceland/319/2020__EPI_ISL_417648 spike protein (1-1147)(P715C_P1069C) LumSynth construct
MFVFLVLLPLVSSQCVNLTTRTQLPPAYTNSFTRGVYYPDKVFRSSVLHSTQDLFLPFFSNVTWFHAIHVSGTNGTKRFDNPVLPFNDGVYFASTEKSNIIRGWIFGTTLDSKTQSLLIVNNATNVVIKVCEFQFCNDPFLGVYYHKNNKSWMESEFRVYSSANNCTFEYVSQPFLIDLEGKQGNFKNLREFVFKNIDGYFKIYSKHTPINLVRDLPQGFSALEPLVDLPIGINITRFQTLLALHRSYLTPGDSSSGWTAGAAAYYVGYLQPRTFLLKYNENGTITDAVDCALDPLSETKCTLKSFTVEKGIYQTSNFRVQPTESIVRFPNITNLCPFGEVFNATRFASVYAWNRKRISNCVADYSVLYNSASFSTFKCYGVSPTKLNDLCFTNVYADSFVIRGDEVRQIAPGQTGKIADYNYKLPDDFTGCVIAWNSNNLDSKVGGNYNYLYRLFRKSNLKPFERDISTEIYQAGSTPCNGVEGFNCYFPLQSYGFQPTNGVGYQPYRVVVLSFELLHAPATVCGPKKSTNLVKNKCVNFNFNGLTGTGVLTESNKKFLPFQQFGRDIADTTDAVRDPQTLEILDITPCSFGGVSVITPGTNTSNQVAVLYQGVNCTEVPVAIHADQLTPTWRVYSTGSNVFQTRAGCLIGAEHVNNSYECDIPIGAGICASYQTQTNSPRRARSVASQSIIAYTMSLGAENSVAYSNNSIAICTNFTISVTTEILPVSMTKTSVDCTMYICGDSTECSNLLLQYGSFCTQLNRALTGIAVEQDKNTQEVFAQVKQIYKTPPIKDFGGFNFSQILPDPSKPSKRSFIEDLLFNKVTLADAGFIKQYGDCLGDIAARDLICAQKFNGLTVLPPLLTDEMIAQYTSALLAGTITSGWTFGAGAALQIPFAMQMAYRFNGIGVTQNVLYENQKLIANQFNSAIGKIQDSLSSTASALGKLQDVVNQNAQALNTLVKQLSSNFGAISSVLNDILSRLDKVEAEVQIDRLITGRLQSLQTYVTQQLIRAAEIRASANLAATKMSECVLGQSKRVDFCGKGYHLMSFPQSAPHGVVFLHVTYVCAQEKNFTTAPAICHDGKAHFPREGVFVSNGTHWFVTQRNFYEPQIITTDNTFVSGNCDVVIGIVNNTVYDPLQPELDSGGGSGGGQIYEGKLTAEGLRFGIVASRFNHALVDRLVEGAIDAIVRHGGREEDITLVRVPGSWEIPVAAGELARKEDIDAVIAIGVLIRGATPHFDYIASEVSKGLADLSLELRKPITFGVITADTLEQAIERAGTKHGNKGWEAALSAIEMANLFKSLR

SEQ ID NO: 8170 - protein, 1307 aa, Artificial Sequence
  SARS-CoV-2/Congo/94/2020__EPI_ISL_417947 spike protein (1-1147)(P715C_P1069C) LumSynth construct
MFVFLVLLPLVSSQCVNLTTRTQLPPAYTNSFTRGVYYPDKVFRSSVLHSTQDLFLPFFSNVTWFHAIHVSGTNGTKRFDNPVLPFNDGVYFASTEKSNIIRGWIFGTTLDSKTQSLLIVNNATNVVIKVCEFQFCNDPFLGVYYHKNNKSWMESEFRVYSSANNCTFEYVSQPFLMDLEGKQGNFKNLREFVFKNIDGYFKIYSKHTPINLVRDLPQGFSALEPLVDLPIGINITRFQTLLALHRSYLTPGDSSSGWTAGAAAYYVGYLQPRTFLLKYNENGTITDAVDCALDPLSETKCTLKSFTVEKGIYQTSNFRVQPTESIVRFPNITNLCPFGEVFNATRFASVYAWNRKRISNCVADYSVLYNSASFSTFKCYGVSPTKLNDLCFTNVYADSFVIRGDEVRQIAPGQTGKIADYNYKLPDDFTGCVIAWNSNNLDSKVGGNYNYLYRLFRKSNLKPFERDISTEIYQAGSTPCNGVEGFNCYFPLQSYGFQPTNGVGYQPYRVVVLSFELLHAPATVCGPKKSTNLVKNKCVNFNFNGLTGTGVLTESNKKFLPFQQFGRDIADTTDAVRDPQTLEILDITPCSFGGVSVITPGTNTSNQVAVLYQGVNCTEVPVAIHADQLTPTWRVYSTGSNVFQTRAGCLIGAEHVNNSYECDIPIGAGICASYQTQTNSPRRARSVASQSIIAYTMSLGAENSVAYSNNSIAICTNFTISVTTEILPVSMTKTSVDCTMYICGDSTECSNLLLQYGSFCTQLNRALTGIAVEQDKNTQEVFAQVKQIYKTPPIKDFGGFNFSQILPDPSKPSKRSFIEDILFNKVTLADAGFIKQYGDCLGDIAARDLICAQKFNGLTVLPPLLTDEMIAQYTSALLAGTITSGWTFGAGAALQIPFAMQMAYRFNGIGVTQNVLYENQKLIANQFNSAIGKIQDSLSSTASALGKLQDVVNQNAQALNTLVKQLSSNFGAISSVLNDILSRLDKVEAEVQIDRLITGRLQSLQTYVTQQLIRAAEIRASANLAATKMSECVLGQSKRVDFCGKGYHLMSFPQSAPHGVVFLHVTYVCAQEKNFTTAPAICHDGKAHFPREGVFVSNGTHWFVTQRNFYEPQIITTDNTFVSGNCDVVIGIVNNTVYDPLQPELDSGGGSGGGQIYEGKLTAEGLRFGIVASRFNHALVDRLVEGAIDAIVRHGGREEDITLVRVPGSWEIPVAAGELARKEDIDAVIAIGVLIRGATPHFDYIASEVSKGLADLSLELRKPITFGVITADTLEQAIERAGTKHGNKGWEAALSAIEMANLFKSLR

SEQ ID NO: 8171 - protein, 1307 aa, Artificial Sequence
  SARS-CoV-2/Congo/158/2020__EPI_ISL_417950 spike protein (1-1147)(P715C_P1069C) LumSynth construct
MFVFLVLLPLVSSQCVNLTTRTQLPPAYTNSFTRGVYYPDKVFRSSVLHSTQDLFLPFFSNVTWFHAIHVSGTNGTKRFDNPVLPFNDGVYFASTEKSNIIRGWIFGTTLDSKTQSLLIVNNATNVVIKVCEFQFCNDPFLGVYYHKNNKSWMESEFRVYSSANNCTFEYVSQPFLMDLEGKQGNFKNLREFVFKNIDGYFKIYSKHTPINLVRDLPQGFSALEPLVDLPIGINITRFQTLLALHRSYLTPGDSSSGWTAGAAAYYVGYLQPRTFLLKYNENGTITDAVDCALDPLSETKCTLKSFTVEKGIYQTSNFRVQPTESIVRFPNITNLCPFGEVFNATRFASVYAWNRKRISNCVADYSVLYNSASFSTFKCYGVSPTKLNDLCFTNVYADSFVIRGDEVRQIAPGQTGKIADYNYKLPDDFTGCVIAWNSNNLDSKVGGNYNYLYRLFRKSNLKPFERDISTEIYQAGSTPCNGVEGFNCYFPLQSYGFQPTNGVGYQPYRVVVLSFELLHAPATVCGPKKSTNLVKNKCVNFNFNGLTGTGVLTESNKKFLPFQQFGRDIADTTDAVRDPQTLEILDITPCSFGGVSVITPGTNTSNQVAVLYQDVNCTEVPVAIHADQLTPTWRVYSTGSNVFQTRAGCLIGAEHVNNSYECDIPIGAGICASYQTQTNSPRRARSVASQSIIAYTMSLGAENSVAYSNNSIAICTNFTISVTTEILPVSMTKTSVDCTMYICGDSTECSNLLLQYGSFCTQLNRALTGIAVEQDKNTQEVFAQVKQIYKTPPIKDFGGFNFSQILPDPSKPSKRSFIEDLLFNKVTLADAGFIKQYGDCLGDIAARDLICAQKFNGLTVLPPLLTDEMIAQYTSALLAGTITSGWTFGAGAALQIPFAMQMAYRFNGIGVTQNVLYENQKLIANQFNSAIGKIQDSLSSTASALGKLQDVVNQNAQALNTLVKQLSSNFGAISSVLNDILSRLDKVEAEVQIDRLITGRLQSLQTYVTQQLIRAAEIRASANLAATKMSECVLGQSKRVDFCGKGYHLMSFPQSAPHGVVFLHVTYVCAQEKNFTTAPAICHDGKAHFPREGVFVSNGTHWFVTQRNFYEPQIITTDNTFLSGNCDVVIGIVNNTVYDPLQPELDSGGGSGGGQIYEGKLTAEGLRFGIVASRFNHALVDRLVEGAIDAIVRHGGREEDITLVRVPGSWEIPVAAGELARKEDIDAVIAIGVLIRGATPHFDYIASEVSKGLADLSLELRKPITFGVITADTLEQAIERAGTKHGNKGWEAALSAIEMANLFKSLR

SEQ ID NO: 8172 - protein, 1307 aa, Artificial Sequence
  SARS-CoV-2/USA/UT-00034/2020__EPI_ISL_417977 spike protein (1-1147)(P715C_P1069C) LumSynth construct
MFVFLVLLPLVSSQCVNLTTRTQLPPAYTNSFTRGVYYPDKVFRSSVLHSTQDLFLPFFSNVTWFHAIHVSGTNGTKRFDNPVLPFNDGVYFASTEKSNIIRGWIFGTTLDSKTQSLLIVNNATNVVIKVCEFQFCNDPFLGVYYYKNNKSWMESEFRVYSSANNCTFEYVSQPFLMDLEGKQGNFKNLREFVFKNIDGYFKIYSKHTPINLVRDLPQGFSALEPLVDLPIGINITRFQTLLALHRSYLTPGDSSSGWTAGAAAYYVGYLQPRTFLLKYNENGTITDAVDCALDPLSETKCTLKSFTVEKGIYQTSNFRVQPTESIVRFPNITNLCPFGEVFNATRFASVYAWNRKRISNCVADYSVLYNSASFSTFKCYGVSPTKLNDLCFTNVYADSFVIRGDEVRQIAPGQTGKIADYNYKLPDDFTGCVIAWNSNNLDSKVGGNYNYLYRLFRKSNLKPFERDISTEIYQAGSTPCNGVEGFNCYFPLQSYGFQPTNGVGYQPYRVVVLSFELLHAPATVCGPKKSTNLVKNKCVNFNFNGLTGTGVLTESNKKFLPFQQFGRDIADTTDAVRDPQTLEILDITPCSFGGVSVITPGTNTSNQVAVLYQGVNCTEVPVAIHADQLTPTWRVYSTGSNVFQTRAGCLIGAEHVNNSYECDIPIGAGICASYQTQTNSPRRARSVASQSIIAYTMSLGAENSVAYSNNSIAICTNFTISVTTEILPVSMTKTSVDCTMYICGDSTECSNLLLQYGSFCTQLNRALTGIAVEQDKNTQEVFAQVKQIYKTPPIKDFGGFNFSQILPDPSKPSKRSFIEDLLFNKVTLADAGFIKQYGDCLGDIAARDLICAQKFNGLTVLPPLLTDEMIAQYTSALLAGTITSGWTFGAGAALQIPFAMQMAYRFNGIGVTQNVLYENQKLIANQFNSAIGKIQDSLSSTASALGKLQDVVNQNAQALNTLVKQLSSNFGAISSVLNDILSRLDKVEAEVQIDRLITGRLQSLQTYVTQQLIRAAEIRASANLAATKMSECVLGQSKRVDFCGKGYHLMSFPQSAPHGVVFLHVTYVCAQEKNFTTAPAICHDGKAHFPREGVFVSNGTHWFVTQRNFYEPQIITTDNTFVSGNCDVVIGIVNNTVYDPLQPELDSGGGSGGGQIYEGKLTAEGLRFGIVASRFNHALVDRLVEGAIDAIVRHGGREEDITLVRVPGSWEIPVAAGELARKEDIDAVIAIGVLIRGATPHFDYIASEVSKGLADLSLELRKPITFGVITADTLEQAIERAGTKHGNKGWEAALSAIEMANLFKSLR

SEQ ID NO: 8173 - protein, 1307 aa, Artificial Sequence
  SARS-CoV-2/USA/UT-00033/2020__EPI_ISL_417976 spike protein (1-1147)(P715C_P1069C) LumSynth construct
MFVFLVLLPLVSSQCVNLTTRTQLPPAYTNSFTRGVYYPDKVFRSSVLHSTQDLFLPFFSNVTWFHAIHVSGTNGTKRFDNPVLPFNDGVYFASTEKSNIIRGWIFGTTLDSKTQSLLIVNNATNVVIKVCEFQFCNDPFLGVYYHKNNKSWMESEFRVYSSANNCTFEYVSQPFLMDLEGKQGNFKNLREFVFKNIDGYFKIYSKHTPINLVRDLPQGFSALEPLVDLPIGINITRFQTLLALHRSYLTPGDSSSGLTAGAAAYYVGYLQPRTFLLKYNENGTITDAVDCALDPLSETKCTLKSFTVEKGIYQTSNFRVQPTESIVRFPNITNLCPFGEVFNATRFASVYAWNRKRISNCVADYSVLYNSASFSTFKCYGVSPTKLNDLCFTNVYADSFVIRGDEVRQIAPGQTGKIADYNYKLPDDFTGCVIAWNSNNLDSKVGGNYNYLYRLFRKSNLKPFERDISTEIYQAGSTPCNGVEGFNCYFPLQSYGFQPTNGVGYQPYRVVVLSFELLHAPATVCGPKKSTNLVKNKCVNFNFNGLTGTGVLTESNKKFLPFQQFGRDIADTTDAVRDPQTLEILDITPCSFGGVSVITPGTNTSNQVAVLYQGVNCTEVPVAIHADQLTPTWRVYSTGSNVFQTRAGCLIGAEHVNNSYECDIPIGAGICASYQTQTNSPRRARSVASQSIIAYTMSLGAENSVAYSNNSIAICTNFTISVTTEILPVSMTKTSVDCTMYICGDSTECSNLLLQYGSFCTQLNRALTGIAVEQDKNTQEVFAQVKQIYKTPPIKDFGGFNFSQILPDPSKPSKRSFIEDLLFNKVTLADAGFIKQYGDCLGDIAARDLICAQKFNGLTVLPPLLTDEMIAQYTSALLAGTITSGWTFGAGAALQIPFAMQMAYRFNGIGVTQNVLYENQKLIANQFNSAIGKIQDSLSSTASALGKLQDVVNQNAQALNTLVKQLSSNFGAISSVLNDILSRLDKVEAEVQIDRLITGRLQSLQTYVTQQLIRAAEIRASANLAATKMSECVLGQSKRVDFCGKGYHLMSFPQSAPHGVVFLHVTYVCAQEKNFTTAPAICHDGKAHFPREGVFVSNGTHWFVTQRNFYEPQIITTDNTFVSGNCDVVIGIVNNTVYDPLQPELDSGGGSGGGQIYEGKLTAEGLRFGIVASRFNHALVDRLVEGAIDAIVRHGGREEDITLVRVPGSWEIPVAAGELARKEDIDAVIAIGVLIRGATPHFDYIASEVSKGLADLSLELRKPITFGVITADTLEQAIERAGTKHGNKGWEAALSAIEMANLFKSLR

SEQ ID NO: 8174 - protein, 1307 aa, Artificial Sequence
  SARS-CoV-2/USA/WI-13/2020__EPI_ISL_417516 spike protein (1-1147)(P715C_P1069C) LumSynth construct
MFVFLVLLPLVSSQCVNLTTRTQLPPAYTNSFTRGVYYPDKVFRSSVLHSTQDLFLPFFSNVTWFHAIHVSGTNGTKRFDNPVLPFNDGVYFASTEKSNIIRGWIFGTTLDSKTQSLLIVNNATNVVIKVCEFQFCNDPFLGVYYHKNNKSWMESEFRVYSSANNCTFEYVSQPFLMDLEGKQGNFKNLREFVFKNIDGYFKIYSKHTPINLVRDLPQGFSALEPLVDLPIGINITRFQTLLALHRSYLTPGDSSSGWTAGAAAYYVGYLQPRTFLLKYNENGTITDAVDCALDPLSETKCTLKSFTVEKGIYQTSNFRVLPTESIVRFPNITNLCPFGEVFNATRFASVYAWNRKRISNCVADYSVLYNSASFSTFKCYGVSPTKLNDLCFTNVYADSFVIRGDEVRQIAPGQTGKIADYNYKLPDDFTGCVIAWNSNNLDSKVGGNYNYLYRLFRKSNLKPFERDISTEIYQAGSTPCNGVEGFNCYFPLQSYGFQPTNGVGYQPYRVVVLSFELLHAPATVCGPKKSTNLVKNKCVNFNFNGLTGTGVLTESNKKFLPFQQFGRDIADTTDAVRDPQTLEILDITPCSFGGVSVITPGTNTSNQVAVLYQGVNCTEVPVAIHADQLTPTWRVYSTGSNVFQTRAGCLIGAEHVNNSYECDIPIGAGICASYQTQTNSPRRARSVASQSIIAYTMSLGAENSVAYSNNSIAICTNFTISVTTEILPVSMTKTSVDCTMYICGDSTECSNLLLQYGSFCTQLNRALTGIAVEQDKNTQEVFAQVKQIYKTPPIKDFGGFNFSQILPDPSKPSKRSFIEDLLFNKVTLADAGFIKQYGDCLGDIAARDLICAQKFNGLTVLPPLLTDEMIAQYTSALLAGTITSGWTFGAGAALQIPFAMQMAYRFNGIGVTQNVLYENQKLIANQFNSAIGKIQDSLSSTASALGKLQDVVNQNAQALNTLVKQLSSNFGAISSVLNDILSRLDKVEAEVQIDRLITGRLQSLQTYVTQQLIRAAEIRASANLAATKMSECVLGQSKRVDFCGKGYHLMSFPQSAPHGVVFLHVTYVCAQEKNFTTAPAICHDGKAHFPREGVFVSNGTHWFVTQRNFYEPQIITTDNTFVSGNCDVVIGIVNNTVYDPLQPELDSGGGSGGGQIYEGKLTAEGLRFGIVASRFNHALVDRLVEGAIDAIVRHGGREEDITLVRVPGSWEIPVAAGELARKEDIDAVIAIGVLIRGATPHFDYIASEVSKGLADLSLELRKPITFGVITADTLEQAIERAGTKHGNKGWEAALSAIEMANLFKSLR

SEQ ID NO: 8175 - protein, 1306 aa, Artificial Sequence
  SARS-CoV-2/India/1-27/2020__EPI_ISL_413522 spike protein (1-1146)(P714C_P1068C) LumSynth construct
MFVFLVLLPLVSSQCVNLTTRTQLPPAYTNSFTRGVYYPDKVFRSSVLHSTQDLFLPFFSNVTWFHAIHVSGTNGTKRFDNPVLPFNDGVYFASTEKSNIIRGWIFGTTLDSKTQSLLIVNNATNVVIKVCEFQFCNDPFLGVYHKNNKSWMESEFRVYSSANNCTFEYVSQPFLMDLEGKQGNFKNLREFVFKNIDGYFKIYSKHTPINLVRDLPQGFSALEPLVDLPIGINITRFQTLLALHRSYLTPGDSSSGWTAGAAAYYVGYLQPRTFLLKYNENGTITDAVDCALDPLSETKCTLKSFTVEKGIYQTSNFRVQPTESIVRFPNITNLCPFGEVFNATRFASVYAWNRKRISNCVADYSVLYNSASFSTFKCYGVSPTKLNDLCFTNVYADSFVIRGDEVIQIAPGQTGKIADYNYKLPDDFTGCVIAWNSNNLDSKVGGNYNYLYRLFRKSNLKPFERDISTEIYQAGSTPCNGVEGFNCYFPLQSYGFQPTNGVGYQPYRVVVLSFELLHAPATVCGPKKSTNLVKNKCVNFNFNGLTGTGVLTESNKKFLPFQQFGRDIADTTDAVRDPQTLEILDITPCSFGGVSVITPGTNTSNQVAVLYQDVNCTEVPVAIHADQLTPTWRVYSTGSNVFQTRAGCLIGAEHVNNSYECDIPIGAGICASYQTQTNSPRRARSVASQSIIAYTMSLGAENSVAYSNNSIAICTNFTISVTTEILPVSMTKTSVDCTMYICGDSTECSNLLLQYGSFCTQLNRALTGIAVEQDKNTQEVFAQVKQIYKTPPIKDFGGFNFSQILPDPSKPSKRSFIEDLLFNKVTLADAGFIKQYGDCLGDIAARDLICAQKFNGLTVLPPLLTDEMIAQYTSALLAGTITSGWTFGAGAALQIPFAMQMAYRFNGIGVTQNVLYENQKLIANQFNSAIGKIQDSLSSTASALGKLQDVVNQNAQALNTLVKQLSSNFGAISSVLNDILSRLDKVEAEVQIDRLITGRLQSLQTYVTQQLIRAAEIRASANLAATKMSECVLGQSKRVDFCGKGYHLMSFPQSAPHGVVFLHVTYVCAQEKNFTTAPAICHDGKAHFPREGVFVSNGTHWFVTQRNFYEPQIITTDNTFVSGNCDVVIGIVNNTVYDPLQPELDSGGGSGGGQIYEGKLTAEGLRFGIVASRFNHALVDRLVEGAIDAIVRHGGREEDITLVRVPGSWEIPVAAGELARKEDIDAVIAIGVLIRGATPHFDYIASEVSKGLADLSLELRKPITFGVITADTLEQAIERAGTKHGNKGWEAALSAIEMANLFKSLR

SEQ ID NO: 8176 - protein, 1301 aa, Artificial Sequence
  SARS-CoV-2/pangolin/Guangxi/P4L/2017__EPI_ISL_410538 spike protein (1-1141)(P709C_P1063C) LumSynth construct
MFVFLFVLPLVSSQCVNLTTRTGIPPGYTNSSTRGVYYPDKVFRSSILHLTQDLFLPFFSNVTWFNTINYQGGFKKFDNPVLPFNDGVYFASTEKSNIIRGWIFGTTLDARTQSLLIVNNATNVVIKVCEFQFCTDPFLGVYYHNNNKTWVENEFRVYSSANNCTFEYISQPFLMDLEGKQGNFKNLREFVFKNVDGYFKIYSKHTPIDLVRDLPRGFAALEPLVDLPIGINITRFQTLLALHRSYLTPGNLESGWTTGAAAYYVGYLQQRTFLLSYNQNGTITDAVDCSLDPLSETKCTLKSLTVEKGIYQTSNFRVQPTISIVRFPNITNLCPFGEVFNASKFASVYAWNRKRISNCVADYSVLYNSTSFSTFKCYGVSPTKLNDLCFTNVYADSFVVKGDEVRQIAPGQTGVIADYNYKLPDDFTGCVIAWNSVKQDALTGGNYGYLYRLFRKSKLKPFERDISTEIYQAGSTPCNGQVGLNCYYPLERYGFHPTTGVNYQPFRVVVLSFELLNGPATVCGPKLSTTLVKDKCVNFNFNGLTGTGVLTTSKKQFLPFQQFGRDISDTTDAVRDPQTLEILDITPCSFGGVSVITPGTNTSNQVAVLYQDVNCTEVPMAIHAEQLTPAWRVYSAGANVFQTRAGCLVGAEHVNNSYECDIPVGAGICASYHSMSSLRSVNQRSIIAYTMSLGAENSVAYSNNSIAICTNFTISVTTEILPVSMTKTSVDCTMYICGDSIECSNLLLQYGSFCTQLNRALTGIAVEQDKNTQEVFAQVKQIYKTPPIKDFGGFNFSQILPDPSKPSKRSFIEDLLFNKVTLADAGFIKQYGDCLGDIAARDLICAQKFNGLTVLPPLLTDEMIAQYTSALLAGTITSGWTFGAGAALQIPFAMQMAYRFNGIGVTQNVLYENQKLIANQFNSAIGKIQDSLSSTASALGKLQDVVNQNAQALNTLVKQLSSNFGAISSVLNDILSRLDKVEAEVQIDRLITGRLQSLQTYVTQQLIRAAEIRASANLAATKMSECVLGQSKRVDFCGKGYHLMSFPQSAPHGVVFLHVTYVCAQEKNFTTAPAICHEGKAHFPREGVFVSNGTHWFITQRNFYEPQIITTDNTFVSGSCDVVIGIVNNTVYDPLQPELDSGGGSGGGQIYEGKLTAEGLRFGIVASRFNHALVDRLVEGAIDAIVRHGGREEDITLVRVPGSWEIPVAAGELARKEDIDAVIAIGVLIRGATPHFDYIASEVSKGLADLSLELRKPITFGVITADTLEQAIERAGTKHGNKGWEAALSAIEMANLFKSLR

SEQ ID NO: 8177 - protein, 1301 aa, Artificial Sequence
  SARS-CoV-2/pangolin/Guangxi/P5L/2017__EPI_ISL_410540 spike protein (1-1141)(P709C_P1063C) LumSynth construct
MFVFLFVLPLVSSQCVNLTTRTGIPPGYTNSSTRGVYYPDKVFRSSILHLTQDLFLPFFSNVTWFNTINYQGGFKKFDNPVLPFNDGVYFASTEKSNIIRGWIFGTTLDARTQSLLIVNNATNVVIKVCEFQFCTDPFLGVYYHNNNKTWVENEFRVYSSANNCTFEYISQPFLMDLEGKQGNFKNLREFVFKNVDGYFKIYSKHTPIDLVRDLPRGFAALEPLVDLPIGINITRFQTLLALHRSYLTPGKLESGWTTGAAAYYVGYLQQRTFLLSYNQNGTITDAVDCSLDPLSETKCTLKSLTVEKGIYQTSNFRVQPTISIVRFPNITNLCPFGEVFNASKFASVYAWNRKRISNCVADYSVLYNSTSFSTFKCYGVSPTKLNDLCFTNVYADSFVVKGDEVRQIAPGQTGVIADYNYKLPDDFTGCVIAWNSVKQDALTGGNYGYLYRLFRKSKLKPFERDISTEIYQAGSTPCNGQVGLNCYYPLERYGFHPTTGVNYQPFRVVVLSFELLNGPATVCGPKLSTTLVKDKCVNFNFNGLTGTGVLTTSKKQFLPFQQFGRDISDTTDAVRDPQTLEILDITPCSFGGVSVITPGTNTSNQVAVLYQDVNCTEVPMAIHAEQLTPAWRVYSAGANVFQTRAGCLVGAEHVNNSYECDIPVGAGICASYHSMSSFRSVNQRSIIAYTMSLGAENSVAYSNNSIAICTNFTISVTTEILPVSMTKTSVDCTMYICGDSIECSNLLLQYGSFCTQLNRALTGIAVEQDKNTQEVFAQVKQIYKTPPIKDFGGFNFSQILPDPSKPSKRSFIEDLLFNKVTLADAGFIKQYGDCLGDIAARDLICAQKFNGLTVLPPLLTDEMIAQYTSALLAGTITSGWTFGAGAALQIPFAMQMAYRFNGIGVTQNVLYENQKLIANQFNSAIGKIQDSLSSTASALGKLQDVVNQNAQALNTLVKQLSSNFGAISSVLNDILSRLDKVEAEVQIDRLITGRLQSLQTYVTQQLIRAAEIRASANLAATKMSECVLGQSKRVDFCGKGYHLMSFPQSAPHGVVFLHVTYVCAQEKNFTTAPAICHEGKAHFPREGVFVSNGTHWFITQRNFYEPQIITTDNTFVSGSCDVVIGIVNNTVYDPLQPELDSGGGSGGGQIYEGKLTAEGLRFGIVASRFNHALVDRLVEGAIDAIVRHGGREEDITLVRVPGSWEIPVAAGELARKEDIDAVIAIGVLIRGATPHFDYIASEVSKGLADLSLELRKPITFGVITADTLEQAIERAGTKHGNKGWEAALSAIEMANLFKSLR

SEQ ID NO: 8178 - protein, 1301 aa, Artificial Sequence
  SARS-CoV-2/pangolin/Guangxi/P5E/2017__EPI_ISL_410541 spike protein (1-1141)(P709C_P1063C) LumSynth construct
MFVFLFVLPLVSSQCVNLTTRTGIPPGYTNSSTRGVYYPDKVFRSSILHLTQDLFLPFFSNVTWFNTITYQGGSKKFDNPVLPFNDGVYFASTEKSNIIRGWIFGTTLDARTQSLLIVNNATNVVIKVCEFQFCTDPFLGVYYHNNNKTWVENEFRVYSSANNCTFEYISQPFLMDLEGKQGNFKNLREFVFKNVDGYFKIYSKHTPIDLVRDLPRGFAALEPLVDLPIGINITRFQTLLALHRSYLTPGKLESGWTTGAAAYYVGYLQQRTFLLSYNQNGTITDAVDCSLDPLSETKCTLKSLTVEKGIYQTSNFRVQPTISIVRFPNITNLCPFGEVFNASKFASVYAWNRKRISNCVADYSVLYNSTSFSTFKCYGVSPTKLNDLCFTNVYADSFVVKGDEVRQIAPGQTGVIADYNYKLPDDFTGCVIAWNSVKQDALTGDNYGYLYRLFRKSKLKPFERDISTEIYQAGSTPCNGQVGLNCYYPLERYGFHPTTGVNYQPFRVVVLSFELLNGPATVCGPKLSTTLVKDKCVNFNFNGLTGTGVLTTSKKQFLPFQQFGRDISDTTDAVRDPQTLEILDITPCSFGGVSVITPGTNTSNQVAVLYQDVNCTEVPMAIHAEQLTPAWRVYSAGANVFQTRAGCLVGAEHVNNSYECDIPVGAGICASYHSMSSFRSVNQRSIIAYTMSLGAENSVAYSNNSIAICTNFTISVTTEILPVSMTKTSVDCTMYICGDSIECSNLLLQYGSFCTQLNRALTGIAVEQDKNTQEVFAQVKQIYKTPPIKDFGGFNFSQILPDPSKPSKRSFIEDLLFNKVTLADAGFIKQYGDCLGDIAARDLICAQKFNGLTVLPPLLTDEMIAQYTSALLAGTITSGWTFGAGAALQIPFAMQMAYRFNGIGVTQNVLYENQKLIANQFNSAIGKIQDSLSSTASALGKLQDVVNQNAQALNTLVKQLSSNFGAISSVLNDILSRLDKVEAEVQIDRLITGRLQSLQTYVTQQLIRAAEIRASANLAATKMSECVLGQSKRVDFCGKGYHLMSFPQSAPHGVVFLHVTYVCAQEKNFTTAPAICHEGKAHFPREGVFVSNGTHWFITQRNFYEPQIITTDNTFVSGSCDVVIGIVNNTVYDPLQPELDSGGGSGGGQIYEGKLTAEGLRFGIVASRFNHALVDRLVEGAIDAIVRHGGREEDITLVRVPGSWEIPVAAGELARKEDIDAVIAIGVLIRGATPHFDYIASEVSKGLADLSLELRKPITFGVITADTLEQAIERAGTKHGNKGWEAALSAIEMANLFKSLR

SEQ ID NO: 8179 - protein, 1299 aa, Artificial Sequence
  SARS-CoV-2/pangolin/Guangxi/P1E/2017__EPI_ISL_410539 spike protein (1-1139)(P707C_P1061C) LumSynth construct
MFVFLFVLPLVSSQCVNLTTRTGIQPGYTNSSTRGVYYPDKVFRSSILHLTQDLFLPFFSNVTWFNTINYQGGFKKFDNPVLPFNDGVYFASTEKSNIIRGWIFGTTLDARTQSLLIVNNATNVVIKVCEFQFCTDPFLGVYYHNNNKTWVENEFRVYSSANNCTFEYISQPFLMDLEGKQGNFKNLREFVFKNVDGYFKIYSKHTPIDLVRDLPRGFAALEPLVDLPIGINITRFQTLLALHRSYLTPGKLESGWTTGAAAYYVGYLQQRTFLLSYNQNGTITDAVDCSLDPLSETKCTLKSLTVEKGIYQTSNFRVQPTISIVRFPNITNLCPFGEVFNASKFASVYAWNRKRISNCVADYSVLYNSTSFSTFKCYGVSPTKLNDLCFTNVYADSFVVKGDEVRQIAPGQTGVIADYNYKLPDDFTGCVIAWNSVKQDALTGGNYLYRLFRKSKLKPFERDISTEIYQAGSTPCNGQVGLNCYYPLERYGFHPTTGVNYQPFRVVVLSFELLNGPATVCGPKLSTTLVKDKCVNFNFNGLTGTGVLTTSKKQFLPFQQFGRDISDTTDAVRDPQTLEILDITPCSFGGVSVITPGTNTSNQVAVLYQDVNCTEVPMAIHAEQLTPAWRVYSAGANVFQTRAGCLVGAEHVNNSYECDIPVGAGICASYHSMSSLRSVNQRSIIAYTMSLGAENSVAYSNNSIAICTNFTISVTTEILPVSMTKTSVDCTMYICGDSIECSNLLLQYGSFCTQLNRALTGIAVEQDKNTQEVFAQVKQIYKTPPIKDFGGFNFSQILPDPSKPSKRSFIEDLLFNKVTLADAGFIKQYGDCLGDIAARDLICAQKFNGLTVLPPLLTDEMIAQYTSALLAGTITSGWTFGAGAALQIPFAMQMAYRFNGIGVTQNVLYENQKLIANQFNSAIGKIQDSLSSTASALGKLQDVVNQNAQALNTLVKQLSSNFGAISSVLNDILSRLDKVEAEVQIDRLITGRLQSLQTYVTQQLIRAAEIRASANLAATKMSECVLGQSKRVDFCGKGYHLMSFPQSAPHGVVFLHVTYVCAQEKNFTTAPAICHEGKAHFPREGVFVSNGTHWFITQRNFYEPQIITTDNTFVSGSCDVVIGIVNNTVYDPLQPELDSGGGSGGGQIYEGKLTAEGLRFGIVASRFNHALVDRLVEGAIDAIVRHGGREEDITLVRVPGSWEIPVAAGELARKEDIDAVIAIGVLIRGATPHFDYIASEVSKGLADLSLELRKPITFGVITADTLEQAIERAGTKHGNKGWEAALSAIEMANLFKSLR

SEQ ID NO: 8180 - protein, 1307 aa, Artificial Sequence
  SARS-CoV-2/Wuhan/WIV05/2019__EPI_ISL_402128 spike protein (1-1147)(G889C_L1034C) LumSynth construct
MFVFLVLLPLVSSQCVNLTTRTQLPPAYTNSFTRGVYYPDKVFRSSVLHSTQDLFLPFFSNVTWFHAIHVSGTNGTKRFDNPVLPFNDGVYFASTEKSNIIRGWIFGTTLDSKTQSLLIVNNATNVVIKVCEFQFCNDPFLGVYYHKNNKSWMESEFRVYSSANNCTFEYVSQPFLMDLEGKQGNFKNLREFVFKNIDGYFKIYSKHTPINLVRDLPQGFSALEPLVDLPIGINITRFQTLLALHRSYLTPGDSSSGWTAGAAAYYVGYLQPRTFLLKYNENGTITDAVDCALDPLSETKCTLKSFTVEKGIYQTSNFRVQPTESIVRFPNITNLCPFGEVFNATRFASVYAWNRKRISNCVADYSVLYNSASFSTFKCYGVSPTKLNDLCFTNVYADSFVIRGDEVRQIAPGQTGKIADYNYKLPDDFTGCVIAWNSNNLDSKVGGNYNYLYRLFRKSNLKPFERDISTEIYQAGSTPCNGVEGFNCYFPLQSYGFQPTNGVGYQPYRVVVLSFELLHAPATVCGPKKSTNLVKNKCVNFNFNGLTGTGVLTESNKKFLPFQQFGRDIADTTDAVRDPQTLEILDITPCSFGGVSVITPGTNTSNQVAVLYQDVNCTEVPVAIHADQLTPTWRVYSTGSNVFQTRAGCLIGAEHVNNSYECDIPIGAGICASYQTQTNSPRRARSVASQSIIAYTMSLGAENSVAYSNNSIAIPTNFTISVTTEILPVSMTKTSVDCTMYICGDSTECSNLLLQYGSFCTQLNRALTGIAVEQDKNTQEVFAQVKQIYKTPPIKDFGGFNFSQILPDPSKPSKRSFIEDLLFNKVTLADAGFIKQYGDCLGDIAARDLICAQKFNGLTVLPPLLTDEMIAQYTSALLAGTITSGWTFCAGAALQIPFAMQMAYRFNGIGVTQNVLYENQKLIANQFNSAIGKIQDSLSSTASALGKLQDVVNQNAQALNTLVKQLSSNFGAISSVLNDILSRLDKVEAEVQIDRLITGRLQSLQTYVTQQLIRAAEIRASANLAATKMSECVCGQSKRVDFCGKGYHLMSFPQSAPHGVVFLHVTYVPAQEKNFTTAPAICHDGKAHFPREGVFVSNGTHWFVTQRNFYEPQIITTDNTFVSGNCDVVIGIVNNTVYDPLQPELDSGGGSGGGQIYEGKLTAEGLRFGIVASRFNHALVDRLVEGAIDAIVRHGGREEDITLVRVPGSWEIPVAAGELARKEDIDAVIAIGVLIRGATPHFDYIASEVSKGLADLSLELRKPITFGVITADTLEQAIERAGTKHGNKGWEAALSAIEMANLFKSLR

SEQ ID NO: 8181 - protein, 1303 aa, Artificial Sequence
  SARS-CoV-2/bat/Yunnan/RaTG13/2013__EPI_ISL_402131 spike protein (1-1143)(G885C_L1030C) LumSynth construct
MFVFLVLLPLVSSQCVNLTTRTQLPPAYTNSSTRGVYYPDKVFRSSVLHLTQDLFLPFFSNVTWFHAIHVSGTNGIKRFDNPVLPFNDGVYFASTEKSNIIRGWIFGTTLDSKTQSLLIVNNATNVVIKVCEFQFCNDPFLGVYYHKNNKSWMESEFRVYSSANNCTFEYVSQPFLMDLEGKQGNFKNLREFVFKNIDGYFKIYSKHTPINLVRDLPPGFSALEPLVDLPIGINITRFQTLLALHRSYLTPGDSSSGWTAGAAAYYVGYLQPRTFLLKYNENGTITDAVDCALDPLSETKCTLKSFTVEKGIYQTSNFRVQPTDSIVRFPNITNLCPFGEVFNATTFASVYAWNRKRISNCVADYSVLYNSTSFSTFKCYGVSPTKLNDLCFTNVYADSFVITGDEVRQIAPGQTGKIADYNYKLPDDFTGCVIAWNSKHIDAKEGGNFNYLYRLFRKANLKPFERDISTEIYQAGSKPCNGQTGLNCYYPLYRYGFYPTDGVGHQPYRVVVLSFELLNAPATVCGPKKSTNLVKNKCVNFNFNGLTGTGVLTESNKKFLPFQQFGRDIADTTDAVRDPQTLEILDITPCSFGGVSVITPGTNASNQVAVLYQDVNCTEVPVAIHADQLTPTWRVYSTGSNVFQTRAGCLIGAEHVNNSYECDIPIGAGICASYQTQTNSRSVASQSIIAYTMSLGAENSVAYSNNSIAIPTNFTISVTTEILPVSMTKTSVDCTMYICGDSTECSNLLLQYGSFCTQLNRALTGIAVEQDKNTQEVFAQVKQIYKTPPIKDFGGFNFSQILPDPSKPSKRSFIEDLLFNKVTLADAGFIKQYGDCLGDIAARDLICAQKFNGLTVLPPLLTDEMIAQYTSALLAGTITSGWTFCAGAALQIPFAMQMAYRFNGIGVTQNVLYENQKLIANQFNSAIGKIQDSLSSTASALGKLQDVVNQNAQALNTLVKQLSSNFGAISSVLNDILSRLDKVEAEVQIDRLITGRLQSLQTYVTQQLIRAAEIRASANLAATKMSECVCGQSKRVDFCGKGYHLMSFPQSAPHGVVFLHVTYVPAQEKNFTTAPAICHDGKAHFPREGVFVSNGTHWFVTQRNFYEPQIITTDNTFVSGSCDVVIGIVNNTVYDPLQPELDSGGGSGGGQIYEGKLTAEGLRFGIVASRFNHALVDRLVEGAIDAIVRHGGREEDITLVRVPGSWEIPVAAGELARKEDIDAVIAIGVLIRGATPHFDYIASEVSKGLADLSLELRKPITFGVITADTLEQAIERAGTKHGNKGWEAALSAIEMANLFKSLR

SEQ ID NO: 8182 - protein, 1307 aa, Artificial Sequence
  SARS-CoV-2/Wuhan/HBCDC-HB-01/2019__EPI_ISL_402132 spike protein (1-1147)(G889C_L1034C) LumSynth construct
MFVFLVLLPLVSSQCVNLTTRTQLPPAYTNSITRGVYYPDKVFRSSVLHSTQDLFLPFFSNVTWFHAIHVSGTNGTKRFDNPVLPFNDGVYFASTEKSNIIRGWIFGTTLDSKTQSLLIVNNATNVVIKVCEFQFCNDPFLGVYYHKNNKSWMESEFRVYSSANNCTFEYVSQPFLMDLEGKQGNFKNLREFVFKNIDGYFKIYSKHTPINLVRDLPQGFSALEPLVDLPIGINITRFQTLLALHRSYLTPGDSSSGWTAGAAAYYVGYLQPRTFLLKYNENGTITDAVDCALDPLSETKCTLKSFTVEKGIYQTSNFRVQPTESIVRFPNITNLCPFGEVFNATRFASVYAWNRKRISNCVADYSVLYNSASFSTFKCYGVSPTKLNDLCFTNVYADSFVIRGDEVRQIAPGQTGKIADYNYKLPDDFTGCVIAWNSNNLDSKVGGNYNYLYRLFRKSNLKPFERDISTEIYQAGSTPCNGVEGFNCYFPLQSYGFQPTNGVGYQPYRVVVLSFELLHAPATVCGPKKSTNLVKNKCVNFNFNGLTGTGVLTESNKKFLPFQQFGRDIADTTDAVRDPQTLEILDITPCSFGGVSVITPGTNTSNQVAVLYQDVNCTEVPVAIHADQLTPTWRVYSTGSNVFQTRAGCLIGAEHVNNSYECDIPIGAGICASYQTQTNSPRRARSVASQSIIAYTMSLGAENSVAYSNNSIAIPTNFTISVTTEILPVSMTKTSVDCTMYICGDSTECSNLLLQYGSFCTQLNRALTGIAVEQDKNTQEVFAQVKQIYKTPPIKDFGGFNFSQILPDPSKPSKRSFIEDLLFNKVTLADAGFIKQYGDCLGDIAARDLICAQKFNGLTVLPPLLTDEMIAQYTSALLAGTITSGWTFCAGAALQIPFAMQMAYRFNGIGVTQNVLYENQKLIANQFNSAIGKIQDSLSSTASALGKLQDVVNQNAQALNTLVKQLSSNFGAISSVLNDILSRLDKVEAEVQIDRLITGRLQSLQTYVTQQLIRAAEIRASANLAATKMSECVCGQSKRVDFCGKGYHLMSFPQSAPHGVVFLHVTYVPAQEKNFTTAPAICHDGKAHFPREGVFVSNGTHWFVTQRNFYEPQIITTDNTFVSGNCDVVIGIVNNTVYDPLQPELDSGGGSGGGQIYEGKLTAEGLRFGIVASRFNHALVDRLVEGAIDAIVRHGGREEDITLVRVPGSWEIPVAAGELARKEDIDAVIAIGVLIRGATPHFDYIASEVSKGLADLSLELRKPITFGVITADTLEQAIERAGTKHGNKGWEAALSAIEMANLFKSLR

SEQ ID NO: 8183 - protein, 1307 aa, Artificial Sequence
  SARS-CoV-2/Guangdong/20SF028/2020__EPI_ISL_403936 spike protein (1-1147)(G889C_L1034C) LumSynth construct
MFVFLVLLPLVSSQCVNLTTRTQLPPAYTNSFTRGVYYPDKVFRSSVLYSTQDLFLPFFSNVTWFHAIHVSGTNGTKRFDNPVLPFNDGVYFASTEKSNIIRGWIFGTTLDSKTQSLLIVNNATNVVIKVCEFQFCNDPFLGVYYHKNNKSWMESEFRVYSSANNCTFEYVSQPFLMDLEGKQGNFKNLREFVFKNIDGYFKIYSKHTPINLVRDLPQGFSALEPLVDLPIGINITRFQTLLALHRSYLTPGDSSSGWTAGAAAYYVGYLQPRTFLLKYNENGTITDAVDCALDPLSETKCTLKSFTVEKGIYQTSNFRVQPTESIVRFPNITNLCPFGEVFNATRFASVYAWNRKRISNCVADYSVLYNSASFSTFKCYGVSPTKLNDLCFTNVYADSFVIRGDEVRQIAPGQTGKIADYNYKLPDDFTGCVIAWNSNNLDSKVGGNYNYLYRLFRKSNLKPFERDISTEIYQAGSTPCNGVEGFNCYFPLQSYGFQPTNGVGYQPYRVVVLSFELLHAPATVCGPKKSTNLVKNKCVNFNFNGLTGTGVLTESNKKFLPFQQFGRDIADTTDAVRDPQTLEILDITPCSFGGVSVITPGTNTSNQVAVLYQDVNCTEVPVAIHADQLTPTWRVYSTGSNVFQTRAGCLIGAEHVNNSYECDIPIGAGICASYQTQTNSPRRARSVASQSIIAYTMSLGAENSVAYSNNSIAIPTNFTISVTTEILPVSMTKTSVDCTMYICGDSTECSNLLLQYGSFCTQLNRALTGIAVEQDKNTQEVFAQVKQIYKTPPIKDFGGFNFSQILPDPSKPSKRSFIEDLLFNKVTLADAGFIKQYGDCLGDIAARDLICAQKFNGLTVLPPLLTDEMIAQYTSALLAGTITSGWTFCAGAALQIPFAMQMAYRFNGIGVTQNVLYENQKLIANQFNSAIGKIQDSLSSTASALGKLQDVVNQNAQALNTLVKQLSSNFGAISSVLNDILSRLDKVEAEVQIDRLITGRLQSLQTYVTQQLIRAAEIRASANLAATKMSECVCGQSKRVDFCGKGYHLMSFPQSAPHGVVFLHVTYVPAQEKNFTTAPAICHDGKAHFPREGVFVSNGTHWFVTQRNFYEPQIITTDNTFVSGNCDVVIGIVNNTVYDPLQPELDSGGGSGGGQIYEGKLTAEGLRFGIVASRFNHALVDRLVEGAIDAIVRHGGREEDITLVRVPGSWEIPVAAGELARKEDIDAVIAIGVLIRGATPHFDYIASEVSKGLADLSLELRKPITFGVITADTLEQAIERAGTKHGNKGWEAALSAIEMANLFKSLR

SEQ ID NO: 8184 - protein, 1307 aa, Artificial Sequence
  SARS-CoV-2/Shenzhen/SZTH-001/2020__EPI_ISL_406592 spike protein (1-1147)(G889C_L1034C) LumSynth construct
MFVFLVLLPLVSSQCVNLTTRTQLPPAYTNSFTRGVYYPDKVFRSSVLHSTQDLFLPFFSNVTWFHAIHVSGTNGTKRFDNPVLPFNDGVYFASTEKSNIIRGWIFGTTLDSKTQSLLIVNNATNVVIKVCEFQFCNDPFLGVYYHKNNKSWMESEFRVYSSANNCTFEYVSQPFLMDLEGKQGNFKNLREFVFKNIDGYFKIYSKHTPINLVRDLPQGFSALEPLVDLPIGINITRFQTLLALHRSYLTPGDSSSGWTAGAAAYYVGYLQPRTFLLKYNENGTITDAVDCALDPLSETKCTLKSFTVEKGIYQTSNFRVQPTESIVRFPNITNLCPFGEVFNATRFASVYAWNRKRISNCVADYSVLYNSASFSTFKCYGVSPTKLNDLCFTNVYADSFVIRGDEVRQIAPGQTGKIADYNYKLPDDFTGCVIAWNSNNLDSKVGGNYNYLYRLFRKSNLKPFERDISTEIYQAGSTPCNGVEGFNCYFPLQSYGFQPTNGVGYQPYRVVVLSFELLHAPATVCGPKKSTNLVKNKCVNFNFNGLTGTGVLTESNKKFLPFQQFGRDIADTTDAVRDPQTLEILDITPCSFGGVSVITPGTNTSNQVAVLYQDVNCTEVPVAIHADQLTPTWRVYSTGSNVFQTRAGCLIGAEHVNNSYECDIPIGAGICASYQTQTNSPRRARSVASQSIIAYTMSLGAENSVAYSNNSIAIPTNFTISVTTEILPVSMTKTSVDCTMYICGDSTECSNLLLQYGSFCTQLNRALTGIAVEQDKNTQEVFAQVKQIYKTPPIKDFGGFNFSQILPDPSKPSKRSFIEDLLFNKVTLADAGFIKQYGDCLGDIAARDLICAQKFNGLTVLPPLLTDEMIAQYTSALLAGTITSGWTFCAGAALQIPFAMQMAYRFNGIGVTQNVLYENQKLIANQFNSAIGKIQDSLSSTASALGKLQDVVNQNAQALNTLVKQLSSNFGAISSVLNDILSRLDKVEAEVQIDRLITGRLQSLQTYVTQQLIRAAEIRASANLAATKMSECVCGQSKRVDFCGKGYHLMSFPQSAPHGVVFLHVTYVPAQEKNFTTAPAICHDGKAHFPREGVFVSNGTHWFVTQRNFYEPQIITTDNTFVSGNCDVLIGIVNNTVYDPLQPELDSGGGSGGGQIYEGKLTAEGLRFGIVASRFNHALVDRLVEGAIDAIVRHGGREEDITLVRVPGSWEIPVAAGELARKEDIDAVIAIGVLIRGATPHFDYIASEVSKGLADLSLELRKPITFGVITADTLEQAIERAGTKHGNKGWEAALSAIEMANLFKSLR

SEQ ID NO: 8185 - protein, 1307 aa, Artificial Sequence
  SARS-CoV-2/Shenzhen/SZTH-004/2020__EPI_ISL_406595 spike protein (1-1147)(G889C_L1034C) LumSynth construct
MFVFLVLLPLVSSQCVNLTTRTQLPPAYTNSFTRGVYYPDKVFRSSVLHSTQDLFLPFFSNVTWFHAIHVSGTNGTKRFDNPVLPFNDGVYFASTEKSNIIRGWIFGTTLDSKTQSLLIVNNATNVVIKVCEFQFCNDPFLGVYYHKNNKSWMESEFRVYSSANNCTFEYVSQPFLMDLEGKQGNFKNLREFVFKNIDGYFKIYSKHTPINLVRDLPQGFSALEPLVDLPIGINITRFQTLLALHRSYLTPGDSSSGWTAGAAAYYVGYLQPRTFLLKYNENGTITDAVDCALDPLSETKCTLKSFTVEKGIYQTSNFRVQPTESIVRFPNITNLCPFGEVFNATRFASVYAWDRKRISNCVAYYSVLYNSASFSTFKCYGVSPTKLNDLCFTNVYADSFVIRGDEVRQIAPGQTGKIADYNYKLPDDFTGCVIAWNSNNLDSKVGGNYNYLYRLFRKSNLKPFERDISTEIYQAGSTPCNGVEGFNCYFPLQSYGFQPTNGVGYQPYRVVVLSFELLHAPATVCGPKKSTNLVKNKCVNFNFNGLTGTGVLTESNKKFLPFQQFGRDIADTTDAVRDPQTLEILDITPCSFGGVSVITPGTNTSNQVAVLYQDVNCTEVPVAIHADQLTPTWRVYSTGSNVFQTRAGCLIGAEHVNNSYECDIPIGAGICASYQTQTNSPRRARSVASQSIIAYTMSLGAENSVAYSNNSIAIPTNFTISVTTEILPVSMTKTSVDCTMYICGDSTECSNLLLQYGSFCTQLNRALTGIAVEQDKNTQEVFAQVKQIYKTPPIKDFGGFNFSQILPDPSKPSKRSFIEDLLFNKVTLADAGFIKQYGDCLGDIAARDLICAQKFNGLTVLPPLLTDEMIAQYTSALLAGTITSGWTFCAGAALQIPFAMQMAYRFNGIGVTQNVLYENQKLIANQFNSAIGKIQDSLSSTASALGKLQDVVNQNAQALNTLVKQLSSNFGAISSVLNDILSRLDKVEAEVQIDRLITGRLQSLQTYVTQQLIRAAEIRASANLAATKMSECVCGQSKRVDFCGKGYHLMSFPQSAPHGVVFLHVTYVPAQEKNFTTAPAICHDGKAHFPREGVFVSNGTHWFVTQRNFYEPQIITTDNTFVSGNCDVVIGIVNNTVYDPLQPELDSGGGSGGGQIYEGKLTAEGLRFGIVASRFNHALVDRLVEGAIDAIVRHGGREEDITLVRVPGSWEIPVAAGELARKEDIDAVIAIGVLIRGATPHFDYIASEVSKGLADLSLELRKPITFGVITADTLEQAIERAGTKHGNKGWEAALSAIEMANLFKSLR

SEQ ID NO: 8186 - protein, 1307 aa, Artificial Sequence
  SARS-CoV-2/France/IDF0372/2020__EPI_ISL_406596 spike protein (1-1147)(G889C_L1034C) LumSynth construct
MFVFLVLLPLVSSQCVNLTTRTQLPPAYTNSFTRGVYYPDKVFRSSVLHSTQDLFLPFFSNVTWFHAIHVSGTNGTKRFDNPVLPFNDGVYFASTEKSNIIRGWIFGTTLDSKTQSLLIVNNATNVVIKVCEFQFCNDPFLGVYYHKNNKSWMESEFRVYSSANNCTFEYVSQPFLMDLEGKQGNFKNLREFVFKNIDGYFKIYSKHTPINLVRDLPQGFSALEPLVDLPIGINITRFQTLLALHRSYLTPGDSSSGWTAGAAAYYVGYLQPRTFLLKYNENGTITDAVDCALDPLSETKCTLKSFTVEKGIYQTSNFRVQPTESIVRFPNITNLCPFGEVFNATRFASVYAWNRKRISNCVADYSFLYNSASFSTFKCYGVSPTKLNDLCFTNVYADSFVIRGDEVRQIAPGQTGKIADYNYKLPDDFTGCVIAWNSNNLDSKVGGNYNYLYRLFRKSNLKPFERDISTEIYQAGSTPCNGVEGFNCYFPLQSYGFQPTNGVGYQPYRVVVLSFELLHAPATVCGPKKSTNLVKNKCVNFNFNGLTGTGVLTESNKKFLPFQQFGRDIADTTDAVRDPQTLEILDITPCSFGGVSVITPGTNTSNQVAVLYQDVNCTEVPVAIHADQLTPTWRVYSTGSNVFQTRAGCLIGAEHVNNSYECDIPIGAGICASYQTQTNSPRRARSVASQSIIAYTMSLGAENSVAYSNNSIAIPTNFTISVTTEILPVSMTKTSVDCTMYICGDSTECSNLLLQYGSFCTQLNRALTGIAVEQDKNTQEVFAQVKQIYKTPPIKDFGGFNFSQILPDPSKPSKRSFIEDLLFNKVTLADAGFIKQYGDCLGDIAARDLICAQKFNGLTVLPPLLTDEMIAQYTSALLAGTITSGWTFCAGAALQIPFAMQMAYRFNGIGVTQNVLYENQKLIANQFNSAIGKIQDSLSSTASALGKLQDVVNQNAQALNTLVKQLSSNFGAISSVLNDILSRLDKVEAEVQIDRLITGRLQSLQTYVTQQLIRAAEIRASANLAATKMSECVCGQSKRVDFCGKGYHLMSFPQSAPHGVVFLHVTYVPAQEKNFTTAPAICHDGKAHFPREGVFVSNGTHWFVTQRNFYEPQIITTDNTFVSGNCDVVIGIVNNTVYDPLQPELDSGGGSGGGQIYEGKLTAEGLRFGIVASRFNHALVDRLVEGAIDAIVRHGGREEDITLVRVPGSWEIPVAAGELARKEDIDAVIAIGVLIRGATPHFDYIASEVSKGLADLSLELRKPITFGVITADTLEQAIERAGTKHGNKGWEAALSAIEMANLFKSLR

SEQ ID NO: 8187 - protein, 1307 aa, Artificial Sequence
  SARS-CoV-2/Australia/VIC01/2020__EPI_ISL_406844 spike protein (1-1147)(G889C_L1034C) LumSynth construct
MFVFLVLLPLVSSQCVNLTTRTQLPPAYTNSFTRGVYYPDKVFRSSVLHSTQDLFLPFFSNVTWFHAIHVSGTNGTKRFDNPVLPFNDGVYFASTEKSNIIRGWIFGTTLDSKTQSLLIVNNATNVVIKVCEFQFCNDPFLGVYYHKNNKSWMESEFRVYSSANNCTFEYVSQPFLMDLEGKQGNFKNLREFVFKNIDGYFKIYSKHTPINLVRDLPQGFSALEPLVDLPIGINITRFQTLLALHRRYLTPGDSSSGWTAGAAAYYVGYLQPRTFLLKYNENGTITDAVDCALDPLSETKCTLKSFTVEKGIYQTSNFRVQPTESIVRFPNITNLCPFGEVFNATRFASVYAWNRKRISNCVADYSVLYNSASFSTFKCYGVSPTKLNDLCFTNVYADSFVIRGDEVRQIAPGQTGKIADYNYKLPDDFTGCVIAWNSNNLDSKVGGNYNYLYRLFRKSNLKPFERDISTEIYQAGSTPCNGVEGFNCYFPLQSYGFQPTNGVGYQPYRVVVLSFELLHAPATVCGPKKSTNLVKNKCVNFNFNGLTGTGVLTESNKKFLPFQQFGRDIADTTDAVRDPQTLEILDITPCSFGGVSVITPGTNTSNQVAVLYQDVNCTEVPVAIHADQLTPTWRVYSTGSNVFQTRAGCLIGAEHVNNSYECDIPIGAGICASYQTQTNSPRRARSVASQSIIAYTMSLGAENSVAYSNNSIAIPTNFTISVTTEILPVSMTKTSVDCTMYICGDSTECSNLLLQYGSFCTQLNRALTGIAVEQDKNTQEVFAQVKQIYKTPPIKDFGGFNFSQILPDPSKPSKRSFIEDLLFNKVTLADAGFIKQYGDCLGDIAARDLICAQKFNGLTVLPPLLTDEMIAQYTSALLAGTITSGWTFCAGAALQIPFAMQMAYRFNGIGVTQNVLYENQKLIANQFNSAIGKIQDSLSSTASALGKLQDVVNQNAQALNTLVKQLSSNFGAISSVLNDILSRLDKVEAEVQIDRLITGRLQSLQTYVTQQLIRAAEIRASANLAATKMSECVCGQSKRVDFCGKGYHLMSFPQSAPHGVVFLHVTYVPAQEKNFTTAPAICHDGKAHFPREGVFVSNGTHWFVTQRNFYEPQIITTDNTFVSGNCDVVIGIVNNTVYDPLQPELDSGGGSGGGQIYEGKLTAEGLRFGIVASRFNHALVDRLVEGAIDAIVRHGGREEDITLVRVPGSWEIPVAAGELARKEDIDAVIAIGVLIRGATPHFDYIASEVSKGLADLSLELRKPITFGVITADTLEQAIERAGTKHGNKGWEAALSAIEMANLFKSLR

SEQ ID NO: 8188 - protein, 1307 aa, Artificial Sequence
  SARS-CoV-2/Germany/BavPat1/2020__EPI_ISL_406862 spike protein (1-1147)(G889C_L1034C) LumSynth construct
MFVFLVLLPLVSSQCVNLTTRTQLPPAYTNSFTRGVYYPDKVFRSSVLHSTQDLFLPFFSNVTWFHAIHVSGTNGTKRFDNPVLPFNDGVYFASTEKSNIIRGWIFGTTLDSKTQSLLIVNNATNVVIKVCEFQFCNDPFLGVYYHKNNKSWMESEFRVYSSANNCTFEYVSQPFLMDLEGKQGNFKNLREFVFKNIDGYFKIYSKHTPINLVRDLPQGFSALEPLVDLPIGINITRFQTLLALHRSYLTPGDSSSGWTAGAAAYYVGYLQPRTFLLKYNENGTITDAVDCALDPLSETKCTLKSFTVEKGIYQTSNFRVQPTESIVRFPNITNLCPFGEVFNATRFASVYAWNRKRISNCVADYSVLYNSASFSTFKCYGVSPTKLNDLCFTNVYADSFVIRGDEVRQIAPGQTGKIADYNYKLPDDFTGCVIAWNSNNLDSKVGGNYNYLYRLFRKSNLKPFERDISTEIYQAGSTPCNGVEGFNCYFPLQSYGFQPTNGVGYQPYRVVVLSFELLHAPATVCGPKKSTNLVKNKCVNFNFNGLTGTGVLTESNKKFLPFQQFGRDIADTTDAVRDPQTLEILDITPCSFGGVSVITPGTNTSNQVAVLYQGVNCTEVPVAIHADQLTPTWRVYSTGSNVFQTRAGCLIGAEHVNNSYECDIPIGAGICASYQTQTNSPRRARSVASQSIIAYTMSLGAENSVAYSNNSIAIPTNFTISVTTEILPVSMTKTSVDCTMYICGDSTECSNLLLQYGSFCTQLNRALTGIAVEQDKNTQEVFAQVKQIYKTPPIKDFGGFNFSQILPDPSKPSKRSFIEDLLFNKVTLADAGFIKQYGDCLGDIAARDLICAQKFNGLTVLPPLLTDEMIAQYTSALLAGTITSGWTFCAGAALQIPFAMQMAYRFNGIGVTQNVLYENQKLIANQFNSAIGKIQDSLSSTASALGKLQDVVNQNAQALNTLVKQLSSNFGAISSVLNDILSRLDKVEAEVQIDRLITGRLQSLQTYVTQQLIRAAEIRASANLAATKMSECVCGQSKRVDFCGKGYHLMSFPQSAPHGVVFLHVTYVPAQEKNFTTAPAICHDGKAHFPREGVFVSNGTHWFVTQRNFYEPQIITTDNTFVSGNCDVVIGIVNNTVYDPLQPELDSGGGSGGGQIYEGKLTAEGLRFGIVASRFNHALVDRLVEGAIDAIVRHGGREEDITLVRVPGSWEIPVAAGELARKEDIDAVIAIGVLIRGATPHFDYIASEVSKGLADLSLELRKPITFGVITADTLEQAIERAGTKHGNKGWEAALSAIEMANLFKSLR

SEQ ID NO: 8189 - protein, 1307 aa, Artificial Sequence
  SARS-CoV-2/Wuhan/HBCDC-HB-02/2020__EPI_ISL_412978 spike protein (1-1147)(G889C_L1034C) LumSynth construct
MFVFLVLLPLVSSQCVNLTTRTQLPPAYTNSFTRGVYYPDKVFRSSVLHSTQDLFLPFFSNVTWFHAIHVSGTNGTKRFDNPVLPFNDGVYFASTEKSNIIRGWIFGTTLDSKTQSLLIVNNATNVVIKVCEFQFCNDPFLGVYYHKNNKSWMESEFRVYSSANNCTFEYVSQPFLMDLEGKQGNFKNLREFVFKNIDGYFKIYSKHTPINLVRDLPQGFSALEPLVDLPIGINITRFQTLLALHRSYLTPGDSSSGWTAGAAAYYVGYLQPRTFLLKYNENGTITDAVDCALDPLSETKCTLKSFTVEKGIYQTSNFRVQPTESIVRFPNITNLCPFGEVFNATRFASVYAWNRKRISNCVADYSVLYNSASFSTFKCYGVSPTKLNDLCFTNVYADSFVIRGDEVRQIAPGQTGKIADYNYKLPDDFTGCVIAWNSNNLDSKVGGNYNYLYRLFRKSNLKPFERDISTEIYQAGSTPCNGVEGFNCYFPLQSYGFQPTNGVGYQPYRVVVLSFELLHAPATVCGPKKSTNLVKNKCVNFNFNGLTGTGVLTESNKKFLPFQQFGRDIADTTDAVRDPQTLEILDITPCSFGGVSVITPGTNTSNQVAVLYQDVNCTEVPVAIHADQLTPTWRVYSTGSNVFQTRAGCLIGAEHVNNSYECDIPIGAGICASYQTQTNSPRRARSVASQSIIAYTMSLGAENSVAYSNNSIAIPTNFTISVTTEILPVSMTKTSVDCTMYICGDSTECSNFLLQYGSFCTQLNRALTGIAVEQDKNTQEVFAQVKQIYKTPPIKDFGGFNFSQILPDPSKPSKRSFIEDLLFNKVTLADAGFIKQYGDCLGDIAARDLICAQKFNGLTVLPPLLTDEMIAQYTSALLAGTITSGWTFCAGAALQIPFAMQMAYRFNGIGVTQNVLYENQKLIANQFNSAIGKIQDSLSSTASALGKLQDVVNQNAQALNTLVKQLSSNFGAISSVLNDILSRLDKVEAEVQIDRLITGRLQSLQTYVTQQLIRAAEIRASANLAATKMSECVCGQSKRVDFCGKGYHLMSFPQSAPHGVVFLHVTYVPAQEKNFTTAPAICHDGKAHFPREGVFVSNGTHWFVTQRNFYEPQIITTDNTFVSGNCDVVIGIVNNTVYDPLQPELDSGGGSGGGQIYEGKLTAEGLRFGIVASRFNHALVDRLVEGAIDAIVRHGGREEDITLVRVPGSWEIPVAAGELARKEDIDAVIAIGVLIRGATPHFDYIASEVSKGLADLSLELRKPITFGVITADTLEQAIERAGTKHGNKGWEAALSAIEMANLFKSLR

SEQ ID NO: 8190 - protein, 1307 aa, Artificial Sequence
  SARS-CoV-2/Australia/QLD02/2020__EPI_ISL_407896 spike protein (1-1147)(G889C_L1034C) LumSynth construct
MFVFLVLLPLVSSQCVNLTTRTQLPPAYTNSFTRGVYYPDKVFRSSVLHSTQDLFLPFFSNVTWFHAIHVSGTNGTKRFDNPVLPFNDGVYFASTEKSNIIRGWIFGTTLDSKTQSLLIVNNATNVVIKVCEFQFCNDPFLGVYYHKNNKSWMESEFRVYSSANNCTFEYVSQPFLMDLEGKQGNFKNLREFVFKNIDGYFKIYSKHTPINLVRDLPQGFSALEPLVDLPIGINITRFQTLLALHRSYLTPGDSSSGWTAGAAAYYVGYLQPRTFLLKYNENGTITDAVDCALDPLSETKCTLKSFTVEKGIYQTSNFRVQPTESIVRFPNITNLCPFGEVFNATRFASVYAWNRKRISNCVADYSVLYNSASFSTFKCYGVSPTKLNDLCFTNVYADSFVIRGDEVRQIAPGQTGKIADYNYKLPDDFTGCVIAWNSNNLDSKVGGNYNYLYRLFRKSNLKPFERDISTEIYQAGSTPCNGVEGFNCYFPLQSYGFQPTNGVGYQPYRVVVLSFELLHAPATVCGPKKSTNLVKNKCVNFNFNGLTGTGVLTESNKKFLPFQQFGRDIADTTDAVRDPQTLEILDITPCSFGGVSVITPGTNTSNQVAVLYQDVNCTEVPVAIHADQLTPTWRVYSTGSNVFQTRAGCLIGAEHVNNSYECDIPIGAGICASYQTQTNSPRRARSVASQSIIAYTMSLGAENSVAYSNNSIAIPTNFTISVTTEILPVSMTKTSVDCTMYICGDSTECSNLLLQYGSFCTQLNRALTGIAVEQDKNTQEVFAQVKQIYKTPPIKDFGGFNFSQILPDPSKPSKRSFIEDLLFNKVTLADAGFIKQYGDCLGDIAARDLICAQKFNGLTVLPPLLTDEMIAQYTSALLAGTITSGWTFCAGAALQIPFAMQMAYRFNGIGVTQNVLYENQKLIANQFNSAIGKIQDSLSSTASALGKLQDVVNQNAQALNTLVKQLSSNFGAISSVLNDILSRLDKVEAEVQIDRLITGRLQSLQTYVTQQLIRAAEIRASANLAATKMSECVCGQSKRVDFCGKGYHLMSFPQSAPHGVVFLHVTYVPAQEKNFTTAPAICHDGKAHFPREGVFVSNGTHWFVTQRNFYEPQIITTDNTFVSGNCDVVIGIVNNTVYDPLQLELDSGGGSGGGQIYEGKLTAEGLRFGIVASRFNHALVDRLVEGAIDAIVRHGGREEDITLVRVPGSWEIPVAAGELARKEDIDAVIAIGVLIRGATPHFDYIASEVSKGLADLSLELRKPITFGVITADTLEQAIERAGTKHGNKGWEAALSAIEMANLFKSLR

SEQ ID NO: 8191 - protein, 1307 aa, Artificial Sequence
  SARS-CoV-2/India/1-31/2020__EPI_ISL_413523 spike protein (1-1147)(G889C_L1034C) LumSynth construct
MFVFLVLLPLVSSQCVNLTTRTQLPPAYTNSFTRGVYYPDKVFRSSVLHSTQDLFLPFFSNVTWFHAIHVSGTNGTKRFDNPVLPFNDGVYFASTEKSNIIRGWIFGTTLDSKTQSLLIVNNATNVVIKVCEFQFCNDPFLGVYYHKNNKSWMESEFRVYSSANNCTFEYVSQPFLMDLEGKQGNFKNLREFVFKNIDGYFKIYSKHTPINLVRDLPQGFSALEPLVDLPIGINITRFQTLLALHRSYLTPGDSSSGWTAGAAAYYVGYLQPRTFLLKYNENGTITDAVDCALDPLSETKCTLKSFTVEKGIYQTSNFRVQPTESIVRFPNITNLCPFGEVFNATRFASVYAWNRKRISNCVADYSVLYNSASFSTFKCYGVSPTKLNDLCFTNVYADSFVIRGDEVRQIAPGQTGKIADYNYKLPDDFTGCVIAWNSNNLDSKVGGNYNYLYRLFRKSNLKPFERDISTEIYQAGSTPCNGVEGFNCYFPLQSYGFQPTNGVGYQPYRVVVLSFELLHAPATVCGPKKSTNLVKNKCVNFNFNGLTGTGVLTESNKKFLPFQQFGRDIADTTDAVRDPQTLEILDITPCSFGGVSVITPGTNTSNQVAVLYQDVNCTEVPVAIHADQLTPTWRVYSTGSNVFQTRAGCLIGAEHVNNSYECDIPIGAGICASYQTQTNSPRRARSVASQSIIAYTMSLGAENSVAYSNNSIAIPTNFTISVTTEILPVSMTKTSVDCTMYICGDSTECSNLLLQYGSFCTQLNRALTGIAVEQDKNTQEVFAQVKQIYKTPPIKDFGGFNFSQILPDPSKPSKRSFIEDLLFNKVTLADAGFIKQYGDCLGDIAARDLICAQKFNGLTVLPPLLTDEMIAQYTSALLAGTITSGWTFCAGAALQIPFAMQMAYRFNGIGVTQNVLYENQKLIANQFNSVIGKIQDSLSSTASALGKLQDVVNQNAQALNTLVKQLSSNFGAISSVLNDILSRLDKVEAEVQIDRLITGRLQSLQTYVTQQLIRAAEIRASANLAATKMSECVCGQSKRVDFCGKGYHLMSFPQSAPHGVVFLHVTYVPAQEKNFTTAPAICHDGKAHFPREGVFVSNGTHWFVTQRNFYEPQIITTDNTFVSGNCDVVIGIVNNTVYDPLQPELDSGGGSGGGQIYEGKLTAEGLRFGIVASRFNHALVDRLVEGAIDAIVRHGGREEDITLVRVPGSWEIPVAAGELARKEDIDAVIAIGVLIRGATPHFDYIASEVSKGLADLSLELRKPITFGVITADTLEQAIERAGTKHGNKGWEAALSAIEMANLFKSLR

SEQ ID NO: 8192 - protein, 1307 aa, Artificial Sequence
  SARS-CoV-2/Guangdong/GD2020087-P0008/2020__EPI_ISL_413863 spike protein (1-1147)(G889C_L1034C) LumSynth construct
MFVFLVLLPLVSSQCVNLTTRTQLPPAYTNSFTRGVYYPDKVFRSSVLHSTQDLFLPFFSNVTWFHAIHVSGTNGTKRFDNPVLPFNDGVYFASTEKSNIIRGWIFGTTLDSKTQSLLIVNNATNVVIKVCEFQFCNDPFLGVYYHKNNKSWMESEFRVYSSANNCTFEYVSQPFLMDLEGKQGNFKNLREFVFKNIDGYFKIYSKHTPINLVRDLPQGFSALEPLVDLPIGINITRFQTLLALHRSYLTPGDSSSGWTAGAAAYYVGYLQPRTFLLKYNENGTITDAVDCALDPLSETKCTLKSFTVEKGIYQTSNFRVQPTESIVRFPNITNLCPFGEVFNATRFASVYAWNRKRISNCVADYSVLYNSASFSTFKCYGVSPTKLNDLCFTNVYADSFVIRGDEVREIAPGQTGKIADYNYKLPDDFTGCVIAWNSNNLDSKVGGNYNYLYRLFRKSNLKPFERDISTEIYQAGSTPCNGVEGFNCYFPLQSYGFQPTNGVGYQPYRVVVLSFELLHAPATVCGPKKSTNLVKNKCVNFNFNGLTGTGVLTESNKKFLPFQQFGRDIADTTDAVRDPQTLEILDITPCSFGGVSVITPGTNTSNQVAVLYQDVNCTEVPVAIHADQLTPTWRVYSTGSNVFQTRAGCLIGAEHVNNSYECDIPIGAGICASYQTQTNSPRRARSVASQSIIAYTMSLGAENSVAYSNNSIAIPTNFTISVTTEILPVSMTKTSVDCTMYICGDSTECSNLLLQYGSFCTQLNRALTGIAVEQDKNTQEVFAQVKQIYKTPPIKDFGGFNFSQILPDPSKPSKRSFIEDLLFNKVTLADAGFIKQYGDCLGDIAARDLICAQKFNGLTVLPPLLTDEMIAQYTSALLAGTITSGWTFCAGAALQIPFAMQMAYRFNGIGVTQNVLYENQKLIANQFNSAIGKIQDSLSSTASALGKLQDVVNQNAQALNTLVKQLSSNFGAISSVLNDILSRLDKVEAEVQIDRLITGRLQSLQTYVTQQLIRAAEIRASANLAATKMSECVCGQSKRVDFCGKGYHLMSFPQSAPHGVVFLHVTYVPAQEKNFTTAPAICHDGKAHFPREGVFVSNGTHWFVTQRNFYEPQIITTDNTFVSGNCDVVIGIVNNTVYDPLQPELDSGGGSGGGQIYEGKLTAEGLRFGIVASRFNHALVDRLVEGAIDAIVRHGGREEDITLVRVPGSWEIPVAAGELARKEDIDAVIAIGVLIRGATPHFDYIASEVSKGLADLSLELRKPITFGVITADTLEQAIERAGTKHGNKGWEAALSAIEMANLFKSLR

SEQ ID NO: 8193 - protein, 1307 aa, Artificial Sequence
  SARS-CoV-2/Sweden/01/2020__EPI_ISL_411951 spike protein (1-1147)(G889C_L1034C) LumSynth construct
MFVFLVLLPLVSSQCVNLTTRTQLPPAYTNSFTRGVYYPDKVFRSSVLHSTQDLFLPFFSNVTWFHAIHVSGTNGTKRFDNPVLPFNDGVYFASTEKSNIIRGWIFGTTLDSKTQSLLIVNNATNVVIKVCEFQFCNDPFLGVYYHKNNKSWMESEFRVYSSANNCTFEYVSQPFLMDLEGKQGNFKNLREFVFKNIDGYFKIYSKHTPINLVRDLPQGFSALEPLVDLPIGINITRFQTLLALHRSYLTPGDSSSGWTAGAAAYYVGYLQPRTFLLKYNENGTITDAVDCALDPLSETKCTLKSFTVEKGIYQTSNFRVQPTESIVRFPNITNLCPFGEVFNATRFASVYAWNRKRISNCVADYSVLYNSASFSTFKCYGVSPTKLNDLCFTNVYADSFVIRGDEVRQIAPGQTGKIADYNYKLPDDFTGCVIAWNSNNLDSKVGGNYNYLYRLFRKSNLKPFERDISTEIYQAGSTPCNGVEGFNCYFPLQSYGFQPTNGVGYQPYRVVVLSFELLHAPATVCGPKKSTNLVKNKCVNFNFNGLTGTGVLTESNKKFLPFQQFGRDIADTTDAVRDPQTLEILDITPCSFGGVSVITPGTNTSNQVAVLYQDVNCTEVPVAIHADQLTPTWRVYSTGSNVFQTRAGCLIGAEHVNNSYECDIPIGAGICASYQTQTNSPRRARSVASQSIIAYTMSLGAENSVAYSNNSIAIPTNFTISVTTEILPVSMTKTSVDCTMYICGDSTECSNLLLQYGSFCTQLNRALTGIAVEQDKNTQEVFAQVKQIYKTPPIKDCGGFNFSQILPDPSKPSKRSFIEDLLFNKVTLADAGFIKQYGDCLGDIAARDLICAQKFNGLTVLPPLLTDEMIAQYTSALLAGTITSGWTFCAGAALQIPFAMQMAYRFNGIGVTQNVLYENQKLIANQFNSAIGKIQDSLSSTASALGKLQDVVNQNAQALNTLVKQLSSNFGAISSVLNDILSRLDKVEAEVQIDRLITGRLQSLQTYVTQQLIRAAEIRASANLAATKMSECVCGQSKRVDFCGKGYHLMSFPQSAPHGVVFLHVTYVPAQEKNFTTAPAICHDGKAHFPREGVFVSNGTHWFVTQRNFYEPQIITTDNTFVSGNCDVVIGIVNNTVYDPLQPELDSGGGSGGGQIYEGKLTAEGLRFGIVASRFNHALVDRLVEGAIDAIVRHGGREEDITLVRVPGSWEIPVAAGELARKEDIDAVIAIGVLIRGATPHFDYIASEVSKGLADLSLELRKPITFGVITADTLEQAIERAGTKHGNKGWEAALSAIEMANLFKSLR

SEQ ID NO: 8194 - protein, 1307 aa, Artificial Sequence
  SARS-CoV-2/Tianmen/HBCDC-HB-07/2020__EPI_ISL_412983 spike protein (1-1147)(G889C_L1034C) LumSynth construct
MFVFLVLLPLVSSQCVNLTTRTQLPPAYTNSFTRGVYYPDKVFRSSVLHSTQDLFLPFFSNVTWFHAIHVSGTNGTKRFDNPVLPFNDGVYFASTEKSNIIRGWIFGTTLDSKTQSLLIVNNATNVVIKVCEFQFCNDPFLGVYYHKNNKSWMESEFRVYSSANNCTFEYVSQPFLMDLEGKQGNFKNLREFVFKNIDGYFKIYSKHTPINLVRDLPQGFSALEPLVDLPIGINITRFQTLLALHRSYLTPGDSSSGWTAGAAAYYVGYLQPRTFLLKYNENGTITDAVDCALDPLSETKCTLKSFTVEKGIYQTSNFRVQPTESIVRFPNITNLCPFGEVFNATRFASVYAWNRKRISNCVADYSVLYNSASFSTFKCYGVSPTKLNDLCFTNVYADSFVIRGDEVRQIAPGQTGKIADYNYKLPDDFTGCVIAWNSNNLDSKVGGNYNYLYRLFRKSNLKPFERDISTEIYQAGSTPCNGVEGFNCYFPLQSYGFQPTNGVGYQPYRVVVLSFELLHAPATVCGPKKSTNLVKNKCVNFNFNGLTGTGVLTESNKKFLPFQQFGRDIADTTDAVRDPQTLEILDITPCSFGGVSVITPGTNTSNQVAVLYQDLNCTEVPVAIHADQLTPTWRVYSTGSNVFQTRAGCLIGAEHVNNSYECDIPIGAGICASYQTQTNSPRRARSVASQSIIAYTMSLGAENSVAYSNNSIAIPTNFTISVTTEILPVSMTKTSVDCTMYICGDSTECSNLLLQYGSFCTQLNRALTGIAVEQDKNTQEVFAQVKQIYKTPPIKDFGGFNFSQILPDPSKPSKRSFIEDLLFNKVTLADAGFIKQYGDCLGDIAARDLICAQKFNGLTVLPPLLTDEMIAQYTSALLAGTITSGWTFCAGAALQIPFAMQMAYRFNGIGVTQNVLYENQKLIANQFNSAIGKIQDSLSSTASALGKLQDVVNQNAQALNTLVKQLSSNFGAISSVLNDILSRLDKVEAEVQIDRLITGRLQSLQTYVTQQLIRAAEIRASANLAATKMSECVCGQSKRVDFCGKGYHLMSFPQSAPHGVVFLHVTYVPAQEKNFTTAPAICHDGKAHFPREGVFVSNGTHWFVTQRNFYEPQIITTDNTFVSGNCDVVIGIVNNTVYDPLQPELDSGGGSGGGQIYEGKLTAEGLRFGIVASRFNHALVDRLVEGAIDAIVRHGGREEDITLVRVPGSWEIPVAAGELARKEDIDAVIAIGVLIRGATPHFDYIASEVSKGLADLSLELRKPITFGVITADTLEQAIERAGTKHGNKGWEAALSAIEMANLFKSLR

SEQ ID NO: 8195 - protein, 1307 aa, Artificial Sequence
  SARS-CoV-2/Hong Kong/case42_VM20002493/2020__EPI_ISL_414527 spike protein (1-1147)(G889C_L1034C) LumSynth construct
MFVFLVLLPLVSSQCVNLTTRTQLPPAYTNSFTRGVYYPDKVFRSSVLHSTQDLFLPFFSNVTWFHAIHVSGTNGTKRFDNPVLPFNDGVYFASTEKSNIIRGWIFGTTLDSKTQSLLIVNNATNVVIKVCEFQFCNDPFLGVYYHKNNKSWMESEFRVYSSANNCTFEYVSQPFLMDLEGKQGNFKNLREFVFKNIDGYFKIYSKHTPINLVRDLPQGFSALEPLVDLPIGINITRFQTLLALHRSYLTPGDSSSGWTAGAAAYYVGYLQPRTFLLKYNENGTITDAVDCALDPLSETKCTLKSFTVEKGIYQTSNFRVQPTESIVRFPNITNLCPFGEVFNATRFASVYAWNRKRISNCVADYSVLYNSASFSTFKCYGVSPTKLNDLCFTNVYADSFVIRGDEVRQIAPGQTGKIADYNYKLPDDFTGCVIAWNSNNLDSKVGGNYNYLYRLFRKSNLKPFERDISTEIYQAGSTPCNGVEGFNCYFPLQSYGFQPTNGVGYQPYRVVVLSFELLHAPATVCGPKKSTNLVKNKCVNFNFNGLTGTGVLTESNKKFLPFQQFGRDIADTTDAVRDPQTLEILDITPCSFGGVSVITPGTNTSNQVAVLYQDVNCTEVPVAIHADQLTPTWRVYSTGSNVFQTRAGCLIGAEHVNNSYECDIPIGAGICASYQTQTNSPRRARSVASQSIIAYTMSLGAENSVAYSNNSIAIPTNFAISVTTEILPVSMTKTSVDCTMYICGDSTECSNLLLQYGSFCTQLNRALTGIAVEQDKNTQEVFAQVKQIYKTPPIKDFGGFNFSQILPDPSKPSKRSFIEDLLFNKVTLADAGFIKQYGDCLGDIAARDLICAQKFNGLTVLPPLLTDEMIAQYTSALLAGTITSGWTFCAGAALQIPFAMQMAYRFNGIGVTQNVLYENQKLIANQFNSAIGKIQDSLSSTASALGKLQDVVNQNAQALNTLVKQLSSNFGAISSVLNDILSRLDKVEAEVQIDRLITGRLQSLQTYVTQQLIRAAEIRASANLAATKMSECVCGQSKRVDFCGKGYHLMSFPQSAPHGVVFLHVTYVPAQEKNFTTAPAICHDGKAHFPREGVFVSNGTHWFVTQRNFYEPQIITTDNTFVSGNCDVVIGIVNNTVYDPLQPELDSGGGSGGGQIYEGKLTAEGLRFGIVASRFNHALVDRLVEGAIDAIVRHGGREEDITLVRVPGSWEIPVAAGELARKEDIDAVIAIGVLIRGATPHFDYIASEVSKGLADLSLELRKPITFGVITADTLEQAIERAGTKHGNKGWEAALSAIEMANLFKSLR

SEQ ID NO: 8196 - protein, 1307 aa, Artificial Sequence
  SARS-CoV-2/USA/CruiseA-23/2020__EPI_ISL_414482 spike protein (1-1147)(G889C_L1034C) LumSynth construct
MFVFLVLLPLVSSQCVNLTTRTQLPPAYTNSFTRGVYYPDKVFRSSVLHSTQDLFLPFFSNVTWFHAIHVSGTNGTKRFDNPVLPFNDGVYFASTEKSNIIRGWIFGTTLDSKTQSLLIVNNATNVVIKVCEFQFCNDPFLGVYYHKNNKSWMESEFRVYSSANNCTFEYVSQPFLMDLEVKQGNFKNLREFVFKNIDGYFKIYSKHTPINLVRDLPQGFSALEPLVDLPIGINITRFQTLLALHRSYLTPGDSSSGWTAGAAAYYVGYLQPRTFLLKYNENGTITDAVDCALDPLSETKCTLKSFTVEKGIYQTSNFRVQPTESIVRFPNITNLCPFGEVFNATRFASVYAWNRKRISNCVADYSVLYNSASFSTFKCYGVSPTKLNDLCFTNVYADSFVIRGDEVRQIAPGQTGKIADYNYKLPDDFTGCVIAWNSNNLDSKVGGNYNYLYRLFRKSNLKPFERDISTEIYQAGSTPCNGVEGFNCYFPLQSYGFQPTNGVGYQPYRVVVLSFELLHAPATVCGPKKSTNLVKNKCVNFNFNGLTGTGVLTESNKKFLPFQQFGRDIADTTDAVRDPQTLEILDITPCSFGGVSVITPGTNTSNQVAVLYQDVNCTEVPVAIHADQLTPTWRVYSTGSNVFQTRAGCLIGAEHVNNSYECDIPIGAGICASYQTQTNSPRRARSVASQSIIAYTMSLGAENSVAYSNNSIAIPTNFTISVTTEILPVSMTKTSVDCTMYICGDSTECSNLLLQYGSFCTQLNRALTGIAVEQDKNTQEVFAQVKQIYKTPPIKDFGGFNFSQILPDPSKPSKRSFIEDLLFNKVTLADAGFIKQYGDCLGDIAARDLICAQKFNGLTVLPPLLTDEMIAQYTSALLAGTITSGWTFCAGAALQIPFAMQMAYRFNGIGVTQNVLYENQKLIANQFNSAIGKIQDSLSSTASALGKLQDVVNQNAQALNTLVKQLSSNFGAISSVLNDILSRLDKVEAEVQIDRLITGRLQSLQTYVTQQLIRAAEIRASANLAATKMSECVCGQSKRVDFCGKGYHLMSFPQSAPHGVVFLHVTYVPAQEKNFTTAPAICHDGKAHFPREGVFVSNGTHWFVTQRNFYEPQIITTDNTFVSGNCDVVIGIVNNTVYDPLQPELDSGGGSGGGQIYEGKLTAEGLRFGIVASRFNHALVDRLVEGAIDAIVRHGGREEDITLVRVPGSWEIPVAAGELARKEDIDAVIAIGVLIRGATPHFDYIASEVSKGLADLSLELRKPITFGVITADTLEQAIERAGTKHGNKGWEAALSAIEMANLFKSLR

SEQ ID NO: 8197 - protein, 1307 aa, Artificial Sequence
  SARS-CoV-2/Hong Kong/case85_VM20002868/2020__EPI_ISL_414519 spike protein (1-1147)(G889C_L1034C) LumSynth construct
MFVFLVLVPLVSSQCVNLTTRTQLPPAYTNSFTRGVYYPDKVFRSSVLHSTQDLFLPFFSNVTWFHAIHVSGTNGTKRFDNPVLPFNDGVYFASTEKSNIIRGWIFGTTLDSKTQSLLIVNNATNVVIKVCEFQFCNDPFLGVYYHKNNKSWMESEFRVYSSANNCTFEYVSQPFLMDLEGKQGNFKNLREFVFKNIDGYFKIYSKHTPINLVRDLPQGFSALEPLVDLPIGINITRFQTLLALHRSYLTPGDSSSGWTAGAAAYYVGYLQPRTFLLKYNENGTITDAVDCALDPLSETKCTLKSFTVEKGIYQTSNFRVQPTESIVRFPNITNLCPFGEVFNATRFASVYAWNRKRISNCVADYSVLYNSASFSTFKCYGVSPTKLNDLCFTNVYADSFVIRGDEVRQIAPGQTGKIADYNYKLPDDFTGCVIAWNSNNLDSKVGGNYNYLYRLFRKSNLKPFERDISTEIYQAGSTPCNGVEGFNCYFPLQSYGFQPTNGVGYQPYRVVVLSFELLHAPATVCGPKKSTNLVKNKCVNFNFNGLTGTGVLTESNKKFLPFQQFGRDIADTTDAVRDPQTLEILDITPCSFGGVSVITPGTNTSNQVAVLYQDVNCTEVPVAIHADQLTPTWRVYSTGSNVFQTRAGCLIGAEHVNNSYECDIPIGAGICASYQTQTNSPRRARSVASQSIIAYTMSLGAENSVAYSNNSIAIPTNFTISVTTEILPVSMTKTSVDCTMYICGDSTECSNLLLQYGSFCTQLNRALTGIAVEQDKNTQEVFAQVKQIYKTPPIKDFGGFNFSQILPDPSKPSKRSFIEDLLFNKVTLADAGFIKQYGDCLGDIAARDLICAQKFNGLTVLPPLLTDEMIAQYTSALLAGTITSGWTFCAGAALQIPFAMQMAYRFNGIGVTQNVLYENQKLIANQFNSAIGKIQDSLSSTASALGKLQDVVNQNAQALNTLVKQLSSNFGAISSVLNDILSRLDKVEAEVQIDRLITGRLQSLQTYVTQQLIRAAEIRASANLAATKMSECVCGQSKRVDFCGKGYHLMSFPQSAPHGVVFLHVTYVPAQEKNFTTAPAICHDGKAHFPREGVFVSNGTHWFVTQRNFYEPQIITTDNTFVSGNCDVVIGIVNNTVYDPLQPELDSGGGSGGGQIYEGKLTAEGLRFGIVASRFNHALVDRLVEGAIDAIVRHGGREEDITLVRVPGSWEIPVAAGELARKEDIDAVIAIGVLIRGATPHFDYIASEVSKGLADLSLELRKPITFGVITADTLEQAIERAGTKHGNKGWEAALSAIEMANLFKSLR

SEQ ID NO: 8198 - protein, 1307 aa, Artificial Sequence; identical to SEQ ID NO: 8188
  SARS-CoV-2/England/200990660/2020__EPI_ISL_414523 spike protein (1-1147)(G889C_L1034C) LumSynth construct

SEQ ID NO: 8199 - protein, 1307 aa, Artificial Sequence
  SARS-CoV-2/Australia/NSW09/2020__EPI_ISL_413595 spike protein (1-1147)(G889C_L1034C) LumSynth construct
MFVFLVLLPLVSSQCVNLTTRTQLPPAYTNSFTRGVYYPDKVFRSSVLHSTQDLFLPFFSNVTWFHAIHVSGTNGTKRFDNPVLPFNDGVYFASTEKSNIIRGWIFGTTLDSKTQSLLIVNNATNVVIKVCEFQFCNDPFLGVYYHKNNKSWMESEFRVYSSANNCTFEYVSQPFLMDLEGKQGNFKNLREFVFKNIDGYFKIYSKHTPINLVRDLPQGFSALEPLVDLPIGINITRFQTLLALHRSYLTPGDSSSGWTAGAAAYYVGYLQPRTFLLKYNENGTITDAVDCALDPLSETKCTLKSFTVEKGIYQTSNFRVQPTESIVRFPNITNLCPFGEVFNATRFASVYAWNRKRISNCVADYSVLYNSASFSTFKCYGVSPTKLNDLCFTNVYADSFVIRGDEVRQIAPGQTGKIADYNYKLPDDFTGCVIAWNSNNLDSKVGGNYNYLYRLFRKSNLKPFERDISTEIYQAGSTPCNGVEGFNCYFPLQSYGFQPTNGVGYQPYRVVVLSFELLHAPATVCGPKKSTNLVKNKCVNFNFNGLTGTGVLTESNKKFLPFQQFGRDIADTTDAVRDPQTLEILDITPCSFGGVSVITPGTNTSNQVAVLYQDVNCTEVPVAIHADQLTPTWRVYSTGSNVFQTRAGCLIGAEHVNNSYECDIPIGAGICASYQTQTNSPRRARSVASQSIIAYTMSLGAENSVAYSNNSIAIPTNFTISVTTEILPVSMTKTSVDCTMYICGDSTECSNLLLQYGSFCTQLNRALTGIAVEQDKNTQEVFAQVKQIYKTPPIKDFGGFNFSQILPDPSKPSKRSFIEDLLFNKVTLADAGFIKQYGDCLGDIAARDLICAQKFNGLTVLPPLLTDEMIAQYTSALLAGTITSGWTFCAGAALQIPFAMQMAYRFNGIGVTQNVLYENQKLIANQFNSAIGKIQDSLSFTASALGKLQDVVNQNAQALNTLVKQLSSNFGAISSVLNDILSRLDKVEAEVQIDRLITGRLQSLQTYVTQQLIRAAEIRASANLAATKMSECVCGQSKRVDFCGKGYHLMSFPQSAPHGVVFLHVTYVPAQEKNFTTAPAICHDGKAHFPREGVFVSNGTHWFVTQRNFYEPQIITTDNTFVSGNCDVVIGIVNNTVYDPLQPELDSGGGSGGGQIYEGKLTAEGLRFGIVASRFNHALVDRLVEGAIDAIVRHGGREEDITLVRVPGSWEIPVAAGELARKEDIDAVIAIGVLIRGATPHFDYIASEVSKGLADLSLELRKPITFGVITADTLEQAIERAGTKHGNKGWEAALSAIEMANLFKSLR

SEQ ID NO: 8200 - protein, 1307 aa, Artificial Sequence; identical to SEQ ID NO: 8180
  SARS-CoV-2/Australia/NSW10/2020__EPI_ISL_413596 spike protein (1-1147)(G889C_L1034C) LumSynth construct

SEQ ID NO: 8201 - protein, 1307 aa, Artificial Sequence
  SARS-CoV-2/Switzerland/1000477797/2020__EPI_ISL_413023 spike protein (1-1147)(G889C_L1034C) LumSynth construct
MFVFLVLLPLVSSQCVNLTTRTQLPPAYTNSFTRGVYYPDKVFRSSVLHSTQDLFLPFFSNVTWFHAIHVSGTNGTKRFDNPVLPFNDGVYFASTEKSNIIRGWIFGTTLDSKTQSLLIVNNATNVVIKVCEFQFCNDPFLGVYYHKNNKSWMESEFRVYSSANNCTFEYVSQPFLMDLEGKQGNFKNLREFVFKNIDGYFNIYSKHTPINLVRDLPQGFSALEPLVDLPIGINITRFQTLLALHRSYLTPGDSSSGWTAGAAAYYVGYLQPRTFLLKYNENGTITDAVDCALDPLSETKCTLKSFTVEKGIYQTSNFRVQPTESIVRFPNITNLCPFGEVFNATRFASVYAWNRKRISNCVADYSVLYNSASFSTFKCYGVSPTKLNDLCFTNVYADSFVIRGDEVRQIAPGQTGKIADYNYKLPDDFTGCVIAWNSNNLDSKVGGNYNYLYRLFRKSNLKPFERDISTEIYQAGSTPCNGVEGFNCYFPLQSYGFQPTNGVGYQPYRVVVLSFELLHAPATVCGPKKSTNLVKNKCVNFNFNGLTGTGVLTESNKKFLPFQQFGRDIADTTDAVRDPQTLEILDITPCSFGGVSVITPGTNTSNQVAVLYQGVNCTEVPVAIHADQLTPTWRVYSTGSNVFQTRAGCLIGAEHVNNSYECDIPIGAGICASYQTQTNSPRRARSVASQSIIAYTMSLGAENSVAYSNNSIAIPTNFTISVTTEILPVSMTKTSVDCTMYICGDSTECSNLLLQYGSFCTQLNRALTGIAVEQDKNTQEVFAQVKQIYKTPPIKDFGGFNFSQILPDPSKPSKRSFIEDLLFNKVTLADAGFIKQYGDCLGDIAARDLICAQKFNGLTVLPPLLTDEMIAQYTSALLAGTITSGWTFCAGAALQIPFAMQMAYRFNGIGVTQNVLYENQKLIANQFNSAIGKIQDSLSSTASALGKLQDVVNQNAQALNTLVKQLSSNFGAISSVLNDILSRLDKVEAEVQIDRLITGRLQSLQTYVTQQLIRAAEIRASANLAATKMSECVCGQSKRVDFCGKGYHLMSFPQSAPHGVVFLHVTYVPAQEKNFTTAPAICHDGKAHFPREGVFVSNGTHWFVTQRNFYEPQIITTDNTFVSGNCDVVIGIVNNTVYDPLQPELDSGGGSGGGQIYEGKLTAEGLRFGIVASRFNHALVDRLVEGAIDAIVRHGGREEDITLVRVPGSWEIPVAAGELARKEDIDAVIAIGVLIRGATPHFDYIASEVSKGLADLSLELRKPITFGVITADTLEQAIERAGTKHGNKGWEAALSAIEMANLFKSLR

SEQ ID NO: 8202 - protein, 1307 aa, Artificial Sequence
  SARS-CoV-2/Belgium/BA-02291/2020__EPI_ISL_415159 spike protein (1-1147)(G889C_L1034C) LumSynth construct
MFVFLVLLPLVSSQCVNLTTRTQLPPAYTNSFTRGVYYPDKVFRSSVLHSTQDLFLPFFSNVTWFHAIHVSGTNGTKRFDNPVLPFNDGVYFASTEKSNIIRGWIFGTTLDSKTQSLLIVNNATNVVIKVCEFQFCNDPFLGVYYHKNNKSWMESEFRVYSSANNCTFEYVSQPFLMDLEGKQGNFKNLREFVFKNIDGYFKIYSKHTPINLVRDLPQGFSALEPLVDLPIGINITRFQTLLALHRSYLTPGDSSSGWTAGAAAYYVGYLQPRTFLLKYNENGTITDAVDCALDPLSETKCTLKSFTVEKGIYQTSNFRVQPTESIVRFPNITNLCPFGEVFNATRFASVYAWNRKRISNCVADYSVLYNSASFSTFKCYGVSPTKLNDLCFTNVYADSFVIRGDEVRQIAPGQTGKIADYNYKLPDDFTGCVIAWNSNNLDSKVGGNYNYLYRLFRRSNLKPFERDISTEIYQAGSTPCNGVEGFNCYFPLQSYGFQPTNGVGYQPYRVVVLSFELLPAPATVCGPKKSTNLVKNKCVNFNFNGLTGTGVLTESNKKFLPFQQFGRDIADTTDAVRDPQTLEILDITPCSFGGVSVITPGTNTSNQVAVLYQGVNCTEVPVAIHADQLTPTWRVYSTGSNVFQTRAGCLIGAEHVNNSYECDIPIGAGICASYQTQTNSPRRARSVASQSIIAYTMSLGAENSVAYSNNSIAIPTNFTISVTTEILPVSMTKTSVDCTMYICGDSTECSNLLLQYGSFCTQLNRALTGIAVEQDKNTQEVFAQVKQIYKTPPIKDFGGFNFSQILPDPSKPSKRSFIEDLLFNKVTLADAGFIKQYGDCLGDIAARDLICAQKFNGLTVLPPLLTDEMIAQYTSALLAGTITSGWTFCAGAALQIPFAMQMAYRFNGIGVTQNVLYENQKLIANQFNSAIGKIQDSLSSAAPALGKLQDVVNQNAQALNTLVKQLSSNFGAISSVLNDILSRLDKVEAEVQIDRLITGRLQSLQTYVTQQLIRAAEIRASANLAATKMSECVCGQSKRVDFCGKGYHLMSFPQSAPHGVVFLHVTYVPAQEKNFTTAPAICHDGKAHFPREGVFVSNGTHWFVTQRNFYEPQIITTDNTFVSGNCDVVIGIVNNTVYDPLQPELDSGGGSGGGQIYEGKLTAEGLRFGIVASRFNHALVDRLVEGAIDAIVRHGGREEDITLVRVPGSWEIPVAAGELARKEDIDAVIAIGVLIRGATPHFDYIASEVSKGLADLSLELRKPITFGVITADTLEQAIERAGTKHGNKGWEAALSAIEMANLFKSLR

SEQ ID NO: 8203 - protein, 1307 aa, Artificial Sequence
  SARS-CoV-2/USA/WA8-UW5/2020__EPI_ISL_413486 spike protein (1-1147)(G889C_L1034C) LumSynth construct
MFVFLVLLPLVSSQCVNLTTRTQLPPAYTNSFTRGVYYPDKVFRSSVLHSTQDLFLPFFSNVTWFHAIHVSGTNGTKRFDNPVLPFNDGVYFASTEKSNIIRGWIFGTTLDSKTQSLLIVNNATNVVIKVCEFQFCNDPFLGVYYHKNNKSWMESEFRVYSSANNCTFEYVSQPFLMDLEGKQGNFKNLREFVFKNIDGYFKIYSKHTPINLVRDLPQGFSALEPLVDLPIGINITRFQTLLALHRSYLTPGDSSSGWTAGAAAYYVGYLQPRTFLLKYNENGTITDAVDCALDPLSETKCTLKSFTVEKGIYQTSNFRVQPTESIVRFPNITNLCPFGEVFNATRFASVYAWNRKRISNCVADYSVLYNSASFSTFKCYGVSPTKLNDLCFTNVYADSFVIRGDEVRQIAPGQTGKIADYNYKLPDDFTGCVIAWNSNNLDSKVGGNYNYLYRLFRKSNLKPFERDISTEIYQAGSTPCNGVEGFNCYFPLQSYGFQPTNGVGYQPYRVVVLSFELLHAPATVCGPKKSTNLVKNKCVNFNFNGLTGTGVLTESNKKFLPFQQFGRDIADTTDAVRDPQTLEILDITPCSFGGVSVITPGTNTSNQVAVLYQDVNCTEVPVAIHADQLTPTWRVYSTGSNVFQTRAGCLIGAEYVNNSYECDIPIGAGICASYQTQTNSPRRARSVASQSIIAYTMSLGAENSVAYSNNSIAIPTNFTISVTTEILPVSMTKTSVDCTMYICGDSTECSNLLLQYGSFCTQLNRALTGIAVEQDKNTQEVFAQVKQIYKTPPIKDFGGFNFSQILPDPSKPSKRSFIEDLLFNKVTLADAGFIKQYGDCLGDIAARDLICAQKFNGLTVLPPLLTDEMIAQYTSALLAGTITSGWTFCAGAALQIPFAMQMAYRFNGIGVTQNVLYENQKLIANQFNSAIGKIQDSLSSTASALGKLQDVVNQNAQALNTLVKQLSSNFGAISSVLNDILSRLDKVEAEVQIDRLITGRLQSLQTYVTQQLIRAAEIRASANLAATKMSECVCGQSKRVDFCGKGYHLMSFPQSAPHGVVFLHVTYVPAQEKNFTTAPAICHDGKAHFPREGVFVSNGTHWFVTQRNFYEPQIITTDNTFVSGNCDVVIGIVNNTVYDPLQPELDSGGGSGGGQIYEGKLTAEGLRFGIVASRFNHALVDRLVEGAIDAIVRHGGREEDITLVRVPGSWEIPVAAGELARKEDIDAVIAIGVLIRGATPHFDYIASEVSKGLADLSLELRKPITFGVITADTLEQAIERAGTKHGNKGWEAALSAIEMANLFKSLR

SEQ ID NO: 8204 - protein, 1307 aa, Artificial Sequence
  SARS-CoV-2/England/20102000506/2020__EPI_ISL_415147 spike protein (1-1147)(G889C_L1034C) LumSynth construct
MFVFLVLLPLVSSQCVNLTTRTQLPPAYTNSFTRGVYYPDKVFRSSVLHSTQDLFLPFFSNVTWFHAIHVSGTNGTKRFDNPVLPFNDGVYFASTEKSNIIRGWIFGTTLDSKTQSLLIVNNATNVVIKVCEFQFCNDPFLGVYYHKNNKSWMESEFRVYSSANNCTFEYVSQPFLMDLEGKQGNFKNLREFVFKNIDGYFKIYSKHTPINLVRDLPQGFSALEPLVDLPIGINITRFQTLLALHRSYLTPGDSSSGWTAGAAAYYVGYLQPRTFLLKYNENGTITDAVDCALDPLSETKCTLKSFTVEKGIYQTSNFRVQPTESIVRFPNITNLCPFGEVFNATRFASVYAWNRKRISNCVADYSVLYNSASFSTFKCYGVSPTKLNDLCFTNVYADSFVIRGDEVRQIAPGQTGKIADYNYKLPDDFTGCVIAWNSNNLDSKVGGNYNYLYRLFRKSNLKPFERDISTEIYQAGSTPCNGVEGFNCYFPLQSYGFQPTNGVGYQPYRVVVLSFELLHAPATVCGPKKSTNLVKNKCVNFNFNGLTGTGVLTESNKKFLPFQQFGRDIADTTDAVRDPQTLEILDITPCSFGGVSVITPGTNTSNQVAVLYQGVNCTEVPVAIHADQLTPTWRVYSTGSNVFQTRAGCLIGAEHVNNSYECDIPIGAGICASYQTQTNSPRRARSVASQSIIAYTMSLGAENSVAYSNNSIAIPTNFTISVTTEILPVSMTKTSVDCTMYICGDSTECSNLLLQYGSFCTQLNRALTGIAVEQDKNTQEVFAQVKQIYKTPPIKDFGGFNFSQILPDPSKPSKRSFIEDLLFNKVTLADAGFIKQYGYCLGDIAARDLICAQKFNGLTVLPPLLTDEMIAQYTSALLAGTITSGWTFCAGAALQIPFAMQMAYRFNGIGVTQNVLYENQKLIANQFNSAIGKIQDSLSSTASALGKLQDVVNQNAQALNTLVKQLSSNFGAISSVLNDILSRLDKVEAEVQIDRLITGRLQSLQTYVTQQLIRAAEIRASANLAATKMSECVCGQSKRVDFCGKGYHLMSFPQSAPHGVVFLHVTYVPAQEKNFTTAPAICHDGKAHFPREGVFVSNGTHWFVTQRNFYEPQIITTDNTFVSGNCDVVIGIVNNTVYDPLQPELDSGGGSGGGQIYEGKLTAEGLRFGIVASRFNHALVDRLVEGAIDAIVRHGGREEDITLVRVPGSWEIPVAAGELARKEDIDAVIAIGVLIRGATPHFDYIASEVSKGLADLSLELRKPITFGVITADTLEQAIERAGTKHGNKGWEAALSAIEMANLFKSLR

SEQ ID NO: 8205 - protein, 1307 aa, Artificial Sequence
  SARS-CoV-2/Belgium/VAG-03013/2020__EPI_ISL_415155 spike protein (1-1147)(G889C_L1034C) LumSynth construct
MFVFLVLLPLVSSQCVNLTTRTQLPPAYTNSFTRGVYYPDKVFRSSVLHSTQDLFLPFFSNVTWFHAIHVSGTNGTKRFDNPVLPFNDGVYFASTEKSNIIRGWIFGTTLDSKTQSLLIVNNATNVVIKVCEFQFCNDPFLGVYYHKNNKSWMESEFRVYSSANNCTFEYVSQPFLMDLEGKQGNFKNLREFVFKNIDGYFKIYSKHTPINLVRDLPQGFSALEPLVDLPIGINITRFQTLLALHRSYLTPGDSSSGWTAGAAAYYVGYLQPRTFLLKYNENGTITDAVDCALDPLSETKCTLKSFTVEKGIYQTSNFRVQPTESIVRFPNITNLCPFGEVFNATRFASVYAWNRKRISNCVADYSVLYNSASFSTFKCYGVSPTKLNDLCFTNVYADSFVIRGDEVRQIAPGQTGKIADYNYKLPDDFTGCVIAWNSNNLDSKVGGNYNYLYRLFRKSNLKPFERDISTEIYQAGSTPCNGVEGFNCYFPLQSYGFQPTNGVGYQPYRVVVLSFELLHAPATVCGPKKSTNLVKNKCVNFNFNGLTGTGVLTESNKKFLPFQQFGRDIADTTDAVRDPQTLEILDITPCSFGGVSVITPGTNTSNQVAVLYQGVNCTEVPVAIHADQLTPTWRVYSTGSNVFQTRAGCLIGAEHVNNSYECDIPIGAGICASYQTQTNSPRRARSVASQSIIAYTMSLGAENSVAYSNNSIAIPTNFTISVTTEILPVSMTKTSVDCTMYICGDSTECSNLLLQYGSFCTQLNRALTGIAVEQDKNTQEVFAQVKQIYKTPPIKDFGGFNFSQILPDPSKPSKRSFIEDLLFNKVTLADAGFIKQYGDCLGDIAARDLICAQKFNGLTVLPPLLTDEMIAQYTSALLAGTITSGWTFCAGAALQIPFAMQMAYRFNGIGVTQNVLYENQKLIANQFNSAIGKIQDSLSSTATALGKLQDVVNQNAQALNTLVKQLSSNFGAISSVLNDILSRLDKVEAEVQIDRLITGRLQSLQTYVTQQLIRAAEIRASANLAATKMSECVCGQSKRVDFCGKGYHLMSFPQSAPHGVVFLHVTYVPAQEKNFTTAPAICHDGKAHFPREGVFVSNGTHWFVTQRNFYEPQIITTDNTFVSGNCDVVIGIVNNTVYDPLQPELDSGGGSGGGQIYEGKLTAEGLRFGIVASRFNHALVDRLVEGAIDAIVRHGGREEDITLVRVPGSWEIPVAAGELARKEDIDAVIAIGVLIRGATPHFDYIASEVSKGLADLSLELRKPITFGVITADTLEQAIERAGTKHGNKGWEAALSAIEMANLFKSLR

SEQ ID NO: 8206 - protein, 1307 aa, Artificial Sequence
  SARS-CoV-2/Belgium/BC-03016/2020__EPI_ISL_415157 spike protein (1-1147)(G889C_L1034C) LumSynth construct
MFVFLVLLPLVSSQCVNLTTRTQLPPAYTNSFTRGVYYPDKVFRSSVLHSTQDLFLPFFSNVTWFHAIHVSGTNGTKRFDNPVLPFNDGVYFASTEKSNIIRGWIFGTTLDSKTQSLLIVNNATNVVIKVCEFQFCNDPFLGVYYHKNNKSWMESEFRVYSSANNCTFEYVSQPFLMDLEGKQGNFKNLREFVFKNIDGYFKIYSKHTPINLVRDLPQGFSALEPLVDLPIGINITRFQTLLALHRSYLTPGDSSSGWTAGAAAYYVGYLQPRTFLLKYNENGTITDAVDCALDPLSETKCTLKSFTVEKGIYQTSNFRVQPTESIVRFPNITNLCPFGEVFNATRFASVYAWNRKRISNCVADYSVLYNSASFSTFKCYGVSPTKLNDLCFTNVYADSFVIRGDEVRQIAPGQTGKIADYNYKLPDDFTGCVIAWNSNNLDSKVGGNYNYLYRLFRKSNLKPFERDISTEIYQAGSTPCNGVEGFNCYFPLQSYGFQPTNGVGYQPYRVVVLSFELLHAPATVCGPKKSTNLVKNKCVNFNFNGLTGTGVLTESNKKFLPFQQFGRDIADTTDAVRDPQTLEILDITPCSFGGVSVITPGTNTSNQVAVLYQGVNCTEVPVAIHADQLTPTWRVYSTGSNVFQTRAGCLIGAEHVNNSYECDIPIGAGICASYQTQTNSPRRARSVASQSIIAYTMSLGAENSVAYSNNSIAIPTNFTISVTTEILPVSMTKTSVDCTMYICGDSTECSNLLLQYGSFCTQLNRALTGIAVEQDKNTQEVFAQVKQIYKTPPIKDFGGFNFSQILPDPSKPSKRSFIEDLLFNKVTLADAGFIKQYGDCLGDIAARDLICAQKFNGLTVLPPLLTDEMIAQYTSALLAGTITSGWTFCAGAALQIPFAMQMAYRFNGIGVTQNVLYENQKLIANQFNSAIGKIQDSLSSTAPALGKLQDVVNQNAQALNTLVKQLSSNFGAISSVLNDILSRLDKVEAEVQIDRLITGRLQSLQTYVTQQLIRAAEIRASANLAATKMSECVCGQSKRVDFCGKGYHLMSFPQSAPHGVVFLHVTYVPAQEKNFTTAPAICHDGKAHFPREGVFVSNGTHWFVTQRNFYEPQIITTDNTFVSGNCDVVIGIVNNTVYDPLQPELDSGGGSGGGQIYEGKLTAEGLRFGIVASRFNHALVDRLVEGAIDAIVRHGGREEDITLVRVPGSWEIPVAAGELARKEDIDAVIAIGVLIRGATPHFDYIASEVSKGLADLSLELRKPITFGVITADTLEQAIERAGTKHGNKGWEAALSAIEMANLFKSLR

SEQ ID NO: 8207 - protein, 1307 aa, Artificial Sequence
  SARS-CoV-2/Germany/BavPat3/2020__EPI_ISL_414521 spike protein (1-1147)(G889C_L1034C) LumSynth construct
MFVFLVLLPLVSSQCVNLTTRTQLPPAYTNSFTRGVYYPDKVFRSSVLHSTQDLFLPFFSNVTWFHAIHVSGTNGTKRFDNPVLPFNDGVYFASTEKSNIIRGWIFGTTLDSKTQSLLIVNNATNVVIKVCEFQFCNDPFLGVYYHKNNKSWMESEFRVYSSANNCTFEYVSQPFLMDLEGKQGNFKNLREFVFKNIDGYFKIYSKHTPINLVRDLPQGFSALEPLVDLPIGINITRFQTLLALHRSYLTPGDSSSGWTAGAAAYYVGYLQPRTFLLKYNENGTITDAVDCALDPLSETKCTLKSFTVEKGIYQTSNFRVQPTESIVRFPNITNLCPFGEVFNATRFASVYAWNRKRISNCVADYSVLYNSASFSTFKCYGVSPTKLNDLCFTNVYADSFVIRGDEVRQIAPGQTGKIADYNYKLPDDFTGCVIAWNSNNLDSKVGGNYNYLYRLFRKSNLKPFERDISTEIYQAGSTPCNGVEGFNCYFPLQSYGFQPTNGVGYQPYRVVVLSFELLHAPATVCGPKKSTNLVKNKCVNFNFNGLTGTGVLTESNKKFLPFQQFGRDIADTTDAVRDPQTLEILDITPCSFGGVSVITPGTNTSNQVAVLYQDVNCTEVPVAIHADQLTPTWRVYSTGSNVFQTRAGCLIGAEHVNNSYECDIPIGAGICASYQTQTNSPRRARSVASQSIIAYTMSLGAENSVAYSNNSIAIPTNFTISVTTEILPVSMTKTSVDCTMYICGDSTECSNLLLQYGSFCTQLNRALTGIAVEQDKNTQQVFAQVKQIYKTPPIKDFGGFNFSQILPDPSKPSKRSFIEDLLFNKVTLADAGFIKQYGDCLGDIAARDLICAQKFNGLTVLPPLLTDEMIAQYTSALLAGTITSGWTFCAGAALQIPFAMQMAYRFNGIGVTQNVLYENQKLIANQFNSAIGKIQDSLSSTASALGKLQDVVNQNAQALNTLVKQLSSNFGAISSVLNDILSRLDKVEAEVQIDRLITGRLQSLQTYVTQQLIRAAEIRASANLAATKMSECVCGQSKRVDFCGKGYHLMSFPQSAPHGVVFLHVTYVPAQEKNFTTAPAICHDGKAHFPREGVFVSNGTHWFVTQRNFYEPQIITTDNTFVSGNCDVVIGIVNNTVYDPLQPELDSGGGSGGGQIYEGKLTAEGLRFGIVASRFNHALVDRLVEGAIDAIVRHGGREEDITLVRVPGSWEIPVAAGELARKEDIDAVIAIGVLIRGATPHFDYIASEVSKGLADLSLELRKPITFGVITADTLEQAIERAGTKHGNKGWEAALSAIEMANLFKSLR

SEQ ID NO: 8208 - protein, 1307 aa, Artificial Sequence
  SARS-CoV-2/France/HF1805/2020__EPI_ISL_414628 spike protein (1-1147)(G889C_L1034C) LumSynth construct
MFVFLVLLPLVSSQCVNLTTRTQLPPAYTNSFTRGVYYPDKVFRSSVLHSTQDLFLPFFSNVTWFHAIHVSGTNGTKRFDNPVLPFNDGVYFASTEKSNIIRGWIFGTTLDSKTQSLLIVNNATNVVIKVCEFQFCNDPFLGVYYHKNNKSWMESEFRVYSSANNCTFEYVSQPFLMDLEGKQGNFKNLREFVFKNIDGYFKIYSKHTPINLVRDLPQGFSALEPLVDLPIGINITRFQTLLALHRSYLTPGDSSSGWTAGAAAYYVGYLQPRTFLLKYNENGTITDAVDCALDPLSETKCTLKSFTVEKGIYQTSNFRVQPTESIVRFPNITNLCPFGEVFNATRFASVYAWNRKRISNCVADYSVLYNSASFSTFKCYGVSPTKLNDLCFTNVYADSFVIRGDEVRQIAPGQTGKIADYNYKLPDDFTGCVIAWNSNNLDSKVGGNYNYLYRLFRKSNLKPFERDISTEIYQAGSTPCNGVEGFNCYFPLQSYGFQPTNGVGYQPYRVVVLSFELLHAPATVCGPKKSTNLVKNKCVNFNFNGLTGTGVLTESNKKFLPFQQFGRDIADTTDAVRDPQTLEILDITPCSFGGVSVITPGTNTSNQVAVLYQGVNCTEVPVAIHADQLTPTWRVYSTGSNVFQTRAGCLIGAEHVNNSYECDIPIGAGICASYQTQTNSPRRARSVASQSIIAYTMSLGAENSVAYSNNSIAIPTNFTISVTTEILPVSMTKTSVDCTMYICGDSTECSNLLLQYGSFCTQLNRALTGIAVEQDKNTQEVFAQVKQIYKTPPIKDFGGFNFSQILPDPSKPSKRSFIEDLLFNKVTLADAGFIKQYGDCLGDIAARDLICAQKFNGLTVLPPLLTDEMIAQYTSALLAGTITSGWTFCAGAALQIPFAMQMAYRFNGIGVTQNVLYENQKLIANQFNSAIGKIQDSLSSTASALGKLQDVVNQNAQALNTLVKQLSSNFGAISSVLNDILSRLDKVEAEVQIDRLITGRLQSLQTYVTQQLIRAAEIRASANLAATKMSECVCGQSKRVDFCGKGYHLMSFPQSAPHGVVFLHVTYVPAQEKNFTTAPAICHDGKAHFPREGVFVSNGTHWFVTQRNFYEPQIITTDNTFVSGNCDVVIGVVNNTVYDPLQPELDSGGGSGGGQIYEGKLTAEGLRFGIVASRFNHALVDRLVEGAIDAIVRHGGREEDITLVRVPGSWEIPVAAGELARKEDIDAVIAIGVLIRGATPHFDYIASEVSKGLADLSLELRKPITFGVITADTLEQAIERAGTKHGNKGWEAALSAIEMANLFKSLR

SEQ ID NO: 8209 - protein, 1307 aa, Artificial Sequence
  SARS-CoV-2/Netherlands/ZuidHolland_9/2020__EPI_ISL_414445 spike protein (1-1147)(G889C_L1034C) LumSynth construct
MFVFLVLLPLVSSQCVNLTTRTQLPPAYTNSFTRGVYYPDKVFRSSVLHSTQDLFLPFFSNVTWFHAIHVSGTNGTKRFDNPVLPFNDGVYFASTEKSNIIRGWIFGTTLDSKTQSLLIVNNATNVVIKVCEFQFCNDPFLGVYYHKNNKSWMESEFRVYSSANNCTFEYVSQPFLMDLEGKQGNFKNLREFVFKNIDGYFKIYSKHTPINLVRDLPQGFSALEPLVDLPIGINITRFQTLLALHRSYLTPGDSSSGWTAGAAAYYVGYLQPRTFLLKYNENGTITDAVDCALDPLSETKCTLKSFTVEKGIYQTSNFRVQPTESIVRFPNITNLCPFGEVFNATRFASVYAWNRKRISNCVADYSVLYNSASFSTFKCYGVSPTKLNDLCFTNVYADSFVIRGDEVRQIAPGQTGKIADYNYKLPDDFTGCVIAWNSNNLDSKVGGNYNYLYRLFRKSNLKPFERDISTEIYQAGSTPCNGVEGFNCYFPLQSYGFQPTNGVGYQPYRVVVLSFELLHAPATVCGPKKSTNLVKNKCVNFNFNGLTGTGVLTESNKKFLPFQQFGRDIADTTDAVRDPQTLEILDITPCSFGGVSVITPGTNTSNQVAVLYQGVNCTEVPVAIHADQLTPTWRVYSTGSNVFQTRAGCLIGAEHVNNSYECDIPIGAGICASYQTQTNSPRRARSVASQSIIAYTMSLGAENSVAYSNNSIAIPTNFTISVTTEILPVSMTKTSVDCTMYICGDSTECSNLLLQYGSFCTQLNRALTGIAVEQDKNTQEVFAQVKQIYKTPPIKDFGGFNFSQILPDPSKPSKRSFIEDLLFNKVTLADAGFIKQYGDCLGDIAARDLICVQKFNGLTVLPPLLTDEMIAQYTSALLAGTITSGWTFCAGAALQIPFAMQMAYRFNGIGVTQNVLYENQKLIANQFNSAIGKIQDSLSSTASALGKLQDVVNQNAQALNTLVKQLSSNFGAISSVLNDILSRLDKVEAEVQIDRLITGRLQSLQTYVTQQLIRAAEIRASANLAATKMSECVCGQSKRVDFCGKGYHLMSFPQSAPHGVVFLHVTYVPAQEKNFTTAPAICHDGKAHFPREGVFVSNGTHWFVTQRNFYEPQIITTDNTFVSGNCDVVIGIVNNTVYDPLQPELDSGGGSGGGQIYEGKLTAEGLRFGIVASRFNHALVDRLVEGAIDAIVRHGGREEDITLVRVPGSWEIPVAAGELARKEDIDAVIAIGVLIRGATPHFDYIASEVSKGLADLSLELRKPITFGVITADTLEQAIERAGTKHGNKGWEAALSAIEMANLFKSLR

SEQ ID NO: 8210 - protein, 1307 aa, Artificial Sequence
  SARS-CoV-2/Finland/FIN03032020A/2020__EPI_ISL_413602 spike protein (1-1147)(G889C_L1034C) LumSynth construct
MFVFLVLLPLVSSQCVNLTTRTQLPPAYTNSFTRGVYYPDKVFRSSVLHSTQDLFLPFFSNVTWFHAIHVSGTNGTKRFDNPVLPFNDGVYFASTEKSNIIRGWIFGTTLDSKTQSLLIVNNATNVVIKVCEFQFCNDPFLGVYYHKNNKSWMESEFRVYSSANNCTFEYVSQPFLMDLEGKQGNFKNLREFVFKNIDGYFKIYSKHTPINLVRDLPQGFSALEPLVDLPIGINITRFQTLLALHRSYLTPGDSSSGWTAGAAAYYVGYLQPRTFLLKYNENGTITDAVDCALDPLSETKCTLKSFTVEKGIYQTSNFRVQPTESIVRFPNITNLCPFGEVFNATRFASVYAWNRKRISNCVADYSVLYNSASFSTFKCYGVSPTKLNDLCFTNVYADSFVIRGDEVRQIAPGQTGKIADYNYKLPDDFTGCVISWNSNNLDSKVGGNYNYLYRLFRKSNLKPFERDISTEIYQAGSTPCNGVEGFNCYFPLQSYGFQPTNGVGYQPYRVVVLSFELLHAPATVCGPKKSTNLVKNKCVNFNFNGLTGTGVLTESNKKFLPFQQFGRDIADTTDAVRDPQTLEILDITPCSFGGVSVITPGTNTSNQVAVLYQGVNCTEVPVAIHADQLTPTWRVYSTGSNVFQTRAGCLIGAEHVNNSYECDIPIGAGICASYQTQTNSPRRARSVASQSIIAYTMSLGAENSVAYSNNSIAIPTNFTISVTTEILPVSMTKTSVDCTMYICGDSTECSNLLLQYGSFCTQLNRALTGIAVEQDKNTQEVFAQVKQIYKTPPIKDFGGFNFSQILPDPSKPSKRSFIEDLLFNKVTLADAGFIKQYGDCLGDIAARDLICAQKFNGLTVLPPLLTDEMIAQYTSALLAGTITSGWTFCAGAALQIPFAMQMAYRFNGIGVTQNVLYENQKLIANQFNSAIGKIQDSLSSTASALGKLQDVVNQNAQALNTLVKQLSSNFGAISSVLNDILSRLDKVEAEVQIDRLITGRLQSLQTYVTQQLIRAAEIRASANLAATKMSECVCGQSKRVDFCGKGYHLMSFPQSAPHGVVFLHVTYVPAQEKNFTTAPAICHDGKAHFPREGVFVSNGTHWFVTQRNFYEPQIITTDNTFVSGNCDVVIGIVNNTVYDPLQPELDSGGGSGGGQIYEGKLTAEGLRFGIVASRFNHALVDRLVEGAIDAIVRHGGREEDITLVRVPGSWEIPVAAGELARKEDIDAVIAIGVLIRGATPHFDYIASEVSKGLADLSLELRKPITFGVITADTLEQAIERAGTKHGNKGWEAALSAIEMANLFKSLR

SEQ ID NO: 8211 - protein, 1307 aa, Artificial Sequence
  SARS-CoV-2/France/GE1977/2020__EPI_ISL_414632 spike protein (1-1147)(G889C_L1034C) LumSynth construct
MFVFLVLLPLVSSQCVNLTTRTQLPPAYTNSFTRGVYYPDKVFRSSVLHSTQDLFLPFFSNVTWFHAIHVSGTNGTKRFDNPVLPFNDGVYFASTEKSNIIRGWIFGTTLDSKTQSLLIVNNATNVVIKVCEFQFCNDPFLGVYYHKNNKSWMESEFRVYSSANNCTFEYVSQPFLMDLEGKQGNFKNLREFVFKNIDGYFKIYSKHTPINLVRDLPQGFSALEPLVDLPIGINITRFQTLLALHRSYLTPGDSSSGWTAGAAAYYVGYLQPRTFLLKYNENGTITDAVDCALDPLSETKCTLKSFTVEKGIYQTSNFRVQPTESIVRFPNITNLCPFGEVFNATRFASVYAWNRKRISNCVADYSVLYNSASFSTFKCYGVSPTKLNDLCFTNVYADSFVIRGDEVRQIAPGQTGKIADYNYKLPDDFTGCVIAWNSNNLDSKVGGNYNYLYRLFRKSNLKPFERDISTEIYQAGSTPCNGVEGFNCYFPLQSYGFQPTNGVGYQPYRVVVLSFELLHAPATVCGPKKSTNLVKNKCVNFNFNGLTGTGVLTESNKKFLPFQQFGRDIADTTDAVRDPQTLEILDITPCSFGGVSVITPGTNTSNQVAVLYQGVNCTEVPVAIHADQLTPTWRVYSTGSNVFQTRAGCLIGAEHVNNSYECDIPIGAGICASYQTQTNSPRRARSVASQSIIAYTMSLGAENSVAYSNNSIAIPTNFTISVTTEILPVSMTKTSVDCTMYICGDSTECSNLLLQYGSFCTQLNRALTGIAVEQDKNTQEVFAQVKQIYKTPPIKDFGGFNFSQILPDPSKPSKRSFIEDLLFNKVTLADAGFIKQYGDCLGDIAARDLICAQKFNGLTVLPPLLTDEMIAQYTSALLAGTITSGWTFCAGAALQIPFAMQMAYRFNGIGVTQNVLYENQKLIANQFNSAIGKIQDSLFSTASALGKLQDVVNQNAQALNTLVKQLSSNFGAISSVLNDILSRLDKVEAEVQIDRLITGRLQSLQTYVTQQLIRAAEIRASANLAATKMSECVCGQSKRVDFCGKGYHLMSFPQSAPHGVVFLHVTYVPAQEKNFTTAPAICHDGKAHFPREGVFVSNGTHWFVTQRNFYEPQIITTDNTFVSGNCDVVIGIVNNTVYDPLQPELDSGGGSGGGQIYEGKLTAEGLRFGIVASRFNHALVDRLVEGAIDAIVRHGGREEDITLVRVPGSWEIPVAAGELARKEDIDAVIAIGVLIRGATPHFDYIASEVSKGLADLSLELRKPITFGVITADTLEQAIERAGTKHGNKGWEAALSAIEMANLFKSLR

SEQ ID NO: 8212 - protein, 1307 aa, Artificial Sequence
  SARS-CoV-2/Finland/FIN-313/2020__EPI_ISL_414641 spike protein (1-1147)(G889C_L1034C) LumSynth construct
MFVFLVLLPLVSSQCVNLTTRTQLPPAYTNSFTRGVYYPDKVFRSSVLHSTQDLFLPFFSNVTWFHAIHVSGTNGTKRFDNPVLPFNDGVYFASTEKSNIIRGWIFGTTLDSKTQSLLIVNNATNVVIKVCEFQFCNDPFLGVYYHKNNKSWMESEFRVYSSANNCTFEYVSQPFLMDLEGKQGNFKNLREFVFKNIDGYFKIYSKHTPINLVRDLPQGFSALEPLVDLPIGINITRFKTLLALHRSYLTPGDSSSGWTAGAAAYYVGYLQPRTFLLKYNENGTITDAVDCALDPLSETKCTLKSFTVEKGIYQTSNFRVQPTESIVRFPNITNLCPFGEVFNATRFASVYAWNRKRISNCVADYSVLYNSASFSTFKCYGVSPTKLNDLCFTNVYADSFVIRGDEVRQIAPGQTGKIADYNYKLPDDFTGCVIAWNSNNLDSKVGGNYNYLYRLFRKSNLKPFERDISTEIYQAGSTPCNGVEGFNCYFPLQSYGFQPTNGVGYQPYRVVVLSFELLHAPATVCGPKKSTNLVKNKCVNFNFNGLTGTGVLTESNKKFLPFQQFGRDIADTTDAVRDPQTLEILDITPCSFGGVSVITPGTNTSNQVAVLYQGVNCTEVPVAIHADQLTPTWRVYSTGSNVFQTRAGCLIGAEHVNNSYECDIPIGAGICASYQTQTNSPRRARSVASQSIIAYTMSLGAENSVAYSNNSIAIPTNFTISVTTEILPVSMTKTSVDCTMYICGDSTECSNLLLQYGSFCTQLNRALTGIAVEQDKNTQEVFAQVKQIYKTPPIKDFGGFNFSQILPDPSKPSKRSFIEDLLFNKVTLADAGFIKQYGDCLGDIAARDLICAQKFNGLTVLPPLLTDEMIAQYTSALLAGTITSGWTFCAGAALQIPFAMQMAYRFNGIGVTQNVLYENQKLIANQFNSAIGKIQDSLSSTASALGKLQDVVNQNAQALNTLVKQLSSNFGAISSVLNDILSRLDKVEAEVQIDRLITGRLQSLQTYVTQQLIRAAEIRASANLAATKMSECVCGQSKRVDFCGKGYHLMSFPQSAPHGVVFLHVTYVPAQEKNFTTAPAICHDGKAHFPREGVFVSNGTHWFVTQRNFYEPQIITTDNTFVSGNCDVVIGIVNNTVYDPLQPELDSGGGSGGGQIYEGKLTAEGLRFGIVASRFNHALVDRLVEGAIDAIVRHGGREEDITLVRVPGSWEIPVAAGELARKEDIDAVIAIGVLIRGATPHFDYIASEVSKGLADLSLELRKPITFGVITADTLEQAIERAGTKHGNKGWEAALSAIEMANLFKSLR

SEQ ID NO: 8213 - protein, 1307 aa, Artificial Sequence
  SARS-CoV-2/Netherlands/ZuidHolland_2/2020__EPI_ISL_414556 spike protein (1-1147)(G889C_L1034C) LumSynth construct
MFVFLVLLPLVSSQCVNLTTRTQLPPAYTNSFTRGVYYPDKVFRSSVLHSTQDLFLPFFSNVTWFHAIHVSGTNGTKRFDNPVLPFNDGVYFASTEKSNIIRGWIFGTTLDSKTQSLLIVNNATNVVIKVCEFQFCNDPFLGVYYHKNNKSWMESEFRVYSSANNCTFEYVSQPFLMDLEGKQGNFKNLREFVFKNIDGYFKIYSKHTPINLVRDLPQGFSALEPLVDLPIGINITRFQTLLALHRSYLTPGDSSSGWTAGAAAYYVGYLQPRTFLLKYNENGTITDAVDCALDPLSETKCTLKSFTVEKGIYQTSNFRVQPTESIVRFPNITNLCPFGEVFNATRFASVYAWNRKRISNCVADYSVLYNSASFSTFKCYGVSPTKLNDLCFTNVYADSFVIRGDEVRQIAPGQTGKIADYNYKLPDDFTGCVIAWNSNNLDSKVGGNYNYLYRLFRKSNLKPFERDISTEIYQAGSTPCNGVEGFNCYFPLQSYGFQPTNGVGYQPYRVVVLSFELLHAPATVCGPKKSTNLVKNKCVNFNFNGLTGTGVLTESNKKFLPFQQFGRDIADTTDAVRDPQTLEILDITPCSFGGVSVITPGTNTSNQVAVLYQGVNCTEVPVAIHADQLTPTWRVYSTGSNVFQTRAGCLIGAEHVNNSYECDIPIGAGICASYQTQTNSPRRARSVASQSIIAYTMSLGAENSVAYSNNSIAIPTNFTISVTTEILPVSMTKTSVDCTMYICGDSTECSNLLLQYGSFCTQLNRALTGIALEQDKNTQEVFAQVKQIYKTPPIKDFGGFNFSQILPDPSKPSKRSFIEDLLFNKVTLADAGFIKQYGDCLGDIAARDLICAQKFNGLTVLPPLLTDEMIAQYTSALLAGTITSGWTFCAGAALQIPFAMQMAYRFNGIGVTQNVLYENQKLIANQFNSAIGKIQDSLSSTASALGKLQDVVNQNAQALNTLVKQLSSNFGAISSVLNDILSRLDKVEAEVQIDRLITGRLQSLQTYVTQQLIRAAEIRASANLAATKMSECVCGQSKRVDFCGKGYHLMSFPQSAPHGVVFLHVTYVPAQEKNFTTAPAICHDGKAHFPREGVFVSNGTHWFVTQRNFYEPQIITTDNTFVSGNCDVVIGIVNNTVYDPLQPELDSGGGSGGGQIYEGKLTAEGLRFGIVASRFNHALVDRLVEGAIDAIVRHGGREEDITLVRVPGSWEIPVAAGELARKEDIDAVIAIGVLIRGATPHFDYIASEVSKGLADLSLELRKPITFGVITADTLEQAIERAGTKHGNKGWEAALSAIEMANLFKSLR

SEQ ID NO: 8214 - protein, 1307 aa, Artificial Sequence
  SARS-CoV-2/USA/WA-UW31/2020__EPI_ISL_414618 spike protein (1-1147)(G889C_L1034C) LumSynth construct
MFVFLVLLPLVSSQCVNLTTRTQLPPAYTNSFTRGVYYPDKVFRSSVLHSTQDLFLPFFSNVTWFHAIHVSGTNGTKRFDNPVLPFNDGVYFASTEKSNIIRGWIFGTTLDSKTQSLLIVNNATNVVIKVCEFQFCNDPFLGVYYHKNNKSWMESEFRVYSSANNCTFEYVSQPFLMDLEGKQGNFKNLREFVFKNIDGYFKIYSKHTPINLVRDLPQGFSALEPLVDLPIGINITRFQTLLALHRSYLTPGDSSSGWTAGAAAYYVGYLQPRTFLLKYNENGTITDAVDCALDPLSETKCTLKSFTVEKGIYQTSNFRVQPTESIVRFPNITNLCPFGEVFNATRFASVYAWNRKRISNCVADYSVLYNSASFSTFKCYGVSPTKLNDLCFTNVYADSFVIRGDEVRQIAPGQTGKIADYNYKLPDDFTGCVIAWNSNNLDSKVGGNYNYLYRLFRKSNLKPFERDISTEIYQAGSTPCNGAEGFNCYFPLQSYGFQPTNGVGYQPYRVVVLSFELLHAPATVCGPKKSTNLVKNKCVNFNFNGLTGTGVLTESNKKFLPFQQFGRDIADTTDAVRDPQTLEILDITPCSFGGVSVITPGTNTSNQVAVLYQDVNCTEVPVAIHADQLTPTWRVYSTGSNVFQTRAGCLIGAEHVNNSYECDIPIGAGICASYQTQTNSPRRARSVASQSIIAYTMSLGAENSVAYSNNSIAIPTNFTISVTTEILPVSMTKTSVDCTMYICGDSTECSNLLLQYGSFCTQLNRALTGIAVEQDKNTQEVFAQVKQIYKTPPIKDFGGFNFSQILPDPSKPSKRSFIEDLLFNKVTLADAGFIKQYGDCLGDIAARDLICAQKFNGLTVLPPLLTDEMIAQYTSALLAGTITSGWTFCAGAALQIPFAMQMAYRFNGIGVTQNVLYENQKLIANQFNSAIGKIQDSLSSTASALGKLQDVVNQNAQALNTLVKQLSSNFGAISSVLNDILSRLDKVEAEVQIDRLITGRLQSLQTYVTQQLIRAAEIRASANLAATKMSECVCGQSKRVDFCGKGYHLMSFPQSAPHGVVFLHVTYVPAQEKNFTTAPAICHDGKAHFPREGVFVSNGTHWFVTQRNFYEPQIITTDNTFVSGNCDVVIGIVNNTVYDPLQPELDSGGGSGGGQIYEGKLTAEGLRFGIVASRFNHALVDRLVEGAIDAIVRHGGREEDITLVRVPGSWEIPVAAGELARKEDIDAVIAIGVLIRGATPHFDYIASEVSKGLADLSLELRKPITFGVITADTLEQAIERAGTKHGNKGWEAALSAIEMANLFKSLR

SEQ ID NO: 8215 - protein, 1307 aa, Artificial Sequence
  SARS-CoV-2/South Korea/SNU01/2020__EPI_ISL_411929 spike protein (1-1147)(G889C_L1034C) LumSynth construct
MFVFLVLLPLVSSQCVNLTTRTQLPPAYTNSFTRGVYYPDKVFRSSVLHSTQDLFLPFFSNVTWFHAIHVSGTNGTKRFDNPVLPFNDGVYFASTEKSNIIRGWIFGTTLDSKTQSLLIVNNATNVVIKVCEFQFCNDPFLGVYYHKNNKSWMESEFRVYSSANNCTFEYVSQPFLMDLEGKQGNFKNLREFVFKNIDGYFKIYSKHTPINLVRDLPQGFWALEPLVDLPIGINITRFQTLLALHRSYLTPGDSSSGWTAGAAAYYVGYLQPRTFLLKYNENGTITDAVDCALDPLSETKCTLKSFTVEKGIYQTSNFRVQPTESIVRFPNITNLCPFGEVFNATRFASVYAWNRKRISNCVADYSVLYNSASFSTFKCYGVSPTKLNDLCFTNVYADSFVIRGDEVRQIAPGQTGKIADYNYKLPDDFTGCVIAWNSNNLDSKVGGNYNYLYRLFRKSNLKPFERDISTEIYQAGSTPCNGVEGFNCYFPLQSYGFQPTNGVGYQPYRVVVLSFELLHAPATVCGPKKSTNLVKNKCVNFNFNGLTGTGVLTESNKKFLPFQQFGRDIADTTDAVRDPQTLEILDITPCSFGGVSVITPGTNTSNQVAVLYQDVNCTEVPVAIHADQLTPTWRVYSTGSNVFQTRAGCLIGAEHVNNSYECDIPIGAGICASYQTQTNSPRRARSVASQSIIAYTMSLGAENSVAYSNNSIAIPTNFTISVTTEILPVSMTKTSVDCTMYICGDSTECSNLLLQYGSFCTQLNRALTGIAVEQDKNTQEVFAQVKQIYKTPPIKDFGGFNFSQILPDPSKPSKRSFIEDLLFNKVTLADAGFIKQYGDCLGDIAARDLICAQKFNGLTVLPPLLTDEMIAQYTSALLAGTITSGWTFCAGAALQIPFAMQMAYRFNGIGVTQNVLYENQKLIANQFNSAIGKIQDSLSSTASALGKLQDVVNQNAQALNTLVKQLSSNFGAISSVLNDILSRLDKVEAEVQIDRLITGRLQSLQTYVTQQLIRAAEIRASANLAATKMSECVCGQSKRVDFCGKGYHLMSFPQSAPHGVVFLHVTYVPAQEKNFTTAPAICHDGKAHFPREGVFVSNGTHWFVTQRNFYEPQIITTDNTFVSGNCDVVIGIVNNTVYDPLQPELDSGGGSGGGQIYEGKLTAEGLRFGIVASRFNHALVDRLVEGAIDAIVRHGGREEDITLVRVPGSWEIPVAAGELARKEDIDAVIAIGVLIRGATPHFDYIASEVSKGLADLSLELRKPITFGVITADTLEQAIERAGTKHGNKGWEAALSAIEMANLFKSLR

SEQ ID NO: 8216 - protein, 1307 aa, Artificial Sequence
  SARS-CoV-2/China/WF0004/2020__EPI_ISL_413694 spike protein (1-1147)(G889C_L1034C) LumSynth construct
MFVFLVLLPLVSSQCVNLTTRTQLPPAYTNSFTRGVYYPDKVFRSSVLHSTQDLFLPFFSNVTWFHAIHVSGTNGTKRFDNPVLPFNDGVYFASTEKSNIIRGWIFGTTLDSKTQSLLIVNNATNVVIKVCEFQFCNDPFLGVYYHKNNKSWTESEFRVYSSANNCTFEYVSQPFLMDLEGKQGNFKNLREFVFKNIDGYFKIYSKHTPINLVRDLPQGFSALEPLVDLPIGINITRFQTLLALHRSYLTPGDSSSGWTAGAAAYYVGYLQPRTFLLKYNENGTITDAVDCALDPLSETKCTLKSFTVEKGIYQTSNFRVQPTESIVRFPNITNLCPFGEVFNATRFASVYAWNRKRISNCVADYSVLYNSASFSTFKCYGVSPTKLNDLCFTNVYADSFVIRGDEVRQIAPGQTGKIADYNYKLPDDFTGCVIAWNSNNLDSKVGGNYNYLYRLFRKSNLKPFERDISTEIYQAGSTPCNGVEGFNCYFPLQSYGFQPTNGVGYQPYRVVVLSFELLHAPATVCGPKKSTNLVKNKCVNFNFNGLTGTGVLTESNKKFLPFQQFGRDIADTTDAVRDPQTLEILDITPCSFGGVSVITPGTNTSNQVAVLYQDVNCTEVPVAIHADQLTPTWRVYSTGSNVFQTRAGCLIGAEHVNNSYECDIPIGAGICASYQTQTNSPRRARSVASQSIIAYTMSLGAENSVAYSNNSIAIPTNFTISVTTEILPVSMTKTSVDCTMYICGDSTECSNLLLQYGSFCTQLNRALTGIAVEQDKNTQEVFAQVKQIYKTPPIKDFGGFNFSQILPDPSKPSKRSFIEDLLFNKVTLADAGFIKQYGDCLGDIAARDLICAQKFNGLTVLPPLLTDEMIAQYTSALLAGTITSGWTFCAGAALQIPFAMQMAYRFNGIGVTQNVLYENQKLIANQFNSAIGKIQDSLSSTASALGKLQDVVNQNAQALNTLVKQLSSNFGAISSVLNDILSRLDKVEAEVQIDRLITGRLQSLQTYVTQQLIRAAEIRASANLAATKMSECVCGQSKRFDFCGKGYHLMSFPQSAPHGVVFLHVTYVPAQEKNFTTAPAICHDGKAHFPREGVFVSNGTHWFVTQRNFYEPQIITTDNTFVSGNCDVVIGIVNNTVYDPLQPELDSGGGSGGGQIYEGKLTAEGLRFGIVASRFNHALVDRLVEGAIDAIVRHGGREEDITLVRVPGSWEIPVAAGELARKEDIDAVIAIGVLIRGATPHFDYIASEVSKGLADLSLELRKPITFGVITADTLEQAIERAGTKHGNKGWEAALSAIEMANLFKSLR

SEQ ID NO: 8217 - protein, 1307 aa, Artificial Sequence
  SARS-CoV-2/China/WF0028/2020__EPI_ISL_413791 spike protein (1-1147)(G889C_L1034C) LumSynth construct
MFVFLVLLPLVSSQCVNLTTRTQLPPAYTNSFTRGVYYPDKVFRSSVLHSTQDLFLPFFSNVTWFHAIHVSGTNGTKRFDNPVLPFNDGVYFASTEKSNIIRGWIFGTTLDSKTQSLLIVNNATNVVIKVCEFQFCNDPFLGVYYHKNNKSWMESEFRVYSSANNCTFEYVSQPFLMDLEGKQGNFKNLREFVFKNIDGYFKIYSKHTPINLVRDLPQGFSALEPLVDLPIGINITRFQTLLALHRSYLTPGDSSSGWTAGAAAYYVGYLQPRTFLLKYNENGTITDAVDCALDPLSETKCTLKSFTVEKGIYQTSNFRVQPTESIVRFPNITNLCPFGEVFNATRFASVYAWNRKRISNCVADYSVLYNSASFSTFKCYGVSPTKLNDLCFTNVYADSFVIRGDEVRQIAPGQTGKIADYNYKLPDDFTGCVIAWNSNNLDSKVGGNYNYLYRLFRKSNLKPFERDISTEIYQAGSTPCNGVEGFNCYFPLQSYGFQPTNGVGYQPYRVVVLSFELLHAPATVCGPKKSTNLVKNKCVNFNFNGLTGTGVLTESNKKFLPFQQFGRDIADTTDAVRDPQTLEILDITPCSFGGVSVITPGTNTSNQVAVLYQDVNCTEVPVAIHADQLTPTWRVYSTGSNVFQTRAGCLIGAEHVNNSYECDIPIGAGICASYQTQTNSPRRARSVASQSIIAYTMSLGAENSVAYSNNSIAIPTNFTISVTTEILPVSMTKTSVDCTMYICGDSTECSNLLLQYGSFCTQLNRALTGIAVEQDKNTQEVFAQVKQIYKTPPIKDFGGFNFSQILPDPSKPSKRSFIEDLLFNKVTLADAGFIKQYGDCLGDIAARDLICAQKFNGLTVLPPLLTDEMIAQYTSALLAGTITSGWTFCAGAALQIPFAMQMAYRFNGIGVTQNVLYENQKLIANQFNSAIGKIQDSLSSTASALGKLQDVVNQNAQALNTLVKQLSSNFGAISSVLNDILSRLDKVEAEVQIDRLITGRLQSLQTYVTQQLIRAAEIRASANLAATKMSECVCGQSKRVDFCGKGYHLMSFPQSAPHGVVFLHVTYVPAQEKNFTTAPAICHDGKAHFPREGVFVSNGTHWFVTQRNFYEPQIITTDNTFVSGNCDVVIGIVNNTVYDPLQPELESGGGSGGGQIYEGKLTAEGLRFGIVASRFNHALVDRLVEGAIDAIVRHGGREEDITLVRVPGSWEIPVAAGELARKEDIDAVIAIGVLIRGATPHFDYIASEVSKGLADLSLELRKPITFGVITADTLEQAIERAGTKHGNKGWEAALSAIEMANLFKSLR

SEQ ID NO: 8218 - protein, 1307 aa, Artificial Sequence
  SARS-CoV-2/2019-nCoV/USA-CruiseA-18/2020__MT159716.1 spike protein (1-1147)(G889C_L1034C) LumSynth construct
MFVFLVLLPLVSSQCVNLTTRTQLPPAYTNSFTRGVYYPDKVFRSSVLHSTQDLFLPFFSNVTWFHAIHVSGTNGTKRFDNPVLPFNDGVYFASTEKSNIIRGWIFGTTLDSKTQSLLIVNNATNVVIKVCEFQFCNDPFLGVYYHKNNKSWMESELRVYSSANNCTFEYVSQPFLMDLEGKQGNFKNLREFVFKNIDGYFKIYSKHTPINLVRDLPQGFSALEPLVDLPIGINITRFQTLLALHRSYLTPGDSSSGWTAGAAAYYVGYLQPRTFLLKYNENGTITDAVDCALDPLSETKCTLKSFTVEKGIYQTSNFRVQPTESIVRFPNITNLCPFGEVFNATRFASVYAWNRKRISNCVADYSVLYNSASFSTFKCYGVSPTKLNDLCFTNVYADSFVIRGDEVRQIAPGQTGKIADYNYKLPDDFTGCVIAWNSNNLDSKVGGNYNYLYRLFRKSNLKPFERDISTEIYQAGSTPCNGVEGFNCYFPLQSYGFQPTNGVGYQPYRVVVLSFELLHAPATVCGPKKSTNLVKNKCVNFNFNGLTGTGVLTESNKKFLPFQQFGRDIADTTDAVRDPQTLEILDITPCSFGGVSVITPGTNTSNQVAVLYQDVNCTEVPVAIHADQLTPTWRVYSTGSNVFQTRAGCLIGAEHVNNSYECDIPIGAGICASYQTQTNSPRRARSVASQSIIAYTMSLGAENSVAYSNNSIAIPTNFTISVTTEILPVSMTKTSVDCTMYICGDSTECSNLLLQYGSFCTQLNRALTGIAVEQDKNTQEVFAQVKQIYKTPPIKDFGGFNFSQILPDPSKPSKRSFIEDLLFNKVTLADAGFIKQYGDCLGDIAARDLICAQKFNGLTVLPPLLTDEMIAQYTSALLAGTITSGWTFCAGAALQIPFAMQMAYRFNGIGVTQNVLYENQKLIANQFNSAIGKIQDSLSSTASALGKLQDVVNQNAQALNTLVKQLSSNFGAISSVLNDILSRLDKVEAEVQIDRLITGRLQSLQTYVTQQLIRAAEIRASANLAATKMSECVCGQSKRVDFCGKGYHLMSFPQSAPHGVVFLHVTYVPAQEKNFTTAPAICHDGKAHFPREGVFVSNGTHWFVTQRNFYEPQIITTDNTFVSGNCDVVIGIVNNTVYDPLQPELDSGGGSGGGQIYEGKLTAEGLRFGIVASRFNHALVDRLVEGAIDAIVRHGGREEDITLVRVPGSWEIPVAAGELARKEDIDAVIAIGVLIRGATPHFDYIASEVSKGLADLSLELRKPITFGVITADTLEQAIERAGTKHGNKGWEAALSAIEMANLFKSLR

SEQ ID NO: 8219 - protein, 1307 aa, Artificial Sequence
  SARS-CoV-2/SARS-CoV-2/Yunnan-01/human/2020/CHN__MT049951.1 spike protein (1-1147)(G889C_L1034C) LumSynth construct
MFVFLVLLPLVSSQCVNLTTRTQLPPANTNSFTRGVYYPDKVFRSSVLHSTQDLFLPFFSNVTWFHAIHVSGTNGTKRFDNPVLPFNDGVYFASTEKSNIIRGWIFGTTLDSKTQSLLIVNNATNVVIKVCEFQFCNDPFLGVYYHKNNKSWMESEFRVYSSANNCTFEYVSQPFLMDLEGKQGNFKNLREFVFKNIDGYFKIYSKHTPINLVRDLPQGFSALEPLVDLPIGINITRFQTLLALHRSYLTPGDSSSGWTAGAAAYYVGYLQPRTFLLKYNENGTITDAVDCALDPLSETKCTLKSFTVEKGIYQTSNFRVQPTESIVRFPNITNLCPFGEVFNATRFASVYAWNRKRISNCVADYSVLYNSASFSTFKCYGVSPTKLNDLCFTNVYADSFVIRGDEVRQIAPGQTGKIADYNYKLPDDFTGCVIAWNSNNLDSKVGGNYNYLYRLFRKSNLKPFERDISTEIYQAGSTPCNGVEGFNCYFPLQSYGFQPTNGVGYQPYRVVVLSFELLHAPATVCGPKKSTNLVKNKCVNFNFNGLTGTGVLTESNKKFLPFQQFGRDIADTTDAVRDPQTLEILDITPCSFGGVSVITPGTNTSNQVAVLYQDVNCTEVPVAIHADQLTPTWRVYSTGSNVFQTRAGCLIGAEHVNNSYECDIPIGAGICASYQTQTNSPRRARSVASQSIIAYTMSLGAENSVAYSNNSIAIPTNFTISVTTEILPVSMTKTSVDCTMYICGDSTECSNLLLQYGSFCTQLNRALTGIAVEQDKNTQEVFAQVKQIYKTPPIKDFGGFNFSQILPDPSKPSKRSFIEDLLFNKVTLADAGFIKQYGDCLGDIAARDLICAQKFNGLTVLPPLLTDEMIAQYTSALLAGTITSGWTFCAGAALQIPFAMQMAYRFNGIGVTQNVLYENQKLIANQFNSAIGKIQDSLSSTASALGKLQDVVNQNAQALNTLVKQLSSNFGAISSVLNDILSRLDKVEAEVQIDRLITGRLQSLQTYVTQQLIRAAEIRASANLAATKMSECVCGQSKRVDFCGKGYHLMSFPQSAPHGVVFLHVTYVPAQEKNFTTAPAICHDGKAHFPREGVFVSNGTHWFVTQRNFYEPQIITTDNTFVSGNCDVVIGIVNNTVYDPLQPELDSGGGSGGGQIYEGKLTAEGLRFGIVASRFNHALVDRLVEGAIDAIVRHGGREEDITLVRVPGSWEIPVAAGELARKEDIDAVIAIGVLIRGATPHFDYIASEVSKGLADLSLELRKPITFGVITADTLEQAIERAGTKHGNKGWEAALSAIEMANLFKSLR

SEQ ID NO: 8220 - protein, 1307 aa, Artificial Sequence
  SARS-CoV-2/USA/WA-UW292/2020__EPI_ISL_418077 spike protein (1-1147)(G889C_L1034C) LumSynth construct
MFVFLVLLPLVSSQCVNLTTRTQLPPAYTNSFTRGVYYPDKVFRSSVLHSTQDLFLPFFSNVTWFHAIHVSGTNGTKRFDNPVLPFNDGVYFASTEKSNIIRGWIFGTTLDSKTQSLLIVNNATNVVIKVCEFQFCNDPFLGVYYHKNNKSWMESEFRVYSSANNCTFEYVSQPFLMDLEGKQGNFKNLREFVFKNIDGYFKIYSKHTPINLVRDLPQGFSALEPLVDLPIGINITRFQTLLALHRSYLTPGDSSSGWTAGAAAYYVGYLQPRTFLLKYNENGTITDAVDCALDPLSETKCTLKSFTVEKGIYQTSNFRVQPTESIVRFPNITNLCPFGEVFNATRFASVYAWNRKRISNCVADYSVLYNSASFSTFKCYGVSPTKLNDLCFTNVYADSFVIRGDEVRQIAPGQTGKIADYNYKLPDDFTGCVIAWNSNNLDSKVGGNYNYLYRLFRKSNLKPFERDISTEIYQASSTPCNGVEGFNCYFPLQSYGFQPTNGVGYQPYRVVVLSFELLHAPATVCGPKKSTNLVKNKCVNFNFNGLTGTGVLTESNKKFLPFQQFGRDIADTTDAVRDPQTLEILDITPCSFGGVSVITPGTNTSNQVAVLYQDVNCTEVPVAIHADQLTPTWRVYSTGSNVFQTRAGCLIGAEHVNNSYECDIPIGAGICASYQTQTNSPRRARSVASQSIIAYTMSLGAENSVAYSNNSIAIPTNFTISVTTEILPVSMTKTSVDCTMYICGDSTECSNLLLQYGSFCTQLNRALTGIAVEQDKNTQEVFAQVKQIYKTPPIKDFGGFNFSQILPDPSKPSKRSFIEDLLFNKVTLADAGFIKQYGDCLGDIAARDLICAQKFNGLTVLPPLLTDEMIAQYTSALLAGTITSGWTFCAGAALQIPFAMQMAYRFNGIGVTQNVLYENQKLIANQFNSAIGKIQDSLSSTASALGKLQDVVNQNAQALNTLVKQLSSNFGAISSVLNDILSRLDKVEAEVQIDRLITGRLQSLQTYVTQQLIRAAEIRASANLAATKMSECVCGQSKRVDFCGKGYHLMSFPQSAPHGVVFLHVTYVPAQEKNFTTAPAICHDGKAHFPREGVFVSNGTHWFVTQRNFYEPQIITTDNTFVSGNCDVVIGIVNNTVYDPLQPELDSGGGSGGGQIYEGKLTAEGLRFGIVASRFNHALVDRLVEGAIDAIVRHGGREEDITLVRVPGSWEIPVAAGELARKEDIDAVIAIGVLIRGATPHFDYIASEVSKGLADLSLELRKPITFGVITADTLEQAIERAGTKHGNKGWEAALSAIEMANLFKSLR

SEQ ID NO: 8221 - protein, 1307 aa, Artificial Sequence
  SARS-CoV-2/Iceland/192/2020__EPI_ISL_417819 spike protein (1-1147)(G889C_L1034C) LumSynth construct
MFVFFVLLPLVSSQCVNLTTRTQLPPAYTNSFTRGVYYPDKVFRSSVLHSTQDLFLPFFSNVTWFHAIHVSGTNGTKRFDNPVLPFNDGVYFASTEKSNIIRGWIFGTTLDSKTQSLLIVNNATNVVIKVCEFQFCNDPFLGVYYHKNNKSWMESEFRVYSSANNCTFEYVSQPFLMDLEGKQGNFKNLREFVFKNIDGYFKIYSKHTPINLVRDLPQGFSALEPLVDLPIGINITRFQTLLALHRSYLTPGDSSSGWTAGAAAYYVGYLQPRTFLLKYNENGTITDAVDCALDPLSETKCTLKSFTVEKGIYQTSNFRVQPTESIVRFPNITNLCPFGEVFNATRFASVYAWNRKRISNCVADYSVLYNSASFSTFKCYGVSPTKLNDLCFTNVYADSFVIRGDEVRQIAPGQTGKIADYNYKLPDDFTGCVIAWNSNNLDSKVGGNYNYLYRLFRKSNLKPFERDISTEIYQAGSTPCNGVEGFNCYFPLQSYGFQPTNGVGYQPYRVVVLSFELLHAPATVCGPKKSTNLVKNKCVNFNFNGLTGTGVLTESNKKFLPFQQFGRDIADTTDAVRDPQTLEILDITPCSFGGVSVITPGTNTSNQVAVLYQGVNCTEVPVAIHADQLTPTWRVYSTGSNVFQTRAGCLIGAEHVNNSYECDIPIGAGICASYQTQTNSPRRARSVASQSIIAYTMSLGAENSVAYSNNSIAIPTNFTISVTTEILPVSMTKTSVDCTMYICGDSTECSNLLLQYGSFCTQLNRALTGIAVEQDKNTQEVFAQVKQIYKTPPIKDFGGFNFSQILPDPSKPSKRSFIEDLLFNKVTLADAGFIKQYGDCLGDIAARDLICAQKFNGLTVLPPLLTDEMIAQYTSALLAGTITSGWTFCAGAALQIPFAMQMAYRFNGIGVTQNVLYENQKLIANQFNSAIGKIQDSLSSTASALGKLQDVVNQNAQALNTLVKQLSSNFGAISSVLNDILSRLDKVEAEVQIDRLITGRLQSLQTYVTQQLIRAAEIRASANLAATKMSECVCGQSKRVDFCGKGYHLMSFPQSAPHGVVFLHVTYVPAQEKNFTTAPAICHDGKAHFPREGVFVSNGTHWFVTQRNFYEPQIITTDNTFVSGNCDVVIGIVNNTVYDPLQPELDSGGGSGGGQIYEGKLTAEGLRFGIVASRFNHALVDRLVEGAIDAIVRHGGREEDITLVRVPGSWEIPVAAGELARKEDIDAVIAIGVLIRGATPHFDYIASEVSKGLADLSLELRKPITFGVITADTLEQAIERAGTKHGNKGWEAALSAIEMANLFKSLR

SEQ ID NO: 8222 - protein, 1307 aa, Artificial Sequence
  SARS-CoV-2/Belgium/ULG-6939/2020__EPI_ISL_417020 spike protein (1-1147)(G889C_L1034C) LumSynth construct
MFVFLVLLPLVSSQCVNLTTRTQLPPAYTNSFTRGVYYPDKVFRSSVLHSTQDLFLPFFSNVTWFHAIHVSGTNGTKRFDNPVLPFNDGVYFASTEKSNIIRGWIFGTTLDSKTQSLLIVNNATNVVIKVCEFQFCNDPFLGVYYHKNNKSWMESEFRVYSSANNCTFEYVSQPFLMDLEGKQGNFKNLREFVFKNIDGYFKIYSKHTPINLVRDLPQGFSALEPLVDLPIGINITRFQTLLALHRSYLTPGDSSSGWTAGAAAYYVGYLQPRTFLLKYNENGTITDAVDCALDPLSETKCTLKSFTVEKGIYQTSNFRVQPTESIVRFPNITNLCPFGEVFNATRFASVYAWNRKRISNCVADYSVLYNSASFSTFKCYGVSPTKLNDLCFTNVYADSFVIRGDEVRQIAPGQTGKIADYNYKLPDDFTGCVIAWNSNNLDSKVGGNYNYLYRLFRKSNLKPFERDISTEIYQAGSTPCNGVEGFNCYFPLQSYGFQPTNGVGYQPYRVVVLSFELLHAPATVCGPKKSTNLVKNKCVNFNFNGLTGTGVLTESNKKFLPFQQFGRDIADTTDAVRDPQTLEILDITPCSFGGVSVITPGTNTSNQVAVLYQGVNCTEVPVAIHADQLTPTWRVYSTGSNVFQTRAGCLIGAEHVNNSYECDIPIGAGICASYQTQTNSPRRARSVASQSIIAYTMSLGAENSVVYSNNSIAIPTNFTISVTTEILPVSMTKTSVDCTMYICGDSTECSNLLLQYGSFCTQLNRALTGIAVEQDKNTQEVFAQVKQIYKTPPIKDFGGFNFSQILPDPSKPSKRSFIEDLLFNKVTLADAGFIKQYGDCLGDIAARDLICAQKFNGLTVLPPLLTDEMIAQYTSALLAGTITSGWTFCAGAALQIPFAMQMAYRFNGIGVTQNVLYENQKLIANQFNSAIGKIQDSLSSTASALGKLQDVVNQNAQALNTLVKQLSSNFGAISSVLNDILSRLDKVEAEVQIDRLITGRLQSLQTYVTQQLIRAAEIRASANLAATKMSECVCGQSKRVDFCGKGYHLMSFPQSAPHGVVFLHVTYVPAQEKNFTTAPAICHDGKAHFPREGVFVSNGTHWFVTQRNFYEPQIITTDNTFVSGNCDVVIGIVNNTVYDPLQPELDSGGGSGGGQIYEGKLTAEGLRFGIVASRFNHALVDRLVEGAIDAIVRHGGREEDITLVRVPGSWEIPVAAGELARKEDIDAVIAIGVLIRGATPHFDYIASEVSKGLADLSLELRKPITFGVITADTLEQAIERAGTKHGNKGWEAALSAIEMANLFKSLR

SEQ ID NO: 8223 - protein, 1307 aa, Artificial Sequence
  SARS-CoV-2/France/HF2496/2020__EPI_ISL_418231 spike protein (1-1147)(G889C_L1034C) LumSynth construct
MFVFLVLLPLVSSQCVNLTTRTQLPPAYTNSFTRGVYYPDKVFRSSVLHSTQDLFLPFFSNVTWFHAIHVSGTNGTKRFDNPVLPFNDGVYFASTEKSNIIRGWIFGTTLDSKTQSLLIVNNATNVVIKVCEFQFCNDPFLGVYYHKNNKSWMESEFRVYSSANNCTFEYVSQPFLMDLEGKQGNFKNLREFVFKNIDGYFKIYSKHTPINLVRDLPQGFSALEPLVDLPIGINITRFQTLLALHRSYLTPGDSSSGWTAGAAAYYVGYLQPRTFLLKYNENGTITDAVDCALDPLSETKCTLKSFTVEKGIYQTSNFRVQPTESIVRFPNITNLCPFGEVFNATRFASVYAWNRKRISNCVADYSVLYNSASFSTFKCYGVSPTKLNDLCFTNVYADSFVIRGDEVRQIAPGQTGKIADYNYKLPDDFTGCVIAWNSNNLDSKVGGNYNYLYRLFRKSNLKPFERDISTEIYQAGSTPCNGVEGFNCYFPLQSYGFQPTNGVGYQPYRVVVLSFELLHAPATVCGPKKSTNLVKNKCVNFNFNGLTGTGVLTESNKKFLPFQQFGRDIADTTDAVRDPQTLEILDITPCSFGGVSVITPGTNTSNQVAVLYQGVNCTEVPVAIHADQLTPTWRVYSTGSNVFQTRAGCLIGAEHVNNSYECDIPIGAGICASYQTQTNSPRRARSVASQSIIAYTMSLGAENSVAYSNNSIAIPTNFTISVTTEILPVSMTKTSVDCTMYICGDSTECSNLLLQYGSFCTQLNRALTGIAVEQDKNTQEVFAQVKQIYKTPPIKDFGGFNFSQILPDPSKPSKRSFIEDLLFNKVTLADAGFIKQYGDCLGDIVARDLICAQKFNGLTVLPPLLTDEMIAQYTSALLAGTITSGWTFCAGAALQIPFAMQMAYRFNGIGVTQNVLYENQKLIANQFNSAIGKIQDSLSSTASALGKLQDVVNQNAQALNTLVKQLSSNFGAISSVLNDILSRLDKVEAEVQIDRLITGRLQSLQTYVTQQLIRAAEIRASANLAATKMSECVCGQSKRVDFCGKGYHLMSFPQSAPHGVVFLHVTYVPAQEKNFTTAPAICHDGKAHFPREGVFVSNGTHWFVTQRNFYEPQIITTDNTFVSGNCDVVIGIVNNTVYDPLQPELDSGGGSGGGQIYEGKLTAEGLRFGIVASRFNHALVDRLVEGAIDAIVRHGGREEDITLVRVPGSWEIPVAAGELARKEDIDAVIAIGVLIRGATPHFDYIASEVSKGLADLSLELRKPITFGVITADTLEQAIERAGTKHGNKGWEAALSAIEMANLFKSLR

SEQ ID NO: 8224 - protein, 1307 aa, Artificial Sequence
  SARS-CoV-2/USA/WA-UW291/2020__EPI_ISL_418076 spike protein (1-1147)(G889C_L1034C) LumSynth construct
MFVFLVLLPLVSSQCVNLTTRTQLPPAYTNSFTRGVYYPDKVFRSSVLHSTQDLFLPFFSNVTWFHAIHVSGTNGTKRFDNPVLPFNDGVYFASTEKSNIIRGWIFGTTLDSKTQSLLIVNNATNVVIKVCEFQFCNDPFLGVYYHKNNKSWMESEFRVYSSANNCTFEYVSQPFLMDLEGKQGNFKNLREFVFKNIDGYFKIYSKHTPINLVRDLPQGFSALEPLVDLPIGINITRFQTLLALHRSYLTPGDSSSGWTAGAAAYYVGYLQPRTFLLKYNENGTITDAVDCALDPLSETKCTLKSFTVEKGIYQTSNFRVQPTESIVRFPNITNLCPFGEVFNATRFASVYAWNRKRISNCVADYSVLYNSASFSTFKCYGVSPTKLNDLCFTNVYADSFVIRGDEVRQIAPGQTGKIADYNYKLPDDFTGCVIAWNSNNLDSKVGGNYNYLYRLFRKSNLKPFERDISTEIYQAGSTPCNGVEGFNCYFPLQSYGFQPTNGVGYQPYRVVVLSFELLHAPATVCGPKKSTNLVKNKCVNFNFNGLTGTGVLTESNKKFLPFQQFGRDIADTTDAVRDPQTLEILDITPCSFGGVSVITPGTNTSNQVAVLYQGVNCTEVPVAIHADQLTPTWRVYSTGSNVFQTRAGCLIGAEHVNNSYECDIPIGAGICASYQTQTNSPRRARSVASQSIIAYTMSLGAENSVAYSNNSIAIPTNFTISVTTEILPVSMTKTSVDCTMYICGDSTECSNLLLQYGSFCTQLNRALTGIAVEQDKNTQEVFAQVKQIYKTPPIKDFGGFNFSQILPDPSKPSKRSFIEDLLFNKVTLADAGFIKQYGDCLGDIAARDLICAQKFNGLTVLPPLLTDEMIAQYTSALLAGTITSGWTFCAGAALQIPFAMQMAYRFNGIGVTQNVLYENQKLIANQFNSAIGKIQYSLSSTASALGKLQDVVNQNAQALNTLVKQLSSNFGAISSVLNDILSRLDKVEAEVQIDRLITGRLQSLQTYVTQQLIRAAEIRASANLAATKMSECVCGQSKRVDFCGKGYHLMSFPQSAPHGVVFLHVTYVPAQEKNFTTAPAICHDGKAHFPREGVFVSNGTHWFVTQRNFYEPQIITTDNTFVSGNCDVVIGIVNNTVYDPLQPELDSGGGSGGGQIYEGKLTAEGLRFGIVASRFNHALVDRLVEGAIDAIVRHGGREEDITLVRVPGSWEIPVAAGELARKEDIDAVIAIGVLIRGATPHFDYIASEVSKGLADLSLELRKPITFGVITADTLEQAIERAGTKHGNKGWEAALSAIEMANLFKSLR

SEQ ID NO: 8225 - protein, 1307 aa, Artificial Sequence; identical to SEQ ID NO: 8188
  SARS-CoV-2/Portugal/PT0034/2020__EPI_ISL_418019 spike protein (1-1147)(G889C_L1034C) LumSynth construct

SEQ ID NO: 8226 - protein, 1307 aa, Artificial Sequence; identical to SEQ ID NO: 8180
  SARS-CoV-2/Iceland/202/2020__EPI_ISL_417750 spike protein (1-1147)(G889C_L1034C) LumSynth construct

SEQ ID NO: 8227 - protein, 1307 aa, Artificial Sequence
  SARS-CoV-2/USA/WA-UW261/2020__EPI_ISL_418046 spike protein (1-1147)(G889C_L1034C) LumSynth construct
MFVFLVLLPLVSSQCVNLTTRTQLPPAYTNSFTRGVYYPDKVFRSSVLHSTQDLFLPFFSNVTWFHAIHVSGTNGTKRFDNPVLPFNDGVYFASTEKSNIIRGWIFGTTLDSKTQSLLIVNNATNVVIKVCEFQFCNDPFLGVYYHKNNKSWMESEFRVYSSANNCTFEYVSQPFLMDLEGKQGNFKNLREFVFKNIDGYFKIYSKHTPINLVRDLPQGFSALEPLVDLPIGINITRFQTLLALHRSYLTPGDSSSGWTAGAAAYYVGYLQPRTFLLKYNENGTITDAVDCALDPLSETKCTLKSFTVEKGIYQTSNFRVQPTESIVRFPNITNLCPFGEVFNATRFTSVYAWNRKRISNCVADYSVLYNSASFSTFKCYGVSPTKLNDLCFTNVYADSFVIRGDEVRQIAPGQTGKIADYNYKLPDDFTGCVIAWNSNNLDSKVGGNYNYLYRLFRKSNLKPFERDISTEIYQAGSTPCNGVEGFNCYFPLQSYGFQPTNGVGYQPYRVVVLSFELLHAPATVCGPKKSTNLVKNKCVNFNFNGLTGTGVLTESNKKFLPFQQFGRDIADTTDAVRDPQTLEILDITPCSFGGVSVITPGTNTSNQVAVLYQDVNCTEVPVAIHADQLTPTWRVYSTGSNVFQTRAGCLIGAEHVNNSYECDIPIGAGICASYQTQTNSPRRARSVASQSIIAYTMSLGAENSVAYSNNSIAIPTNFTISVTTEILPVSMTKTSVDCTMYICGDSTECSNLLLQYGSFCTQLNRALTGIAVEQDKNTQEVFAQVKQIYKTPPIKDFGGFNFSQILPDPSKPSKRSFIEDLLFNKVTLADAGFIKQYGDCLGDIAARDLICAQKFNGLTVLPPLLTDEMIAQYTSALLAGTITSGWTFCAGAALQIPFAMQMAYRFNGIGVTQNVLYENQKLIANQFNSAIGKIQDSLSSTASALGKLQDVVNQNAQALNTLVKQLSSNFGAISSVLNDILSRLDKVEAEVQIDRLITGRLQSLQTYVTQQLIRAAEIRASANLAATKMSECVCGQSKRVDFCGKGYHLMSFPQSAPHGVVFLHVTYVPAQEKNFTTAPAICHDGKAHFPREGVFVSNGTHWFVTQRNFYEPQIITTDNTFVSGNCDVVIGIVNNTVYDPLQPELDSGGGSGGGQIYEGKLTAEGLRFGIVASRFNHALVDRLVEGAIDAIVRHGGREEDITLVRVPGSWEIPVAAGELARKEDIDAVIAIGVLIRGATPHFDYIASEVSKGLADLSLELRKPITFGVITADTLEQAIERAGTKHGNKGWEAALSAIEMANLFKSLR

SEQ ID NO: 8228 - protein, 1307 aa, Artificial Sequence
  SARS-CoV-2/Portugal/PT0035/2020__EPI_ISL_418020 spike protein (1-1147)(G889C_L1034C) LumSynth construct
MFVFLVLLPLVSSQCVNLTTRTQLPPAYTNSFTRGVYYPDKVFRSSVLHSTQDLFLPFFSNVTWFHAIHVSGTNGTKRFDNPVLPFNDGVYFASTEKSNIIRGWIFGTTLDSKTQSLLIVNNATNVVIKVCEFQFCNDPFLGVYYHKNNKSWMESEFRVYSSANNCTFEYVSQPFLMDLEGKQGNFKNLREFVFKNIDGYFKIYSKHTPINLVRDLPQGFSALEPLVDLPIGINITRFQTLLALHRSYLTPGDSSSGWTAGAAAYYVGYLQPRTFLLKYNENGTITDAVDCALDPLSETKCTLKSFTVEKGIYQTSNFRVQPTESIVRFPNITNLCPFGEVFNATRFASVYAWNRKRISNCVADYSVLYNSASFSTFKCYGVSPTKLNDLCFTNVYADSFVIRGDEVRQIAPGQTGKIADYNYKLPDDFTGCVIAWNSNNLDSKVGGNYNYLYRLFRKSNLKPFERDISTEIYQAGSTPCNGVEGFNCYFPLQSYGFQPTNGVGYQPYRVVVLSFELLHAPATVCGPKKSTNLVKNKCVNFNFNGLTGTGVLTESNKKFLPFQQFGRDIADTTDAVRDPQTLEILDITPCSFGGVSVITPGTNTSNQVAVLYQDVNCTEVPVAIHADQLTPTWRVYSTGSNVFQTRAGCLIGAEHVNNSYECDIPIGAGICASYQTQTNSPRRARSVASQSIIAYTMSLGAENSVAYSNNSIAIPTNFTISVTTEILPVSMTKTSVDCTMYICGDSTECSNLLLQYGSFCTQLNRALTGIAVEQDKNTQEVFAQVKQIYKTPPIKDFGGFNFSQILPDPSKPSKRSFIEDLLFNKVTLADAGFIKQYGDCLGDISARDLICAQKFNGLTVLPPLLTDEMIAQYTSALLAGTITSGWTFCAGAALQIPFAMQMAYRFNGIGVTQNVLYENQKLIANQFNSAIGKIQDSLSSTASALGKLQDVVNQNAQALNTLVKQLSSNFGAISSVLNDILSRLDKVEAEVQIDRLITGRLQSLQTYVTQQLIRAAEIRASANLAATKMSECVCGQSKRVDFCGKGYHLMSFPQSAPHGVVFLHVTYVPAQEKNFTTAPAICHDGKAHFPREGVFVSNGTHWFVTQRNFYEPQIITTDNTFVSGNCDVVIGIVNNTVYDPLQPELDSGGGSGGGQIYEGKLTAEGLRFGIVASRFNHALVDRLVEGAIDAIVRHGGREEDITLVRVPGSWEIPVAAGELARKEDIDAVIAIGVLIRGATPHFDYIASEVSKGLADLSLELRKPITFGVITADTLEQAIERAGTKHGNKGWEAALSAIEMANLFKSLR

SEQ ID NO: 8229 - protein, 1307 aa, Artificial Sequence
  SARS-CoV-2/USA/NY-NYUMC7/2020__EPI_ISL_418192 spike protein (1-1147)(G889C_L1034C) LumSynth construct
MFVFLVLLPLVSSQCVNLTTRTQLPPAYTNSFTRGVYYPDKVFRSSVLHSTQDLFLPFFSNVTWFHAIHVSGTNGTKRFDNPVLPFNDGVYFASTEKSNIIRGWIFGTTLDSKTQSLLIVNNATNVVIKVCEFQFCNDPFLGVYHHKNNKSWMESEFRVYSSANNCTFEYVSQPFLMDLEGKQGNFKNLREFVFKNIDGYFKIYSKHTPINLVRDLPQGFSALEPLVDLPIGINITRFQTLLALHRSYLTPGDSSSGWTAGAAAYYVGYLQPRTFLLKYNENGTITDAVDCALDPLSETKCTLKSFTVEKGIYQTSNFRVQPTESIVRFPNITNLCPFGEVFNATRFASVYAWNRKRISNCVADYSVLYNSASFSTFKCYGVSPTKLNDLCFTNVYADSFVIRGDEVRQIAPGQTGKIADYNYKLPDDFTGCVIAWNSNNLDSKVGGNYNYLYRLFRKSNLKPFERDISTEIYQAGSTPCNGVEGFNCYFPLQSYGFQPTNGVGYQPYRVVVLSFELLHAPATVCGPKKSTNLVKNKCVNFNFNGLTGTGVLTESNKKFLPFQQFGRDIADTTDAVRDPQTLEILDITPCSFGGVSVITPGTNTSNQVAVLYQGVNCTEVPVAIHADQLTPTWRVYSTGSNVFQTRAGCLIGAEHVNNSYECDIPIGAGICASYQTQTNSPRRARSVASQSIIAYTMSLGAENSVAYSNNSIAIPTNFTISVTTEILPVSMTKTSVDCTMYICGDSTECSNLLLQYGSFCTQLNRALTGIAVEQDKNTQEVFAQVKQIYKTPPIKDFGGFNFSQILPDPSKPSKRSFIEDLLFNKVTLADAGFIKQYGDCLGDIAARDLICAQKFNGLTVLPPLLTDEMIAQYTSALLAGTITSGWTFCAGAALQIPFAMQMAYRFNGIGVTQNVLYENQKLIANQFNSAIGKIQDSLSSTASALGKLQDVVNQNAQALNTLVKQLSSNFGAISSVLNDILSRLDKVEAEVQIDRLITGRLQSLQTYVTQQLIRAAEIRASANLAATKMSECVCGQSKRVDFCGKGYHLMSFPQSAPHGVVFLHVTYVPAQEKNFTTAPAICHDGKAHFPREGVFVSNGTHWFVTQRNFYEPQIITTDNTFVSGNCDVVIGIVNNTVYDPLQPELDSGGGSGGGQIYEGKLTAEGLRFGIVASRFNHALVDRLVEGAIDAIVRHGGREEDITLVRVPGSWEIPVAAGELARKEDIDAVIAIGVLIRGATPHFDYIASEVSKGLADLSLELRKPITFGVITADTLEQAIERAGTKHGNKGWEAALSAIEMANLFKSLR

SEQ ID NO: 8230 - protein, 1307 aa, Artificial Sequence
  SARS-CoV-2/Iceland/189/2020__EPI_ISL_417709 spike protein (1-1147)(G889C_L1034C) LumSynth construct
MFVFLVLLPLVSSQCVNLTTRTQLPPAYTNSFTRGVYYPDKVFRSSVLHSTQDLFLPFFSNVTWFHAIHVSGTNGTKRFDNPVLPFNDGVYFASTEKSNIIRGWIFGTTLDSKTQSLLIVNNATNVVIKVCEFQFCNDPFLGVYYHKNNKSWMESEFRVYSSANNCTFEYVSQPFLMDLEGKQGNFKNLREFVFKNIDGYFKIYSKHTPINLVRDLPQGFSALEPLVDLPIGINITRFQTLLALHRSYLTPGDSSSGWTAGAAAYYVGYLQPRTFLLKYNENGTITDAVDCALDPLSETKCTLKSFTVEKGIYQTSNFRVQPTESIVRFPNITNLCPFGEVFNATRFASVYAWNRKRISNCVADYSVLYNSASFSTFKCYGVSPTKLNDLCFTNVYADSFVIRGDEVRQIAPGQTGKIADYNYKLPDDFTGCVIAWNSNNLDSKVGGNYNYLYRLFRKSNLKPFERDISTEIYQAGSTPCNGVEGFNCYFPLQSYGFQPTNGVGYQPYRVVVLSFELLHAPATVCGPKKSTNLVKNKCVNFNFNGLTGTGVLTESNKKFLPFQQFGRDIADTTDAVRDPQTLEILDITPCSFGGVSVITPGTNTSNQVAVLYQGVNCTEVPVAIHADQLTPTWRVYSTGSNVFQTRAGCLIGAEHVNNSYECDIPIGAGICASYQTQTNSPRRARSVASQSIIAYTMSLGAENSVAYSNNSIAIPTNFTISVTTEILPVSMTKTSVDCTMYICGDSTECSNLLLQYGSFCTQLNRALTGIAVEQDKNTQEVFAQVKQIYKTPPIKDFGGFNFSQILPDPSKPSKRSFIEDLLFNKVTLADAGFTKQYGDCLGDIAARDLICAQKFNGLTVLPPLLTDEMIAQYTSALLAGTITSGWTFCAGAALQIPFAMQMAYRFNGIGVTQNVLYENQKLIANQFNSAIGKIQDSLSSTASALGKLQDVVNQNAQALNTLVKQLSSNFGAISSVLNDILSRLDKVEAEVQIDRLITGRLQSLQTYVTQQLIRAAEIRASANLAATKMSECVCGQSKRVDFCGKGYHLMSFPQSAPHGVVFLHVTYVPAQEKNFTTAPAICHDGKAHFPREGVFVSNGTHWFVTQRNFYEPQIITTDNTFVSGNCDVVIGIVNNTVYDPLQPELDSGGGSGGGQIYEGKLTAEGLRFGIVASRFNHALVDRLVEGAIDAIVRHGGREEDITLVRVPGSWEIPVAAGELARKEDIDAVIAIGVLIRGATPHFDYIASEVSKGLADLSLELRKPITFGVITADTLEQAIERAGTKHGNKGWEAALSAIEMANLFKSLR

SEQ ID NO: 8231 - protein, 1307 aa, Artificial Sequence
  SARS-CoV-2/Australia/NSW56/2020__EPI_ISL_417408 spike protein (1-1147)(G889C_L1034C) LumSynth construct
MFVFLVLLPLVSSQCVNLTTRTQLPPAYTNSFTRGVYYPDKVFRSSVLHSTQDLFLPFFSNVTWFHAIHVSGTNGTKRFDNPVLPFNDGVYFASTEKSNIIRGWIFGTTLDSKTQSLLIVNNATNVVIKVCEFQFCNDPFLGVYYHKNNKSWMESEFRVYSSANNCTFEYVSQPFLMDLEGKQGNFKNLREFVFKNIDGYFKIYSKHTPINLVRDLPQGFSALEPLVDLPIGINITRFQTLLALHRSYLTPGDSSSGWTAGAAAYYVGYLQPRTFLLKYNENGTITDAVDCALDPLSETKCTLKSFTVEKGIYQTSNFRVQPTESIVRFPNITNLCPFGEVFNATRFASVYAWNRKRISNCVADYSVLYNSASFSTFKCYGVSPTKLNDLCFTNVYADSFVIRGDEVRQIAPGQTGKIADYNYKLPDDFTGCVIAWNSNNLDSKVGGNYNYLYRLFRKSNLKPFERDISTEIYQAGSTPCNGVEGFNCYFPLQSYGFQPTNGVGYQPYRVVVLSFELLHAPATVCGPKKSTNLVKNKCVNFNFNGLTGTGVLTESNKKFLPFQQFGRDIADTTDAVRDPQTLEILDITPCSFGGVSVITPGTNTSNQVAVLYQDVNCTEVPVAIHADQLTPTWRVYSTGSNVFQTRAGCLIGAEHVNNSYECDIPIGAGICASYQTQTNSPRRARSVASQSIIAYTMSLGAENSVAYSNNSIAIPTNFTISVTTEILPVSMTKTSVDCTMYICGDSTECSNLLLQYGSFCTQLNRALTGIAVEQDKNTQEVFAQVKQIYKTPPIKDFGGFNFSQILPDSSKPSKRSFIEDLLFNKVTLADAGFIKQYGDCLGDIAARDLICAQKFNGLTVLPPLLTDEMIAQYTSALLAGTITSGWTFCAGAALQIPFAMQMAYRFNGIGVTQNVLYENQKLIANQFNSAIGKIQDSLSSTASALGKLQDVVNQNAQALNTLVKQLSSNFGAISSVLNDILSRLDKVEAEVQIDRLITGRLQSLQTYVTQQLIRAAEIRASANLAATKMSECVCGQSKRVDFCGKGYHLMSFPQSAPHGVVFLHVTYVPAQEKNFTTAPAICHDGKAHFPREGVFVSNGTHWFVTQRNFYEPQIITTDNTFVSGNCDVVIGIVNNTVYDPLQPELDSGGGSGGGQIYEGKLTAEGLRFGIVASRFNHALVDRLVEGAIDAIVRHGGREEDITLVRVPGSWEIPVAAGELARKEDIDAVIAIGVLIRGATPHFDYIASEVSKGLADLSLELRKPITFGVITADTLEQAIERAGTKHGNKGWEAALSAIEMANLFKSLR

SEQ ID NO: 8232 - protein, 1307 aa, Artificial Sequence
  SARS-CoV-2/Iceland/280/2020__EPI_ISL_417608 spike protein (1-1147)(G889C_L1034C) LumSynth construct
MFVFLVLLPLVSSQCVNLTTRTQLPPAYTNSFTRGVYYPDKVFRSSVLHSTQDLFLPFFSNVTWFHAIHVSGTNGTKRFDNPVLPFNDGVYFASTEKSNIIRGWIFGTTLDSKTQSLLIVNNATNVVIKVCEFQFCNDPFLGVYYHKNNKSWMESEFRVYSSANNCTFEYVSQPFLMDLEGKQGNFKNLREFVFKNIDGYFKIYSKHTPINLVRDLPQGFSALEPLVDLPIGINITRFQTLLALHRSYLTPGDSSSGWTAGAAAYYVGYLQPRTFLLKYNENGTITDAVDCALDPLSETKCTLKSFTVEKGIYQTSNFRVQPTESIVRFPNITNLCPFGEVFNATRFASVYAWNRKRISNCVADYSVLYNSASFSTFKCYGVSPTKLNDLCFTNVYADSFVIRGDEVRQIAPGQTGKIADYNYKLPDDFTGCVIAWNSNNLDSKVGGNYNYLYRLFRKSNLKPFERDISTEIYQAGSTPCNGVEGFNCYFPLQSYGFQPTNGVGYQPYRVVVLSFELLHAPATVCGPKKSTNLVKNKCVNFNFNGLTGTGVLTESNKKFLPFQQFGRDIADTTDAVRDPQTLEILDITPCSFGGVSVITPGTNTSNQVAVLYQGVNCTEVPVAIHADQLTPTWRVYSTGSNVFQTRAGCLIGAEHVNNSYECDIPIGAGICASYHTQTNSPRRARSVASQSIIAYTMSLGAENSVAYSNNSIAIPTNFTISVTTEILPVSMTKTSVDCTMYICGDSTECSNLLLQYGSFCTQLNRALTGIAVEQDKNTQEVFAQVKQIYKTPPIKDFGGFNFSQILPDPSKPSKRSFIEDLLFNKVTLADAGFIKQYGDCLGDIAARDLICAQKFNGLTVLPPLLTDEMIAQYTSALLAGTITSGWTFCAGAALQIPFAMQMAYRFNGIGVTQNVLYENQKLIANQFNSAIGKIQDSLSSTASALGKLQDVVNQNAQALNTLVKQLSSNFGAISSVLNDILSRLDKVEAEVQIDRLITGRLQSLQTYVTQQLIRAAEIRASANLAATKMSECVCGQSKRVDFCGKGYHLMSFPQSAPHGVVFLHVTYVPAQEKNFTTAPAICHDGKAHFPREGVFVSNGTHWFVTQRNFYEPQIITTDNTFVSGNCDVVIGIVNNTVYDPLQPELDSGGGSGGGQIYEGKLTAEGLRFGIVASRFNHALVDRLVEGAIDAIVRHGGREEDITLVRVPGSWEIPVAAGELARKEDIDAVIAIGVLIRGATPHFDYIASEVSKGLADLSLELRKPITFGVITADTLEQAIERAGTKHGNKGWEAALSAIEMANLFKSLR

SEQ ID NO: 8233 - protein, 1307 aa, Artificial Sequence; identical to SEQ ID NO: 8188
  SARS-CoV-2/Iceland/247/2020__EPI_ISL_417575 spike protein (1-1147)(G889C_L1034C) LumSynth construct

SEQ ID NO: 8234 - protein, 1307 aa, Artificial Sequence
  SARS-CoV-2/Iceland/238/2020__EPI_ISL_417566 spike protein (1-1147)(G889C_L1034C) LumSynth construct
MFVFLVLLPLVSSQCVNLTTRTQLPPAYTNSFTRGVYYPDKVFRSSVLHSTQDLFLPFFSNVTWFHAIHVSGTNGTKRFDNPVLPFNDGVYFASTEKSNIIRGWIFGTTLDSKTQSLLIVNNATNVVIKVCEFQFCNDPFLGVYYHKNNKSWMESEFRVYSSANNCTFEYVSQPFLMDLEGKQGNFKNLREFVFKNIDGYFKIYSKHTPINLVRDLPQGFSALEPLVDLPIGINITRFQTLLALHRSYLTPGDSSSGWTAGAAAYYVGYLQPRTFLLKYNENGTITDAVDCALDPLSETKCTLKSFTVEKGIYQTSNFRVQPTESIVRFPNITNLCPFGEVFNATRFASVYAWNRKRISNCVADYSVLYNSASFSTFKCYGVSPTKLNDLCFTNVYADSFVIRGDEVRQIAPGQTGKIADYNYKLPDDFTGCVIAWNSNNLDSKVGGNYNYLYRLFRKSNLKPFERDISTEIYQAGSTPCNGVEGFNCYFPLQSYGFQPTNGVGYQPYRVVVLSFELLHAPATVCGPKKSTNLVKNKCVNFNFNGLTGTGVLTESNKKFLPFQQFGRDIADTTDAVRDPQTLEILDITPCSFGGVSVITPGTNTSNQVAVLYQGVNCTEVPVAIHADQLTPTWRVYSTGSNVFQTRAGCLIGAEHVNNSYECDIPIGAGICASYQTQTNSPRRARSVASQSIIAYTMSLGAENSVAYSNNSIAIPTNFTISVTTEILPVSMTKTSVDCTMYICGDSTECSNLLLQYGSFCTQLNRALTGIAVEQDKNTQEVFAQVKQIYKTPPIKDFGGFNFSQILPDPSKPSKRSFIEDLLFNKVTLADVGFIKQYGDCLGDIAARDLICAQKFNGLTVLPPLLTDEMIAQYTSALLAGTITSGWTFCAGAALQIPFAMQMAYRFNGIGVTQNVLYENQKLIANQFNSAIGKIQDSLSSTASALGKLQDVVNQNAQALNTLVKQLSSNFGAISSVLNDILSRLDKVEAEVQIDRLITGRLQSLQTYVTQQLIRAAEIRASANLAATKMSECVCGQSKRVDFCGKGYHLMSFPQSAPHGVVFLHVTYVPAQEKNFTTAPAICHDGKAHFPREGVFVSNGTHWFVTQRNFYEPQIITTDNTFVSGNCDVVIGIVNNTVYDPLQPELDSGGGSGGGQIYEGKLTAEGLRFGIVASRFNHALVDRLVEGAIDAIVRHGGREEDITLVRVPGSWEIPVAAGELARKEDIDAVIAIGVLIRGATPHFDYIASEVSKGLADLSLELRKPITFGVITADTLEQAIERAGTKHGNKGWEAALSAIEMANLFKSLR

SEQ ID NO: 8235 - protein, 1307 aa, Artificial Sequence
  SARS-CoV-2/Greece/16/2020__EPI_ISL_418265 spike protein (1-1147)(G889C_L1034C) LumSynth construct
MFVFLVLLPLVSSQCVNLTTRTQLPPAYTNSFTRGVYYPDKVFRSSVLHSTQDLFLPFFSNVTWFHAIHVSGTNGTKRFDNPVLPFNDGVYFASTEKSNIIRGWIFGTTLDSKTQSLLIVNNATNVVIKVCEFQFCNDPFLGVYYHKNNKSWMESEFRVYSSANNCTFEYVSQPFLMDLEGKQGNFKNLREFVFKNVDGYFKIYSKHTPINLVRDLPQGFSALEPLVDLPIGINITRFQTLLALHRSYLTPGDSSSGWTAGAAAYYVGYLQPRTFLLKYNENGTITDAVDCALDPLSETKCTLKSFTVEKGIYQTSNFRVQPTESIVRFPNITNLCPFGEVFNATRFASVYAWNRKRISNCVADYSVLYNSASFSTFKCYGVSPTKLNDLCFTNVYADSFVIRGDEVRQIAPGQTGKIADYNYKLPDDFTGCVIAWNSNNLDSKVGGNYNYLYRLFRKSNLKPFERDISTEIYQAGSTPCNGVEGFNCYFPLQSYGFQPTNGVGYQPYRVVVLSFELLHAPATVCGPKKSTNLVKNKCVNFNFNGLTGTGVLTESNKKFLPFQQFGRDIADTTDAVRDPQTLEILDITPCSFGGVSVITPGTNTSNQVAVLYQDVNCTEVPVAIHADQLTPTWRVYSTGSNVFQTRAGCLIGAEHVNNSYECDIPIGAGICASYQTQTNSPRRARSVASQSIIAYTMSLGAENSVAYSNNSIAIPTNFTISVTTEILPVSMTKTSVDCTMYICGDSTECSNLLLQYGSFCTQLNRALTGIAVEQDKNTQEVFAQVKQIYKTPPIKDFGGFNFSQILPDPSKPSKRSFIEDLLFNKVTLADAGFIKQYGDCLGDIAARDLICAQKFNGLTVLPPLLTDEMIAQYTSALLAGTITSGWTFCAGAALQIPFAMQMAYRFNGIGVTQNVLYENQKLIANQFNSAIGKIQDSLSSTASALGKLQDVVNQNAQALNTLVKQLSSNFGAISSVLNDILSRLDKVEAEVQIDRLITGRLQSLQTYVTQQLIRAAEIRASANLAATKMSECVCGQSKRVDFCGKGYHLMSFPQSAPHGVVFLHVTYVPAQEKNFTTAPAICHDGKAHFPREGVFVSNGTHWFVTQRNFYEPQIITTDNTFVSGNCDVVIGIVNNTVYDPLQPELDSGGGSGGGQIYEGKLTAEGLRFGIVASRFNHALVDRLVEGAIDAIVRHGGREEDITLVRVPGSWEIPVAAGELARKEDIDAVIAIGVLIRGATPHFDYIASEVSKGLADLSLELRKPITFGVITADTLEQAIERAGTKHGNKGWEAALSAIEMANLFKSLR

SEQ ID NO: 8236 - protein, 1307 aa, Artificial Sequence
  SARS-CoV-2/Iceland/319/2020__EPI_ISL_417648 spike protein (1-1147)(G889C_L1034C) LumSynth construct
MFVFLVLLPLVSSQCVNLTTRTQLPPAYTNSFTRGVYYPDKVFRSSVLHSTQDLFLPFFSNVTWFHAIHVSGTNGTKRFDNPVLPFNDGVYFASTEKSNIIRGWIFGTTLDSKTQSLLIVNNATNVVIKVCEFQFCNDPFLGVYYHKNNKSWMESEFRVYSSANNCTFEYVSQPFLIDLEGKQGNFKNLREFVFKNIDGYFKIYSKHTPINLVRDLPQGFSALEPLVDLPIGINITRFQTLLALHRSYLTPGDSSSGWTAGAAAYYVGYLQPRTFLLKYNENGTITDAVDCALDPLSETKCTLKSFTVEKGIYQTSNFRVQPTESIVRFPNITNLCPFGEVFNATRFASVYAWNRKRISNCVADYSVLYNSASFSTFKCYGVSPTKLNDLCFTNVYADSFVIRGDEVRQIAPGQTGKIADYNYKLPDDFTGCVIAWNSNNLDSKVGGNYNYLYRLFRKSNLKPFERDISTEIYQAGSTPCNGVEGFNCYFPLQSYGFQPTNGVGYQPYRVVVLSFELLHAPATVCGPKKSTNLVKNKCVNFNFNGLTGTGVLTESNKKFLPFQQFGRDIADTTDAVRDPQTLEILDITPCSFGGVSVITPGTNTSNQVAVLYQGVNCTEVPVAIHADQLTPTWRVYSTGSNVFQTRAGCLIGAEHVNNSYECDIPIGAGICASYQTQTNSPRRARSVASQSIIAYTMSLGAENSVAYSNNSIAIPTNFTISVTTEILPVSMTKTSVDCTMYICGDSTECSNLLLQYGSFCTQLNRALTGIAVEQDKNTQEVFAQVKQIYKTPPIKDFGGFNFSQILPDPSKPSKRSFIEDLLFNKVTLADAGFIKQYGDCLGDIAARDLICAQKFNGLTVLPPLLTDEMIAQYTSALLAGTITSGWTFCAGAALQIPFAMQMAYRFNGIGVTQNVLYENQKLIANQFNSAIGKIQDSLSSTASALGKLQDVVNQNAQALNTLVKQLSSNFGAISSVLNDILSRLDKVEAEVQIDRLITGRLQSLQTYVTQQLIRAAEIRASANLAATKMSECVCGQSKRVDFCGKGYHLMSFPQSAPHGVVFLHVTYVPAQEKNFTTAPAICHDGKAHFPREGVFVSNGTHWFVTQRNFYEPQIITTDNTFVSGNCDVVIGIVNNTVYDPLQPELDSGGGSGGGQIYEGKLTAEGLRFGIVASRFNHALVDRLVEGAIDAIVRHGGREEDITLVRVPGSWEIPVAAGELARKEDIDAVIAIGVLIRGATPHFDYIASEVSKGLADLSLELRKPITFGVITADTLEQAIERAGTKHGNKGWEAALSAIEMANLFKSLR

SEQ ID NO: 8237 - protein, 1307 aa, Artificial Sequence
  SARS-CoV-2/Congo/94/2020__EPI_ISL_417947 spike protein (1-1147)(G889C_L1034C) LumSynth construct
MFVFLVLLPLVSSQCVNLTTRTQLPPAYTNSFTRGVYYPDKVFRSSVLHSTQDLFLPFFSNVTWFHAIHVSGTNGTKRFDNPVLPFNDGVYFASTEKSNIIRGWIFGTTLDSKTQSLLIVNNATNVVIKVCEFQFCNDPFLGVYYHKNNKSWMESEFRVYSSANNCTFEYVSQPFLMDLEGKQGNFKNLREFVFKNIDGYFKIYSKHTPINLVRDLPQGFSALEPLVDLPIGINITRFQTLLALHRSYLTPGDSSSGWTAGAAAYYVGYLQPRTFLLKYNENGTITDAVDCALDPLSETKCTLKSFTVEKGIYQTSNFRVQPTESIVRFPNITNLCPFGEVFNATRFASVYAWNRKRISNCVADYSVLYNSASFSTFKCYGVSPTKLNDLCFTNVYADSFVIRGDEVRQIAPGQTGKIADYNYKLPDDFTGCVIAWNSNNLDSKVGGNYNYLYRLFRKSNLKPFERDISTEIYQAGSTPCNGVEGFNCYFPLQSYGFQPTNGVGYQPYRVVVLSFELLHAPATVCGPKKSTNLVKNKCVNFNFNGLTGTGVLTESNKKFLPFQQFGRDIADTTDAVRDPQTLEILDITPCSFGGVSVITPGTNTSNQVAVLYQGVNCTEVPVAIHADQLTPTWRVYSTGSNVFQTRAGCLIGAEHVNNSYECDIPIGAGICASYQTQTNSPRRARSVASQSIIAYTMSLGAENSVAYSNNSIAIPTNFTISVTTEILPVSMTKTSVDCTMYICGDSTECSNLLLQYGSFCTQLNRALTGIAVEQDKNTQEVFAQVKQIYKTPPIKDFGGFNFSQILPDPSKPSKRSFIEDILFNKVTLADAGFIKQYGDCLGDIAARDLICAQKFNGLTVLPPLLTDEMIAQYTSALLAGTITSGWTFCAGAALQIPFAMQMAYRFNGIGVTQNVLYENQKLIANQFNSAIGKIQDSLSSTASALGKLQDVVNQNAQALNTLVKQLSSNFGAISSVLNDILSRLDKVEAEVQIDRLITGRLQSLQTYVTQQLIRAAEIRASANLAATKMSECVCGQSKRVDFCGKGYHLMSFPQSAPHGVVFLHVTYVPAQEKNFTTAPAICHDGKAHFPREGVFVSNGTHWFVTQRNFYEPQIITTDNTFVSGNCDVVIGIVNNTVYDPLQPELDSGGGSGGGQIYEGKLTAEGLRFGIVASRFNHALVDRLVEGAIDAIVRHGGREEDITLVRVPGSWEIPVAAGELARKEDIDAVIAIGVLIRGATPHFDYIASEVSKGLADLSLELRKPITFGVITADTLEQAIERAGTKHGNKGWEAALSAIEMANLFKSLR

SEQ ID NO: 8238 - protein, 1307 aa, Artificial Sequence
  SARS-CoV-2/Congo/158/2020__EPI_ISL_417950 spike protein (1-1147)(G889C_L1034C) LumSynth construct
MFVFLVLLPLVSSQCVNLTTRTQLPPAYTNSFTRGVYYPDKVFRSSVLHSTQDLFLPFFSNVTWFHAIHVSGTNGTKRFDNPVLPFNDGVYFASTEKSNIIRGWIFGTTLDSKTQSLLIVNNATNVVIKVCEFQFCNDPFLGVYYHKNNKSWMESEFRVYSSANNCTFEYVSQPFLMDLEGKQGNFKNLREFVFKNIDGYFKIYSKHTPINLVRDLPQGFSALEPLVDLPIGINITRFQTLLALHRSYLTPGDSSSGWTAGAAAYYVGYLQPRTFLLKYNENGTITDAVDCALDPLSETKCTLKSFTVEKGIYQTSNFRVQPTESIVRFPNITNLCPFGEVFNATRFASVYAWNRKRISNCVADYSVLYNSASFSTFKCYGVSPTKLNDLCFTNVYADSFVIRGDEVRQIAPGQTGKIADYNYKLPDDFTGCVIAWNSNNLDSKVGGNYNYLYRLFRKSNLKPFERDISTEIYQAGSTPCNGVEGFNCYFPLQSYGFQPTNGVGYQPYRVVVLSFELLHAPATVCGPKKSTNLVKNKCVNFNFNGLTGTGVLTESNKKFLPFQQFGRDIADTTDAVRDPQTLEILDITPCSFGGVSVITPGTNTSNQVAVLYQDVNCTEVPVAIHADQLTPTWRVYSTGSNVFQTRAGCLIGAEHVNNSYECDIPIGAGICASYQTQTNSPRRARSVASQSIIAYTMSLGAENSVAYSNNSIAIPTNFTISVTTEILPVSMTKTSVDCTMYICGDSTECSNLLLQYGSFCTQLNRALTGIAVEQDKNTQEVFAQVKQIYKTPPIKDFGGFNFSQILPDPSKPSKRSFIEDLLFNKVTLADAGFIKQYGDCLGDIAARDLICAQKFNGLTVLPPLLTDEMIAQYTSALLAGTITSGWTFCAGAALQIPFAMQMAYRFNGIGVTQNVLYENQKLIANQFNSAIGKIQDSLSSTASALGKLQDVVNQNAQALNTLVKQLSSNFGAISSVLNDILSRLDKVEAEVQIDRLITGRLQSLQTYVTQQLIRAAEIRASANLAATKMSECVCGQSKRVDFCGKGYHLMSFPQSAPHGVVFLHVTYVPAQEKNFTTAPAICHDGKAHFPREGVFVSNGTHWFVTQRNFYEPQIITTDNTFLSGNCDVVIGIVNNTVYDPLQPELDSGGGSGGGQIYEGKLTAEGLRFGIVASRFNHALVDRLVEGAIDAIVRHGGREEDITLVRVPGSWEIPVAAGELARKEDIDAVIAIGVLIRGATPHFDYIASEVSKGLADLSLELRKPITFGVITADTLEQAIERAGTKHGNKGWEAALSAIEMANLFKSLR

SEQ ID NO: 8239 - protein, 1307 aa, Artificial Sequence
  SARS-CoV-2/USA/UT-00034/2020__EPI_ISL_417977 spike protein (1-1147)(G889C_L1034C) LumSynth construct
MFVFLVLLPLVSSQCVNLTTRTQLPPAYTNSFTRGVYYPDKVFRSSVLHSTQDLFLPFFSNVTWFHAIHVSGTNGTKRFDNPVLPFNDGVYFASTEKSNIIRGWIFGTTLDSKTQSLLIVNNATNVVIKVCEFQFCNDPFLGVYYYKNNKSWMESEFRVYSSANNCTFEYVSQPFLMDLEGKQGNFKNLREFVFKNIDGYFKIYSKHTPINLVRDLPQGFSALEPLVDLPIGINITRFQTLLALHRSYLTPGDSSSGWTAGAAAYYVGYLQPRTFLLKYNENGTITDAVDCALDPLSETKCTLKSFTVEKGIYQTSNFRVQPTESIVRFPNITNLCPFGEVFNATRFASVYAWNRKRISNCVADYSVLYNSASFSTFKCYGVSPTKLNDLCFTNVYADSFVIRGDEVRQIAPGQTGKIADYNYKLPDDFTGCVIAWNSNNLDSKVGGNYNYLYRLFRKSNLKPFERDISTEIYQAGSTPCNGVEGFNCYFPLQSYGFQPTNGVGYQPYRVVVLSFELLHAPATVCGPKKSTNLVKNKCVNFNFNGLTGTGVLTESNKKFLPFQQFGRDIADTTDAVRDPQTLEILDITPCSFGGVSVITPGTNTSNQVAVLYQGVNCTEVPVAIHADQLTPTWRVYSTGSNVFQTRAGCLIGAEHVNNSYECDIPIGAGICASYQTQTNSPRRARSVASQSIIAYTMSLGAENSVAYSNNSIAIPTNFTISVTTEILPVSMTKTSVDCTMYICGDSTECSNLLLQYGSFCTQLNRALTGIAVEQDKNTQEVFAQVKQIYKTPPIKDFGGFNFSQILPDPSKPSKRSFIEDLLFNKVTLADAGFIKQYGDCLGDIAARDLICAQKFNGLTVLPPLLTDEMIAQYTSALLAGTITSGWTFCAGAALQIPFAMQMAYRFNGIGVTQNVLYENQKLIANQFNSAIGKIQDSLSSTASALGKLQDVVNQNAQALNTLVKQLSSNFGAISSVLNDILSRLDKVEAEVQIDRLITGRLQSLQTYVTQQLIRAAEIRASANLAATKMSECVCGQSKRVDFCGKGYHLMSFPQSAPHGVVFLHVTYVPAQEKNFTTAPAICHDGKAHFPREGVFVSNGTHWFVTQRNFYEPQIITTDNTFVSGNCDVVIGIVNNTVYDPLQPELDSGGGSGGGQIYEGKLTAEGLRFGIVASRFNHALVDRLVEGAIDAIVRHGGREEDITLVRVPGSWEIPVAAGELARKEDIDAVIAIGVLIRGATPHFDYIASEVSKGLADLSLELRKPITFGVITADTLEQAIERAGTKHGNKGWEAALSAIEMANLFKSLR

SEQ ID NO: 8240 - protein, 1307 aa, Artificial Sequence
  SARS-CoV-2/USA/UT-00033/2020__EPI_ISL_417976 spike protein (1-1147)(G889C_L1034C) LumSynth construct
MFVFLVLLPLVSSQCVNLTTRTQLPPAYTNSFTRGVYYPDKVFRSSVLHSTQDLFLPFFSNVTWFHAIHVSGTNGTKRFDNPVLPFNDGVYFASTEKSNIIRGWIFGTTLDSKTQSLLIVNNATNVVIKVCEFQFCNDPFLGVYYHKNNKSWMESEFRVYSSANNCTFEYVSQPFLMDLEGKQGNFKNLREFVFKNIDGYFKIYSKHTPINLVRDLPQGFSALEPLVDLPIGINITRFQTLLALHRSYLTPGDSSSGLTAGAAAYYVGYLQPRTFLLKYNENGTITDAVDCALDPLSETKCTLKSFTVEKGIYQTSNFRVQPTESIVRFPNITNLCPFGEVFNATRFASVYAWNRKRISNCVADYSVLYNSASFSTFKCYGVSPTKLNDLCFTNVYADSFVIRGDEVRQIAPGQTGKIADYNYKLPDDFTGCVIAWNSNNLDSKVGGNYNYLYRLFRKSNLKPFERDISTEIYQAGSTPCNGVEGFNCYFPLQSYGFQPTNGVGYQPYRVVVLSFELLHAPATVCGPKKSTNLVKNKCVNFNFNGLTGTGVLTESNKKFLPFQQFGRDIADTTDAVRDPQTLEILDITPCSFGGVSVITPGTNTSNQVAVLYQGVNCTEVPVAIHADQLTPTWRVYSTGSNVFQTRAGCLIGAEHVNNSYECDIPIGAGICASYQTQTNSPRRARSVASQSIIAYTMSLGAENSVAYSNNSIAIPTNFTISVTTEILPVSMTKTSVDCTMYICGDSTECSNLLLQYGSFCTQLNRALTGIAVEQDKNTQEVFAQVKQIYKTPPIKDFGGFNFSQILPDPSKPSKRSFIEDLLFNKVTLADAGFIKQYGDCLGDIAARDLICAQKFNGLTVLPPLLTDEMIAQYTSALLAGTITSGWTFCAGAALQIPFAMQMAYRFNGIGVTQNVLYENQKLIANQFNSAIGKIQDSLSSTASALGKLQDVVNQNAQALNTLVKQLSSNFGAISSVLNDILSRLDKVEAEVQIDRLITGRLQSLQTYVTQQLIRAAEIRASANLAATKMSECVCGQSKRVDFCGKGYHLMSFPQSAPHGVVFLHVTYVPAQEKNFTTAPAICHDGKAHFPREGVFVSNGTHWFVTQRNFYEPQIITTDNTFVSGNCDVVIGIVNNTVYDPLQPELDSGGGSGGGQIYEGKLTAEGLRFGIVASRFNHALVDRLVEGAIDAIVRHGGREEDITLVRVPGSWEIPVAAGELARKEDIDAVIAIGVLIRGATPHFDYIASEVSKGLADLSLELRKPITFGVITADTLEQAIERAGTKHGNKGWEAALSAIEMANLFKSLR

SEQ ID NO: 8241 - protein, 1307 aa, Artificial Sequence
  SARS-CoV-2/USA/WI-13/2020__EPI_ISL_417516 spike protein (1-1147)(G889C_L1034C) LumSynth construct
MFVFLVLLPLVSSQCVNLTTRTQLPPAYTNSFTRGVYYPDKVFRSSVLHSTQDLFLPFFSNVTWFHAIHVSGTNGTKRFDNPVLPFNDGVYFASTEKSNIIRGWIFGTTLDSKTQSLLIVNNATNVVIKVCEFQFCNDPFLGVYYHKNNKSWMESEFRVYSSANNCTFEYVSQPFLMDLEGKQGNFKNLREFVFKNIDGYFKIYSKHTPINLVRDLPQGFSALEPLVDLPIGINITRFQTLLALHRSYLTPGDSSSGWTAGAAAYYVGYLQPRTFLLKYNENGTITDAVDCALDPLSETKCTLKSFTVEKGIYQTSNFRVLPTESIVRFPNITNLCPFGEVFNATRFASVYAWNRKRISNCVADYSVLYNSASFSTFKCYGVSPTKLNDLCFTNVYADSFVIRGDEVRQIAPGQTGKIADYNYKLPDDFTGCVIAWNSNNLDSKVGGNYNYLYRLFRKSNLKPFERDISTEIYQAGSTPCNGVEGFNCYFPLQSYGFQPTNGVGYQPYRVVVLSFELLHAPATVCGPKKSTNLVKNKCVNFNFNGLTGTGVLTESNKKFLPFQQFGRDIADTTDAVRDPQTLEILDITPCSFGGVSVITPGTNTSNQVAVLYQGVNCTEVPVAIHADQLTPTWRVYSTGSNVFQTRAGCLIGAEHVNNSYECDIPIGAGICASYQTQTNSPRRARSVASQSIIAYTMSLGAENSVAYSNNSIAIPTNFTISVTTEILPVSMTKTSVDCTMYICGDSTECSNLLLQYGSFCTQLNRALTGIAVEQDKNTQEVFAQVKQIYKTPPIKDFGGFNFSQILPDPSKPSKRSFIEDLLFNKVTLADAGFIKQYGDCLGDIAARDLICAQKFNGLTVLPPLLTDEMIAQYTSALLAGTITSGWTFCAGAALQIPFAMQMAYRFNGIGVTQNVLYENQKLIANQFNSAIGKIQDSLSSTASALGKLQDVVNQNAQALNTLVKQLSSNFGAISSVLNDILSRLDKVEAEVQIDRLITGRLQSLQTYVTQQLIRAAEIRASANLAATKMSECVCGQSKRVDFCGKGYHLMSFPQSAPHGVVFLHVTYVPAQEKNFTTAPAICHDGKAHFPREGVFVSNGTHWFVTQRNFYEPQIITTDNTFVSGNCDVVIGIVNNTVYDPLQPELDSGGGSGGGQIYEGKLTAEGLRFGIVASRFNHALVDRLVEGAIDAIVRHGGREEDITLVRVPGSWEIPVAAGELARKEDIDAVIAIGVLIRGATPHFDYIASEVSKGLADLSLELRKPITFGVITADTLEQAIERAGTKHGNKGWEAALSAIEMANLFKSLR

SEQ ID NO: 8242 - protein, 1306 aa, Artificial Sequence
  SARS-CoV-2/India/1-27/2020__EPI_ISL_413522 spike protein (1-1146)(G888C_L1033C) LumSynth construct
MFVFLVLLPLVSSQCVNLTTRTQLPPAYTNSFTRGVYYPDKVFRSSVLHSTQDLFLPFFSNVTWFHAIHVSGTNGTKRFDNPVLPFNDGVYFASTEKSNIIRGWIFGTTLDSKTQSLLIVNNATNVVIKVCEFQFCNDPFLGVYHKNNKSWMESEFRVYSSANNCTFEYVSQPFLMDLEGKQGNFKNLREFVFKNIDGYFKIYSKHTPINLVRDLPQGFSALEPLVDLPIGINITRFQTLLALHRSYLTPGDSSSGWTAGAAAYYVGYLQPRTFLLKYNENGTITDAVDCALDPLSETKCTLKSFTVEKGIYQTSNFRVQPTESIVRFPNITNLCPFGEVFNATRFASVYAWNRKRISNCVADYSVLYNSASFSTFKCYGVSPTKLNDLCFTNVYADSFVIRGDEVIQIAPGQTGKIADYNYKLPDDFTGCVIAWNSNNLDSKVGGNYNYLYRLFRKSNLKPFERDISTEIYQAGSTPCNGVEGFNCYFPLQSYGFQPTNGVGYQPYRVVVLSFELLHAPATVCGPKKSTNLVKNKCVNFNFNGLTGTGVLTESNKKFLPFQQFGRDIADTTDAVRDPQTLEILDITPCSFGGVSVITPGTNTSNQVAVLYQDVNCTEVPVAIHADQLTPTWRVYSTGSNVFQTRAGCLIGAEHVNNSYECDIPIGAGICASYQTQTNSPRRARSVASQSIIAYTMSLGAENSVAYSNNSIAIPTNFTISVTTEILPVSMTKTSVDCTMYICGDSTECSNLLLQYGSFCTQLNRALTGIAVEQDKNTQEVFAQVKQIYKTPPIKDFGGFNFSQILPDPSKPSKRSFIEDLLFNKVTLADAGFIKQYGDCLGDIAARDLICAQKFNGLTVLPPLLTDEMIAQYTSALLAGTITSGWTFCAGAALQIPFAMQMAYRFNGIGVTQNVLYENQKLIANQFNSAIGKIQDSLSSTASALGKLQDVVNQNAQALNTLVKQLSSNFGAISSVLNDILSRLDKVEAEVQIDRLITGRLQSLQTYVTQQLIRAAEIRASANLAATKMSECVCGQSKRVDFCGKGYHLMSFPQSAPHGVVFLHVTYVPAQEKNFTTAPAICHDGKAHFPREGVFVSNGTHWFVTQRNFYEPQIITTDNTFVSGNCDVVIGIVNNTVYDPLQPELDSGGGSGGGQIYEGKLTAEGLRFGIVASRFNHALVDRLVEGAIDAIVRHGGREEDITLVRVPGSWEIPVAAGELARKEDIDAVIAIGVLIRGATPHFDYIASEVSKGLADLSLELRKPITFGVITADTLEQAIERAGTKHGNKGWEAALSAIEMANLFKSLR

SEQ ID NO: 8243 - protein, 1301 aa, Artificial Sequence
  SARS-CoV-2/pangolin/Guangxi/P4L/2017__EPI_ISL_410538 spike protein (1-1141)(G883C_L1028C) LumSynth construct
MFVFLFVLPLVSSQCVNLTTRTGIPPGYTNSSTRGVYYPDKVFRSSILHLTQDLFLPFFSNVTWFNTINYQGGFKKFDNPVLPFNDGVYFASTEKSNIIRGWIFGTTLDARTQSLLIVNNATNVVIKVCEFQFCTDPFLGVYYHNNNKTWVENEFRVYSSANNCTFEYISQPFLMDLEGKQGNFKNLREFVFKNVDGYFKIYSKHTPIDLVRDLPRGFAALEPLVDLPIGINITRFQTLLALHRSYLTPGNLESGWTTGAAAYYVGYLQQRTFLLSYNQNGTITDAVDCSLDPLSETKCTLKSLTVEKGIYQTSNFRVQPTISIVRFPNITNLCPFGEVFNASKFASVYAWNRKRISNCVADYSVLYNSTSFSTFKCYGVSPTKLNDLCFTNVYADSFVVKGDEVRQIAPGQTGVIADYNYKLPDDFTGCVIAWNSVKQDALTGGNYGYLYRLFRKSKLKPFERDISTEIYQAGSTPCNGQVGLNCYYPLERYGFHPTTGVNYQPFRVVVLSFELLNGPATVCGPKLSTTLVKDKCVNFNFNGLTGTGVLTTSKKQFLPFQQFGRDISDTTDAVRDPQTLEILDITPCSFGGVSVITPGTNTSNQVAVLYQDVNCTEVPMAIHAEQLTPAWRVYSAGANVFQTRAGCLVGAEHVNNSYECDIPVGAGICASYHSMSSLRSVNQRSIIAYTMSLGAENSVAYSNNSIAIPTNFTISVTTEILPVSMTKTSVDCTMYICGDSIECSNLLLQYGSFCTQLNRALTGIAVEQDKNTQEVFAQVKQIYKTPPIKDFGGFNFSQILPDPSKPSKRSFIEDLLFNKVTLADAGFIKQYGDCLGDIAARDLICAQKFNGLTVLPPLLTDEMIAQYTSALLAGTITSGWTFCAGAALQIPFAMQMAYRFNGIGVTQNVLYENQKLIANQFNSAIGKIQDSLSSTASALGKLQDVVNQNAQALNTLVKQLSSNFGAISSVLNDILSRLDKVEAEVQIDRLITGRLQSLQTYVTQQLIRAAEIRASANLAATKMSECVCGQSKRVDFCGKGYHLMSFPQSAPHGVVFLHVTYVPAQEKNFTTAPAICHEGKAHFPREGVFVSNGTHWFITQRNFYEPQIITTDNTFVSGSCDVVIGIVNNTVYDPLQPELDSGGGSGGGQIYEGKLTAEGLRFGIVASRFNHALVDRLVEGAIDAIVRHGGREEDITLVRVPGSWEIPVAAGELARKEDIDAVIAIGVLIRGATPHFDYIASEVSKGLADLSLELRKPITFGVITADTLEQAIERAGTKHGNKGWEAALSAIEMANLFKSLR

SEQ ID NO: 8244 - protein, 1301 aa, Artificial Sequence
  SARS-CoV-2/pangolin/Guangxi/P5L/2017__EPI_ISL_410540 spike protein (1-1141)(G883C_L1028C) LumSynth construct
MFVFLFVLPLVSSQCVNLTTRTGIPPGYTNSSTRGVYYPDKVFRSSILHLTQDLFLPFFSNVTWFNTINYQGGFKKFDNPVLPFNDGVYFASTEKSNIIRGWIFGTTLDARTQSLLIVNNATNVVIKVCEFQFCTDPFLGVYYHNNNKTWVENEFRVYSSANNCTFEYISQPFLMDLEGKQGNFKNLREFVFKNVDGYFKIYSKHTPIDLVRDLPRGFAALEPLVDLPIGINITRFQTLLALHRSYLTPGKLESGWTTGAAAYYVGYLQQRTFLLSYNQNGTITDAVDCSLDPLSETKCTLKSLTVEKGIYQTSNFRVQPTISIVRFPNITNLCPFGEVFNASKFASVYAWNRKRISNCVADYSVLYNSTSFSTFKCYGVSPTKLNDLCFTNVYADSFVVKGDEVRQIAPGQTGVIADYNYKLPDDFTGCVIAWNSVKQDALTGGNYGYLYRLFRKSKLKPFERDISTEIYQAGSTPCNGQVGLNCYYPLERYGFHPTTGVNYQPFRVVVLSFELLNGPATVCGPKLSTTLVKDKCVNFNFNGLTGTGVLTTSKKQFLPFQQFGRDISDTTDAVRDPQTLEILDITPCSFGGVSVITPGTNTSNQVAVLYQDVNCTEVPMAIHAEQLTPAWRVYSAGANVFQTRAGCLVGAEHVNNSYECDIPVGAGICASYHSMSSFRSVNQRSIIAYTMSLGAENSVAYSNNSIAIPTNFTISVTTEILPVSMTKTSVDCTMYICGDSIECSNLLLQYGSFCTQLNRALTGIAVEQDKNTQEVFAQVKQIYKTPPIKDFGGFNFSQILPDPSKPSKRSFIEDLLFNKVTLADAGFIKQYGDCLGDIAARDLICAQKFNGLTVLPPLLTDEMIAQYTSALLAGTITSGWTFCAGAALQIPFAMQMAYRFNGIGVTQNVLYENQKLIANQFNSAIGKIQDSLSSTASALGKLQDVVNQNAQALNTLVKQLSSNFGAISSVLNDILSRLDKVEAEVQIDRLITGRLQSLQTYVTQQLIRAAEIRASANLAATKMSECVCGQSKRVDFCGKGYHLMSFPQSAPHGVVFLHVTYVPAQEKNFTTAPAICHEGKAHFPREGVFVSNGTHWFITQRNFYEPQIITTDNTFVSGSCDVVIGIVNNTVYDPLQPELDSGGGSGGGQIYEGKLTAEGLRFGIVASRFNHALVDRLVEGAIDAIVRHGGREEDITLVRVPGSWEIPVAAGELARKEDIDAVIAIGVLIRGATPHFDYIASEVSKGLADLSLELRKPITFGVITADTLEQAIERAGTKHGNKGWEAALSAIEMANLFKSLR

SEQ ID NO: 8245 - protein, 1301 aa, Artificial Sequence
  SARS-CoV-2/pangolin/Guangxi/P5E/2017__EPI_ISL_410541 spike protein (1-1141)(G883C_L1028C) LumSynth construct
MFVFLFVLPLVSSQCVNLTTRTGIPPGYTNSSTRGVYYPDKVFRSSILHLTQDLFLPFFSNVTWFNTITYQGGSKKFDNPVLPFNDGVYFASTEKSNIIRGWIFGTTLDARTQSLLIVNNATNVVIKVCEFQFCTDPFLGVYYHNNNKTWVENEFRVYSSANNCTFEYISQPFLMDLEGKQGNFKNLREFVFKNVDGYFKIYSKHTPIDLVRDLPRGFAALEPLVDLPIGINITRFQTLLALHRSYLTPGKLESGWTTGAAAYYVGYLQQRTFLLSYNQNGTITDAVDCSLDPLSETKCTLKSLTVEKGIYQTSNFRVQPTISIVRFPNITNLCPFGEVFNASKFASVYAWNRKRISNCVADYSVLYNSTSFSTFKCYGVSPTKLNDLCFTNVYADSFVVKGDEVRQIAPGQTGVIADYNYKLPDDFTGCVIAWNSVKQDALTGDNYGYLYRLFRKSKLKPFERDISTEIYQAGSTPCNGQVGLNCYYPLERYGFHPTTGVNYQPFRVVVLSFELLNGPATVCGPKLSTTLVKDKCVNFNFNGLTGTGVLTTSKKQFLPFQQFGRDISDTTDAVRDPQTLEILDITPCSFGGVSVITPGTNTSNQVAVLYQDVNCTEVPMAIHAEQLTPAWRVYSAGANVFQTRAGCLVGAEHVNNSYECDIPVGAGICASYHSMSSFRSVNQRSIIAYTMSLGAENSVAYSNNSIAIPTNFTISVTTEILPVSMTKTSVDCTMYICGDSIECSNLLLQYGSFCTQLNRALTGIAVEQDKNTQEVFAQVKQIYKTPPIKDFGGFNFSQILPDPSKPSKRSFIEDLLFNKVTLADAGFIKQYGDCLGDIAARDLICAQKFNGLTVLPPLLTDEMIAQYTSALLAGTITSGWTFCAGAALQIPFAMQMAYRFNGIGVTQNVLYENQKLIANQFNSAIGKIQDSLSSTASALGKLQDVVNQNAQALNTLVKQLSSNFGAISSVLNDILSRLDKVEAEVQIDRLITGRLQSLQTYVTQQLIRAAEIRASANLAATKMSECVCGQSKRVDFCGKGYHLMSFPQSAPHGVVFLHVTYVPAQEKNFTTAPAICHEGKAHFPREGVFVSNGTHWFITQRNFYEPQIITTDNTFVSGSCDVVIGIVNNTVYDPLQPELDSGGGSGGGQIYEGKLTAEGLRFGIVASRFNHALVDRLVEGAIDAIVRHGGREEDITLVRVPGSWEIPVAAGELARKEDIDAVIAIGVLIRGATPHFDYIASEVSKGLADLSLELRKPITFGVITADTLEQAIERAGTKHGNKGWEAALSAIEMANLFKSLR

SEQ ID NO: 8246 - protein, 1299 aa, Artificial Sequence
  SARS-CoV-2/pangolin/Guangxi/P1E/2017__EPI_ISL_410539 spike protein (1-1139)(G881C_L1026C) LumSynth construct
MFVFLFVLPLVSSQCVNLTTRTGIQPGYTNSSTRGVYYPDKVFRSSILHLTQDLFLPFFSNVTWFNTINYQGGFKKFDNPVLPFNDGVYFASTEKSNIIRGWIFGTTLDARTQSLLIVNNATNVVIKVCEFQFCTDPFLGVYYHNNNKTWVENEFRVYSSANNCTFEYISQPFLMDLEGKQGNFKNLREFVFKNVDGYFKIYSKHTPIDLVRDLPRGFAALEPLVDLPIGINITRFQTLLALHRSYLTPGKLESGWTTGAAAYYVGYLQQRTFLLSYNQNGTITDAVDCSLDPLSETKCTLKSLTVEKGIYQTSNFRVQPTISIVRFPNITNLCPFGEVFNASKFASVYAWNRKRISNCVADYSVLYNSTSFSTFKCYGVSPTKLNDLCFTNVYADSFVVKGDEVRQIAPGQTGVIADYNYKLPDDFTGCVIAWNSVKQDALTGGNYLYRLFRKSKLKPFERDISTEIYQAGSTPCNGQVGLNCYYPLERYGFHPTTGVNYQPFRVVVLSFELLNGPATVCGPKLSTTLVKDKCVNFNFNGLTGTGVLTTSKKQFLPFQQFGRDISDTTDAVRDPQTLEILDITPCSFGGVSVITPGTNTSNQVAVLYQDVNCTEVPMAIHAEQLTPAWRVYSAGANVFQTRAGCLVGAEHVNNSYECDIPVGAGICASYHSMSSLRSVNQRSIIAYTMSLGAENSVAYSNNSIAIPTNFTISVTTEILPVSMTKTSVDCTMYICGDSIECSNLLLQYGSFCTQLNRALTGIAVEQDKNTQEVFAQVKQIYKTPPIKDFGGFNFSQILPDPSKPSKRSFIEDLLFNKVTLADAGFIKQYGDCLGDIAARDLICAQKFNGLTVLPPLLTDEMIAQYTSALLAGTITSGWTFCAGAALQIPFAMQMAYRFNGIGVTQNVLYENQKLIANQFNSAIGKIQDSLSSTASALGKLQDVVNQNAQALNTLVKQLSSNFGAISSVLNDILSRLDKVEAEVQIDRLITGRLQSLQTYVTQQLIRAAEIRASANLAATKMSECVCGQSKRVDFCGKGYHLMSFPQSAPHGVVFLHVTYVPAQEKNFTTAPAICHEGKAHFPREGVFVSNGTHWFITQRNFYEPQIITTDNTFVSGSCDVVIGIVNNTVYDPLQPELDSGGGSGGGQIYEGKLTAEGLRFGIVASRFNHALVDRLVEGAIDAIVRHGGREEDITLVRVPGSWEIPVAAGELARKEDIDAVIAIGVLIRGATPHFDYIASEVSKGLADLSLELRKPITFGVITADTLEQAIERAGTKHGNKGWEAALSAIEMANLFKSLR

SEQ ID NO: 8247 - protein, 1307 aa, Artificial Sequence
  SARS-CoV-2/Wuhan/WIV05/2019__EPI_ISL_402128 spike protein (1-1147)(I909C_Y1047C) LumSynth construct
MFVFLVLLPLVSSQCVNLTTRTQLPPAYTNSFTRGVYYPDKVFRSSVLHSTQDLFLPFFSNVTWFHAIHVSGTNGTKRFDNPVLPFNDGVYFASTEKSNIIRGWIFGTTLDSKTQSLLIVNNATNVVIKVCEFQFCNDPFLGVYYHKNNKSWMESEFRVYSSANNCTFEYVSQPFLMDLEGKQGNFKNLREFVFKNIDGYFKIYSKHTPINLVRDLPQGFSALEPLVDLPIGINITRFQTLLALHRSYLTPGDSSSGWTAGAAAYYVGYLQPRTFLLKYNENGTITDAVDCALDPLSETKCTLKSFTVEKGIYQTSNFRVQPTESIVRFPNITNLCPFGEVFNATRFASVYAWNRKRISNCVADYSVLYNSASFSTFKCYGVSPTKLNDLCFTNVYADSFVIRGDEVRQIAPGQTGKIADYNYKLPDDFTGCVIAWNSNNLDSKVGGNYNYLYRLFRKSNLKPFERDISTEIYQAGSTPCNGVEGFNCYFPLQSYGFQPTNGVGYQPYRVVVLSFELLHAPATVCGPKKSTNLVKNKCVNFNFNGLTGTGVLTESNKKFLPFQQFGRDIADTTDAVRDPQTLEILDITPCSFGGVSVITPGTNTSNQVAVLYQDVNCTEVPVAIHADQLTPTWRVYSTGSNVFQTRAGCLIGAEHVNNSYECDIPIGAGICASYQTQTNSPRRARSVASQSIIAYTMSLGAENSVAYSNNSIAIPTNFTISVTTEILPVSMTKTSVDCTMYICGDSTECSNLLLQYGSFCTQLNRALTGIAVEQDKNTQEVFAQVKQIYKTPPIKDFGGFNFSQILPDPSKPSKRSFIEDLLFNKVTLADAGFIKQYGDCLGDIAARDLICAQKFNGLTVLPPLLTDEMIAQYTSALLAGTITSGWTFGAGAALQIPFAMQMAYRFNGCGVTQNVLYENQKLIANQFNSAIGKIQDSLSSTASALGKLQDVVNQNAQALNTLVKQLSSNFGAISSVLNDILSRLDKVEAEVQIDRLITGRLQSLQTYVTQQLIRAAEIRASANLAATKMSECVLGQSKRVDFCGKGCHLMSFPQSAPHGVVFLHVTYVPAQEKNFTTAPAICHDGKAHFPREGVFVSNGTHWFVTQRNFYEPQIITTDNTFVSGNCDVVIGIVNNTVYDPLQPELDSGGGSGGGQIYEGKLTAEGLRFGIVASRFNHALVDRLVEGAIDAIVRHGGREEDITLVRVPGSWEIPVAAGELARKEDIDAVIAIGVLIRGATPHFDYIASEVSKGLADLSLELRKPITFGVITADTLEQAIERAGTKHGNKGWEAALSAIEMANLFKSLR

SEQ ID NO: 8248 - protein, 1303 aa, Artificial Sequence
  SARS-CoV-2/bat/Yunnan/RaTG13/2013__EPI_ISL_402131 spike protein (1-1143)(I905C_Y1043C) LumSynth construct
MFVFLVLLPLVSSQCVNLTTRTQLPPAYTNSSTRGVYYPDKVFRSSVLHLTQDLFLPFFSNVTWFHAIHVSGTNGIKRFDNPVLPFNDGVYFASTEKSNIIRGWIFGTTLDSKTQSLLIVNNATNVVIKVCEFQFCNDPFLGVYYHKNNKSWMESEFRVYSSANNCTFEYVSQPFLMDLEGKQGNFKNLREFVFKNIDGYFKIYSKHTPINLVRDLPPGFSALEPLVDLPIGINITRFQTLLALHRSYLTPGDSSSGWTAGAAAYYVGYLQPRTFLLKYNENGTITDAVDCALDPLSETKCTLKSFTVEKGIYQTSNFRVQPTDSIVRFPNITNLCPFGEVFNATTFASVYAWNRKRISNCVADYSVLYNSTSFSTFKCYGVSPTKLNDLCFTNVYADSFVITGDEVRQIAPGQTGKIADYNYKLPDDFTGCVIAWNSKHIDAKEGGNFNYLYRLFRKANLKPFERDISTEIYQAGSKPCNGQTGLNCYYPLYRYGFYPTDGVGHQPYRVVVLSFELLNAPATVCGPKKSTNLVKNKCVNFNFNGLTGTGVLTESNKKFLPFQQFGRDIADTTDAVRDPQTLEILDITPCSFGGVSVITPGTNASNQVAVLYQDVNCTEVPVAIHADQLTPTWRVYSTGSNVFQTRAGCLIGAEHVNNSYECDIPIGAGICASYQTQTNSRSVASQSIIAYTMSLGAENSVAYSNNSIAIPTNFTISVTTEILPVSMTKTSVDCTMYICGDSTECSNLLLQYGSFCTQLNRALTGIAVEQDKNTQEVFAQVKQIYKTPPIKDFGGFNFSQILPDPSKPSKRSFIEDLLFNKVTLADAGFIKQYGDCLGDIAARDLICAQKFNGLTVLPPLLTDEMIAQYTSALLAGTITSGWTFGAGAALQIPFAMQMAYRFNGCGVTQNVLYENQKLIANQFNSAIGKIQDSLSSTASALGKLQDVVNQNAQALNTLVKQLSSNFGAISSVLNDILSRLDKVEAEVQIDRLITGRLQSLQTYVTQQLIRAAEIRASANLAATKMSECVLGQSKRVDFCGKGCHLMSFPQSAPHGVVFLHVTYVPAQEKNFTTAPAICHDGKAHFPREGVFVSNGTHWFVTQRNFYEPQIITTDNTFVSGSCDVVIGIVNNTVYDPLQPELDSGGGSGGGQIYEGKLTAEGLRFGIVASRFNHALVDRLVEGAIDAIVRHGGREEDITLVRVPGSWEIPVAAGELARKEDIDAVIAIGVLIRGATPHFDYIASEVSKGLADLSLELRKPITFGVITADTLEQAIERAGTKHGNKGWEAALSAIEMANLFKSLR

SEQ ID NO: 8249 - protein, 1307 aa, Artificial Sequence
  SARS-CoV-2/Wuhan/HBCDC-HB-01/2019__EPI_ISL_402132 spike protein (1-1147)(I909C_Y1047C) LumSynth construct
MFVFLVLLPLVSSQCVNLTTRTQLPPAYTNSITRGVYYPDKVFRSSVLHSTQDLFLPFFSNVTWFHAIHVSGTNGTKRFDNPVLPFNDGVYFASTEKSNIIRGWIFGTTLDSKTQSLLIVNNATNVVIKVCEFQFCNDPFLGVYYHKNNKSWMESEFRVYSSANNCTFEYVSQPFLMDLEGKQGNFKNLREFVFKNIDGYFKIYSKHTPINLVRDLPQGFSALEPLVDLPIGINITRFQTLLALHRSYLTPGDSSSGWTAGAAAYYVGYLQPRTFLLKYNENGTITDAVDCALDPLSETKCTLKSFTVEKGIYQTSNFRVQPTESIVRFPNITNLCPFGEVFNATRFASVYAWNRKRISNCVADYSVLYNSASFSTFKCYGVSPTKLNDLCFTNVYADSFVIRGDEVRQIAPGQTGKIADYNYKLPDDFTGCVIAWNSNNLDSKVGGNYNYLYRLFRKSNLKPFERDISTEIYQAGSTPCNGVEGFNCYFPLQSYGFQPTNGVGYQPYRVVVLSFELLHAPATVCGPKKSTNLVKNKCVNFNFNGLTGTGVLTESNKKFLPFQQFGRDIADTTDAVRDPQTLEILDITPCSFGGVSVITPGTNTSNQVAVLYQDVNCTEVPVAIHADQLTPTWRVYSTGSNVFQTRAGCLIGAEHVNNSYECDIPIGAGICASYQTQTNSPRRARSVASQSIIAYTMSLGAENSVAYSNNSIAIPTNFTISVTTEILPVSMTKTSVDCTMYICGDSTECSNLLLQYGSFCTQLNRALTGIAVEQDKNTQEVFAQVKQIYKTPPIKDFGGFNFSQILPDPSKPSKRSFIEDLLFNKVTLADAGFIKQYGDCLGDIAARDLICAQKFNGLTVLPPLLTDEMIAQYTSALLAGTITSGWTFGAGAALQIPFAMQMAYRFNGCGVTQNVLYENQKLIANQFNSAIGKIQDSLSSTASALGKLQDVVNQNAQALNTLVKQLSSNFGAISSVLNDILSRLDKVEAEVQIDRLITGRLQSLQTYVTQQLIRAAEIRASANLAATKMSECVLGQSKRVDFCGKGCHLMSFPQSAPHGVVFLHVTYVPAQEKNFTTAPAICHDGKAHFPREGVFVSNGTHWFVTQRNFYEPQIITTDNTFVSGNCDVVIGIVNNTVYDPLQPELDSGGGSGGGQIYEGKLTAEGLRFGIVASRFNHALVDRLVEGAIDAIVRHGGREEDITLVRVPGSWEIPVAAGELARKEDIDAVIAIGVLIRGATPHFDYIASEVSKGLADLSLELRKPITFGVITADTLEQAIERAGTKHGNKGWEAALSAIEMANLFKSLR

SEQ ID NO: 8250 - protein, 1307 aa, Artificial Sequence
  SARS-CoV-2/Guangdong/20SF028/2020__EPI_ISL_403936 spike protein (1-1147)(I909C_Y1047C) LumSynth construct
MFVFLVLLPLVSSQCVNLTTRTQLPPAYTNSFTRGVYYPDKVFRSSVLYSTQDLFLPFFSNVTWFHAIHVSGTNGTKRFDNPVLPFNDGVYFASTEKSNIIRGWIFGTTLDSKTQSLLIVNNATNVVIKVCEFQFCNDPFLGVYYHKNNKSWMESEFRVYSSANNCTFEYVSQPFLMDLEGKQGNFKNLREFVFKNIDGYFKIYSKHTPINLVRDLPQGFSALEPLVDLPIGINITRFQTLLALHRSYLTPGDSSSGWTAGAAAYYVGYLQPRTFLLKYNENGTITDAVDCALDPLSETKCTLKSFTVEKGIYQTSNFRVQPTESIVRFPNITNLCPFGEVFNATRFASVYAWNRKRISNCVADYSVLYNSASFSTFKCYGVSPTKLNDLCFTNVYADSFVIRGDEVRQIAPGQTGKIADYNYKLPDDFTGCVIAWNSNNLDSKVGGNYNYLYRLFRKSNLKPFERDISTEIYQAGSTPCNGVEGFNCYFPLQSYGFQPTNGVGYQPYRVVVLSFELLHAPATVCGPKKSTNLVKNKCVNFNFNGLTGTGVLTESNKKFLPFQQFGRDIADTTDAVRDPQTLEILDITPCSFGGVSVITPGTNTSNQVAVLYQDVNCTEVPVAIHADQLTPTWRVYSTGSNVFQTRAGCLIGAEHVNNSYECDIPIGAGICASYQTQTNSPRRARSVASQSIIAYTMSLGAENSVAYSNNSIAIPTNFTISVTTEILPVSMTKTSVDCTMYICGDSTECSNLLLQYGSFCTQLNRALTGIAVEQDKNTQEVFAQVKQIYKTPPIKDFGGFNFSQILPDPSKPSKRSFIEDLLFNKVTLADAGFIKQYGDCLGDIAARDLICAQKFNGLTVLPPLLTDEMIAQYTSALLAGTITSGWTFGAGAALQIPFAMQMAYRFNGCGVTQNVLYENQKLIANQFNSAIGKIQDSLSSTASALGKLQDVVNQNAQALNTLVKQLSSNFGAISSVLNDILSRLDKVEAEVQIDRLITGRLQSLQTYVTQQLIRAAEIRASANLAATKMSECVLGQSKRVDFCGKGCHLMSFPQSAPHGVVFLHVTYVPAQEKNFTTAPAICHDGKAHFPREGVFVSNGTHWFVTQRNFYEPQIITTDNTFVSGNCDVVIGIVNNTVYDPLQPELDSGGGSGGGQIYEGKLTAEGLRFGIVASRFNHALVDRLVEGAIDAIVRHGGREEDITLVRVPGSWEIPVAAGELARKEDIDAVIAIGVLIRGATPHFDYIASEVSKGLADLSLELRKPITFGVITADTLEQAIERAGTKHGNKGWEAALSAIEMANLFKSLR

SEQ ID NO: 8251 - protein, 1307 aa, Artificial Sequence
  SARS-CoV-2/Shenzhen/SZTH-001/2020__EPI_ISL_406592 spike protein (1-1147)(I909C_Y1047C) LumSynth construct
MFVFLVLLPLVSSQCVNLTTRTQLPPAYTNSFTRGVYYPDKVFRSSVLHSTQDLFLPFFSNVTWFHAIHVSGTNGTKRFDNPVLPFNDGVYFASTEKSNIIRGWIFGTTLDSKTQSLLIVNNATNVVIKVCEFQFCNDPFLGVYYHKNNKSWMESEFRVYSSANNCTFEYVSQPFLMDLEGKQGNFKNLREFVFKNIDGYFKIYSKHTPINLVRDLPQGFSALEPLVDLPIGINITRFQTLLALHRSYLTPGDSSSGWTAGAAAYYVGYLQPRTFLLKYNENGTITDAVDCALDPLSETKCTLKSFTVEKGIYQTSNFRVQPTESIVRFPNITNLCPFGEVFNATRFASVYAWNRKRISNCVADYSVLYNSASFSTFKCYGVSPTKLNDLCFTNVYADSFVIRGDEVRQIAPGQTGKIADYNYKLPDDFTGCVIAWNSNNLDSKVGGNYNYLYRLFRKSNLKPFERDISTEIYQAGSTPCNGVEGFNCYFPLQSYGFQPTNGVGYQPYRVVVLSFELLHAPATVCGPKKSTNLVKNKCVNFNFNGLTGTGVLTESNKKFLPFQQFGRDIADTTDAVRDPQTLEILDITPCSFGGVSVITPGTNTSNQVAVLYQDVNCTEVPVAIHADQLTPTWRVYSTGSNVFQTRAGCLIGAEHVNNSYECDIPIGAGICASYQTQTNSPRRARSVASQSIIAYTMSLGAENSVAYSNNSIAIPTNFTISVTTEILPVSMTKTSVDCTMYICGDSTECSNLLLQYGSFCTQLNRALTGIAVEQDKNTQEVFAQVKQIYKTPPIKDFGGFNFSQILPDPSKPSKRSFIEDLLFNKVTLADAGFIKQYGDCLGDIAARDLICAQKFNGLTVLPPLLTDEMIAQYTSALLAGTITSGWTFGAGAALQIPFAMQMAYRFNGCGVTQNVLYENQKLIANQFNSAIGKIQDSLSSTASALGKLQDVVNQNAQALNTLVKQLSSNFGAISSVLNDILSRLDKVEAEVQIDRLITGRLQSLQTYVTQQLIRAAEIRASANLAATKMSECVLGQSKRVDFCGKGCHLMSFPQSAPHGVVFLHVTYVPAQEKNFTTAPAICHDGKAHFPREGVFVSNGTHWFVTQRNFYEPQIITTDNTFVSGNCDVLIGIVNNTVYDPLQPELDSGGGSGGGQIYEGKLTAEGLRFGIVASRFNHALVDRLVEGAIDAIVRHGGREEDITLVRVPGSWEIPVAAGELARKEDIDAVIAIGVLIRGATPHFDYIASEVSKGLADLSLELRKPITFGVITADTLEQAIERAGTKHGNKGWEAALSAIEMANLFKSLR

SEQ ID NO: 8252 - protein, 1307 aa, Artificial Sequence
  SARS-CoV-2/Shenzhen/SZTH-004/2020__EPI_ISL_406595 spike protein (1-1147)(I909C_Y1047C) LumSynth construct
MFVFLVLLPLVSSQCVNLTTRTQLPPAYTNSFTRGVYYPDKVFRSSVLHSTQDLFLPFFSNVTWFHAIHVSGTNGTKRFDNPVLPFNDGVYFASTEKSNIIRGWIFGTTLDSKTQSLLIVNNATNVVIKVCEFQFCNDPFLGVYYHKNNKSWMESEFRVYSSANNCTFEYVSQPFLMDLEGKQGNFKNLREFVFKNIDGYFKIYSKHTPINLVRDLPQGFSALEPLVDLPIGINITRFQTLLALHRSYLTPGDSSSGWTAGAAAYYVGYLQPRTFLLKYNENGTITDAVDCALDPLSETKCTLKSFTVEKGIYQTSNFRVQPTESIVRFPNITNLCPFGEVFNATRFASVYAWDRKRISNCVAYYSVLYNSASFSTFKCYGVSPTKLNDLCFTNVYADSFVIRGDEVRQIAPGQTGKIADYNYKLPDDFTGCVIAWNSNNLDSKVGGNYNYLYRLFRKSNLKPFERDISTEIYQAGSTPCNGVEGFNCYFPLQSYGFQPTNGVGYQPYRVVVLSFELLHAPATVCGPKKSTNLVKNKCVNFNFNGLTGTGVLTESNKKFLPFQQFGRDIADTTDAVRDPQTLEILDITPCSFGGVSVITPGTNTSNQVAVLYQDVNCTEVPVAIHADQLTPTWRVYSTGSNVFQTRAGCLIGAEHVNNSYECDIPIGAGICASYQTQTNSPRRARSVASQSIIAYTMSLGAENSVAYSNNSIAIPTNFTISVTTEILPVSMTKTSVDCTMYICGDSTECSNLLLQYGSFCTQLNRALTGIAVEQDKNTQEVFAQVKQIYKTPPIKDFGGFNFSQILPDPSKPSKRSFIEDLLFNKVTLADAGFIKQYGDCLGDIAARDLICAQKFNGLTVLPPLLTDEMIAQYTSALLAGTITSGWTFGAGAALQIPFAMQMAYRFNGCGVTQNVLYENQKLIANQFNSAIGKIQDSLSSTASALGKLQDVVNQNAQALNTLVKQLSSNFGAISSVLNDILSRLDKVEAEVQIDRLITGRLQSLQTYVTQQLIRAAEIRASANLAATKMSECVLGQSKRVDFCGKGCHLMSFPQSAPHGVVFLHVTYVPAQEKNFTTAPAICHDGKAHFPREGVFVSNGTHWFVTQRNFYEPQIITTDNTFVSGNCDVVIGIVNNTVYDPLQPELDSGGGSGGGQIYEGKLTAEGLRFGIVASRFNHALVDRLVEGAIDAIVRHGGREEDITLVRVPGSWEIPVAAGELARKEDIDAVIAIGVLIRGATPHFDYIASEVSKGLADLSLELRKPITFGVITADTLEQAIERAGTKHGNKGWEAALSAIEMANLFKSLR

SEQ ID NO: 8253 - protein, 1307 aa, Artificial Sequence
  SARS-CoV-2/France/IDF0372/2020__EPI_ISL_406596 spike protein (1-1147)(I909C_Y1047C) LumSynth construct
MFVFLVLLPLVSSQCVNLTTRTQLPPAYTNSFTRGVYYPDKVFRSSVLHSTQDLFLPFFSNVTWFHAIHVSGTNGTKRFDNPVLPFNDGVYFASTEKSNIIRGWIFGTTLDSKTQSLLIVNNATNVVIKVCEFQFCNDPFLGVYYHKNNKSWMESEFRVYSSANNCTFEYVSQPFLMDLEGKQGNFKNLREFVFKNIDGYFKIYSKHTPINLVRDLPQGFSALEPLVDLPIGINITRFQTLLALHRSYLTPGDSSSGWTAGAAAYYVGYLQPRTFLLKYNENGTITDAVDCALDPLSETKCTLKSFTVEKGIYQTSNFRVQPTESIVRFPNITNLCPFGEVFNATRFASVYAWNRKRISNCVADYSFLYNSASFSTFKCYGVSPTKLNDLCFTNVYADSFVIRGDEVRQIAPGQTGKIADYNYKLPDDFTGCVIAWNSNNLDSKVGGNYNYLYRLFRKSNLKPFERDISTEIYQAGSTPCNGVEGFNCYFPLQSYGFQPTNGVGYQPYRVVVLSFELLHAPATVCGPKKSTNLVKNKCVNFNFNGLTGTGVLTESNKKFLPFQQFGRDIADTTDAVRDPQTLEILDITPCSFGGVSVITPGTNTSNQVAVLYQDVNCTEVPVAIHADQLTPTWRVYSTGSNVFQTRAGCLIGAEHVNNSYECDIPIGAGICASYQTQTNSPRRARSVASQSIIAYTMSLGAENSVAYSNNSIAIPTNFTISVTTEILPVSMTKTSVDCTMYICGDSTECSNLLLQYGSFCTQLNRALTGIAVEQDKNTQEVFAQVKQIYKTPPIKDFGGFNFSQILPDPSKPSKRSFIEDLLFNKVTLADAGFIKQYGDCLGDIAARDLICAQKFNGLTVLPPLLTDEMIAQYTSALLAGTITSGWTFGAGAALQIPFAMQMAYRFNGCGVTQNVLYENQKLIANQFNSAIGKIQDSLSSTASALGKLQDVVNQNAQALNTLVKQLSSNFGAISSVLNDILSRLDKVEAEVQIDRLITGRLQSLQTYVTQQLIRAAEIRASANLAATKMSECVLGQSKRVDFCGKGCHLMSFPQSAPHGVVFLHVTYVPAQEKNFTTAPAICHDGKAHFPREGVFVSNGTHWFVTQRNFYEPQIITTDNTFVSGNCDVVIGIVNNTVYDPLQPELDSGGGSGGGQIYEGKLTAEGLRFGIVASRFNHALVDRLVEGAIDAIVRHGGREEDITLVRVPGSWEIPVAAGELARKEDIDAVIAIGVLIRGATPHFDYIASEVSKGLADLSLELRKPITFGVITADTLEQAIERAGTKHGNKGWEAALSAIEMANLFKSLR

SEQ ID NO: 8254 - protein, 1307 aa, Artificial Sequence
  SARS-CoV-2/Australia/VIC01/2020__EPI_ISL_406844 spike protein (1-1147)(I909C_Y1047C) LumSynth construct
MFVFLVLLPLVSSQCVNLTTRTQLPPAYTNSFTRGVYYPDKVFRSSVLHSTQDLFLPFFSNVTWFHAIHVSGTNGTKRFDNPVLPFNDGVYFASTEKSNIIRGWIFGTTLDSKTQSLLIVNNATNVVIKVCEFQFCNDPFLGVYYHKNNKSWMESEFRVYSSANNCTFEYVSQPFLMDLEGKQGNFKNLREFVFKNIDGYFKIYSKHTPINLVRDLPQGFSALEPLVDLPIGINITRFQTLLALHRRYLTPGDSSSGWTAGAAAYYVGYLQPRTFLLKYNENGTITDAVDCALDPLSETKCTLKSFTVEKGIYQTSNFRVQPTESIVRFPNITNLCPFGEVFNATRFASVYAWNRKRISNCVADYSVLYNSASFSTFKCYGVSPTKLNDLCFTNVYADSFVIRGDEVRQIAPGQTGKIADYNYKLPDDFTGCVIAWNSNNLDSKVGGNYNYLYRLFRKSNLKPFERDISTEIYQAGSTPCNGVEGFNCYFPLQSYGFQPTNGVGYQPYRVVVLSFELLHAPATVCGPKKSTNLVKNKCVNFNFNGLTGTGVLTESNKKFLPFQQFGRDIADTTDAVRDPQTLEILDITPCSFGGVSVITPGTNTSNQVAVLYQDVNCTEVPVAIHADQLTPTWRVYSTGSNVFQTRAGCLIGAEHVNNSYECDIPIGAGICASYQTQTNSPRRARSVASQSIIAYTMSLGAENSVAYSNNSIAIPTNFTISVTTEILPVSMTKTSVDCTMYICGDSTECSNLLLQYGSFCTQLNRALTGIAVEQDKNTQEVFAQVKQIYKTPPIKDFGGFNFSQILPDPSKPSKRSFIEDLLFNKVTLADAGFIKQYGDCLGDIAARDLICAQKFNGLTVLPPLLTDEMIAQYTSALLAGTITSGWTFGAGAALQIPFAMQMAYRFNGCGVTQNVLYENQKLIANQFNSAIGKIQDSLSSTASALGKLQDVVNQNAQALNTLVKQLSSNFGAISSVLNDILSRLDKVEAEVQIDRLITGRLQSLQTYVTQQLIRAAEIRASANLAATKMSECVLGQSKRVDFCGKGCHLMSFPQSAPHGVVFLHVTYVPAQEKNFTTAPAICHDGKAHFPREGVFVSNGTHWFVTQRNFYEPQIITTDNTFVSGNCDVVIGIVNNTVYDPLQPELDSGGGSGGGQIYEGKLTAEGLRFGIVASRFNHALVDRLVEGAIDAIVRHGGREEDITLVRVPGSWEIPVAAGELARKEDIDAVIAIGVLIRGATPHFDYIASEVSKGLADLSLELRKPITFGVITADTLEQAIERAGTKHGNKGWEAALSAIEMANLFKSLR

SEQ ID NO: 8255 - protein, 1307 aa, Artificial Sequence
  SARS-CoV-2/Germany/BavPat1/2020__EPI_ISL_406862 spike protein (1-1147)(I909C_Y1047C) LumSynth construct
MFVFLVLLPLVSSQCVNLTTRTQLPPAYTNSFTRGVYYPDKVFRSSVLHSTQDLFLPFFSNVTWFHAIHVSGTNGTKRFDNPVLPFNDGVYFASTEKSNIIRGWIFGTTLDSKTQSLLIVNNATNVVIKVCEFQFCNDPFLGVYYHKNNKSWMESEFRVYSSANNCTFEYVSQPFLMDLEGKQGNFKNLREFVFKNIDGYFKIYSKHTPINLVRDLPQGFSALEPLVDLPIGINITRFQTLLALHRSYLTPGDSSSGWTAGAAAYYVGYLQPRTFLLKYNENGTITDAVDCALDPLSETKCTLKSFTVEKGIYQTSNFRVQPTESIVRFPNITNLCPFGEVFNATRFASVYAWNRKRISNCVADYSVLYNSASFSTFKCYGVSPTKLNDLCFTNVYADSFVIRGDEVRQIAPGQTGKIADYNYKLPDDFTGCVIAWNSNNLDSKVGGNYNYLYRLFRKSNLKPFERDISTEIYQAGSTPCNGVEGFNCYFPLQSYGFQPTNGVGYQPYRVVVLSFELLHAPATVCGPKKSTNLVKNKCVNFNFNGLTGTGVLTESNKKFLPFQQFGRDIADTTDAVRDPQTLEILDITPCSFGGVSVITPGTNTSNQVAVLYQGVNCTEVPVAIHADQLTPTWRVYSTGSNVFQTRAGCLIGAEHVNNSYECDIPIGAGICASYQTQTNSPRRARSVASQSIIAYTMSLGAENSVAYSNNSIAIPTNFTISVTTEILPVSMTKTSVDCTMYICGDSTECSNLLLQYGSFCTQLNRALTGIAVEQDKNTQEVFAQVKQIYKTPPIKDFGGFNFSQILPDPSKPSKRSFIEDLLFNKVTLADAGFIKQYGDCLGDIAARDLICAQKFNGLTVLPPLLTDEMIAQYTSALLAGTITSGWTFGAGAALQIPFAMQMAYRFNGCGVTQNVLYENQKLIANQFNSAIGKIQDSLSSTASALGKLQDVVNQNAQALNTLVKQLSSNFGAISSVLNDILSRLDKVEAEVQIDRLITGRLQSLQTYVTQQLIRAAEIRASANLAATKMSECVLGQSKRVDFCGKGCHLMSFPQSAPHGVVFLHVTYVPAQEKNFTTAPAICHDGKAHFPREGVFVSNGTHWFVTQRNFYEPQIITTDNTFVSGNCDVVIGIVNNTVYDPLQPELDSGGGSGGGQIYEGKLTAEGLRFGIVASRFNHALVDRLVEGAIDAIVRHGGREEDITLVRVPGSWEIPVAAGELARKEDIDAVIAIGVLIRGATPHFDYIASEVSKGLADLSLELRKPITFGVITADTLEQAIERAGTKHGNKGWEAALSAIEMANLFKSLR

SEQ ID NO: 8256 - protein, 1307 aa, Artificial Sequence
  SARS-CoV-2/Wuhan/HBCDC-HB-02/2020__EPI_ISL_412978 spike protein (1-1147)(I909C_Y1047C) LumSynth construct
MFVFLVLLPLVSSQCVNLTTRTQLPPAYTNSFTRGVYYPDKVFRSSVLHSTQDLFLPFFSNVTWFHAIHVSGTNGTKRFDNPVLPFNDGVYFASTEKSNIIRGWIFGTTLDSKTQSLLIVNNATNVVIKVCEFQFCNDPFLGVYYHKNNKSWMESEFRVYSSANNCTFEYVSQPFLMDLEGKQGNFKNLREFVFKNIDGYFKIYSKHTPINLVRDLPQGFSALEPLVDLPIGINITRFQTLLALHRSYLTPGDSSSGWTAGAAAYYVGYLQPRTFLLKYNENGTITDAVDCALDPLSETKCTLKSFTVEKGIYQTSNFRVQPTESIVRFPNITNLCPFGEVFNATRFASVYAWNRKRISNCVADYSVLYNSASFSTFKCYGVSPTKLNDLCFTNVYADSFVIRGDEVRQIAPGQTGKIADYNYKLPDDFTGCVIAWNSNNLDSKVGGNYNYLYRLFRKSNLKPFERDISTEIYQAGSTPCNGVEGFNCYFPLQSYGFQPTNGVGYQPYRVVVLSFELLHAPATVCGPKKSTNLVKNKCVNFNFNGLTGTGVLTESNKKFLPFQQFGRDIADTTDAVRDPQTLEILDITPCSFGGVSVITPGTNTSNQVAVLYQDVNCTEVPVAIHADQLTPTWRVYSTGSNVFQTRAGCLIGAEHVNNSYECDIPIGAGICASYQTQTNSPRRARSVASQSIIAYTMSLGAENSVAYSNNSIAIPTNFTISVTTEILPVSMTKTSVDCTMYICGDSTECSNFLLQYGSFCTQLNRALTGIAVEQDKNTQEVFAQVKQIYKTPPIKDFGGFNFSQILPDPSKPSKRSFIEDLLFNKVTLADAGFIKQYGDCLGDIAARDLICAQKFNGLTVLPPLLTDEMIAQYTSALLAGTITSGWTFGAGAALQIPFAMQMAYRFNGCGVTQNVLYENQKLIANQFNSAIGKIQDSLSSTASALGKLQDVVNQNAQALNTLVKQLSSNFGAISSVLNDILSRLDKVEAEVQIDRLITGRLQSLQTYVTQQLIRAAEIRASANLAATKMSECVLGQSKRVDFCGKGCHLMSFPQSAPHGVVFLHVTYVPAQEKNFTTAPAICHDGKAHFPREGVFVSNGTHWFVTQRNFYEPQIITTDNTFVSGNCDVVIGIVNNTVYDPLQPELDSGGGSGGGQIYEGKLTAEGLRFGIVASRFNHALVDRLVEGAIDAIVRHGGREEDITLVRVPGSWEIPVAAGELARKEDIDAVIAIGVLIRGATPHFDYIASEVSKGLADLSLELRKPITFGVITADTLEQAIERAGTKHGNKGWEAALSAIEMANLFKSLR

SEQ ID NO: 8257 - protein, 1307 aa, Artificial Sequence
  SARS-CoV-2/Australia/QLD02/2020__EPI_ISL_407896 spike protein (1-1147)(I909C_Y1047C) LumSynth construct
MFVFLVLLPLVSSQCVNLTTRTQLPPAYTNSFTRGVYYPDKVFRSSVLHSTQDLFLPFFSNVTWFHAIHVSGTNGTKRFDNPVLPFNDGVYFASTEKSNIIRGWIFGTTLDSKTQSLLIVNNATNVVIKVCEFQFCNDPFLGVYYHKNNKSWMESEFRVYSSANNCTFEYVSQPFLMDLEGKQGNFKNLREFVFKNIDGYFKIYSKHTPINLVRDLPQGFSALEPLVDLPIGINITRFQTLLALHRSYLTPGDSSSGWTAGAAAYYVGYLQPRTFLLKYNENGTITDAVDCALDPLSETKCTLKSFTVEKGIYQTSNFRVQPTESIVRFPNITNLCPFGEVFNATRFASVYAWNRKRISNCVADYSVLYNSASFSTFKCYGVSPTKLNDLCFTNVYADSFVIRGDEVRQIAPGQTGKIADYNYKLPDDFTGCVIAWNSNNLDSKVGGNYNYLYRLFRKSNLKPFERDISTEIYQAGSTPCNGVEGFNCYFPLQSYGFQPTNGVGYQPYRVVVLSFELLHAPATVCGPKKSTNLVKNKCVNFNFNGLTGTGVLTESNKKFLPFQQFGRDIADTTDAVRDPQTLEILDITPCSFGGVSVITPGTNTSNQVAVLYQDVNCTEVPVAIHADQLTPTWRVYSTGSNVFQTRAGCLIGAEHVNNSYECDIPIGAGICASYQTQTNSPRRARSVASQSIIAYTMSLGAENSVAYSNNSIAIPTNFTISVTTEILPVSMTKTSVDCTMYICGDSTECSNLLLQYGSFCTQLNRALTGIAVEQDKNTQEVFAQVKQIYKTPPIKDFGGFNFSQILPDPSKPSKRSFIEDLLFNKVTLADAGFIKQYGDCLGDIAARDLICAQKFNGLTVLPPLLTDEMIAQYTSALLAGTITSGWTFGAGAALQIPFAMQMAYRFNGCGVTQNVLYENQKLIANQFNSAIGKIQDSLSSTASALGKLQDVVNQNAQALNTLVKQLSSNFGAISSVLNDILSRLDKVEAEVQIDRLITGRLQSLQTYVTQQLIRAAEIRASANLAATKMSECVLGQSKRVDFCGKGCHLMSFPQSAPHGVVFLHVTYVPAQEKNFTTAPAICHDGKAHFPREGVFVSNGTHWFVTQRNFYEPQIITTDNTFVSGNCDVVIGIVNNTVYDPLQLELDSGGGSGGGQIYEGKLTAEGLRFGIVASRFNHALVDRLVEGAIDAIVRHGGREEDITLVRVPGSWEIPVAAGELARKEDIDAVIAIGVLIRGATPHFDYIASEVSKGLADLSLELRKPITFGVITADTLEQAIERAGTKHGNKGWEAALSAIEMANLFKSLR

SEQ ID NO: 8258 - protein, 1307 aa, Artificial Sequence
  SARS-CoV-2/India/1-31/2020__EPI_ISL_413523 spike protein (1-1147)(I909C_Y1047C) LumSynth construct
MFVFLVLLPLVSSQCVNLTTRTQLPPAYTNSFTRGVYYPDKVFRSSVLHSTQDLFLPFFSNVTWFHAIHVSGTNGTKRFDNPVLPFNDGVYFASTEKSNIIRGWIFGTTLDSKTQSLLIVNNATNVVIKVCEFQFCNDPFLGVYYHKNNKSWMESEFRVYSSANNCTFEYVSQPFLMDLEGKQGNFKNLREFVFKNIDGYFKIYSKHTPINLVRDLPQGFSALEPLVDLPIGINITRFQTLLALHRSYLTPGDSSSGWTAGAAAYYVGYLQPRTFLLKYNENGTITDAVDCALDPLSETKCTLKSFTVEKGIYQTSNFRVQPTESIVRFPNITNLCPFGEVFNATRFASVYAWNRKRISNCVADYSVLYNSASFSTFKCYGVSPTKLNDLCFTNVYADSFVIRGDEVRQIAPGQTGKIADYNYKLPDDFTGCVIAWNSNNLDSKVGGNYNYLYRLFRKSNLKPFERDISTEIYQAGSTPCNGVEGFNCYFPLQSYGFQPTNGVGYQPYRVVVLSFELLHAPATVCGPKKSTNLVKNKCVNFNFNGLTGTGVLTESNKKFLPFQQFGRDIADTTDAVRDPQTLEILDITPCSFGGVSVITPGTNTSNQVAVLYQDVNCTEVPVAIHADQLTPTWRVYSTGSNVFQTRAGCLIGAEHVNNSYECDIPIGAGICASYQTQTNSPRRARSVASQSIIAYTMSLGAENSVAYSNNSIAIPTNFTISVTTEILPVSMTKTSVDCTMYICGDSTECSNLLLQYGSFCTQLNRALTGIAVEQDKNTQEVFAQVKQIYKTPPIKDFGGFNFSQILPDPSKPSKRSFIEDLLFNKVTLADAGFIKQYGDCLGDIAARDLICAQKFNGLTVLPPLLTDEMIAQYTSALLAGTITSGWTFGAGAALQIPFAMQMAYRFNGCGVTQNVLYENQKLIANQFNSVIGKIQDSLSSTASALGKLQDVVNQNAQALNTLVKQLSSNFGAISSVLNDILSRLDKVEAEVQIDRLITGRLQSLQTYVTQQLIRAAEIRASANLAATKMSECVLGQSKRVDFCGKGCHLMSFPQSAPHGVVFLHVTYVPAQEKNFTTAPAICHDGKAHFPREGVFVSNGTHWFVTQRNFYEPQIITTDNTFVSGNCDVVIGIVNNTVYDPLQPELDSGGGSGGGQIYEGKLTAEGLRFGIVASRFNHALVDRLVEGAIDAIVRHGGREEDITLVRVPGSWEIPVAAGELARKEDIDAVIAIGVLIRGATPHFDYIASEVSKGLADLSLELRKPITFGVITADTLEQAIERAGTKHGNKGWEAALSAIEMANLFKSLR

SEQ ID NO: 8259 - protein, 1307 aa, Artificial Sequence
  SARS-CoV-2/Guangdong/GD2020087-P0008/2020__EPI_ISL_413863 spike protein (1-1147)(I909C_Y1047C) LumSynth construct
MFVFLVLLPLVSSQCVNLTTRTQLPPAYTNSFTRGVYYPDKVFRSSVLHSTQDLFLPFFSNVTWFHAIHVSGTNGTKRFDNPVLPFNDGVYFASTEKSNIIRGWIFGTTLDSKTQSLLIVNNATNVVIKVCEFQFCNDPFLGVYYHKNNKSWMESEFRVYSSANNCTFEYVSQPFLMDLEGKQGNFKNLREFVFKNIDGYFKIYSKHTPINLVRDLPQGFSALEPLVDLPIGINITRFQTLLALHRSYLTPGDSSSGWTAGAAAYYVGYLQPRTFLLKYNENGTITDAVDCALDPLSETKCTLKSFTVEKGIYQTSNFRVQPTESIVRFPNITNLCPFGEVFNATRFASVYAWNRKRISNCVADYSVLYNSASFSTFKCYGVSPTKLNDLCFTNVYADSFVIRGDEVREIAPGQTGKIADYNYKLPDDFTGCVIAWNSNNLDSKVGGNYNYLYRLFRKSNLKPFERDISTEIYQAGSTPCNGVEGFNCYFPLQSYGFQPTNGVGYQPYRVVVLSFELLHAPATVCGPKKSTNLVKNKCVNFNFNGLTGTGVLTESNKKFLPFQQFGRDIADTTDAVRDPQTLEILDITPCSFGGVSVITPGTNTSNQVAVLYQDVNCTEVPVAIHADQLTPTWRVYSTGSNVFQTRAGCLIGAEHVNNSYECDIPIGAGICASYQTQTNSPRRARSVASQSIIAYTMSLGAENSVAYSNNSIAIPTNFTISVTTEILPVSMTKTSVDCTMYICGDSTECSNLLLQYGSFCTQLNRALTGIAVEQDKNTQEVFAQVKQIYKTPPIKDFGGFNFSQILPDPSKPSKRSFIEDLLFNKVTLADAGFIKQYGDCLGDIAARDLICAQKFNGLTVLPPLLTDEMIAQYTSALLAGTITSGWTFGAGAALQIPFAMQMAYRFNGCGVTQNVLYENQKLIANQFNSAIGKIQDSLSSTASALGKLQDVVNQNAQALNTLVKQLSSNFGAISSVLNDILSRLDKVEAEVQIDRLITGRLQSLQTYVTQQLIRAAEIRASANLAATKMSECVLGQSKRVDFCGKGCHLMSFPQSAPHGVVFLHVTYVPAQEKNFTTAPAICHDGKAHFPREGVFVSNGTHWFVTQRNFYEPQIITTDNTFVSGNCDVVIGIVNNTVYDPLQPELDSGGGSGGGQIYEGKLTAEGLRFGIVASRFNHALVDRLVEGAIDAIVRHGGREEDITLVRVPGSWEIPVAAGELARKEDIDAVIAIGVLIRGATPHFDYIASEVSKGLADLSLELRKPITFGVITADTLEQAIERAGTKHGNKGWEAALSAIEMANLFKSLR

SEQ ID NO: 8260 - protein, 1307 aa, Artificial Sequence
  SARS-CoV-2/Sweden/01/2020__EPI_ISL_411951 spike protein (1-1147)(I909C_Y1047C) LumSynth construct
MFVFLVLLPLVSSQCVNLTTRTQLPPAYTNSFTRGVYYPDKVFRSSVLHSTQDLFLPFFSNVTWFHAIHVSGTNGTKRFDNPVLPFNDGVYFASTEKSNIIRGWIFGTTLDSKTQSLLIVNNATNVVIKVCEFQFCNDPFLGVYYHKNNKSWMESEFRVYSSANNCTFEYVSQPFLMDLEGKQGNFKNLREFVFKNIDGYFKIYSKHTPINLVRDLPQGFSALEPLVDLPIGINITRFQTLLALHRSYLTPGDSSSGWTAGAAAYYVGYLQPRTFLLKYNENGTITDAVDCALDPLSETKCTLKSFTVEKGIYQTSNFRVQPTESIVRFPNITNLCPFGEVFNATRFASVYAWNRKRISNCVADYSVLYNSASFSTFKCYGVSPTKLNDLCFTNVYADSFVIRGDEVRQIAPGQTGKIADYNYKLPDDFTGCVIAWNSNNLDSKVGGNYNYLYRLFRKSNLKPFERDISTEIYQAGSTPCNGVEGFNCYFPLQSYGFQPTNGVGYQPYRVVVLSFELLHAPATVCGPKKSTNLVKNKCVNFNFNGLTGTGVLTESNKKFLPFQQFGRDIADTTDAVRDPQTLEILDITPCSFGGVSVITPGTNTSNQVAVLYQDVNCTEVPVAIHADQLTPTWRVYSTGSNVFQTRAGCLIGAEHVNNSYECDIPIGAGICASYQTQTNSPRRARSVASQSIIAYTMSLGAENSVAYSNNSIAIPTNFTISVTTEILPVSMTKTSVDCTMYICGDSTECSNLLLQYGSFCTQLNRALTGIAVEQDKNTQEVFAQVKQIYKTPPIKDCGGFNFSQILPDPSKPSKRSFIEDLLFNKVTLADAGFIKQYGDCLGDIAARDLICAQKFNGLTVLPPLLTDEMIAQYTSALLAGTITSGWTFGAGAALQIPFAMQMAYRFNGCGVTQNVLYENQKLIANQFNSAIGKIQDSLSSTASALGKLQDVVNQNAQALNTLVKQLSSNFGAISSVLNDILSRLDKVEAEVQIDRLITGRLQSLQTYVTQQLIRAAEIRASANLAATKMSECVLGQSKRVDFCGKGCHLMSFPQSAPHGVVFLHVTYVPAQEKNFTTAPAICHDGKAHFPREGVFVSNGTHWFVTQRNFYEPQIITTDNTFVSGNCDVVIGIVNNTVYDPLQPELDSGGGSGGGQIYEGKLTAEGLRFGIVASRFNHALVDRLVEGAIDAIVRHGGREEDITLVRVPGSWEIPVAAGELARKEDIDAVIAIGVLIRGATPHFDYIASEVSKGLADLSLELRKPITFGVITADTLEQAIERAGTKHGNKGWEAALSAIEMANLFKSLR

SEQ ID NO: 8261 - protein, 1307 aa, Artificial Sequence
  SARS-CoV-2/Tianmen/HBCDC-HB-07/2020__EPI_ISL_412983 spike protein (1-1147)(I909C_Y1047C) LumSynth construct
MFVFLVLLPLVSSQCVNLTTRTQLPPAYTNSFTRGVYYPDKVFRSSVLHSTQDLFLPFFSNVTWFHAIHVSGTNGTKRFDNPVLPFNDGVYFASTEKSNIIRGWIFGTTLDSKTQSLLIVNNATNVVIKVCEFQFCNDPFLGVYYHKNNKSWMESEFRVYSSANNCTFEYVSQPFLMDLEGKQGNFKNLREFVFKNIDGYFKIYSKHTPINLVRDLPQGFSALEPLVDLPIGINITRFQTLLALHRSYLTPGDSSSGWTAGAAAYYVGYLQPRTFLLKYNENGTITDAVDCALDPLSETKCTLKSFTVEKGIYQTSNFRVQPTESIVRFPNITNLCPFGEVFNATRFASVYAWNRKRISNCVADYSVLYNSASFSTFKCYGVSPTKLNDLCFTNVYADSFVIRGDEVRQIAPGQTGKIADYNYKLPDDFTGCVIAWNSNNLDSKVGGNYNYLYRLFRKSNLKPFERDISTEIYQAGSTPCNGVEGFNCYFPLQSYGFQPTNGVGYQPYRVVVLSFELLHAPATVCGPKKSTNLVKNKCVNFNFNGLTGTGVLTESNKKFLPFQQFGRDIADTTDAVRDPQTLEILDITPCSFGGVSVITPGTNTSNQVAVLYQDLNCTEVPVAIHADQLTPTWRVYSTGSNVFQTRAGCLIGAEHVNNSYECDIPIGAGICASYQTQTNSPRRARSVASQSIIAYTMSLGAENSVAYSNNSIAIPTNFTISVTTEILPVSMTKTSVDCTMYICGDSTECSNLLLQYGSFCTQLNRALTGIAVEQDKNTQEVFAQVKQIYKTPPIKDFGGFNFSQILPDPSKPSKRSFIEDLLFNKVTLADAGFIKQYGDCLGDIAARDLICAQKFNGLTVLPPLLTDEMIAQYTSALLAGTITSGWTFGAGAALQIPFAMQMAYRFNGCGVTQNVLYENQKLIANQFNSAIGKIQDSLSSTASALGKLQDVVNQNAQALNTLVKQLSSNFGAISSVLNDILSRLDKVEAEVQIDRLITGRLQSLQTYVTQQLIRAAEIRASANLAATKMSECVLGQSKRVDFCGKGCHLMSFPQSAPHGVVFLHVTYVPAQEKNFTTAPAICHDGKAHFPREGVFVSNGTHWFVTQRNFYEPQIITTDNTFVSGNCDVVIGIVNNTVYDPLQPELDSGGGSGGGQIYEGKLTAEGLRFGIVASRFNHALVDRLVEGAIDAIVRHGGREEDITLVRVPGSWEIPVAAGELARKEDIDAVIAIGVLIRGATPHFDYIASEVSKGLADLSLELRKPITFGVITADTLEQAIERAGTKHGNKGWEAALSAIEMANLFKSLR

SEQ ID NO: 8262 - protein, 1307 aa, Artificial Sequence
  SARS-CoV-2/Hong Kong/case42_VM20002493/2020__EPI_ISL_414527 spike protein (1-1147)(I909C_Y1047C) LumSynth construct
MFVFLVLLPLVSSQCVNLTTRTQLPPAYTNSFTRGVYYPDKVFRSSVLHSTQDLFLPFFSNVTWFHAIHVSGTNGTKRFDNPVLPFNDGVYFASTEKSNIIRGWIFGTTLDSKTQSLLIVNNATNVVIKVCEFQFCNDPFLGVYYHKNNKSWMESEFRVYSSANNCTFEYVSQPFLMDLEGKQGNFKNLREFVFKNIDGYFKIYSKHTPINLVRDLPQGFSALEPLVDLPIGINITRFQTLLALHRSYLTPGDSSSGWTAGAAAYYVGYLQPRTFLLKYNENGTITDAVDCALDPLSETKCTLKSFTVEKGIYQTSNFRVQPTESIVRFPNITNLCPFGEVFNATRFASVYAWNRKRISNCVADYSVLYNSASFSTFKCYGVSPTKLNDLCFTNVYADSFVIRGDEVRQIAPGQTGKIADYNYKLPDDFTGCVIAWNSNNLDSKVGGNYNYLYRLFRKSNLKPFERDISTEIYQAGSTPCNGVEGFNCYFPLQSYGFQPTNGVGYQPYRVVVLSFELLHAPATVCGPKKSTNLVKNKCVNFNFNGLTGTGVLTESNKKFLPFQQFGRDIADTTDAVRDPQTLEILDITPCSFGGVSVITPGTNTSNQVAVLYQDVNCTEVPVAIHADQLTPTWRVYSTGSNVFQTRAGCLIGAEHVNNSYECDIPIGAGICASYQTQTNSPRRARSVASQSIIAYTMSLGAENSVAYSNNSIAIPTNFAISVTTEILPVSMTKTSVDCTMYICGDSTECSNLLLQYGSFCTQLNRALTGIAVEQDKNTQEVFAQVKQIYKTPPIKDFGGFNFSQILPDPSKPSKRSFIEDLLFNKVTLADAGFIKQYGDCLGDIAARDLICAQKFNGLTVLPPLLTDEMIAQYTSALLAGTITSGWTFGAGAALQIPFAMQMAYRFNGCGVTQNVLYENQKLIANQFNSAIGKIQDSLSSTASALGKLQDVVNQNAQALNTLVKQLSSNFGAISSVLNDILSRLDKVEAEVQIDRLITGRLQSLQTYVTQQLIRAAEIRASANLAATKMSECVLGQSKRVDFCGKGCHLMSFPQSAPHGVVFLHVTYVPAQEKNFTTAPAICHDGKAHFPREGVFVSNGTHWFVTQRNFYEPQIITTDNTFVSGNCDVVIGIVNNTVYDPLQPELDSGGGSGGGQIYEGKLTAEGLRFGIVASRFNHALVDRLVEGAIDAIVRHGGREEDITLVRVPGSWEIPVAAGELARKEDIDAVIAIGVLIRGATPHFDYIASEVSKGLADLSLELRKPITFGVITADTLEQAIERAGTKHGNKGWEAALSAIEMANLFKSLR

SEQ ID NO: 8263 - protein, 1307 aa, Artificial Sequence
  SARS-CoV-2/USA/CruiseA-23/2020__EPI_ISL_414482 spike protein (1-1147)(I909C_Y1047C) LumSynth construct
MFVFLVLLPLVSSQCVNLTTRTQLPPAYTNSFTRGVYYPDKVFRSSVLHSTQDLFLPFFSNVTWFHAIHVSGTNGTKRFDNPVLPFNDGVYFASTEKSNIIRGWIFGTTLDSKTQSLLIVNNATNVVIKVCEFQFCNDPFLGVYYHKNNKSWMESEFRVYSSANNCTFEYVSQPFLMDLEVKQGNFKNLREFVFKNIDGYFKIYSKHTPINLVRDLPQGFSALEPLVDLPIGINITRFQTLLALHRSYLTPGDSSSGWTAGAAAYYVGYLQPRTFLLKYNENGTITDAVDCALDPLSETKCTLKSFTVEKGIYQTSNFRVQPTESIVRFPNITNLCPFGEVFNATRFASVYAWNRKRISNCVADYSVLYNSASFSTFKCYGVSPTKLNDLCFTNVYADSFVIRGDEVRQIAPGQTGKIADYNYKLPDDFTGCVIAWNSNNLDSKVGGNYNYLYRLFRKSNLKPFERDISTEIYQAGSTPCNGVEGFNCYFPLQSYGFQPTNGVGYQPYRVVVLSFELLHAPATVCGPKKSTNLVKNKCVNFNFNGLTGTGVLTESNKKFLPFQQFGRDIADTTDAVRDPQTLEILDITPCSFGGVSVITPGTNTSNQVAVLYQDVNCTEVPVAIHADQLTPTWRVYSTGSNVFQTRAGCLIGAEHVNNSYECDIPIGAGICASYQTQTNSPRRARSVASQSIIAYTMSLGAENSVAYSNNSIAIPTNFTISVTTEILPVSMTKTSVDCTMYICGDSTECSNLLLQYGSFCTQLNRALTGIAVEQDKNTQEVFAQVKQIYKTPPIKDFGGFNFSQILPDPSKPSKRSFIEDLLFNKVTLADAGFIKQYGDCLGDIAARDLICAQKFNGLTVLPPLLTDEMIAQYTSALLAGTITSGWTFGAGAALQIPFAMQMAYRFNGCGVTQNVLYENQKLIANQFNSAIGKIQDSLSSTASALGKLQDVVNQNAQALNTLVKQLSSNFGAISSVLNDILSRLDKVEAEVQIDRLITGRLQSLQTYVTQQLIRAAEIRASANLAATKMSECVLGQSKRVDFCGKGCHLMSFPQSAPHGVVFLHVTYVPAQEKNFTTAPAICHDGKAHFPREGVFVSNGTHWFVTQRNFYEPQIITTDNTFVSGNCDVVIGIVNNTVYDPLQPELDSGGGSGGGQIYEGKLTAEGLRFGIVASRFNHALVDRLVEGAIDAIVRHGGREEDITLVRVPGSWEIPVAAGELARKEDIDAVIAIGVLIRGATPHFDYIASEVSKGLADLSLELRKPITFGVITADTLEQAIERAGTKHGNKGWEAALSAIEMANLFKSLR

SEQ ID NO: 8264 - protein, 1307 aa, Artificial Sequence
  SARS-CoV-2/Hong Kong/case85_VM20002868/2020__EPI_ISL_414519 spike protein (1-1147)(I909C_Y1047C) LumSynth construct
MFVFLVLVPLVSSQCVNLTTRTQLPPAYTNSFTRGVYYPDKVFRSSVLHSTQDLFLPFFSNVTWFHAIHVSGTNGTKRFDNPVLPFNDGVYFASTEKSNIIRGWIFGTTLDSKTQSLLIVNNATNVVIKVCEFQFCNDPFLGVYYHKNNKSWMESEFRVYSSANNCTFEYVSQPFLMDLEGKQGNFKNLREFVFKNIDGYFKIYSKHTPINLVRDLPQGFSALEPLVDLPIGINITRFQTLLALHRSYLTPGDSSSGWTAGAAAYYVGYLQPRTFLLKYNENGTITDAVDCALDPLSETKCTLKSFTVEKGIYQTSNFRVQPTESIVRFPNITNLCPFGEVFNATRFASVYAWNRKRISNCVADYSVLYNSASFSTFKCYGVSPTKLNDLCFTNVYADSFVIRGDEVRQIAPGQTGKIADYNYKLPDDFTGCVIAWNSNNLDSKVGGNYNYLYRLFRKSNLKPFERDISTEIYQAGSTPCNGVEGFNCYFPLQSYGFQPTNGVGYQPYRVVVLSFELLHAPATVCGPKKSTNLVKNKCVNFNFNGLTGTGVLTESNKKFLPFQQFGRDIADTTDAVRDPQTLEILDITPCSFGGVSVITPGTNTSNQVAVLYQDVNCTEVPVAIHADQLTPTWRVYSTGSNVFQTRAGCLIGAEHVNNSYECDIPIGAGICASYQTQTNSPRRARSVASQSIIAYTMSLGAENSVAYSNNSIAIPTNFTISVTTEILPVSMTKTSVDCTMYICGDSTECSNLLLQYGSFCTQLNRALTGIAVEQDKNTQEVFAQVKQIYKTPPIKDFGGFNFSQILPDPSKPSKRSFIEDLLFNKVTLADAGFIKQYGDCLGDIAARDLICAQKFNGLTVLPPLLTDEMIAQYTSALLAGTITSGWTFGAGAALQIPFAMQMAYRFNGCGVTQNVLYENQKLIANQFNSAIGKIQDSLSSTASALGKLQDVVNQNAQALNTLVKQLSSNFGAISSVLNDILSRLDKVEAEVQIDRLITGRLQSLQTYVTQQLIRAAEIRASANLAATKMSECVLGQSKRVDFCGKGCHLMSFPQSAPHGVVFLHVTYVPAQEKNFTTAPAICHDGKAHFPREGVFVSNGTHWFVTQRNFYEPQIITTDNTFVSGNCDVVIGIVNNTVYDPLQPELDSGGGSGGGQIYEGKLTAEGLRFGIVASRFNHALVDRLVEGAIDAIVRHGGREEDITLVRVPGSWEIPVAAGELARKEDIDAVIAIGVLIRGATPHFDYIASEVSKGLADLSLELRKPITFGVITADTLEQAIERAGTKHGNKGWEAALSAIEMANLFKSLR

SEQ ID NO: 8265 - protein, 1307 aa, Artificial Sequence; identical to SEQ ID NO: 8255
  SARS-CoV-2/England/200990660/2020__EPI_ISL_414523 spike protein (1-1147)(I909C_Y1047C) LumSynth construct

SEQ ID NO: 8266 - protein, 1307 aa, Artificial Sequence
  SARS-CoV-2/Australia/NSW09/2020__EPI_ISL_413595 spike protein (1-1147)(I909C_Y1047C) LumSynth construct
MFVFLVLLPLVSSQCVNLTTRTQLPPAYTNSFTRGVYYPDKVFRSSVLHSTQDLFLPFFSNVTWFHAIHVSGTNGTKRFDNPVLPFNDGVYFASTEKSNIIRGWIFGTTLDSKTQSLLIVNNATNVVIKVCEFQFCNDPFLGVYYHKNNKSWMESEFRVYSSANNCTFEYVSQPFLMDLEGKQGNFKNLREFVFKNIDGYFKIYSKHTPINLVRDLPQGFSALEPLVDLPIGINITRFQTLLALHRSYLTPGDSSSGWTAGAAAYYVGYLQPRTFLLKYNENGTITDAVDCALDPLSETKCTLKSFTVEKGIYQTSNFRVQPTESIVRFPNITNLCPFGEVFNATRFASVYAWNRKRISNCVADYSVLYNSASFSTFKCYGVSPTKLNDLCFTNVYADSFVIRGDEVRQIAPGQTGKIADYNYKLPDDFTGCVIAWNSNNLDSKVGGNYNYLYRLFRKSNLKPFERDISTEIYQAGSTPCNGVEGFNCYFPLQSYGFQPTNGVGYQPYRVVVLSFELLHAPATVCGPKKSTNLVKNKCVNFNFNGLTGTGVLTESNKKFLPFQQFGRDIADTTDAVRDPQTLEILDITPCSFGGVSVITPGTNTSNQVAVLYQDVNCTEVPVAIHADQLTPTWRVYSTGSNVFQTRAGCLIGAEHVNNSYECDIPIGAGICASYQTQTNSPRRARSVASQSIIAYTMSLGAENSVAYSNNSIAIPTNFTISVTTEILPVSMTKTSVDCTMYICGDSTECSNLLLQYGSFCTQLNRALTGIAVEQDKNTQEVFAQVKQIYKTPPIKDFGGFNFSQILPDPSKPSKRSFIEDLLFNKVTLADAGFIKQYGDCLGDIAARDLICAQKFNGLTVLPPLLTDEMIAQYTSALLAGTITSGWTFGAGAALQIPFAMQMAYRFNGCGVTQNVLYENQKLIANQFNSAIGKIQDSLSFTASALGKLQDVVNQNAQALNTLVKQLSSNFGAISSVLNDILSRLDKVEAEVQIDRLITGRLQSLQTYVTQQLIRAAEIRASANLAATKMSECVLGQSKRVDFCGKGCHLMSFPQSAPHGVVFLHVTYVPAQEKNFTTAPAICHDGKAHFPREGVFVSNGTHWFVTQRNFYEPQIITTDNTFVSGNCDVVIGIVNNTVYDPLQPELDSGGGSGGGQIYEGKLTAEGLRFGIVASRFNHALVDRLVEGAIDAIVRHGGREEDITLVRVPGSWEIPVAAGELARKEDIDAVIAIGVLIRGATPHFDYIASEVSKGLADLSLELRKPITFGVITADTLEQAIERAGTKHGNKGWEAALSAIEMANLFKSLR

SEQ ID NO: 8267 - protein, 1307 aa, Artificial Sequence; identical to SEQ ID NO: 8247
  SARS-CoV-2/Australia/NSW10/2020__EPI_ISL_413596 spike protein (1-1147)(I909C_Y1047C) LumSynth construct

SEQ ID NO: 8268 - protein, 1307 aa, Artificial Sequence
  SARS-CoV-2/Switzerland/1000477797/2020__EPI_ISL_413023 spike protein (1-1147)(I909C_Y1047C) LumSynth construct
MFVFLVLLPLVSSQCVNLTTRTQLPPAYTNSFTRGVYYPDKVFRSSVLHSTQDLFLPFFSNVTWFHAIHVSGTNGTKRFDNPVLPFNDGVYFASTEKSNIIRGWIFGTTLDSKTQSLLIVNNATNVVIKVCEFQFCNDPFLGVYYHKNNKSWMESEFRVYSSANNCTFEYVSQPFLMDLEGKQGNFKNLREFVFKNIDGYFNIYSKHTPINLVRDLPQGFSALEPLVDLPIGINITRFQTLLALHRSYLTPGDSSSGWTAGAAAYYVGYLQPRTFLLKYNENGTITDAVDCALDPLSETKCTLKSFTVEKGIYQTSNFRVQPTESIVRFPNITNLCPFGEVFNATRFASVYAWNRKRISNCVADYSVLYNSASFSTFKCYGVSPTKLNDLCFTNVYADSFVIRGDEVRQIAPGQTGKIADYNYKLPDDFTGCVIAWNSNNLDSKVGGNYNYLYRLFRKSNLKPFERDISTEIYQAGSTPCNGVEGFNCYFPLQSYGFQPTNGVGYQPYRVVVLSFELLHAPATVCGPKKSTNLVKNKCVNFNFNGLTGTGVLTESNKKFLPFQQFGRDIADTTDAVRDPQTLEILDITPCSFGGVSVITPGTNTSNQVAVLYQGVNCTEVPVAIHADQLTPTWRVYSTGSNVFQTRAGCLIGAEHVNNSYECDIPIGAGICASYQTQTNSPRRARSVASQSIIAYTMSLGAENSVAYSNNSIAIPTNFTISVTTEILPVSMTKTSVDCTMYICGDSTECSNLLLQYGSFCTQLNRALTGIAVEQDKNTQEVFAQVKQIYKTPPIKDFGGFNFSQILPDPSKPSKRSFIEDLLFNKVTLADAGFIKQYGDCLGDIAARDLICAQKFNGLTVLPPLLTDEMIAQYTSALLAGTITSGWTFGAGAALQIPFAMQMAYRFNGCGVTQNVLYENQKLIANQFNSAIGKIQDSLSSTASALGKLQDVVNQNAQALNTLVKQLSSNFGAISSVLNDILSRLDKVEAEVQIDRLITGRLQSLQTYVTQQLIRAAEIRASANLAATKMSECVLGQSKRVDFCGKGCHLMSFPQSAPHGVVFLHVTYVPAQEKNFTTAPAICHDGKAHFPREGVFVSNGTHWFVTQRNFYEPQIITTDNTFVSGNCDVVIGIVNNTVYDPLQPELDSGGGSGGGQIYEGKLTAEGLRFGIVASRFNHALVDRLVEGAIDAIVRHGGREEDITLVRVPGSWEIPVAAGELARKEDIDAVIAIGVLIRGATPHFDYIASEVSKGLADLSLELRKPITFGVITADTLEQAIERAGTKHGNKGWEAALSAIEMANLFKSLR

SEQ ID NO: 8269 - protein, 1307 aa, Artificial Sequence
  SARS-CoV-2/Belgium/BA-02291/2020__EPI_ISL_415159 spike protein (1-1147)(I909C_Y1047C) LumSynth construct
MFVFLVLLPLVSSQCVNLTTRTQLPPAYTNSFTRGVYYPDKVFRSSVLHSTQDLFLPFFSNVTWFHAIHVSGTNGTKRFDNPVLPFNDGVYFASTEKSNIIRGWIFGTTLDSKTQSLLIVNNATNVVIKVCEFQFCNDPFLGVYYHKNNKSWMESEFRVYSSANNCTFEYVSQPFLMDLEGKQGNFKNLREFVFKNIDGYFKIYSKHTPINLVRDLPQGFSALEPLVDLPIGINITRFQTLLALHRSYLTPGDSSSGWTAGAAAYYVGYLQPRTFLLKYNENGTITDAVDCALDPLSETKCTLKSFTVEKGIYQTSNFRVQPTESIVRFPNITNLCPFGEVFNATRFASVYAWNRKRISNCVADYSVLYNSASFSTFKCYGVSPTKLNDLCFTNVYADSFVIRGDEVRQIAPGQTGKIADYNYKLPDDFTGCVIAWNSNNLDSKVGGNYNYLYRLFRRSNLKPFERDISTEIYQAGSTPCNGVEGFNCYFPLQSYGFQPTNGVGYQPYRVVVLSFELLPAPATVCGPKKSTNLVKNKCVNFNFNGLTGTGVLTESNKKFLPFQQFGRDIADTTDAVRDPQTLEILDITPCSFGGVSVITPGTNTSNQVAVLYQGVNCTEVPVAIHADQLTPTWRVYSTGSNVFQTRAGCLIGAEHVNNSYECDIPIGAGICASYQTQTNSPRRARSVASQSIIAYTMSLGAENSVAYSNNSIAIPTNFTISVTTEILPVSMTKTSVDCTMYICGDSTECSNLLLQYGSFCTQLNRALTGIAVEQDKNTQEVFAQVKQIYKTPPIKDFGGFNFSQILPDPSKPSKRSFIEDLLFNKVTLADAGFIKQYGDCLGDIAARDLICAQKFNGLTVLPPLLTDEMIAQYTSALLAGTITSGWTFGAGAALQIPFAMQMAYRFNGCGVTQNVLYENQKLIANQFNSAIGKIQDSLSSAAPALGKLQDVVNQNAQALNTLVKQLSSNFGAISSVLNDILSRLDKVEAEVQIDRLITGRLQSLQTYVTQQLIRAAEIRASANLAATKMSECVLGQSKRVDFCGKGCHLMSFPQSAPHGVVFLHVTYVPAQEKNFTTAPAICHDGKAHFPREGVFVSNGTHWFVTQRNFYEPQIITTDNTFVSGNCDVVIGIVNNTVYDPLQPELDSGGGSGGGQIYEGKLTAEGLRFGIVASRFNHALVDRLVEGAIDAIVRHGGREEDITLVRVPGSWEIPVAAGELARKEDIDAVIAIGVLIRGATPHFDYIASEVSKGLADLSLELRKPITFGVITADTLEQAIERAGTKHGNKGWEAALSAIEMANLFKSLR

SEQ ID NO: 8270 - protein, 1307 aa, Artificial Sequence
  SARS-CoV-2/USA/WA8-UW5/2020__EPI_ISL_413486 spike protein (1-1147)(I909C_Y1047C) LumSynth construct
MFVFLVLLPLVSSQCVNLTTRTQLPPAYTNSFTRGVYYPDKVFRSSVLHSTQDLFLPFFSNVTWFHAIHVSGTNGTKRFDNPVLPFNDGVYFASTEKSNIIRGWIFGTTLDSKTQSLLIVNNATNVVIKVCEFQFCNDPFLGVYYHKNNKSWMESEFRVYSSANNCTFEYVSQPFLMDLEGKQGNFKNLREFVFKNIDGYFKIYSKHTPINLVRDLPQGFSALEPLVDLPIGINITRFQTLLALHRSYLTPGDSSSGWTAGAAAYYVGYLQPRTFLLKYNENGTITDAVDCALDPLSETKCTLKSFTVEKGIYQTSNFRVQPTESIVRFPNITNLCPFGEVFNATRFASVYAWNRKRISNCVADYSVLYNSASFSTFKCYGVSPTKLNDLCFTNVYADSFVIRGDEVRQIAPGQTGKIADYNYKLPDDFTGCVIAWNSNNLDSKVGGNYNYLYRLFRKSNLKPFERDISTEIYQAGSTPCNGVEGFNCYFPLQSYGFQPTNGVGYQPYRVVVLSFELLHAPATVCGPKKSTNLVKNKCVNFNFNGLTGTGVLTESNKKFLPFQQFGRDIADTTDAVRDPQTLEILDITPCSFGGVSVITPGTNTSNQVAVLYQDVNCTEVPVAIHADQLTPTWRVYSTGSNVFQTRAGCLIGAEYVNNSYECDIPIGAGICASYQTQTNSPRRARSVASQSIIAYTMSLGAENSVAYSNNSIAIPTNFTISVTTEILPVSMTKTSVDCTMYICGDSTECSNLLLQYGSFCTQLNRALTGIAVEQDKNTQEVFAQVKQIYKTPPIKDFGGFNFSQILPDPSKPSKRSFIEDLLFNKVTLADAGFIKQYGDCLGDIAARDLICAQKFNGLTVLPPLLTDEMIAQYTSALLAGTITSGWTFGAGAALQIPFAMQMAYRFNGCGVTQNVLYENQKLIANQFNSAIGKIQDSLSSTASALGKLQDVVNQNAQALNTLVKQLSSNFGAISSVLNDILSRLDKVEAEVQIDRLITGRLQSLQTYVTQQLIRAAEIRASANLAATKMSECVLGQSKRVDFCGKGCHLMSFPQSAPHGVVFLHVTYVPAQEKNFTTAPAICHDGKAHFPREGVFVSNGTHWFVTQRNFYEPQIITTDNTFVSGNCDVVIGIVNNTVYDPLQPELDSGGGSGGGQIYEGKLTAEGLRFGIVASRFNHALVDRLVEGAIDAIVRHGGREEDITLVRVPGSWEIPVAAGELARKEDIDAVIAIGVLIRGATPHFDYIASEVSKGLADLSLELRKPITFGVITADTLEQAIERAGTKHGNKGWEAALSAIEMANLFKSLR

SEQ ID NO: 8271 - protein, 1307 aa, Artificial Sequence
  SARS-CoV-2/England/20102000506/2020__EPI_ISL_415147 spike protein (1-1147)(I909C_Y1047C) LumSynth construct
MFVFLVLLPLVSSQCVNLTTRTQLPPAYTNSFTRGVYYPDKVFRSSVLHSTQDLFLPFFSNVTWFHAIHVSGTNGTKRFDNPVLPFNDGVYFASTEKSNIIRGWIFGTTLDSKTQSLLIVNNATNVVIKVCEFQFCNDPFLGVYYHKNNKSWMESEFRVYSSANNCTFEYVSQPFLMDLEGKQGNFKNLREFVFKNIDGYFKIYSKHTPINLVRDLPQGFSALEPLVDLPIGINITRFQTLLALHRSYLTPGDSSSGWTAGAAAYYVGYLQPRTFLLKYNENGTITDAVDCALDPLSETKCTLKSFTVEKGIYQTSNFRVQPTESIVRFPNITNLCPFGEVFNATRFASVYAWNRKRISNCVADYSVLYNSASFSTFKCYGVSPTKLNDLCFTNVYADSFVIRGDEVRQIAPGQTGKIADYNYKLPDDFTGCVIAWNSNNLDSKVGGNYNYLYRLFRKSNLKPFERDISTEIYQAGSTPCNGVEGFNCYFPLQSYGFQPTNGVGYQPYRVVVLSFELLHAPATVCGPKKSTNLVKNKCVNFNFNGLTGTGVLTESNKKFLPFQQFGRDIADTTDAVRDPQTLEILDITPCSFGGVSVITPGTNTSNQVAVLYQGVNCTEVPVAIHADQLTPTWRVYSTGSNVFQTRAGCLIGAEHVNNSYECDIPIGAGICASYQTQTNSPRRARSVASQSIIAYTMSLGAENSVAYSNNSIAIPTNFTISVTTEILPVSMTKTSVDCTMYICGDSTECSNLLLQYGSFCTQLNRALTGIAVEQDKNTQEVFAQVKQIYKTPPIKDFGGFNFSQILPDPSKPSKRSFIEDLLFNKVTLADAGFIKQYGYCLGDIAARDLICAQKFNGLTVLPPLLTDEMIAQYTSALLAGTITSGWTFGAGAALQIPFAMQMAYRFNGCGVTQNVLYENQKLIANQFNSAIGKIQDSLSSTASALGKLQDVVNQNAQALNTLVKQLSSNFGAISSVLNDILSRLDKVEAEVQIDRLITGRLQSLQTYVTQQLIRAAEIRASANLAATKMSECVLGQSKRVDFCGKGCHLMSFPQSAPHGVVFLHVTYVPAQEKNFTTAPAICHDGKAHFPREGVFVSNGTHWFVTQRNFYEPQIITTDNTFVSGNCDVVIGIVNNTVYDPLQPELDSGGGSGGGQIYEGKLTAEGLRFGIVASRFNHALVDRLVEGAIDAIVRHGGREEDITLVRVPGSWEIPVAAGELARKEDIDAVIAIGVLIRGATPHFDYIASEVSKGLADLSLELRKPITFGVITADTLEQAIERAGTKHGNKGWEAALSAIEMANLFKSLR

SEQ ID NO: 8272 - protein, 1307 aa, Artificial Sequence
  SARS-CoV-2/Belgium/VAG-03013/2020__EPI_ISL_415155 spike protein (1-1147)(I909C_Y1047C) LumSynth construct
MFVFLVLLPLVSSQCVNLTTRTQLPPAYTNSFTRGVYYPDKVFRSSVLHSTQDLFLPFFSNVTWFHAIHVSGTNGTKRFDNPVLPFNDGVYFASTEKSNIIRGWIFGTTLDSKTQSLLIVNNATNVVIKVCEFQFCNDPFLGVYYHKNNKSWMESEFRVYSSANNCTFEYVSQPFLMDLEGKQGNFKNLREFVFKNIDGYFKIYSKHTPINLVRDLPQGFSALEPLVDLPIGINITRFQTLLALHRSYLTPGDSSSGWTAGAAAYYVGYLQPRTFLLKYNENGTITDAVDCALDPLSETKCTLKSFTVEKGIYQTSNFRVQPTESIVRFPNITNLCPFGEVFNATRFASVYAWNRKRISNCVADYSVLYNSASFSTFKCYGVSPTKLNDLCFTNVYADSFVIRGDEVRQIAPGQTGKIADYNYKLPDDFTGCVIAWNSNNLDSKVGGNYNYLYRLFRKSNLKPFERDISTEIYQAGSTPCNGVEGFNCYFPLQSYGFQPTNGVGYQPYRVVVLSFELLHAPATVCGPKKSTNLVKNKCVNFNFNGLTGTGVLTESNKKFLPFQQFGRDIADTTDAVRDPQTLEILDITPCSFGGVSVITPGTNTSNQVAVLYQGVNCTEVPVAIHADQLTPTWRVYSTGSNVFQTRAGCLIGAEHVNNSYECDIPIGAGICASYQTQTNSPRRARSVASQSIIAYTMSLGAENSVAYSNNSIAIPTNFTISVTTEILPVSMTKTSVDCTMYICGDSTECSNLLLQYGSFCTQLNRALTGIAVEQDKNTQEVFAQVKQIYKTPPIKDFGGFNFSQILPDPSKPSKRSFIEDLLFNKVTLADAGFIKQYGDCLGDIAARDLICAQKFNGLTVLPPLLTDEMIAQYTSALLAGTITSGWTFGAGAALQIPFAMQMAYRFNGCGVTQNVLYENQKLIANQFNSAIGKIQDSLSSTATALGKLQDVVNQNAQALNTLVKQLSSNFGAISSVLNDILSRLDKVEAEVQIDRLITGRLQSLQTYVTQQLIRAAEIRASANLAATKMSECVLGQSKRVDFCGKGCHLMSFPQSAPHGVVFLHVTYVPAQEKNFTTAPAICHDGKAHFPREGVFVSNGTHWFVTQRNFYEPQIITTDNTFVSGNCDVVIGIVNNTVYDPLQPELDSGGGSGGGQIYEGKLTAEGLRFGIVASRFNHALVDRLVEGAIDAIVRHGGREEDITLVRVPGSWEIPVAAGELARKEDIDAVIAIGVLIRGATPHFDYIASEVSKGLADLSLELRKPITFGVITADTLEQAIERAGTKHGNKGWEAALSAIEMANLFKSLR

SEQ ID NO: 8273 - protein, 1307 aa, Artificial Sequence
  SARS-CoV-2/Belgium/BC-03016/2020__EPI_ISL_415157 spike protein (1-1147)(I909C_Y1047C) LumSynth construct
MFVFLVLLPLVSSQCVNLTTRTQLPPAYTNSFTRGVYYPDKVFRSSVLHSTQDLFLPFFSNVTWFHAIHVSGTNGTKRFDNPVLPFNDGVYFASTEKSNIIRGWIFGTTLDSKTQSLLIVNNATNVVIKVCEFQFCNDPFLGVYYHKNNKSWMESEFRVYSSANNCTFEYVSQPFLMDLEGKQGNFKNLREFVFKNIDGYFKIYSKHTPINLVRDLPQGFSALEPLVDLPIGINITRFQTLLALHRSYLTPGDSSSGWTAGAAAYYVGYLQPRTFLLKYNENGTITDAVDCALDPLSETKCTLKSFTVEKGIYQTSNFRVQPTESIVRFPNITNLCPFGEVFNATRFASVYAWNRKRISNCVADYSVLYNSASFSTFKCYGVSPTKLNDLCFTNVYADSFVIRGDEVRQIAPGQTGKIADYNYKLPDDFTGCVIAWNSNNLDSKVGGNYNYLYRLFRKSNLKPFERDISTEIYQAGSTPCNGVEGFNCYFPLQSYGFQPTNGVGYQPYRVVVLSFELLHAPATVCGPKKSTNLVKNKCVNFNFNGLTGTGVLTESNKKFLPFQQFGRDIADTTDAVRDPQTLEILDITPCSFGGVSVITPGTNTSNQVAVLYQGVNCTEVPVAIHADQLTPTWRVYSTGSNVFQTRAGCLIGAEHVNNSYECDIPIGAGICASYQTQTNSPRRARSVASQSIIAYTMSLGAENSVAYSNNSIAIPTNFTISVTTEILPVSMTKTSVDCTMYICGDSTECSNLLLQYGSFCTQLNRALTGIAVEQDKNTQEVFAQVKQIYKTPPIKDFGGFNFSQILPDPSKPSKRSFIEDLLFNKVTLADAGFIKQYGDCLGDIAARDLICAQKFNGLTVLPPLLTDEMIAQYTSALLAGTITSGWTFGAGAALQIPFAMQMAYRFNGCGVTQNVLYENQKLIANQFNSAIGKIQDSLSSTAPALGKLQDVVNQNAQALNTLVKQLSSNFGAISSVLNDILSRLDKVEAEVQIDRLITGRLQSLQTYVTQQLIRAAEIRASANLAATKMSECVLGQSKRVDFCGKGCHLMSFPQSAPHGVVFLHVTYVPAQEKNFTTAPAICHDGKAHFPREGVFVSNGTHWFVTQRNFYEPQIITTDNTFVSGNCDVVIGIVNNTVYDPLQPELDSGGGSGGGQIYEGKLTAEGLRFGIVASRFNHALVDRLVEGAIDAIVRHGGREEDITLVRVPGSWEIPVAAGELARKEDIDAVIAIGVLIRGATPHFDYIASEVSKGLADLSLELRKPITFGVITADTLEQAIERAGTKHGNKGWEAALSAIEMANLFKSLR

SEQ ID NO: 8274 - protein, 1307 aa, Artificial Sequence
  SARS-CoV-2/Germany/BavPat3/2020__EPI_ISL_414521 spike protein (1-1147)(I909C_Y1047C) LumSynth construct
MFVFLVLLPLVSSQCVNLTTRTQLPPAYTNSFTRGVYYPDKVFRSSVLHSTQDLFLPFFSNVTWFHAIHVSGTNGTKRFDNPVLPFNDGVYFASTEKSNIIRGWIFGTTLDSKTQSLLIVNNATNVVIKVCEFQFCNDPFLGVYYHKNNKSWMESEFRVYSSANNCTFEYVSQPFLMDLEGKQGNFKNLREFVFKNIDGYFKIYSKHTPINLVRDLPQGFSALEPLVDLPIGINITRFQTLLALHRSYLTPGDSSSGWTAGAAAYYVGYLQPRTFLLKYNENGTITDAVDCALDPLSETKCTLKSFTVEKGIYQTSNFRVQPTESIVRFPNITNLCPFGEVFNATRFASVYAWNRKRISNCVADYSVLYNSASFSTFKCYGVSPTKLNDLCFTNVYADSFVIRGDEVRQIAPGQTGKIADYNYKLPDDFTGCVIAWNSNNLDSKVGGNYNYLYRLFRKSNLKPFERDISTEIYQAGSTPCNGVEGFNCYFPLQSYGFQPTNGVGYQPYRVVVLSFELLHAPATVCGPKKSTNLVKNKCVNFNFNGLTGTGVLTESNKKFLPFQQFGRDIADTTDAVRDPQTLEILDITPCSFGGVSVITPGTNTSNQVAVLYQDVNCTEVPVAIHADQLTPTWRVYSTGSNVFQTRAGCLIGAEHVNNSYECDIPIGAGICASYQTQTNSPRRARSVASQSIIAYTMSLGAENSVAYSNNSIAIPTNFTISVTTEILPVSMTKTSVDCTMYICGDSTECSNLLLQYGSFCTQLNRALTGIAVEQDKNTQQVFAQVKQIYKTPPIKDFGGFNFSQILPDPSKPSKRSFIEDLLFNKVTLADAGFIKQYGDCLGDIAARDLICAQKFNGLTVLPPLLTDEMIAQYTSALLAGTITSGWTFGAGAALQIPFAMQMAYRFNGCGVTQNVLYENQKLIANQFNSAIGKIQDSLSSTASALGKLQDVVNQNAQALNTLVKQLSSNFGAISSVLNDILSRLDKVEAEVQIDRLITGRLQSLQTYVTQQLIRAAEIRASANLAATKMSECVLGQSKRVDFCGKGCHLMSFPQSAPHGVVFLHVTYVPAQEKNFTTAPAICHDGKAHFPREGVFVSNGTHWFVTQRNFYEPQIITTDNTFVSGNCDVVIGIVNNTVYDPLQPELDSGGGSGGGQIYEGKLTAEGLRFGIVASRFNHALVDRLVEGAIDAIVRHGGREEDITLVRVPGSWEIPVAAGELARKEDIDAVIAIGVLIRGATPHFDYIASEVSKGLADLSLELRKPITFGVITADTLEQAIERAGTKHGNKGWEAALSAIEMANLFKSLR

SEQ ID NO: 8275 - protein, 1307 aa, Artificial Sequence
  SARS-CoV-2/France/HF1805/2020__EPI_ISL_414628 spike protein (1-1147)(I909C_Y1047C) LumSynth construct
MFVFLVLLPLVSSQCVNLTTRTQLPPAYTNSFTRGVYYPDKVFRSSVLHSTQDLFLPFFSNVTWFHAIHVSGTNGTKRFDNPVLPFNDGVYFASTEKSNIIRGWIFGTTLDSKTQSLLIVNNATNVVIKVCEFQFCNDPFLGVYYHKNNKSWMESEFRVYSSANNCTFEYVSQPFLMDLEGKQGNFKNLREFVFKNIDGYFKIYSKHTPINLVRDLPQGFSALEPLVDLPIGINITRFQTLLALHRSYLTPGDSSSGWTAGAAAYYVGYLQPRTFLLKYNENGTITDAVDCALDPLSETKCTLKSFTVEKGIYQTSNFRVQPTESIVRFPNITNLCPFGEVFNATRFASVYAWNRKRISNCVADYSVLYNSASFSTFKCYGVSPTKLNDLCFTNVYADSFVIRGDEVRQIAPGQTGKIADYNYKLPDDFTGCVIAWNSNNLDSKVGGNYNYLYRLFRKSNLKPFERDISTEIYQAGSTPCNGVEGFNCYFPLQSYGFQPTNGVGYQPYRVVVLSFELLHAPATVCGPKKSTNLVKNKCVNFNFNGLTGTGVLTESNKKFLPFQQFGRDIADTTDAVRDPQTLEILDITPCSFGGVSVITPGTNTSNQVAVLYQGVNCTEVPVAIHADQLTPTWRVYSTGSNVFQTRAGCLIGAEHVNNSYECDIPIGAGICASYQTQTNSPRRARSVASQSIIAYTMSLGAENSVAYSNNSIAIPTNFTISVTTEILPVSMTKTSVDCTMYICGDSTECSNLLLQYGSFCTQLNRALTGIAVEQDKNTQEVFAQVKQIYKTPPIKDFGGFNFSQILPDPSKPSKRSFIEDLLFNKVTLADAGFIKQYGDCLGDIAARDLICAQKFNGLTVLPPLLTDEMIAQYTSALLAGTITSGWTFGAGAALQIPFAMQMAYRFNGCGVTQNVLYENQKLIANQFNSAIGKIQDSLSSTASALGKLQDVVNQNAQALNTLVKQLSSNFGAISSVLNDILSRLDKVEAEVQIDRLITGRLQSLQTYVTQQLIRAAEIRASANLAATKMSECVLGQSKRVDFCGKGCHLMSFPQSAPHGVVFLHVTYVPAQEKNFTTAPAICHDGKAHFPREGVFVSNGTHWFVTQRNFYEPQIITTDNTFVSGNCDVVIGVVNNTVYDPLQPELDSGGGSGGGQIYEGKLTAEGLRFGIVASRFNHALVDRLVEGAIDAIVRHGGREEDITLVRVPGSWEIPVAAGELARKEDIDAVIAIGVLIRGATPHFDYIASEVSKGLADLSLELRKPITFGVITADTLEQAIERAGTKHGNKGWEAALSAIEMANLFKSLR

SEQ ID NO: 8276 - protein, 1307 aa, Artificial Sequence
  SARS-CoV-2/Netherlands/ZuidHolland_9/2020__EPI_ISL_414445 spike protein (1-1147)(I909C_Y1047C) LumSynth construct
MFVFLVLLPLVSSQCVNLTTRTQLPPAYTNSFTRGVYYPDKVFRSSVLHSTQDLFLPFFSNVTWFHAIHVSGTNGTKRFDNPVLPFNDGVYFASTEKSNIIRGWIFGTTLDSKTQSLLIVNNATNVVIKVCEFQFCNDPFLGVYYHKNNKSWMESEFRVYSSANNCTFEYVSQPFLMDLEGKQGNFKNLREFVFKNIDGYFKIYSKHTPINLVRDLPQGFSALEPLVDLPIGINITRFQTLLALHRSYLTPGDSSSGWTAGAAAYYVGYLQPRTFLLKYNENGTITDAVDCALDPLSETKCTLKSFTVEKGIYQTSNFRVQPTESIVRFPNITNLCPFGEVFNATRFASVYAWNRKRISNCVADYSVLYNSASFSTFKCYGVSPTKLNDLCFTNVYADSFVIRGDEVRQIAPGQTGKIADYNYKLPDDFTGCVIAWNSNNLDSKVGGNYNYLYRLFRKSNLKPFERDISTEIYQAGSTPCNGVEGFNCYFPLQSYGFQPTNGVGYQPYRVVVLSFELLHAPATVCGPKKSTNLVKNKCVNFNFNGLTGTGVLTESNKKFLPFQQFGRDIADTTDAVRDPQTLEILDITPCSFGGVSVITPGTNTSNQVAVLYQGVNCTEVPVAIHADQLTPTWRVYSTGSNVFQTRAGCLIGAEHVNNSYECDIPIGAGICASYQTQTNSPRRARSVASQSIIAYTMSLGAENSVAYSNNSIAIPTNFTISVTTEILPVSMTKTSVDCTMYICGDSTECSNLLLQYGSFCTQLNRALTGIAVEQDKNTQEVFAQVKQIYKTPPIKDFGGFNFSQILPDPSKPSKRSFIEDLLFNKVTLADAGFIKQYGDCLGDIAARDLICVQKFNGLTVLPPLLTDEMIAQYTSALLAGTITSGWTFGAGAALQIPFAMQMAYRFNGCGVTQNVLYENQKLIANQFNSAIGKIQDSLSSTASALGKLQDVVNQNAQALNTLVKQLSSNFGAISSVLNDILSRLDKVEAEVQIDRLITGRLQSLQTYVTQQLIRAAEIRASANLAATKMSECVLGQSKRVDFCGKGCHLMSFPQSAPHGVVFLHVTYVPAQEKNFTTAPAICHDGKAHFPREGVFVSNGTHWFVTQRNFYEPQIITTDNTFVSGNCDVVIGIVNNTVYDPLQPELDSGGGSGGGQIYEGKLTAEGLRFGIVASRFNHALVDRLVEGAIDAIVRHGGREEDITLVRVPGSWEIPVAAGELARKEDIDAVIAIGVLIRGATPHFDYIASEVSKGLADLSLELRKPITFGVITADTLEQAIERAGTKHGNKGWEAALSAIEMANLFKSLR

SEQ ID NO: 8277 - protein, 1307 aa, Artificial Sequence
  SARS-CoV-2/Finland/FIN03032020A/2020__EPI_ISL_413602 spike protein (1-1147)(I909C_Y1047C) LumSynth construct
MFVFLVLLPLVSSQCVNLTTRTQLPPAYTNSFTRGVYYPDKVFRSSVLHSTQDLFLPFFSNVTWFHAIHVSGTNGTKRFDNPVLPFNDGVYFASTEKSNIIRGWIFGTTLDSKTQSLLIVNNATNVVIKVCEFQFCNDPFLGVYYHKNNKSWMESEFRVYSSANNCTFEYVSQPFLMDLEGKQGNFKNLREFVFKNIDGYFKIYSKHTPINLVRDLPQGFSALEPLVDLPIGINITRFQTLLALHRSYLTPGDSSSGWTAGAAAYYVGYLQPRTFLLKYNENGTITDAVDCALDPLSETKCTLKSFTVEKGIYQTSNFRVQPTESIVRFPNITNLCPFGEVFNATRFASVYAWNRKRISNCVADYSVLYNSASFSTFKCYGVSPTKLNDLCFTNVYADSFVIRGDEVRQIAPGQTGKIADYNYKLPDDFTGCVISWNSNNLDSKVGGNYNYLYRLFRKSNLKPFERDISTEIYQAGSTPCNGVEGFNCYFPLQSYGFQPTNGVGYQPYRVVVLSFELLHAPATVCGPKKSTNLVKNKCVNFNFNGLTGTGVLTESNKKFLPFQQFGRDIADTTDAVRDPQTLEILDITPCSFGGVSVITPGTNTSNQVAVLYQGVNCTEVPVAIHADQLTPTWRVYSTGSNVFQTRAGCLIGAEHVNNSYECDIPIGAGICASYQTQTNSPRRARSVASQSIIAYTMSLGAENSVAYSNNSIAIPTNFTISVTTEILPVSMTKTSVDCTMYICGDSTECSNLLLQYGSFCTQLNRALTGIAVEQDKNTQEVFAQVKQIYKTPPIKDFGGFNFSQILPDPSKPSKRSFIEDLLFNKVTLADAGFIKQYGDCLGDIAARDLICAQKFNGLTVLPPLLTDEMIAQYTSALLAGTITSGWTFGAGAALQIPFAMQMAYRFNGCGVTQNVLYENQKLIANQFNSAIGKIQDSLSSTASALGKLQDVVNQNAQALNTLVKQLSSNFGAISSVLNDILSRLDKVEAEVQIDRLITGRLQSLQTYVTQQLIRAAEIRASANLAATKMSECVLGQSKRVDFCGKGCHLMSFPQSAPHGVVFLHVTYVPAQEKNFTTAPAICHDGKAHFPREGVFVSNGTHWFVTQRNFYEPQIITTDNTFVSGNCDVVIGIVNNTVYDPLQPELDSGGGSGGGQIYEGKLTAEGLRFGIVASRFNHALVDRLVEGAIDAIVRHGGREEDITLVRVPGSWEIPVAAGELARKEDIDAVIAIGVLIRGATPHFDYIASEVSKGLADLSLELRKPITFGVITADTLEQAIERAGTKHGNKGWEAALSAIEMANLFKSLR

SEQ ID NO: 8278 - protein, 1307 aa, Artificial Sequence
  SARS-CoV-2/France/GE1977/2020__EPI_ISL_414632 spike protein (1-1147)(I909C_Y1047C) LumSynth construct
MFVFLVLLPLVSSQCVNLTTRTQLPPAYTNSFTRGVYYPDKVFRSSVLHSTQDLFLPFFSNVTWFHAIHVSGTNGTKRFDNPVLPFNDGVYFASTEKSNIIRGWIFGTTLDSKTQSLLIVNNATNVVIKVCEFQFCNDPFLGVYYHKNNKSWMESEFRVYSSANNCTFEYVSQPFLMDLEGKQGNFKNLREFVFKNIDGYFKIYSKHTPINLVRDLPQGFSALEPLVDLPIGINITRFQTLLALHRSYLTPGDSSSGWTAGAAAYYVGYLQPRTFLLKYNENGTITDAVDCALDPLSETKCTLKSFTVEKGIYQTSNFRVQPTESIVRFPNITNLCPFGEVFNATRFASVYAWNRKRISNCVADYSVLYNSASFSTFKCYGVSPTKLNDLCFTNVYADSFVIRGDEVRQIAPGQTGKIADYNYKLPDDFTGCVIAWNSNNLDSKVGGNYNYLYRLFRKSNLKPFERDISTEIYQAGSTPCNGVEGFNCYFPLQSYGFQPTNGVGYQPYRVVVLSFELLHAPATVCGPKKSTNLVKNKCVNFNFNGLTGTGVLTESNKKFLPFQQFGRDIADTTDAVRDPQTLEILDITPCSFGGVSVITPGTNTSNQVAVLYQGVNCTEVPVAIHADQLTPTWRVYSTGSNVFQTRAGCLIGAEHVNNSYECDIPIGAGICASYQTQTNSPRRARSVASQSIIAYTMSLGAENSVAYSNNSIAIPTNFTISVTTEILPVSMTKTSVDCTMYICGDSTECSNLLLQYGSFCTQLNRALTGIAVEQDKNTQEVFAQVKQIYKTPPIKDFGGFNFSQILPDPSKPSKRSFIEDLLFNKVTLADAGFIKQYGDCLGDIAARDLICAQKFNGLTVLPPLLTDEMIAQYTSALLAGTITSGWTFGAGAALQIPFAMQMAYRFNGCGVTQNVLYENQKLIANQFNSAIGKIQDSLFSTASALGKLQDVVNQNAQALNTLVKQLSSNFGAISSVLNDILSRLDKVEAEVQIDRLITGRLQSLQTYVTQQLIRAAEIRASANLAATKMSECVLGQSKRVDFCGKGCHLMSFPQSAPHGVVFLHVTYVPAQEKNFTTAPAICHDGKAHFPREGVFVSNGTHWFVTQRNFYEPQIITTDNTFVSGNCDVVIGIVNNTVYDPLQPELDSGGGSGGGQIYEGKLTAEGLRFGIVASRFNHALVDRLVEGAIDAIVRHGGREEDITLVRVPGSWEIPVAAGELARKEDIDAVIAIGVLIRGATPHFDYIASEVSKGLADLSLELRKPITFGVITADTLEQAIERAGTKHGNKGWEAALSAIEMANLFKSLR

SEQ ID NO: 8279 - protein, 1307 aa, Artificial Sequence
  SARS-CoV-2/Finland/FIN-313/2020__EPI_ISL_414641 spike protein (1-1147)(I909C_Y1047C) LumSynth construct
MFVFLVLLPLVSSQCVNLTTRTQLPPAYTNSFTRGVYYPDKVFRSSVLHSTQDLFLPFFSNVTWFHAIHVSGTNGTKRFDNPVLPFNDGVYFASTEKSNIIRGWIFGTTLDSKTQSLLIVNNATNVVIKVCEFQFCNDPFLGVYYHKNNKSWMESEFRVYSSANNCTFEYVSQPFLMDLEGKQGNFKNLREFVFKNIDGYFKIYSKHTPINLVRDLPQGFSALEPLVDLPIGINITRFKTLLALHRSYLTPGDSSSGWTAGAAAYYVGYLQPRTFLLKYNENGTITDAVDCALDPLSETKCTLKSFTVEKGIYQTSNFRVQPTESIVRFPNITNLCPFGEVFNATRFASVYAWNRKRISNCVADYSVLYNSASFSTFKCYGVSPTKLNDLCFTNVYADSFVIRGDEVRQIAPGQTGKIADYNYKLPDDFTGCVIAWNSNNLDSKVGGNYNYLYRLFRKSNLKPFERDISTEIYQAGSTPCNGVEGFNCYFPLQSYGFQPTNGVGYQPYRVVVLSFELLHAPATVCGPKKSTNLVKNKCVNFNFNGLTGTGVLTESNKKFLPFQQFGRDIADTTDAVRDPQTLEILDITPCSFGGVSVITPGTNTSNQVAVLYQGVNCTEVPVAIHADQLTPTWRVYSTGSNVFQTRAGCLIGAEHVNNSYECDIPIGAGICASYQTQTNSPRRARSVASQSIIAYTMSLGAENSVAYSNNSIAIPTNFTISVTTEILPVSMTKTSVDCTMYICGDSTECSNLLLQYGSFCTQLNRALTGIAVEQDKNTQEVFAQVKQIYKTPPIKDFGGFNFSQILPDPSKPSKRSFIEDLLFNKVTLADAGFIKQYGDCLGDIAARDLICAQKFNGLTVLPPLLTDEMIAQYTSALLAGTITSGWTFGAGAALQIPFAMQMAYRFNGCGVTQNVLYENQKLIANQFNSAIGKIQDSLSSTASALGKLQDVVNQNAQALNTLVKQLSSNFGAISSVLNDILSRLDKVEAEVQIDRLITGRLQSLQTYVTQQLIRAAEIRASANLAATKMSECVLGQSKRVDFCGKGCHLMSFPQSAPHGVVFLHVTYVPAQEKNFTTAPAICHDGKAHFPREGVFVSNGTHWFVTQRNFYEPQIITTDNTFVSGNCDVVIGIVNNTVYDPLQPELDSGGGSGGGQIYEGKLTAEGLRFGIVASRFNHALVDRLVEGAIDAIVRHGGREEDITLVRVPGSWEIPVAAGELARKEDIDAVIAIGVLIRGATPHFDYIASEVSKGLADLSLELRKPITFGVITADTLEQAIERAGTKHGNKGWEAALSAIEMANLFKSLR

SEQ ID NO: 8280 - protein, 1307 aa, Artificial Sequence
  SARS-CoV-2/Netherlands/ZuidHolland_2/2020__EPI_ISL_414556 spike protein (1-1147)(I909C_Y1047C) LumSynth construct
MFVFLVLLPLVSSQCVNLTTRTQLPPAYTNSFTRGVYYPDKVFRSSVLHSTQDLFLPFFSNVTWFHAIHVSGTNGTKRFDNPVLPFNDGVYFASTEKSNIIRGWIFGTTLDSKTQSLLIVNNATNVVIKVCEFQFCNDPFLGVYYHKNNKSWMESEFRVYSSANNCTFEYVSQPFLMDLEGKQGNFKNLREFVFKNIDGYFKIYSKHTPINLVRDLPQGFSALEPLVDLPIGINITRFQTLLALHRSYLTPGDSSSGWTAGAAAYYVGYLQPRTFLLKYNENGTITDAVDCALDPLSETKCTLKSFTVEKGIYQTSNFRVQPTESIVRFPNITNLCPFGEVFNATRFASVYAWNRKRISNCVADYSVLYNSASFSTFKCYGVSPTKLNDLCFTNVYADSFVIRGDEVRQIAPGQTGKIADYNYKLPDDFTGCVIAWNSNNLDSKVGGNYNYLYRLFRKSNLKPFERDISTEIYQAGSTPCNGVEGFNCYFPLQSYGFQPTNGVGYQPYRVVVLSFELLHAPATVCGPKKSTNLVKNKCVNFNFNGLTGTGVLTESNKKFLPFQQFGRDIADTTDAVRDPQTLEILDITPCSFGGVSVITPGTNTSNQVAVLYQGVNCTEVPVAIHADQLTPTWRVYSTGSNVFQTRAGCLIGAEHVNNSYECDIPIGAGICASYQTQTNSPRRARSVASQSIIAYTMSLGAENSVAYSNNSIAIPTNFTISVTTEILPVSMTKTSVDCTMYICGDSTECSNLLLQYGSFCTQLNRALTGIALEQDKNTQEVFAQVKQIYKTPPIKDFGGFNFSQILPDPSKPSKRSFIEDLLFNKVTLADAGFIKQYGDCLGDIAARDLICAQKFNGLTVLPPLLTDEMIAQYTSALLAGTITSGWTFGAGAALQIPFAMQMAYRFNGCGVTQNVLYENQKLIANQFNSAIGKIQDSLSSTASALGKLQDVVNQNAQALNTLVKQLSSNFGAISSVLNDILSRLDKVEAEVQIDRLITGRLQSLQTYVTQQLIRAAEIRASANLAATKMSECVLGQSKRVDFCGKGCHLMSFPQSAPHGVVFLHVTYVPAQEKNFTTAPAICHDGKAHFPREGVFVSNGTHWFVTQRNFYEPQIITTDNTFVSGNCDVVIGIVNNTVYDPLQPELDSGGGSGGGQIYEGKLTAEGLRFGIVASRFNHALVDRLVEGAIDAIVRHGGREEDITLVRVPGSWEIPVAAGELARKEDIDAVIAIGVLIRGATPHFDYIASEVSKGLADLSLELRKPITFGVITADTLEQAIERAGTKHGNKGWEAALSAIEMANLFKSLR

SEQ ID NO: 8281 - protein, 1307 aa, Artificial Sequence
  SARS-CoV-2/USA/WA-UW31/2020__EPI_ISL_414618 spike protein (1-1147)(I909C_Y1047C) LumSynth construct
MFVFLVLLPLVSSQCVNLTTRTQLPPAYTNSFTRGVYYPDKVFRSSVLHSTQDLFLPFFSNVTWFHAIHVSGTNGTKRFDNPVLPFNDGVYFASTEKSNIIRGWIFGTTLDSKTQSLLIVNNATNVVIKVCEFQFCNDPFLGVYYHKNNKSWMESEFRVYSSANNCTFEYVSQPFLMDLEGKQGNFKNLREFVFKNIDGYFKIYSKHTPINLVRDLPQGFSALEPLVDLPIGINITRFQTLLALHRSYLTPGDSSSGWTAGAAAYYVGYLQPRTFLLKYNENGTITDAVDCALDPLSETKCTLKSFTVEKGIYQTSNFRVQPTESIVRFPNITNLCPFGEVFNATRFASVYAWNRKRISNCVADYSVLYNSASFSTFKCYGVSPTKLNDLCFTNVYADSFVIRGDEVRQIAPGQTGKIADYNYKLPDDFTGCVIAWNSNNLDSKVGGNYNYLYRLFRKSNLKPFERDISTEIYQAGSTPCNGAEGFNCYFPLQSYGFQPTNGVGYQPYRVVVLSFELLHAPATVCGPKKSTNLVKNKCVNFNFNGLTGTGVLTESNKKFLPFQQFGRDIADTTDAVRDPQTLEILDITPCSFGGVSVITPGTNTSNQVAVLYQDVNCTEVPVAIHADQLTPTWRVYSTGSNVFQTRAGCLIGAEHVNNSYECDIPIGAGICASYQTQTNSPRRARSVASQSIIAYTMSLGAENSVAYSNNSIAIPTNFTISVTTEILPVSMTKTSVDCTMYICGDSTECSNLLLQYGSFCTQLNRALTGIAVEQDKNTQEVFAQVKQIYKTPPIKDFGGFNFSQILPDPSKPSKRSFIEDLLFNKVTLADAGFIKQYGDCLGDIAARDLICAQKFNGLTVLPPLLTDEMIAQYTSALLAGTITSGWTFGAGAALQIPFAMQMAYRFNGCGVTQNVLYENQKLIANQFNSAIGKIQDSLSSTASALGKLQDVVNQNAQALNTLVKQLSSNFGAISSVLNDILSRLDKVEAEVQIDRLITGRLQSLQTYVTQQLIRAAEIRASANLAATKMSECVLGQSKRVDFCGKGCHLMSFPQSAPHGVVFLHVTYVPAQEKNFTTAPAICHDGKAHFPREGVFVSNGTHWFVTQRNFYEPQIITTDNTFVSGNCDVVIGIVNNTVYDPLQPELDSGGGSGGGQIYEGKLTAEGLRFGIVASRFNHALVDRLVEGAIDAIVRHGGREEDITLVRVPGSWEIPVAAGELARKEDIDAVIAIGVLIRGATPHFDYIASEVSKGLADLSLELRKPITFGVITADTLEQAIERAGTKHGNKGWEAALSAIEMANLFKSLR
